United States Patent Application Publication US 2007/0067865 A1 - sequence listing, part 70

SEQ ID NO: 452508 - DNA, 700 bp, Sorghum bicolor
cgtccggatagaattcgcagggatgccagattggagggtgcgtgagtttgaaggtaaattcactgatgagtttgcccacagtaatggcaaggaacatgaaggtggagttgaggctccaggtgtcactagtagtaagaagttgaagcatgcagtcgccaatgagaaagcccaaggtcccatccccagaacgaatagctcagattcacagaaatgtaatttagaggacaaccaatgtgagaacgggatagtatcccagaatataaacagtgccgctgactgcataggagactgcaaaaatggttccaatgcctttctttcaagagaagaaaatacaatcgttgaaaccagatgtccaacagataactggaactcctgtcagtttgcactgagcaatggttcgtccattctcaataaccacagtgctccacaggatagcctcacttatggagataatgatctaaactacatcgattggcctggcattgattattttgaggatgtcgacacattattcaggtcatctgattccacatatggtcagcagcagctggagaatgcagatgggttatcttggattccttcttcagatgctgtttactcttctgatgttgctatgcacgaagggttcgactcgtattattcagattatggtattttggatgaactctcaacatatcattgggtataaagattaataact

SEQ ID NO: 452509 - DNA, 318 bp, Sorghum bicolor
ggcacgaggaaaagatccctcctccctcccaaaggcgagtccgttagccaagaatcccggcaacaatgacctccctctcctccgccgtggcactgccgtcctcgtgccgggcatgcccggcggggggcagccggagggcgcggatggtggtgacgcgcgcggcggcgtccagcccgaagctgccgaacgggcggcggctgcgggtggcggtggtgggaggcgtgtccgcgttcggcgcggctgcggaggccctggcgaagggcgtagttgagacactgctgatttagcggcagatgtacaattgctagccttgtggcg

SEQ ID NO: 452510 - DNA, 436 bp, Sorghum bicolor
cgtccgcgagccgacggtgcggctggtcggtccggaagggaggtgcgtggacgtgccctacggcgtctactacaacggcaagcaggtgcagctatggagctgcaagtccaacggcgacgtgaaccagctctggacgctgaagcgagacggcaccatccggtccaacggcaagtgcctggcggccagcaggagcgacacggcgggcgcgcgcgtggtgatcgacgactgcccgccgcgcgtcccgacggggcgcgtcgtctgggaggtgcgcgtggacggcaccatcgcgctcaaggggtcgtcgtcgtccggcggcggcgggctggtgctggccgtgacgtcgtcgacgctcttcgcggggctgacggtgcgacgggacgaccgcgggacggggcagtcgtggacgccgaccaacgacaccgcgccgatggacgcc

SEQ ID NO: 452511 - DNA, 1412 bp, Sorghum bicolor
  unsure (1)..(1412): unsure at all n locations
cacaacaaaggactagctattgaagattatcatgaagcagacttcccaaaatttttaataacagaaacagtttatacctatggaatgaaacaaacagctacagatactcacggtgaagtaaaaaatatgctacaacaacagaagaacaggccttcttatttctcaaatcattcctgccttcttcagcagctccagataaaaggcccaagaaacttttggttcctccaaaggcttgtactaactaaatttcttggggaaaacttattgagactgttggcctgatttctccgtggttgtactctcaggttcttggcctgatttctccgtggttgtactctcaggttctcgagactgtttggtagctgcaccatttgcagatggctcactagctagagtttcttggagagaaccatttccagtcccgactactttggcagttgtttcgacttcgacggcctgtgctttcagcatcttttctttctcgagatcttgctttgccagggttgaaaactgtgagtcgagggaccttacagcacccagccatgcaagaacaatcaccagaagtattccaccaaggtagggtgtcgaattcgcaagagatccaaatgacaggatcatgaactgctggatcaaagcacctccagatttcccaaggggttgcagacaacgtcaatagctgctttacctttaaccttcatatcctcatccaaaggaatgtatgccatctctttgcaaggatcaaacagactgtactttgcactcttactgaaaatgttctgcattgctccaacatagactgccgcaagcaaaggtgtcatcccaaacttggtcataagaggagtcaatggctcaccaaacaaaatcagtgagaagaacccaactcctgtgagaagtaacactgcaggtgtgatcgtagctgcaactccccacccgaactttctgaggattactctccctaacaacatcattgtaaaggtagctatgccggtggcagttgagaaatcgcccatgaatgaagaatattcatttgggcttggaactgtgctttcaattttgatttccatgtcacctccacaaggttaatgcttattccataagcaacgaccaatgtggcaagatccctcacataccgagatgacaacagaaccttcatgctctcacccatgctgagctttggcttgtccttctttttccgctcgaccacgggatagatgagttatcaataacaaacttgttcaccccccaatagataccggtgatgataagacccagtacaaccactatgctcatggccttcaacgaaattgcccaaccatccactccaggacccaaattcttcctcatgtttgagaaatatttcaccgtgcgcccaganagatgtagggccacattggcaccaagcccaaacagcg

SEQ ID NO: 452512 - DNA, 683 bp, Sorghum bicolor
cgtccgggcctcccgtggtgcggttcgtccttgctccgggtgcgcggcgaaggccatggcgaagggcggcgctgccacggtcatcctcgccgtcgtgctgctgtgcctgtgccacccggccaagaacgacgggtcgctgagccttctcgtcgtcggggactggggccgtaagggggcgtgcaaccagtcccgggtcgcccagcagatgggaagggtcggggagaagctcgacatcgacttcgtcgtctccaccggggacaacttctacgacaccgggctgacgggcgttgatgacgacgcgtttgagcaatccttcacgaacatctacacggcaaagagcttacagaagccgtggtacctagttctggggaatcatgactacaagggtgacgcactagctcagtttagtccagtcctgcgtaagatcgacagccggtttatttgcatgagatcattcattgtgaacgcagaaatcgcggatttcttttttatcgacaccaccccgtttcaactgaaatattggactcacccgaaagataatcattatgactggagaggagtagcacctcgagagaaatacattgccaacttgctgaaggatttggataaggcgctgaagaaatcaactgggaagtggaagattgccattggccatcataccatggaggggtgtagtcaccatg

SEQ ID NO: 452513 - DNA, 694 bp, Sorghum bicolor
cgtccgcgctcgccctttcccctatccacgagcgagccaccgcagagcggagcgaggcgaaccgcagcggcagcgccagcggcagcaggatgccgacgctgaacctgcgcaccaacgtgccggtggacgcggtggtagccgccgacatcctcaaggactgctccaaggccgtcgccaggatcatcggcaagcccgaatcctacgtcatggtgtcgatcaacgggtcggtgccgatgtcgttcgcgggcagcgaagagccggcggcgtacggcgagctcgtgtccatcggtggcatcggccccggcgtcaatgggaagctgagcgccgccgtcgccgaggtcctcgagaccaagctctccgtcagcaggtccagattctacatcaaattcgatgacgtgcagagatccaactttggcttcaacggatccacattctgagacaactccagcaggactggagacgattggttgctgcgtccaaacgaccagctcggtccgccaatacataccatcagtacatcaataaacgttgatcatgtgtatcacctgcaccaccgccgtcgcccatggaaattccgcttgagtacgagacaccactaggttatgagtttttaatatttcaatgtttcaactgaaagcagcgatagcatgtacctgatttcaaatgtcattgaacttcattttcagtacaatca

SEQ ID NO: 452514 - DNA, 696 bp, Sorghum bicolor
cgtccgcagcttgtttagtagatatcagtggatcgatgtatgatggaggaaacaagctagctagctagcagcagccagcagcagggagaaggatagagagagaaaaaaatcctatattctcggcccttctccagcaggtcatctgcagatctgtctcctgtgaccttacaaaggccaggaccaggaaggaaatggcatcgccgtcgagcaccagcaacaactcggccctctcccctgtggccgcgtcaggggcgacgacgcccggtgccggggcgccgtgcgcggcgtgcaagttcctgcggcgcaagtgccttgccggggtgcgtgttcgcgccctacttcccgccggaggagccgcagaagttcgccaacgtgcacaaggtgttcggcgccagcaacgtgaccaagctgctcaacgagctgctgccgcaccagcgggaggacgccgtgagctcgctcgcctacgaggccgaggcgcgcgtcaaggaccccgtctacggctgcgtcggcgccatctccgtgctccagcgccaggtccaccgcctgcagaaggagctggacgccgcgcacgccgagctccttcgctacgccttgcggcacgtcgccgccggcatccccaccgcgctccccgtcagcgtgagcgtcagcgccgcgcccaggctctccacggcaatgacgacgagccctccgcagttc

SEQ ID NO: 452515 - DNA, 530 bp, Sorghum bicolor
gagattgccagacccttctactcctaacctaaagattgatttgttggctgaaatttcaatagcaccacgaatcatgtcggatgttgatggtgccctcaaatcaaagcagttgaagactgaggttgatgaatatctcaagaggccggagggctcttcctttctaagtgacctgaagcaaaaattgctgctgcctcagaatgaagcaactgttgccgggacacgctacaacgtgcctctgatcaattcacttgttctttatgttggcatccaagctgtgcaacaactgcaactgaacaaggctaatgcatcagcatcagtacagcagattaatcatatgcctccgatggacattttccagattgaaacagctaccgagatgttcagaaatcttataacaagttgggatacagagggccgctaccttctgttgaatgcaatcgctaaccaactgcgctatcccaatagccatacccactacttctccttcatcattctggatctatttgctgaggcttcccaagaaattattc

SEQ ID NO: 452516 - DNA, 923 bp, Sorghum bicolor
  unsure (1)..(923): unsure at all n locations
cgtccgcgcgcacccaagcagaaccacgccacgcgcggtgcacagtgcacgcacttcccacttccgccagtgccagccgctcttgttgtcccagtccaggagtggccgccagccgctgcactgcacacacgccctcgcactcgcattcctcatcactctctccctccccatcgaccatcgtctccgaatctctctatcttcttctctctctaccggcaaggcccgctgtctccgtccggagctctctcgcgtgctcgcagtcgcaggcgcgtcctgagaggagaccttcgcttcgtccgtggcagagggtagtagaccatgaaggcgctggtggtgacagtgcttctcctgctctcctncaccctcgccgtgtcacagtggtgcgtgtgcaggcaggacgcgacgcatgcggcgctgcagaagaccatagactacgcctgcggctccggggcggactgcaactccatccatgagaacggggcgtgctacaaccccaacaccgtccccgcgcactgctcctgggcggccaacagctactaccagaacaacaaggccaagggcgccacctgcgacttcaccggcaccgccaccctcaccaccagcgacccaagttcttctggctgctcttaccctaccagtgcaagcgccgctggaacgatgaccccgaccactggaggcacaatgggaggaaccccagggaccttcacgcccgggacaggcacaggcacaactggcactggcatggggacaggcactgccaccggaaccaccgggttcggcggcctaggaccaggcacaaacgctggcatggacacagcggcagcagcgggcttgctcctcccaacggctgggctggccactgccctcgctgcgctcctcttctcagccatcgtgctcgcatgatcgctttgatatgacctcag

SEQ ID NO: 452517 - DNA, 1243 bp, Sorghum bicolor
cgtccggactgatcagtgaccgctaaagctaaccacaccaaaccccccggccatggcgctcgcgtccacctccgccaccgcgcccgctgccgtgctcaagaccccgtcgttcctcggtgccaggcgcgcgctcgccaatgccgccgccgctgccaagcccgcgccgcgccgctcgctcgtcgtcgtcgccgcggtcgcccccaagaagtcgtggatccccgccttcaagagcgacgccgagttcatcaacccgccatggctcgacggctcgctccccggcgacttcgggttcgacccgctggggctgggcaaggacccggcgttcctcaagtggtaccgggaggcggagctgatccacgggcggtgggcgatggcggccgtgctgggcatcttcgtggggcaggcgtggagcgggatcccgtggttcgaggccggcgccgacccgggcgccatcgcgcccttctccttcggctcgctgctgggcacgcagctgctgctcatggggtgggtggagtccaagcgctgggtggacttcttcaacccggactcgcagtccgtcgagtgggccacgccctggtcccgcaccgccgaaaacttcgccaacttcaccggcgagcaaggctaccccggcggcaagttcttcgacccgctcggcctcgccggcaccgtcaaggacggcgtctacatccccgacgtcgacaagctcgagcggctcaagctcgccgagatcaagcacgcccgcctcgccatgctcgccatgctcatcttctacttcgaggccggacagggcaagacgccgctcggcgcgctcggcctatgattttgcattgcatgctgccggtgccgacgacgaccgtgtcgtgtcatgctgtgtacttgtattcatcgatcgatcgaattcgaatcgaccgagttaaattctcgattgggcgcgtggcgtgggtgagggacgtatggcttcatcttcatcggatcagacgcattgaaatgcaaacaatggatcaagcttgccttgcttgcatgggattgattggatatttggattggagatcaaagaagagcgtagcagcaatgtactgtctgtgttcgtgacagcaaatggggacttcttctctgttttttcctcttccgtgtatgtaccatgtaatgtatagtttgtgaatgctagtcttagttttgttgagcacaatcggggatttaaccggagagttttcaatttcaattgaaaaatgttggcttaaaa

SEQ ID NO: 452518 - DNA, 532 bp, Sorghum bicolor
  unsure (1)..(532): unsure at all n locations
cgccgaatccttccagcagtctcctcgacgcgcccccattcattcttggagagcaagaagaacaacgcgcagttcaaaagcgagacaaacgaatcccgttccacgcagcacctgcctctctcctctcctcgctcgcgcagatctagcgatggcggcgggcggcgacgcggcggcgtggggggaggagcccgtggcgcggcgccgtcccaagaccaagatcgtctgcacgctcggcccggcgccgcggtccgtcgagatgatctcgcgcctgctgcgcgccggcatgtgcgtcgcgcgcttcaacttctcccacggctcccacgagtaccaccaggagacgctcgacaacctccgcgccgccatggagctcacgggcatcctcttgcgccgttatgctcgacacccagggtccagagattcgaactggatttttgaaagattgggaagcctatcagttgaaaaaaggtcaagaaatcacaatttccacagactacagcattnaagggggatgagaaaatgatatcgatgagct

SEQ ID NO: 452519 - DNA, 1289 bp, Sorghum bicolor
cgtccggtagcttccgcgccgcaacagcgccttctccctttccgtccgcgccatcctcctcctcctcatcatccccgcgcgcccgatccctcatactccgatttcccagaccaagaaaagggaggaagattggggtgcgcaggagagcgtccgggtttgatgccttcccgcccctccccggcaaggtcttcgtcgatgaggcaatcggagcggaatacggggagggcttcgaaacatttcggatggatggaccactcaaggttgatgtggattatctgaatgaaaaattgcaagaatgcttccttcaaaggataaggcatgctatgaagccggatgaggcgtttggtctaattttttcgtgggacaatgttattgctgacacagactcgctaaagttgaatgcttggagtcagcttgctctggaggaaggtaaggatatcccaagtgctgctcatgtccggaagagcattcttcatggtgctgctgaccatgttcttagaaaggttttgtactgggcaaaagaggaagataaaatggaaaaaatgaaggcacgccttatagagttatactatgaaaacctgttcaaactggatacacctgtagaaggattgagagaatggctggatgctgttcagactgcagggataccttgtgctgttgcatcatcccttgacaggagatgcatgatcgaagctttggatcggatggcactaagcaaatatttcaaggcgattgtgactgacgaagatgattatggactcaatagcaaataggtttctgtcagctgctatgaagttggatcgtaaaccctcaaagtgtgttgtgtttgaggacgacccaaggggcgtcacagccgcccacaactgtactatgatggcagttgcattgattggtgctcatccagcgtatgagttggtacaggccgatcttgccattgcaaagtacagcgagctctcagtgatcaacctcagaaggctgtttgcgaacaagggaatcagcttcatggacttgcagaagcagataatcgagaagtcacctcccaagaggaggctgacagtagacaccattttctgatggatatactttatttggtgtctgtctgttgttcttgagtagccgaccatctttgacagcgttgtatataagatagtgctgatcttagttgatctgccgtgtccctccttgtgaatgcaatgcagtagttccatcaaggtaccatgaagactgctgcatcaatgttgctgttgatgtaagctgatattattcaaatttattcatatttcataaaa

SEQ ID NO: 452520 - DNA, 685 bp, Sorghum bicolor
cgtccgctccgcccccttcgcccttcccgacgcgccgcccgaaaccctagctccaccgatctatctctctccatcccagcccagccagggggaggagatggcggcggcgccagcggcgggagggcagggcggcgtgggcatggacaccgcgctcgtcgacgacatcatccgccgcctgctcgaggtgcggaccgcgcgccccgggaagcaggtgcagctctccgagtcggagatccgccagctctgcaacgtctcccgcgaaatcttcctcagccagcccaacctcctcgagctcgaggcgcccatcaagatctgcggtgacatccatggtcaatacagtgatcttctaaggctttttgaatatggaggctttcctcctgaagccaactatctattcttaggcggttatgttgatcgaggcaaacaaagtttggagactatatgccttcttcttgcttacaaaatcaagtaccctgagaacttttttcttctgaggggcaatcatgaatgtgcctcgataaacagaatatatggattttatgatgaatgcaagcgtcgatttaatgtgcggctatggaaggtcttcacagaatgttttaacactctacctgtggctgctcttatcgatgataaaatattatgtatgcacggcggactctcccctgtctagcacacttggtgagat

SEQ ID NO: 452521 - DNA, 685 bp, Sorghum bicolor
cgtccggcctcagattgcttcagtaggctcctgctgccttgttggtgtaatctgtgctgggactctctatgttgcagacctgggcgactcacgtgcagttcttggaaggcttgttaaggcaactggagaggctgtggccatgcagttgtcatcggagcacaatgcgtgccatgaggaagttagacaagagctgcagtcatcacatcctgatgatccacatattgcggttcttaaacacaatgtttggcgagtgaagggtctcatccagatctcaagatctatcggagatgtatatctaaagaaaccagagtataacagagaacctcttcatagcaagttgcggcttcgagaaaccttccagaggccgattcttagcgctgaccctcacattactgaacatcgaatacagccaaacgatcagtttggtatatccgcttctgatggcctatgggagcacctcagcactcacgggcgcagttgaccttggccacagtcgtccccgtgatggaatcgctcgcagactagttaaagccgcgatgcaagaagctgccaagaagagggagatgagatattcagacctgacgaagatcgaccgacgcgtgagagggcatttccacgacgatacaaccagcgttagcgctgatcctggattcaaatgccatgggcaaagcaagctggagcaaaa

SEQ ID NO: 452522 - DNA, 892 bp, Sorghum bicolor
  unsure (1)..(892): unsure at all n locations
cgtccgcccctcccgcctctcgccagtcgcctcgcaccctcgcctccgtcctccgcgcaccagccggcgaccctgcgagtcttgacaagttctcccaatggatcgagtaccgaatggaaggcctaaggtttccaacagacctgtagttgtgctttcagattctgattctgactctgaaggttttgtagaagcgctgactcctgttcactcgaagtcaaacgggaaggcttcgtcggcgagcctaaaaactggtgggaaggcttcagccttttctaaaggagaggcaagcaatggaaaagcatacagtagtggcaaaggtggaaagggttcttcgtcacatgcggtgcctaccaagtctgatgcggaactaaagctagagcttgatatccctccaaattctagaattcttatgaattgtgaagcagctgaactattgcaagaaattcacgagcacatggctatactatcagaggaccccaagatcaaaattcctgagtcatttgacaaagcctttcagtatgcaaaagatggaaatcatttcaccactgcaagctctgtgaaacaagcccttgaacctcttaaaaaatgtggggttagtgatggcgagatatgcatgatagcaaacgttgggcctgagactgttgaagaggtttatgcactagtgccatctctcaaggctaataggtcagctaccgaaggttcagtcactgaggttcttgctgtccttgcaaacataaaagctgctaagtgaatctccaatggaactagaccgataataaatcggaagcagccgtcttgtgtgatcaaagagcgcggaatctgcaaagtggtcctttggtcttttggatgtactgcataaacatgtnggtattaaaaaaaacgtagttgtgct

SEQ ID NO: 452523 - DNA, 524 bp, Sorghum bicolor
cgtccgcgcaacccgagcgcggttagcccacgcaccgacccgacgcacgccaccgtctcccatcccgaatacctccggtgctcagcgtcatggacggcctctccaagaccatcggcggcggtggccctagcgttccggcgggatcccaccccgcgggcgggagccaggcggcggccggaggaggcgcgacgcagcggacgcagtacccgtatgtgactggtacttcagtcattgccttgaaatacaaggatggtgtgattatggcatgtgacactggagcctcctatggatcaactttgagatacaagagtgtggaacgcattaaggcagttggcaagcatagcatcattggagcaagtggagagtacagcgatttccaggagatcctgcgctatctggatgaactaactctgtctgatcatatgtgggatgatggaaactccctgggccccaaagagatccactcttatttgaccagagtgatgtacaacagacgcaaccaggttgatcctctctggaactca

SEQ ID NO: 452524 - DNA, 879 bp, Sorghum bicolor
cgtccgcaccttggtaatgacaaatggacatgcctttggggccagcgcattccatgttctcagattgtctactggtataagaaggttgatgctgctgttatctcctactcgcgcagaggtaaacctattctttgtttgcctaagactctctccagatacggaaaaaggtagtggtttgttccctaaaagacatttttatctattaatttatatatcaaaagccaaattaagttaaaccatcatgcaactatttttcacggtagatcaaggccttgtttagttcccagaaaattttgcaaaatttttcacattccccgtcacatcgaatctttagacgcatgcatggagtattaaatatagacgaaaataacaactaattgcacagtttggtcgaaattgacgaaacgaatcttttgagcctagttagtccatgattggacaatatttgtcaaatacaaaccgaaagtgctacagtggcgattttccaaaaaaaaaattagaactaaacaaggccttagtttgcgaaaaattttagatttcgctattatagtacttttggctttatttgacaattattattcaactatagactaagtaggcttaaaagattcgtctcgcaaattacaggtaaaatgtataattagctatctttttatttatatttaatactttatgcatatgtcgaaagattcgatgtgaacaggaatcttgaaaaatttggagaactaaaaagacttattttgccaaatgccaaaacgttagcagctggtacagttttaagctaaggccttgtttagttcatcctgaaaaccaaaacgtcttcaagatttccagtcacatcgaatcttttggcacatacatgaaacattgaatcggacg

SEQ ID NO: 452525 - DNA, 552 bp, Sorghum bicolor
cgtccgcctgaccctgacccgtgcgttgcgcctcctcgcagacggcgccaggagccgcctcctcgccttctcgccatcggccggcggcgacggtggctgcttccccgagcccgcaggtagaccacctttagttggttcctcgagtcttcacctggtgcttcagtttgcagcttcatttttaagatgtcacaagccagggaagtgaggtacactgcacggtctattacacctcctgctgatagaaatggcacctcaagctcgcctcctccaaagagacgcagcccttcaaggtcacctccaccaaagagtgcttcacggtccccacgtccaaggagtccaaagagacgcagcacttcaaggtctcctcctaggagacgtggtagatcaaggtcaagggatagaagtcggtccaggagcccagatgatagaaatccagggacctaaccttatgtgactgggttgtctacctcgtgtaactgaagaagatcttcagaagttctttagtaaagaaggaaaaggtaaaaactgtcatgttgttctggatcctaggac

SEQ ID NO: 452526 - DNA, 525 bp, Sorghum bicolor
cgtccgggagataacaaagagtatcttcccattgaaggtttagccgcgtttaacaaagcaacagcagagctattgcttggagctgataaccctgttattaagcaagggctggttgctacaattcagtctctctcgggcactggatcactgcgtctcgctgcagcattcatacaaagatacttccctgaagctaaagtaatcatatcatcgcccacctggggtaaccacaagaatatcttcaatgatgctagggtaccttggtcagagtaccggtattatgaccccaagactgttgggttggattttgagggaatgatagctgacattgaggctgctcctgaaggatcttttgttctgctacatggttgtgctcacaacccaactggaatagacccaactcctgaacagtgggagaaaattgcagatgtcatccaagagaaaaaacatatgcccttctttgatgttgcatatcagggttttgccagtggaagccttgatgaagatgcattttctgtgaagcttttt

SEQ ID NO: 452527 - DNA, 549 bp, Sorghum bicolor
cgtccgcgtcgcgaagctccagcagctgctgctgcaaaaccccaaagagggaaggacgaagccacagacattagaggtccttgtgaatggaagaggagggagggagagcaaagatgcggcgcgtcgcgctgttgctgctcctcgtatgcgcgctggcgcgggctgccgcggtcgtcaccgacggtcttctcccgaacggcaacttcgaggatggcccgcccaagtcggcgctggtgaacggcacggtggtgtcgggcgccaacgccattcccgcgctgggagacctccggcttcgtggagtacatcgagtcgggccacaagcagggcgacatgctgctggtggtgccgcagggcgcccacgccgtgcgcctgggcaacgaggcctccatcccgcagcgccctcgccgtggcgcgcggcgcctactacgccatcaccttcaacgcggcgccgacgtgcgcgcaggcggaggcgctcaacgtgtcggtgagccccgagtggggtgtgctcccgatgcagaccatctacggcagcaacggctgggactcgta

SEQ ID NO: 452528 - DNA, 656 bp, Sorghum bicolor
cgtccgcttgaaaaaattgatcctgaaaaaactgctattcaagttgttatactagtaccaacaagggaactggctctgcaaacttcacgagtctgtaaagagcttgggaagtacctgaacattcaagtcatggttagtactggaggaaccagcttgaaggatgacatcatgcgtttgtaccaacctgttcatttacttgttgggactcctggccgaatacttgatcttaccaggaagggcatttgtgtgctgaaagattgttcaatgcttgtcatggatgaggcagacaagctattagctccagagtttcagccttctgtggaggcacttattcatttccttccacctagtcggcaactgttgatgttttcagcaacttttcctgtaactgtcaaggaattcaaagagaaatatctgcctagaccttatgtgattaatctaatggatgaactgacactgaaaggaatcacacaatattatgcttttgttgaagaaaggcagaaagttcattgcctgaatacacttttctcaaagcttcaaattaatcaatccattatattctgcaactctgttaatagagttgagctactggctaagaaaataactgaactcggttattcatgcttctacattcatgcctaaatgttgcaagacca

SEQ ID NO: 452529 - DNA, 898 bp, Sorghum bicolor
cgtccgcccacgcgtccgcgaggggaggaggtccgagtttatttcccgatacgaaaggagagcacgaatcaaggaccgagtttcaagttccaacatggaaaccgagttccaggatggtaagcaggaggttattgaagcatggtacatggacgatagtgaagaagaccagaggcttcctcatcaccgtgatcccaaagaattcattcctcttgataagctttcagaactgggaatcatcagctggcgcctgaatcctgacaactgggagaatgatgagaacctcaagaaaatccgtgaagccagagggtactcttacatggacatttgtgatgtatgcccagagaagctgccaaattatgagattaagataaagaatttctttgaagagcacctgcatactgatgaagaaatacgctattgccttgaagggagtggatactttgatgtgagggacgaaaatgaccagtggatccgtgtagcagtgaagaaaggaggcatgattgttcttcctgcagggatgtatcaccgcttcacattggacaatgagaactatatcaaggcaatgcgtctctttgttggcgagcctgtttggacgccgtacaaccgtccccatgatcatctgccagcgagaaaggagtatctggacaagctcctcaagccagaaggccaagctgttgaagctcgttgagacaatttgaaagctacctgttggcctctttccaccctgcgtcctgtgtcgtataacctgaataagatgttgtatgtccctaatctagtactagtgtcctggccaatttgaagtgaacactgtaactactgtctatcaggatcaggtgaggtcatctggcttaaatacctgcaatatatatactgtaaacatatatctaataaatagaaa

SEQ ID NO: 452530 - DNA, 475 bp, Sorghum bicolor
taccgaaccgcagtgtcggcccacgcgcacgctctctatcttgctgcggaaggggtcagggaagaggagacggagaagaagaacagagaaggggacgaggctttgcctagctcgttggggctctatggagatccagcaccacggcggcgttggcaattcgaaggttgtgaaggttcagagccaggaggcatgggatctgttcaccgatcaagcaagcaaagaagggcgacctgttgttgctcattttggggcatcatggtgtgtgacgtccctgtccatgaactacaagtttgaagagcttgctcagacccaccctgaggtcttggtcctctacctagaccgttgatgatgtccagagtgtttcatccaagtacggagtgaaggcgatgccgacatttttcctcatcaagaacaaggaggtggtgagtaagatccgtggggcgaacccagatgaggtgaagaagctggtggacgc

SEQ ID NO: 452531 - DNA, 799 bp, Sorghum bicolor
cgtccgataccagttgcctttgcagcgctacatggccctcatggacctccaggaagggaatgagaggcttttctacaagctgcttattgacaatgtggaggagttacttcctatcgtctacacaccaactgtaggcgaggcctgccaaaagtatggatccatttttagtcgtcctcagggtctttatatcagtttgaaggagaagggaaagatccttgaggtgctgaagaactggccagagaggagcattcaagttattgttgttactgatggtgaacggattttggggcttggagatctcggatgccagggaatggggattcctgttggtaaactttccctttacactgccctgggaggagttcgtccatctgcttgcttgccaaatcacaattggatgttggtacaaataatgaggagctgcttaatgacgaattttacattggcttgagacaaagaagagccacgggccaggagtacactgattttctgcaagaatttatgagtgctgtgaaacaaaactatggggaaaaagtgctcattcagtttgaggattttgccaaccataatgcttttgatctccttgcaagatatggcaccactcaccttgtattcaatgatgatattcagggaacagcttctgtggttcttgctgggcttattgcagcccaaacactacttggtggttcattggcagatcacacttaccttttcctgggtgctggagaggctgggacaggtatcgctgaactaatagctcttgagatctcacgtcagacgaaagctcctatagaggagt

SEQ ID NO: 452532 - DNA, 776 bp, Sorghum bicolor
cgtccgattttccaagtggaaatttgcgtttatatcgatgaatcggccagactacctccaggattcagatgttatatctactcgctttcagaggagagaggtctatggagcttgggagcaatatcttgggatggagcacactgatactgcaccaaaaagggcttatacagtgaatcagaaccgtcactcatacgagaagccagtcaaaatttacaattgaaatttctaactggtctggcctcatggtgaggtaccccatatgagaggagcaaccaaaaaggcaggataaggaatttgtactgtcagggggaaacctcatagttgtcaaccattcgggccatgaccatctattccagtgctacaggccagccgctgtcatctcatctgtagcagccagatcccacagcaatgattttttttttcaagattttccttctttgcccccgggcgatggtgctagagcattgatgtccgtttcggttgggtacaagggccagatattgcttcattcttagagcaaagttgggtacataagattttggtaggaggcgtgtatacaggcaggcggtatatgttgtcatgtactgctgttaatgtagtgacagtggttgacttgtaaattggttccagtttccagcgcatgtctgaaaaaggagagtaattttgggtcctttcagaaacatgcaatatttgacttcttgttgcaagaaactacaacttgctcaaggccctactgcttcgattatcactaaagcaagagaaaaattgtacctttt

SEQ ID NO: 452533 - DNA, 469 bp, Sorghum bicolor
  unsure (1)..(469): unsure at all n locations
cgtccggcggaaggaagggggagcgcaacactcgcggtcgcggggagagagagagagacaagggggccggtcacacacacgccgaccgcgcgagctagcgagatccccctctcccgctgccggatccgatctcacctgacctcgtcgccgcctgccgggggagggagaagaggaagaggtagaggaggcggcggacatggctccggtgccggcgctcgccaagtacaagctcgttcttcctgggggtccagtccgtcggctagaccagcatcatcacccgcttcatgatacgacaagttcgacatcacctaccaggcttctattggtattgtttttccgtacgatgacaatgtaccttgaagatagaactgtgagactccaactctgggatacagctggtcaagaaaggttcaggagtttaattccaagctatatcagagattcttcagntgctgtcatagtattcgat

SEQ ID NO: 452534 - DNA, 895 bp, Sorghum bicolor
cgtccgcctgtgtttgttgaggttgtgcttggagcaggttgactggacggcttcggcgagcgacaggcagcctggacgagcagcgcattgcggttggcccatgcagcaggctgctaatagctgacgcacttgcctttccaatgtcgtctctttggcagaacacagctccggcaccaatgcccggcacgcaaggagggcaggcggtggcgttccgcatctccggcgacaaggccttcttcttcggctgcgggttctacggcgcgcaggacacgctgtgcgacgacgccggccggcactacttccgcgactgctacatccagggcttccatcgacttcgtccttccggcaaccgcccggctcccctctacaaaggacttgcgaggctgcacctcgacgggcgcagcgggttcggggtcggtggcggcgccacgggcggcacgaccccggcgagcgcacgggcttcgccttcgtcaactgccgggtgaccgcaccgggaggctctacgtagggcgagcccatggccagtactcgcgcatcgtctacgcctacacctacttcgacagcgtcatcgcgcccggcggatgggatgactgggagcacaccggcaacaagagcatgacggcgttcttcgggatgtacaggaactggggccccggagtcgacgccgtgcacggcgtgtcgtgggcgcgggagctcgactactttgccggcccgcccttccttggtatgagcttcgtcaacgggttccactggctcacacctgatgtctgaaaaaacacacacacacacacacgcggtcgagagtcagcacacagatcgattacagcaaaccagattctattcgtacagaacatacacggaacaaaacaccattttaccagcttatatatatgta

SEQ ID NO: 452535 - DNA, 414 bp, Sorghum bicolor
attcggcacgaggccgcgtctcccaatcgtctcgcacctacggcctcaggcgcatcggcctcgcagctgcacagacgccggtgacgaccacggcggcgagatgacggtcttccacttcctcaactgcgccttcctcaccttcggcccccacgtcgtctactactccgccactcccctgtcagagtatgatacaatcggcacttctgtaaaagcagctgctgtttatcttggaactgcacttgtaaagcttgtttgcttggcaacattgctcaaagtacctgagaatgatagctttgatccctatcaggagttaatgaaagtttttattggattcattgatgtagctggactgtattttgctttgacacagttgacccacagaaacatctctcagaatcataagttccaggctgt

SEQ ID NO: 452536 - DNA, 559 bp, Sorghum bicolor
cgtccggacccacgcgtccgtgcaaccccaaatctccccttcctcacaaacgcgcagcagaggggccgagacccaagaagaagaagaagaaagcagaagcagcgacagcgagcaagcagaagcttagctagcgtggaggtgcccaaggcgagagggacaacgacggccgcgacaggctagctagcaaccagctgctagctcctgcggagccgaagccgatggctggcgccgacgtcgacgtcgggacggagctccggctcggcctgccgggaggaggcgccgaggcggccaaggccgcgaagaggggcttcgaggacaccatcgacctcaagctgaagctgcccaccgccggcatggaggaagctgccgccgccaagccggagccggcagccgagaaggccaagaggcccgccgaggcgccggcagctgatgccgagaagccacctgcacccaaggcacaagctgtgggttggccaccagtccgatcataccgcaggaacgtcatgaccgtccagtctgtgaagagcaagaaggaagaggaacctgagaagcagcagtc

SEQ ID NO: 452537 - DNA, 927 bp, Sorghum bicolor
cgtccgcctgagaccactggcccaaacatggttgttgatatgtgtaagggagtgcagtatctcaatgaaatcaaggattctgtcgtggctggtttccagtgggcatcaaaggagggtgcactggctgaggagaacatgcgcggaatttgctttgaggtctgtgatgtcgttcttcatgctgatgctatccacaggggtggtggccaggtcatcccaactgccaggagggtcatctatgcttctcagctcacggccaagccaaggctgctggagccagtgtacctggtggagattcaggccccagaaaatgcacttggtggtatctacggtgttctgaaccagaagagagggcatgtgtttgaggagatgcagaggccgggtaccccgctctacaacatcaaggcttacctccctgtcatcgagtcgtttgggttctccagccaactgagggctgcaacctctggtcaggcgttcccccagtgtgtctttgaccattgggacatgatgggctctgatcctttggaggctggctcccaggctgctcagctggtgctggatatccgcaagaggaagggtctcaaggaacagatgacccctctctctgagtttgaggacaagctctaaatttttggttgtttgttctactgttactattgctggtttaatcgtcaatttgtctattgtattgggaacgacttgaatattttctctcgttttagttaatgtacctgtctctgaactatattggtcatcatgtagtgtgtcctgctgtgctgagagcctgagactccattttgatatccggtgtgatgtagcagatgaaacggaggtggtatctttggtttagttagtggttacatacttgtattccctgtgttgctcatttctattgtcttaataacgctttgcctgatctgtcagccattt

SEQ ID NO: 452538 - DNA, 496 bp, Sorghum bicolor
gcagaggccgggtacccctctatacaacatcaaggcttacctccctgtcatcgagtcctttgggttctccagccaactgagggctgcaacctctggtcaggctttcccccagtgtgtgtttgaccattgggacatgatgggctctgatcctttggaggcgggctcccaggctgctcagctggtgctggatatccgcaagaggaagggtctcaaggaacagatgacccctctttctgagtttgaggacaagctctaattttctcgttttgctactgttacctggtttaattgtcggttcaactcctgtactgggaactactatcttgtttccttttagttgtcaaatgcatgtttctgaacatcattggtcatactgtagatggtagtgtgctgctgaggcactttttgctatccatcgtggtgtaacagatgaaacagttggtatatgctttgttaagtggaagtgttgcagtaaatgcttgtgccatcctgattt

SEQ ID NO: 452539 - DNA, 627 bp, Sorghum bicolor
cgtccgacgcgccgctcgtctcgtgcgctcgcgtacgcaaggcgagagagggagggagtttttttttttttttgctcgaaaaggaaaaacaaaaaaaagcacggaggaggaaaagatatggtggcgggatcgatgaagcacctcgtggaggtggagccggcgaaggaggcggcgggtggggcgccgtcggcggggccgacgtaccgatgcgcggccggtgacaacgccgcgtcgccgcccgccgtgccggggctcgactgctgctgggacatattccgcttgtccgtcgagaagtaccccgacaacaagatgctgggccgccgcgaaattctcgacgggaaggctggcagctacacatggctgacttacaagcaggtatacgacaccgtgctcaaggttggggctgccatccggagctgtggcgtcggcaagggcggtcggtgcggcatctatggagccaattctcctgagtgggtcatcagtatgcaggcctgcaatgcccatggcatttactgtgttccacttgatgacacgcttggtgctggggcagtagaatttgtattgtgccatgcagaggtacaaattgcttttgttgaggaaaagaatgttggagagatgctcaagaca

SEQ ID NO: 452540 - DNA, 380 bp, Sorghum bicolor
cgtccgagctgatgaaggatccagagtcactgaacatgtctaaaaagtctccaagatcagcatcgaaattggcgtctaccctgcgcagcctctcattcaaaagaaaagatgagctcccagaggattgtgaacaacttcaacagcaaagcgaagatgatccttatcagacacttgagactgcatatgttgctcatgtttcattaagctgggaggctctgcattgcacctatgtgcacctgagccttatcgttgcagcacaacctgataatcctacaacctacagctctgctgctcaagcctccccgctctgccaggtcctgttgcagagattcgttgaaaatgagccattcgagcatggtaccccggttgagatatatgca

SEQ ID NO: 452541 - DNA, 510 bp, Sorghum bicolor
cgtgcgggataccaccaccgtactgagatgaacaagaaggtttacaagattggcaaggctggacaagagacccatgatgcctccacagagtttgacaggactgagaaggacatccctccaatgggtggcttcccccactatggtatagtgaagggtgactacctgatgatcaagggctgctgcgtgggtccgaagaagagggtggtgaccctccgccagtccctgcttaagcagacttctcggctggccctcgaggagatcaagctcaagttcatcgacacctcatccaagttcgggcacggccgcttccagaccaccgaggagaagcagaggcactatggcaaggtcaaggcctaagcttgttctggtgctggtgctgcggtgcagcgacaagtctcatttgtcaaagccatcgacctgtgatactcttgttcccttgtcggactaagttttgtagtggatgttttgggaacatgttttggccttctatatggatttgtgctctactgc

SEQ ID NO: 452542 - DNA, 640 bp, Sorghum bicolor
cgtccggtccgccgccctttcccaaaccctacccagccgccgagcaagcagcagcagcagcagccatgccgccgaagctcgacccggcgcaggtggtggaggtcttcgtccgcgtgacgggcggggaggtgggccgcggcgtcgtccctggcgcccaagatcggcccgctcggcctctccccgaagaagatcggcgaggacatcgccaaggagacggccaaggactggaagggcctccgcgtcaccgtcaagctcacggtacagaacaggcaggccaaggtctccgtcgtgccctccgccgccgcgctcgtcatcaaggcgctcaaggagcccgagagggacaggaagaaggtcaagaacattaagcacagcggcaacatcagcctcgacgacgtcgtcgagatcgccaagaccatgcggcccaggtccatggccaaggagatggccggcaccgtcaaggagatcctcgggacctgcgtcagcgttgggtgcaccgttgatggcaaggaccccaaggacctgcagcaggagatcgatgatggggaggtcgagatcccctccgcttaaaggctattcaactaaggagatcatcagacactggtgaagtctttgttccaaatgctatttttgtacctttgga

SEQ ID NO: 452543 - DNA, 698 bp, Sorghum bicolor
  unsure (1)..(698): unsure at all n locations
agcctaagctccaaaccaaacccttccacaccctacgccgccgcagccacaccacagcagccatgccgcccaagttggacccatctgaggtggtggaggtcttcgtccgcgtgacgggaggcgaggtcggcgcggcgtcgtcgctggcacccaagatcggcccgctcggtctctccccgaagaagatcggtgaggacatcgccaaggagaccgccaaggactggaagggcctncgcgtcaccgtcaagctcaccgtgcagaaccggcaggccaaggtctccgtcgtgccctccgccgcggcgctcgtcatcaaggcgctcaaggagcccgagagggacagggaagaaggtcaaagaaccatcaagcacagcggcaacatcagcctcgacgacgtcgtcgagatcgccaagaccatgaggcccaggtccatggccaaggagatggccggcaccgtcaaggagatcctcggcacctgcgtcagcgtcggatgcaccgtagacggcaaggaccccaatgacctgcaacaggagattgatgacggcgaggtcgagatcccatccgcttgaagactaggcatcgaaggagactaccattggtgctgctgaaagtggtggagaagtggggccgnttncttcgnctcgccgacccgggccttcacttcttcaaccccttcgccggggagtgcgtcgcgggcgccc

SEQ ID NO: 452544 - DNA, 713 bp, Sorghum bicolor
  unsure (1)..(713): unsure at all n locations
ttccgggtcgaccacgcgtccgggtcgcgttcgctctcgcggagatcggagagaagcggaggaggcctcagccctagcgccgccccccatcgccgcatcagccatggcgctggccgctcgcctcgtctcgcgctcccgtcagctatattcggttcaagcagcttttggaaatggaggtgccactcaagttcgctcctttgcagctccagctgaccgtcctcctgtcagtggtgatgatctcctgaagggcatattctttgaggtaaagaaaaagtttgagacagctcttggtgtccttaaaaaggaaaagatcactattgatccagaagacccagcggcagtttctcgttatgcccaagtcatgaagactgtaagggaaaaggcagatcttctttctgattctcaaaggattaaatataccattgagaccttcaccaagggcatccctgatgcacggacttacttgaatactcttcaacagatcagaataaagagtggtcttatagatcatcttggaattgagcctttgatgatggaagctcttgagaagattgagaaggacattaagaaacctacttttgaggagcgacaagaagaacatggccaccctcttggcagagtttgacaagattaacaaaaagcttggcattcggaaggaggatcttcccaagatcgaggaagagcttgaatnggaaattgcaaaagcgagctga

SEQ ID NO: 452545 - DNA, 380 bp, Sorghum bicolor
cgtccgcttcctctcgctcgcttcccttccctgctcccttcctcctccagccccctttattcctccatccgctcgcgccaatctcttcagggggcgggcagggatcggtgcccgccggccgcccgtcatgatctcctggcggcgcagcgcgtcatggctgtcgtcggcgtcccgctcctcgcttggcgctgccgtcggcggggaggcgaaggtcacgccggaggtggatccggcggcagcccaggagatggaggaggacgaggaggccgacgaggagcggtggtcgcgcctgctgccggagctgctcacggagatcatgcggcgcgtggaccccggcgccgagcgctggccgacgcgccgtgacgtggtggtctgcgcct

SEQ ID NO: 452546 - DNA, 519 bp, Sorghum bicolor
ggcacgaggggagaactgcctgctcctgctccctccgcttctccgtgctccaactcgccatccccatacttcttttcaggcggggatggacgattatgcccgggagatgatggagctcaagacgcttgtcacccgcaccctcgagaagaagggtgtcctcgccaagattagggctgagctaagagcaagtgtgtttgaagccattgaagaggaggatcgggtggtggagaacgatgatggcgtgaatcctgctttgcttggtagctgtaatgaccgagctaagcaactgcatgcttcaccttcaggaaggttactaactgcacttgtatgcgaatacttagagtgggcgcaactaagtcacacaatgaaagtttacttgccagagtgtaacctacccaaggacttttggaagaatgaattgaaagatttttctaacaaaagtggagctgaagggagcaagagcgctgaaagtggtccaatgcttttagatgttctcgaaggttatctgaaatatgagaa

SEQ ID NO: 452547 - DNA, 940 bp, Sorghum bicolor
cgtccgcacctcccggatctcatcttcgtcgacctccctccctcccgatcccgcctccccgccgccgggcgccggcgcctacccctccgccactgctgccgtctcccccaccgaggtcttgtctccggcgagcgagccggagcccgcggcggcgacgatgtacgggtgggagatgctgtcgttcaacatacacgatgggttcctggaggccatcgtgcggggcaaccgctcgggtctcctcaccgccgccgactacaacaatctctgccagtgcgagaccctcgacgacattaagatgcacctcaccgctaccgagtacgggccctacctccagaacgaaccttcacccttgcacacaacgacgattgtggagaagtgcactcttaaactggtcgatgagtacaagcacatgctgtgccaggccactgaaccactatctacgttcttgcagtatataacttatggccacatgattgacaatgttgtccttattgtaactgggacactacatgagagagatgttaatggaactttcggagaaatgccacccattgggcatgtttgacagcattgcatcacttgctgttgctcaaaacatgcgtgagctttatagactggttctagtcgatacaccactggccccttacttgtcagagtgcattacatctgaggatttggatgacatgaatatcgagatcatgaggaacactctctacaaagcatatcttgaggacttctacaaattttgccagaaactacgtggtgcaacagctgagatcatgtgtgatctcctttcatttgaagctgacagaagagctgttaacattactataaatagtattggtactgagttgacaagagatgaccgcatgaagctgcactccaactctgtgctattgcacccatatggtcacgaagaactgccgtttgtgaagatgtg

SEQ ID NO: 452548 - DNA, 845 bp, Sorghum bicolor
  unsure (1)..(845): unsure at all n locations
cgtccggcggcctgctcctgcgatctgcccagcagatctgaggttccgatcggccgtccccgtgaaccagcggcaaccgtcggcatggcgctcgtattgcattctggggctggaaacaagaatgccttcaaggcacttattgctgcagaatacagtggggtcaaggtcgagttgaccaaggattttgagatgggtgtctccaacaagacccctgaatttcttaagatgaacccccttgggaaggttcctgttctggagactcctgatggcgctgtttttgagagtaatgctattgcacgctatgttgctcgtttgaaggatgacaaccctctttttgggtcttcccgtattgaacaagcccatgttgagcaatgggtggactttgctgcaacagaagttgatcctggtgttgcatggtacttgtatccaaggcttgggtttatcccttatgctcacacaaccgaggaaacagctatggcttcattgaagagatcacttggtgctctgaacacacaccttgcctcaaacacataccttgttgggcattctgttactctagctgacattgtattgacatgcaacctctaccatggaattgcacggatcttgaccaagagcttcacttctgattttcctcatgtcgagaggtatttctggaccatggttaaccagcctaacttcaagaaggcattggtgaggtcaagcaggcagagtctgtacctnnctgtcagaaaaaggccgctccttctaaggagcctaaggcaaaggatgtcaagaaagaagccccaaaggaggcccccaagccaaaggtgggtgaggcaccagcagaagaggaagcaccaaag

SEQ ID NO: 452549 - DNA, 1539 bp, Sorghum bicolor
cgtccgcacaccacgaactgctctctctctctctctctcctcgcgacgactgggcgagaccgccgccgcccttcgccaggtgcccaggtctccgccgcgtccttcgccggcgaagagagctcaccagcagttctgtagaaatggctgatggtgaggacatccagcctcttgtctgcgacaatggcaccggaatggtcaaggctggttttgctggtgatgatgcaccgagggctgttttccctagcatcgtgggtcgtcctcgtcacacgggtgtcatggtagggatgggacagaaggacgcgtatgttggcgatgaggcacagtccaagagaggtattctcacgctcaagtacccgattgagcatggtattgtcagcaattgggatgacatggagaaaatctggcatcacactttctacaacgagctccgtgttgccccggaggagcaccctgtgttgctcactgaagctcctctgaacccaaaggccaacagggagaagatgacccagattatgtttgagactttcaatgttcctgccatgtatgttgcgattcaagcagtgctctccctctatgctagtgggcgtactactggtattgttctcgactctggtgatggtgtgagccacactgtgcccatttacgaaggatatgcccttccccatgccattcttcgtttggatcttgctggccgggacctcacggactccctcatgaaaattctcacggagaggggttactccttcacaacctctgccgagcgagaaattgtaagggacatcaaggagaagcttgcatatatagcccttgactatgagcaagagttggaaactgccaagaacagctcctcagttgaaaagagctatgagctacctgatggtcaagtaatcaccatcggcgcagagagattcaggtgccctgaggtcctcttccagccatctatgattggtatggaggctgctggaatccatgagacaacatacaattcaatcatgaagtgcgatgtggatatcaggaaggacctctacggcaacattgtgctcagtggtggttcaactatgttcccgggtatcgctgatcgtatgagcaaggagatcacttcgcttgcaccaagcagtatgaagatcaaggttgttgcaccacctgagaggaagtacagtgtctggataggagggtcgatcctagcctcactcagcactttccaacagatgtggatatcgaaggaggagtatgatgagtctggcccagctattgttcacaggaagtgcttctaggttttctcatcgcctagtctcaagttatgtctcctccatttctcgagacacttgtggcagatttgcatgctacctttattttcatcggacctgagtcctctcggggataggccctcctttgtatgttgtggctccatgtgcgagcacgccgtgtcgtatcacctggtttgtgagatgagttgttgtcaaacttgcttggcttgattggttgtacctgtaagagctgatagttttataaattgcttggactgttctgctgctacct

SEQ ID NO: 452550 - DNA, 841 bp, Sorghum bicolor
  unsure (1)..(841): unsure at all n locations
ggcgcccggtgactgggaatcgcagacggcgtcccacttgtcgccctccatcttatgcttctccgacagatgccacaggagaaccacgaggccgccgggtagggcgacgccggcaaccatgcacagcatgaacaggaggctccggtaccaccacgccaccacgttgtgcggcttcacgtagtaagcctccaccagggtgaacgccaggaggaagccgagcgtggacgccaggaagtacatggccgcccagaagttgtccccggtgccgaccagaccagacatggtcgaaccgttcttgacgaacatgccagggactttgcggtcgtccacgacgatgccgtcctccaatgggggcaaggattcttgagtcacgaaggcctggatgtccagtttcaacctgtccgagacagatgaactgatggtctgagcatcaacagcggacaagagagaaagcncctgccacttcttgactgaccaaaggaccagcacgttcttgggcatgcattgcttgccctcctcgatcctgtggattatgtcgctcaagatcgccaagaacggcgatattccaatgcctcctgccacctagatgagattctcgtacatcaagtggtagggtgattcatgcccatacgggccttccacgcaggctgtcatgcgtccgcattgcaactcagagtcacccctgttcttgtcctggacatcggtgatgatgctcctcagtttttcagtccatgtgcagagtactttcctcagaaccgacatgtggtatctcccatccatgggacttgaagatacactgaacggatgccactgcaagaacgatagctcggacgcgtgggtc

SEQ ID NO: 452551 - DNA, 435 bp, Sorghum bicolor
tgtctggataggagggtcgatcctagcctcgctaagcactttccaacagatgtggatatcgaaggaggagtatgatgagtttggcccagcaatcgttcaccggaagtgcttttaagtttccccagttgttgttacctagtctcaagtagtcaagttatgtccccttcatttcttgagatatgtgtggcagatttgcatgctacgtttatttgcatcggacctgagttttttttgggatagacccttctttgtgtgttgttgcttcatgtgcggtttgtgaggttagttgtcaaacatgcttggcttgattggttgtacctctgagagctgatagttatataaattgcttggattgtgctggtgctatcaatagtcttgtatgtatctgaattttgaaagcattgttatctgagcatccgtgcaagtatgaacttc

SEQ ID NO: 452552 - DNA, 701 bp, Sorghum bicolor
cgtacggcccatctcacgctcccgcaccctctcctcctcgcccattccttccgcctgcctccccgcgccgccggtcgccggagcccagcgactccgcccgcgccgcgctgcgccctgcagaatcctcgatggctgccgccaggggcattaaccagcttctgaagagaactctccacaaccagtctgctggttcatcgctgctttcttcattgaggggaaagcatgaagagtcctctgctggactgagagcattggctcttcttggagttggtgcctctggtcttttgagttttgctacaatagcatctgctgatgaagctgagcatggcttggcagccccagattatccctggccccatgctggcatcatgagctcttatgatcacgcgtcaattcggcgtgggcatcaagtttacacacaagtttgtgcttcttgtcactccatgtccttgatttcgtaccgtgatttggttggggtggcctatactgaggaggaaacaaaggcaatggctgctgagattgaggtggttgatggtcctaacgatgagggtgaaatgttcacccgccctggtaagctgagtgatcgcttcccacagccttatgcgaacgagcaagcagcccgatttgctaatggtggtgcataccccccggaccttagtcttatcacaaaggcaaggcacaatggtcagaactatgttttt

SEQ ID NO: 452553 - DNA, 529 bp, Sorghum bicolor
  unsure (1)..(529): unsure at all n locations
cgtccggcacaccgcgcagcaacgaaaagttgaacaggaaccagccaacaagctttgctactgtggtttcgagcggcggcggcggcggcggccgagaagagaagagagagagagagggaggcgagcatggccgaccacaaggaggagcccgtgctggagtctgtgatggacaagatcaccgagaagttccacggcggggactccacgtcgtcgtctgactcggacgacgagaagaagaagaaggggtcctcgtcggcgtcggcagcggaggccgtgaaggccaagatgtatcgcctcttcggccgcgagaggcccgtccactccgtcctcggcggcggcaagcctgccgatctcgtcctatggaggaacaagaagatctcaggcggngtacttgctggtgccacggccatctggctcctgttcgaggttatggagtaccatctcctcaccttgctgtgccactgtctcatcctctcgctagccatcctcttnctgtggtctaatgcctncacgttcattaacaagtcgc

SEQ ID NO: 452554 - DNA, 470 bp, Sorghum bicolor
  unsure (1)..(470): unsure at all n locations
cgtccgccgatccccaagccccgccgctgctccctcgtacgcacgcgcgcaccgcgtcgccctttatctgctcccgctgggccgctggtcggctgctgagtcgtcgtcgtcgttgttgttgttgctgggattgcagcgttggcgggccttgtagcgaggagggggtgtggaggcccggcgatggttcgcgggatgagcttcggcggcagcagctccgtcgcatccggtgcgaagaggccgtttgagtacgggagaacgcatgtggtgaggcccaagggcacgcacaaggccaccattgtctggctccacggccttggggacaatggagccagctggtctcaactactggaaactctntcccttcctaatataaaatggatatgccccactgcaccttcaaggcctgtgtcagtgtttggcgggttcccctccacaacatggtttgatgttgctgatctttctgaggatgc

SEQ ID NO: 452555 - DNA, 521 bp, Sorghum bicolor
cgtccgcctcgctcggctgttgcctcctcctacccgaagccgcgccttccaacgagattcctcccctcctctctccaataacgctagccgccgccgccaccgccaccgccgccggcgacgaatccggcgttttgagtttcggttgccagtgtagccatgtccatgttcaataggatcttcgggaagcccaaggaattctcaaaagcaaagaataaaagagcggctatccaatccttgaagaggaaaaaactttatgagcaacaaattgaacagctgggaaattttcagttgagaatccatgatcagatgatcatgttagaagcagctaaagctacaacagagactgttgatgcgttgagaactggagctgcagctatgaaagcaatgcaaaaagcaacaaacattgatgatgtcgacaagaccatggatgaaattaacgaacagactggaaatatgaaacaaattcaagatgctttgtcagctcctcttggagcttctgctgattttgacgaggatgaact

SEQ ID NO: 452556 - DNA, 424 bp, Sorghum bicolor
  unsure (1)..(424): unsure at all n locations
cgtccgctccaactcgtctcccccgatcatccaaaaccagaccaaaataacaaatctcccccatcgatcccaactcccccacccgatcccctcgctcggctgttgcctcctcctacccgaagccgcgccttccaacgagattcctcccctcctctctccaataacgctagccgccgtcgtcaccgtcaccgtcgncggcgacgaatccggcgttttgagtttcggttgccagtgtagccatgtccatgttcaataggatcttcgggaagcccaaggagcaggccaactccaatgccttggccactctcgacaagttaaatgagactcttgatatgctggagaagaaagaaaaagtgctggagaaaaaggcagccgctgagcttgagagagccaaggaattctcaaaagcaaagaataaaagagc

SEQ ID NO: 452557 - DNA, 538 bp, Sorghum bicolor
  unsure (1)..(538): unsure at all n locations
cgtccgctaaggatgagaccactttggaaggcaacggagttgctgagaacagcttccttgttataatgttgtccaaggctaaggcatcgtcgagtggagcttctaccgctactgctgcaaaagctcctgcaactccggcccaacctgctgcacctgtagcccctgtggcccctgctacatcagttgcaagagcacctacacaagctcctgttgccacagctgaaacgacacctccaagtgcacagcctcaggctgctcctgctgctacggttgctgcatctggtgatgctgatgtgtacagtcaggcagcttcaaaccttgtatctggcaacaatctagaacagactatccaacaaattcttgacatgggtggtggtacttgngaacgtgatacagttgtccgtgctctacgtgctgcatataataaccctgagagagctatagactacctatattctggaattcctgagaatgtggaggctcctcctgttgcccgagcacctgctgctggccaacaaacaaatcagcaggctccatc

SEQ ID NO: 452558 - DNA, 446 bp, Sorghum bicolor
cggccggcgataccaaaagatccataattaatctaacgtacacgtacgtagtccagctgatttgtccacgcggcatggcgacgcccagcgccgccgcctccagcagcttcctcggcccggcgaccaccgctgtcgcctcgacaccctctgcatgcccatccacgctccccaagaagaatgccgctggcgctgggcgccggcggcaccgcacaatgcagtgcagggccagcagcggcggaggccgccgtggcgacggcgacgacgtcgacagccgcctcctttggctgccccgtcgtcaagtgctcaccggcctgagcggcgtcgccgccggcttcgtcgggtaccctgacgaccttgcgttcatcgccctcgccctggaagcgaaccccgtggagagctgccgccgccgggagaaggtgacggacaagatcgtggagtgctcggac

SEQ ID NO: 452559 - DNA, 586 bp, Sorghum bicolor
cgtccggggagacgaacccatcataattccatcggtgctcctgcgtatataagcgcggcaatcgggacgccgggcgaggaggtgttcattcctcatccatcccacgccacgcgcgcgcaggccaaggccggatcgggctctcagtcagatctcgcccggcggccacgacccgagagagagagagagagaaagaggggggttggccggcgatcgggagaagatgtttagcgggacgcagcagaagtgcaaggtgtgcaccaagacggtgtacccgatggaccagctcttcaccgacggcgtcgccttccaccgctcctgcttcaagtgccagcactgcaagtccaccctctccctgagcaactattcctcgttcgaaggagtgccgtactgcatggcccattgcgagcagctgttcaaggagaccgggagttacaccaagagcttccactcacactcacccgcacagattactccggagaagtcggcccctgagctgaccagatcaccaagcaaagctgcaaggatgttttcaggaacacaagacaagtgtgcgacttgcggtaaaaccgcatatcctcttgagaag

SEQ ID NO: 452560 - DNA, 433 bp, Sorghum bicolor
cgtccgactggtttggttcaaaagcagcacagaaggtgcagatgcctctgactgctgttacctctgtaattgatggcttgaaaagactatatgttgaaaaactgaagccattggaagtcgcttacagatacaatgattttgcttccccattattgacaaacagtgattttgatgcaaagccaatggttatgctcttgggtcagtattcaacagggaaaacaacattcattaagcatctgctgaagacaagctacccaggagctcacgtcggaccagagccaaccactgatagattcgtagttgtcatgtcaggatctgatggaaggaccattccaggcaatactattgctgttcaagccgacatgccattcactggtcttacaacatttgggggagcaattctgtcaaagtttgaatgctctcagatgccaca

SEQ ID NO: 452561 - DNA, 489 bp, Sorghum bicolor
cgtccgctcagtgacctacctctgtctccactacaacgagtgcagtgtccacccagcccagctctagcctgctgcagtgcaagagcaagatggtcagcagaggtgctcgtcggccatcggcgcggctcctgctcctctccctggggcttgtgctcctctacttcacctcagtaagcagcgtcggcgttgctgcggcccagaaaacgtggtgcgtggccaagccgtccgcgtccaacgacatcctgtctctgaacctcaactacgcgtgctcccaggtgagctgcgccgtgatccagaagggcggaccgtgctactacccggacaacctggtgtcgcgtgccgccgtcgccatgaacctctactacgccttcaatggcaggcacccctggaactgctacttcaacaactcggcgcctcgggggcagtccgatcccagctatggctcctgcacctactactgatcgattcgattatatatatatatatata

SEQ ID NO: 452562 - DNA, 760 bp, Sorghum bicolor
cgtccggacccacgcgtccgaccacgcgtccgcccacgcgtacggattctgatgaggatgagactgatgattctgattctgatgataccgatgattctgatgagggtgagggattatctcctgaagaaggcgatgacgatgattcaagtgatgaggatgatacaagtgacgatgaggaggaagaaactccaactcctaagaagaagccagaggcaggcaagaagagacctgctgaaaattccctgactcctctttctgataagaaagctaaggttgccacaccgtcagcccagaagacaggtggcaagaagggcgccgtccatgtggcaactccacacccagcaaaaggcaagacccctgcaaacaatgataaatcaaaggagaagtctccaaaatctggtggctcggtcccttgcaaatcttgcaccaagactttcaacagtgagatggcacttcaggctcactcgaaggcgaagcatggtgccaagtgagtcgcaggtacaactgagtcttcgaaggcgaagcatgggaggtttaagtgagtctggaaaaaatgtcggtggaagtaggcctggccttgttttgtttagagactagtggctatgtgattgtggtagatgcagcaaaacaaggctgtggtgtgtgaactttaatattctgggttgcccagctggtagtatttggatttgtgttgtgctgcgaattgatcgttttttcgccttggtgatatagtagcatggtcctttgtcgcattggctca

SEQ ID NO: 452563 - DNA, 654 bp, Sorghum bicolor
cgtccgatggcacctttggttgatgaaagctggaggtcaaagtttgagagagttagagatgatggcttctcccgtttaaggggtctgtgggtcctccatgaaattataatgccgattgtcaccaagctccttacagctctctgtgtcccatacgtccttgcaaggggcatcttcccggtgctgggttaccctctcatagtgaactcagcagtgtaccgctttgcctggcttggatgcctgatcttcagcgcactcttcttttgtggcaagagattccatgtctggttcaccaacctccacaactccatcagggatgaccgctatctgattggccggaggctgcacaactttggcgaggactcacactcacccgaaccaagtgaatctggagcaactatagggtcagatgaccaggaccgagcccttgtcctgcgagatcaggaagaggacgtggggttgaggatgaggcgcaataatatgcgtgcaaaccaacaacccaggctggctttataagcaggaagtagttttggataaagagctcataatcatgggataagctggtctgcagcttctgcttgtgctttgtaatgggtgttgtagagtgagtttgtgttagtgatagagaagagctaaagactgttctacgacgaacct

SEQ ID NO: 452564 - DNA, 531 bp, Sorghum bicolor
cgtccggatgtcatcacgggtggagatctatacgctactgtttttgagaacacattgatgcagcaccacgttgctcttccgccaggttctatggggaaagtaagttacatcgcaccagctggtcagtacagcctgcaggacacagtgctagaattggaatttcagggcataaaaaagaaatttaccatgcttcagacatggcctgtgcgttcaccaaggcctgttgcgtcaaagcttgctgcagatacacctcttctaacagggcagcgtgtactggatgcgctattcccctcagttcttggaggcacttgtgctattccaggagcgtttggttgtggtaaaactgtcatcagtcaggcactttccaagtactccaattccgaagctgtggtttatgttgggtgtggtgaaagaggaaatgagatggctgaggttctcatggacttcccccagttgacgatgacattgcctgatggccgtgaggagtcagtcatgaagagaacaacactggtggctaacacatcaaacatg

SEQ ID NO: 452565 - DNA, 535 bp, Sorghum bicolor
cgtccgctcgtggctgtctgcttgtcttgcccccctctcgctctccgacgactggtgcgccgcgccgccgccgccctaagccaggtgctgaggctttatttcgtctcttcgccggcgaacgagcacccacgaggcgtagagagagatggcgagtctaaccggcctcgccgcgaaccctaatccgaacaagtcattcgagatactgccgaacccgggtgactccgtctccagcctcagctttagtcccaagagtaatctgcttgtggcaacctcctgggataaccaggtgaggtgttgggagattgttggtggcaacagtcagccaaaggcatgcatatcacatgaccagccggtcctctgctccgcttggaaagatgatggaactactgtcttctctggaggctgtgacaagcaggtcaaaatgtggcctctgctgtcaggtgggcagcctcagacagttgcgatgcatgacgcgcctgtcaaggaggtcgcctggattcctcagatgaatctttctgtctctggaagctgggat

SEQ ID NO: 452566 - DNA, 1431 bp, Sorghum bicolor
cgtccgcaatgtcatcatggcaacatacgaagataagctccttggtgacgtccaagtgtacccagagaaggggactgttgctttttctgctggtctgcacggatgggcctttaccctcactaactttgccaagatgtatgcatctaagtttggagttgatgaatctaagatgatggagaggctttggggtgagaacttctttgaccctgccaccaagaaatggacaaccaagaacacaggctcccctacctgcaagagaggatttgttcagttctgctatgagccaatcaagcaaatcatcaacacctgcatgaacgaccagaaggagaaattgtggcccatgctgcaaaagctcaatgttaccatgaagtctgatgagaaggaattgattggcaaagctttgatgaagcgtgttatgcaaacgtggctaccagcaagcactgcactgctcgagatgatgatattccaccttccttccccggcaaaggctcaaaagtatcgtgtggagaacttgtatgagggaccccttgatgatgtctatgcaactgctatcagaaactgtgatccggagggacctcttatgctgtatgtttcaaagatgattccagcatctgacaagggcaggttctttgcctttggtcgtgtcttctcagggaaggttgctactggtatgaaggttcggatcatgggtcccaactatgtccctggccagaagaaggatctgtatgtcaagagcgtccagcgtactgttatctggatgggaaagaaacaagagtctgtcgaggatgttccttgtggcaacactgttgctatggttggtctggaccagttcatcacgaagaacgctacactcactaatgagaaggaggttgatgcatgcccgatcagagcaatgaagttctctgtctcccctgttgtgcgtgttgctgttcagtgcaaggttgcctctgaccttcccaagctagttgaaggtttgaagcgtctggcaaagtctgatcctatggttctctgtacaattgaagaatctggtgagcatatcattgctggagctggtgagcttcatcttgagatctgcctgaaggatctgcaggaggacttcatgggtggtgctgaaattatcgtttcccctcctgttgtgtccttccgtgaaactgttcttgagaagtcctgccgtactgtcatgagcaagtcacccaacaagcacaaccgtctgtacatggaagcgcgccccttggaggagggtcttgctgaggccattgatgagggccgcattggcccacgtgatgatcctaaggtgcgctcccagatcctctctcaggagtttggttgggacaaggaccttgccaagaagatttggtgttttggacctgagaccactggtccaaacatggttgttgatatgtgtaagggagttcagtatctcaatgaaat

SEQ ID NO: 452567 - DNA, 554 bp, Sorghum bicolor
cgtccgaaaaaaaccccgtgctctttctctctccctctgcgcacatgtgggcccatcaaaccaggaggccttatcacttcggcttcctcccctttcttctaaaaatcatttttgttctctcgctactgagatccacttcatgttctacttcttcctcttctcaaatctagagtgttggtaacgatgggggctagaaccagtggtttcgtgtgcggggtgacgagattggtcggtctctcctttgagtgcaggctgcttggccgcagcgccggcgttggatctgaccacgcctcgacgcgattcacctcgcctgacagcgtcgccgcgctctccagcagggataaccaggctctagatcgaagcacccgcggcgacaaggacggtgcagacggcgccggtggccgcaacatgctttggttctccaaggaccaggccactggcattcgagtgtgcttcaagatcacagcacgctcaacccgaagccttttatattatttttgcataggttgtgatccgtcgtcgtgatcatgcccaggggttaatactctatcaga

SEQ ID NO: 452568 - DNA, 558 bp, Sorghum bicolor
cgtccggataagaagaggaacagcgaagaacagaagcaggcgaagcgactgtcgcgaggacctcatccgccatgacgctctccctctccacctccttcctccccacccccgccgccgcgaccgcgagggccaccacagcccgcaccctacgctccgtcgtcccctcccaggggatgcggtgctcgatgcgcaagaaggggctgcacccggagatctacgaggacgcgaaggtgtactgcaacggggagctggtgctggtgacggggggaaccaagccggagtacacggtggacgtgtggtccgggaaccacccctactacgtcggcgacacctcggcgctggtggtgatggacagccagatcgagaagttccgcaagaagtgggggcacgtcaaggagtactggcccgaggaccagtggagggagatgcaccccgacggcgaccccgggttcgagcccgagggggacaactgaaatggctcccgtcttcttcctcatcaatcaccggaccggtgctgtttctctctgtgtcctcttgagtctgaatggaattgagact

SEQ ID NO: 452569 - DNA, 596 bp, Sorghum bicolor
cgtccgcatccatcttcccttccttcgtcgttctctcctctcctaggcggccggccgccgcagagtggacttcgaattggctccttcctttgctgggtactaccatgaagaggttggtgtcgaccgccctcgccacgagagggctcctgagatctcgcggagcgccgagcacaactgctgttatgtcccgaccagctttccagcagtttatgaactattcgtcaccacaaggtggtgatcctaatgctagcacaaactcaactgcagcacgaatagctgctgatcctgatacacatcaagattttgagccaaagagcagaagttcagacatgtctttgaatgacattgttgctcaggatatcaaggagaacccagtcttgatctacatgaagggttttcctgagtctccaatgtgtggcttcagcgcactggcagttaaggtcctccagcaatatggcgtccctatctgtggcagagacattcttggagatctcaagctcaaagagagtgttaaagctcacactaactggcctacattttcacaaatatttatcaaaagagagtttgttgggggatctgacatcatattaagcatg

SEQ ID NO: 452570 - DNA, 799 bp, Sorghum bicolor
ttccggtcgaccacgcgtccgggtttgatgagcctgactaccaagatgaacgtgtcatcattacatattacttttccgtctgaaggtgaattcagcaaattgaagaatagtgggttgttacaaagaattgggttgcaatatcactggagaaatcggaattacaagagttttgatgagtttctgatggatttgaagcaacctaaacggaagaatatcagacaagaacgtaaaaagattcctgctcaaaatttgcaaatgaagcgacttcgtggagacgaaataaagagcagccactgggatgccttctataaattctaccgtaacacaactgataatcattggggccgaccatacttgacaagggatttctttcacctcttgggcgaaaagatgggggagaatgtgatgcttattgttgctgaaaaagatgatcaactagttgctggagctcttaaccttattggaggtgatacactgtttggccggttatggggatgcctgccagatgcttactttcccaatttgcattttgaagcttgctattatcaggcgattgaagcagccatagagttaaacctgagtaatgtggaggcaggtgctcagggagagcacaagatccagcgtggttacctcccagtgacaacttacagctgccactacttttcaaatcctggttttgcggcagctattggaaattttcttacacatgagacggctcatgttaagcgtgctattaaggtccttcatgattcgggttcatacaaggaagacatactgaaagaatttgcagcttaacaag

SEQ ID NO: 452571 - DNA, 788 bp, Sorghum bicolor
  unsure (1)..(788): unsure at all n locations
cgtccgcaccccagtccgtccccgcttgttccttccttcctgcttctcctctccatccagttggattgggttcgttgggctttcggatagctgtggtgtgcacggcacggcacggcagttcggctactagcgaggaagagaggaggagaccggatccatggcgtcgaagcggatcctcaaggagctcaaggacctgcagaaggatccgcccacctcatgcagcgcaggccctgttgccgaagatatgttccactggcaagcgacgattatgggtccatcagatagcccatactctggcggcgtatttttggtctctattcacttcccaccggactacccattcaaaccacccaaggttgcattcaagacaaaggttttccatccgaatatcaacagcaatgggagcatctgtcttgatatcttgaaggaacaatggagccctgctttgacagtttctaaggtcctcctatcaatttgttcccttcttacggacccaaaccctgacgatcctttggtcccagagattgctcacatgtacaagactgatcgcgtgaagtacgaatctactgctaggagccggactcagaaatatgcaatgggctgatgatattgctggctgccgggaagatgatgacccagttatttgctcgttacgcaagctgtgggtctgtcctagatctaatgcactgccttctgtaactgaaaaaacaaaggtctaaattgaacagtccattcattcatgcatcgaactatattggtctataatggaacgcgaaacattgatngtc

SEQ ID NO: 452572 - DNA, 664 bp, Sorghum bicolor
cgtccgttttgagatgaagcttatggacatcgacagtgagcaccttggaatcccggattccgagtaccaggccatcgtccgcatgccgtctgctgagtttatgaggatctgcaaggaccttagcagcatcggcgatactgtcgtaatctcggtgactaaggagggcgtgaagttctccacctctggagaaattgggagcgcaaacattgtttgcaggcagaaccaaactattgacaagccagaagaggctaccattatagagatgcaagagccggtttccctgacctttgccctgaggtacatgaactccttcaccaaggcatcttcattgtccgagcaagtgactatcagcctgtcgtctgagctaccagtggtggtcgagtacaagattgctgagatgggttacattagattttacctggcccccaagatcgaggaggatgaggagatgaaggcctgatggcttgtaatgacataatgctcgtgttgcctacttttcattgttgtccaaccatggtttgcttagctagtgtttgcaagcaaaaagggatgttatgtgttatctaggccagactgctttagctacttgtgtctatttgtgactgccctctgaatccatggatttacagtgagcctattagattagtgggcttatgctttgttc

SEQ ID NO: 452573 - DNA, 645 bp, Sorghum bicolor
cgtccggctcaatacaatgctagtcagctgatcacacagagagagactgtgagtagggagattaggaagatactgactgagagggctcgattcttcaacattgctcttgatgatgtctctatcacaagcctgagcttcgggaaggagttcactcatgccattgaagccaagcaggttgctgcacaggaagctgagcgtgctaagttcattgtcgagaaagctgagcaagataagagaagtgcaattatcagggctcagggagaggctaagagtgccgagctgattggtcaagccatagcgaacaaccctgccttccttgccctgaggcagattgaagctgcaagggagatctcccacacgatttcgtcctccgccaacaaggtgttcctggactccaacgacctgctgctcaacctccagcagctgaatgtgtcgagcaagcagaagaaatgatgatgtcacattttatgcccccccctttcgtctgagttattattacagttagcagtggatgcctttgtaccagccttatctgatgtggaatttggcgagtatgtgctcgaaggcaagcaaagctgggcagggtttgtttaaacttgattatagcttgaggaagttcaataaagaccataattctgttatttt

SEQ ID NO: 452574 - DNA, 358 bp, Sorghum bicolor
cgtccgcccacgcgtccgaatgaagtcagtgctgctgaaaaggaattgcttgatgagattactgatttggaaaagcaaagagatgagctggaggcacagctgaaaaaggtcaatatatcactaaatgctgctgctggacggctcaagcaaactagggaagagagggaccaatttgacgaaccaaacaatcaaatcatatttagcttgaaaaaagaggaggatgacctctcgaatcatgctatgtaggaatcaagtgtaattggaagtctgggctggagtagctaacagaaagcaaaattgtggtaaagggggtttatgaaatattaatagacacatgtgataattgtatgtgtataga

SEQ ID NO: 452575 - DNA, 521 bp, Sorghum bicolor
  unsure (1)..(521): unsure at all n locations
acgcgttccgaattgtattacaagaattaataattgttggctaaattattggtcaaagattataaagtttaactcttgacgtatgtggaatgccttataaactgatgatccaaatggagtaatagtttaatttattatgctatggttagccctcttttacattgaaaggaaaagcattgacactcttttgtggcaaggcatgattggtcaggactcaggacatgttagatttccttttagccttcatgcactgtttctcttgtgcgcatcgtattaacttgttaacacatcatttttacatttttcctgttactcttctggtactatgatgactactatcaagtgccttatcaaacatcactgtaatacagagcaccaatatgtctgcacccagccaataaagttctagatcttttgctgcttctgaagttctgataggtgatgcatatatattaaataaagtcctctttttnttaaaaaaaaagagacatgcacaagtgcctttcaaatttacgaataac

SEQ ID NO: 452576 - DNA, 637 bp, Sorghum bicolor
cgtccgcgccatcgtcctcccctcgtctcccaaaggaggcgccgctcctcgtctacgccgtccacttccctctctagcctcaacgcctccgccccccccactcgcgagaccctagctagccctagcgccacccgccgactcacccggagggaggaggaggaggaggaggaggaggccttcgccgtggtcgtcggccgaggagcaggcgccaggatgttcgggtaccagaagggcgtcgacgtcgaggcggggacctccgccgccacgggcggcggcgcgcgccagctctacccggggatgcaggagagccccgagctgcgctgggcgctcatccgcaagatctacgtcatcctctccctccagctgctcctcaccgccgtcgtcgccgccggcgtcgtcaaggtccgcgccatcccgcacttcttcaccaccaccaacgccgggctcggactctacatcttcctcatcatcctccccttcatcgtgctgtgcccgttgtacttctaccatgagaagcacccagtcaacctgatcctgctcggcctcttcaccgtcgccatcagcttctctgtgggcttgacatgtgccttcaccagtggcaaggtcattctggaatctgcaattctgacaacagtgg

SEQ ID NO: 452577 - DNA, 673 bp, Sorghum bicolor
cgtccggtacactggaactattgttactgaagacggaaaggaaaagaaagttactattgattttgagcccttcaagcctatcaacgtgtcgctctacctctgtgacaacaagttccacactgaggctctaaatgagctattggaatctgatgacaagtttggtttcattgttatggatggtaatggtactctttttggcacactaagtggcaatacccgtgaagtgcttcacaaattcactgttgacctcccgaagaagcatggtagaggaggacagtctgctctgcgttttgctcggcttcggatggagaaacgccataactatgtccgcaaaacagctgaacttgctacccagtttttcatcaatccagctacaagtcagcctaatgttgcagggttgattcttgctggttctgctgattttaagactgagctgagccaatctgatatgttcgatcagcgactccaagccaagatcctcaacgtggttgatgtttcttatggtggcgagaatggtttcaaccaagccattgagttgtctgctgaaattcttgcaaatgtgaagttcattcaagagaagaagttaattggcaagtattttgaaaagatcagtcaggatactgggaaatatgtctttggtgttgatgacacccttaaggctcttgaaatgggt

SEQ ID NO: 452578 - DNA, 545 bp, Sorghum bicolor
cgtccgatttatatggtcacacttgctgacattcaatatggaactggttcaattgctggttttttcagtgaggatagtgttacattaggtgatctggttgtgaaggatcaggaatttattggagctacaaaggagccaggccttaccttcatggtgtgcaaaatttgatggcattcttgggctaggctttcaggaaatatctgttgggaatgcgacaccagtatggtataacatggtaaaacaaggtctcatcagcgaccctgttttctccttctggtttaaccgacatgctgatgacggagaaggtggtgaaattgtgtttggtggaatggattctagccactacaagggtgatcacacgtatgtcccagtcactcagaagggatactggcagtttaacatgggtgatgtcctggttgatggagtgtccactgggttttgtgctggcggatgtgccgcaattgcagattctggaacttccttgcttgctgggcccacagccataattactggaatcaatggaaagattggtgctgcttgggtag

SEQ ID NO: 452579 - DNA, 825 bp, Sorghum bicolor
cgtccgggtttggagtcatacattctcaagggattgttcaccgtgacgttaagcccgagaacattctctttgacgaggacttctgtgtgaaaattgctgattttggtgttgcctgtgaggagactttatgcgacatgcttgtggaggatgaaggcacttacaggtggatggcacctgagatgatcaagcaaaaggcatacaaccgaaaggtggatgtctacagcttcggactgctcatgtgggaaatggtgtctggtagaattccttacgagaacctgacccctttccaggtggcttatgcagtagccaacaggaacttgaggccaacaatttctccagaatgtccatcggccctcagacccctgattgagcagtgctgcgccttgcagcctgacaagaggcccgacttctggcagattgtgaaagtcctggaacagttccactccattgtctcacagggtggctgccttgaaacaccaaagagcggcacctgccaggaccccaagaagcggctcatgcagtggattcagaaactgaaaccgacgcatagcacctgagtaaccaaagctctcatagttatcagcatcgttgcagccgtagtttttgtcaggttgggtatgctcagtagtttagacctgttaaggatccttgattcaaggaaccagtattctaaggatgctcgtagctgtttatctgctgatctgcaatatagatctcacagtagctgtacatggttatgcttttgtaattttcttctcccttgttaaatttacctccaggttattctcatgataacatagcatgtgcccctcactcgttgaggtg

SEQ ID NO: 452580 - DNA, 868 bp, Sorghum bicolor
cgtccggaactcataaatgactctgtgccacccaaggatcctgaagagggaggtgaaaattgtgaaggcaatgctgattcagaaagcctttctgacatcgacgatgcagaggttgattggtaccttcacaatgaggaagaaaaacagtataaaaagattatctgggaggaaatgaacaaagaataccttgaggaacaagcagccaaggaagctttggcagctgaattggcagctagagggattgttgtggaagagggaaagaagaaaaaacgaagacgtaatgaagacaccaagagctcgacacctgctgaaacaccggcagaagccacatacaacatgctgaaacggaagggacttggttcaaagatcaatgagggagctgttggcgaattgtacaagactaaagatgaagttggcagcgcaagtaaggaagaagagatggactttgacgcactgtttgggccggacaatgctgatggtgaaactgttgatgatggttacaatgggggctataacgacgatggcgtagaagcctacaatggcattgacgatgattttgatttctaggatgtagcagcatttgccgaacggcaaagctgaccagcacgggcacgattcttcatgtgtacattatatagtttcttttgttttggctaagtttcaactattattacggagctattggatagtcaacatagttttgcttgtataataataatatttgaaactaggttctgcctggttgtagttgtaactaagtcctgtgtgctcaagctcctaaaagggcattgtagatccaccccaaaagattgcaagcggtgatgtaacatttgtattattaataataaaggaactgagccgtcttaga

SEQ ID NO: 452581 - DNA, 786 bp, Sorghum bicolor
  unsure (1)..(786): unsure at all n locations
cgtccggttgggccttgatgctgacacttgggacatcattggaccttcattgttggagaaagttgtttatctacttacggaattggatgttaatataacatgggaagatattcttcaagatgaacacaacaaaggtatatttgacatggaacttgaggatttggatgaggatgaagataaccttggtcaagaaggaacaaaggtcctgtttggaggaaatgtgtgtgccgaaaaacttgatggtttaatggtggttgtgtgcaagcacctcaagtcacgcgcagaagaacctgatcgcctaaataaggaatttgacactttgaaggctatattcaaatcacatgtgattagggtgcacaaatccaaatttgcacagtttatcatgttttatgcttgttccctgtatccaaagatttgtggtgagggctttgctttttttcttgtcgatatttttattgacaaggacaaaaaggaggatgcaataactagaatgtctgcagtttcatatgttggaagctatctgtcccgggcaaggttcatttccgtaaatacagttgttgctgtactccaaaggttagtggagtggtgcggggactattgtggcagtcagctggacaaaggggtgacagccaatcctataaaacatcaactattttatgccagctgccaggctgtgatgtatgtcctatgctttcggttaagatctattatggactacccaaatcttaaactacaacntttttaaatgcgaatccagaatatctttgcccattcattggagccatt

SEQ ID NO: 452582 - DNA, 528 bp, Sorghum bicolor
ccgaattcctggtcgaccacgcctccgcgctcaattggcacagagtacacacagcgcagccaaccactccagaagctccgagaacctagggtttccccacctccatggccatcgcgcgccgccgccgccgctgcggtgcatccgttgccgccgccgctagctcggcgtaccgtggcgtggttggtgtgcacccacctcgcctgggccgccgtcgacgccgtcatctgcttgttcctcgcaagcatgtggcttttcttcttgggcctggccaccaatgaaatcgggcggctcgcctgcggtgagggttgcgctgtggtcaccgcggcgtacaacctcgtctctgtagcggcgggggtcaccgctgtgctcgtcctccccttcagcgtgagcgtgctactgatggcatcgatgatggcccgcgcgcaggcgtgcggcgacgacggccactgacattgaggcaacgaaggaacctgctctgaagacatcgtatgcggcagtgcgggagacgctgtgcgactttctcgctct

SEQ ID NO: 452583 - DNA, 919 bp, Sorghum bicolor
ggcacgaggaaaacactgagcagtgtctctgctggcaaaatttatgttgagatagagagagcaagattgatcagaagacttgctaaaatcaaagaggagcagggacagattgacgaggctgcctatttgatgcaagaagttgctgtcgaaacatttggctccatggccaagacggaaaaaattgctttcattcttgagcaggtccggctatgcctggatcggcaagattatgtcagagcacaaattttatcaaggaaaattagtactagagtatttgaagcagatccatcgaaggaaaaaaagaaaccaaaggaaggggacaatattgttcaggatgctcctgcagacattccatccctactagaattgaagcgcgtctactatgaactcatgattcgatattacatgcacaacaatgattacctggaaatctgccgctgttacaaggcgatttatgatattccagcgattaaagaggatccaacaaagtggataccgattcttcggaagatctgttggtacttggtgctagcaccccatgatcctatgcaatcgagccttctcaatgctactctcgaggataaaaacctttcagaaatcccaaatttcaggttattgctgaagcagctggtcaccatggaggtgatacagtggacaaatttgtgggaattcttcaaggaggaatatgagaaagaggagaatcttctcgggggagctttgggtgccaaagcttcagaagatttgaaactgaggatcatcgaacataatatcttggttgtgtccaagtactatgcaagggttaccctcaagaggcttgccgatcttctttgcctgactttgcaggaggcagagaagcatctctcagacatggttaactcaaaagctctgattgcaaagatcgacaggccgatgggagttg

SEQ ID NO: 452584 - DNA, 500 bp, Sorghum bicolor
  unsure (1)..(500): unsure at all n locations
cgtccgcccgtctggagcgagctagccaggctgccatggctgcggcgaacgcaggggacgtggatgtggtcgatttcgactccgacgacgacgacctcatggacgacgacgccctcgaggcctacccggcctccgcccctcgcctccgctccaccatcgcggccagcggagattcctccgctgccgcgcgcaagaccaaaggccgcggattccgcgaggagccttcctcctcgcggcccttagccggccgctccgacttcgactccctcggctccgactatggccctggacccctcagatctattgaggggtggattattttggtaactggcatccatgaagaagcacaggaggatgatctccataatgctttccgggaatttgggcaggtcaagaaccttcatttgaatttagatcgtcgtactggngttgtcaaaggatatgctttggttgaatatgagaagcttgatgaagcacaggctgcaattaaagcaatggat

SEQ ID NO: 452585 - DNA, 585 bp, Sorghum bicolor
cgtccgcccacgcgtccgcacacttctagctcacagtgctatccatggcgcaatggcggggtatagcttcactgttggaatggtcaacggaagacatacctatatacctttctatcgggtgacatccacaaggaacaaggttaaagtcactgacaggatgtgggcaaggcttctgtcgtccaccaaccagccaagtttcctgagtcagaaggatatcgatgaagcgagtgaggcggataggctggcaaacaggccaccactgccaacgggtgccagctctcgcgtggcgaggtctttcgatcaatcttcgtcgtgttcttcaaatggagagatctagtgattgctggtgcaccacaactgtgtacagaaactactacaatggttctgagctcaggtgcctgggcagcttggcgacgcaatgagttttgctcttgttaggtggtatgcatatgccttgcgtataggggccacaccgatatgaccctggtagcacgtgtaataaagaaacgccattgatgaagctacttcctggaggctccatctatcatgtatttgctgcagaatatgagttattatgcaatcggc

SEQ ID NO: 452586 - DNA, 507 bp, Sorghum bicolor
ggcacgaggcacctacagaagcgaggagcactccttcctcggattctcttctagtcctccatagccacttcatagcgatctatctctcttatccagttaagtttcagacacatggcgagcaacaacggcacggccaactgcaccaccgtgccgcagccgccgccatcgaccgggaagctcatcacgattctcagcatcgatggcggcggcatccgcggcctcatcccggcgaccatcatcgcacacctcgaggccaagctgcaggagctggacggcccagatgctcggattgccgactacttcgacgtgatcgccgggacgagcaccggcgccctgctcacgtcgatgctggcggcgcccgacgacaacaaccggccgctgttctccgccaaggacctcaccaccttctacctcgagaacggccccaaaattttcccacagaaaaaggccgggtttctgacgccggtgaggaacctgctgggcttggttcgggtcccaagtacgacg

SEQ ID NO: 452587 - DNA, 502 bp, Sorghum bicolor
cgtccgcccacgcgtccgcaagttgcagttccaggcagcagatcagcagagacacacccacaccgtaccacacacactagcgacctgcagtctgatctgcaggtacgctagaaaccaagctacgactgctgtgtgctgcgtacgtacgtaggagtacgtggtggtagcgagatggcgaagaaagtggccttggtggcctcgctgctggccctgaacctcctcttgttcggtttcgccgacgcatgtggctgcaggtgcggcggctcctgccctagtccaccaggcggtggtggcgggggaggtggaggcgggggaggcggaggatctggtgtggtgggagcggaggcggcggtgggagcggtgggggcggcagcggaggaggaggcggcggcggcggcggctgctgttgaggaggaggaggcggcggcggcggcgggacgcgcggtcgttgccctgtggacacgctgaagttgggcgtgtgcgccaacgtgctgaacgggct

SEQ ID NO: 452588 - DNA, 548 bp, Sorghum bicolor
cgtccgagacccacgcgtccgttcgcctatccgatctgccacctcctcgccgtctcgcacgttccttccccaactccgcagcgtagcctctccgcgccgcgatccagatccaggttgttcagcatgggtctggtgaaggaaggcgtcgacatggaggagggaaccctggagatcggcatggagtacaggactgtatctggtgtggccgggcctttggttatcttggataaagtaaagggcccaaagtaccaagaaattgtaaacatccgacttggagatggcaccactcgccgtggtcaagtcccggaagttgatggcgaaaaagctgttgtgcaggtctttgaaggaacttctggaatagacaacaaatacacaactgtgcagtttacagggcgaggttttgaaaactcctgtatcacttgatatgcttgggcgcattttcaatggttctggaaaacctattgacaatggccccccgatattgcctgaagcctacttggacatctctggaagttctattaaccccagtgagagaacctatccagagg

SEQ ID NO: 452589 - DNA, 539 bp, Sorghum bicolor
cgtccgggaggcggacccagcctctctccacagctctcgagaaacctccatccagtcgagggcaggctccatccttcctccagactccagaggcaccacagacacacacacaccaatggctcccagcaagctcgccgtggtcatcgccttggtggcgtctctcctcctgctcaccaacatcaacaccaaggctgctccgggtccgggcggctacccgccggctcctccgctcggccctccgccgcaccagatcgtcgaccccgccaaagactgcgggggcgcgtgcgacgtgcggtgcggcgcgcagtcgcggaagaaccggtgcgcccgggcgtgcctcaagtgctgcagcgtctgccgctgcgtgccggcgggcacggccggcaaccagcagacgtgcggcaagtgctacaccgactggatcacgcacggcaacaggaccaagtgcccgtgagtgcggctgcggggtggcagcggcggtcagcggttccccggccgaaagcagcctgagtccatgggcgcaccactgcacgccacgt

SEQ ID NO: 452590 - DNA, 566 bp, Sorghum bicolor
cgtccggttctacaagaactggtgcaagagcaagaagaaggccttcaccaagtacgccctcaaatatgacagcgacgcaggcaagaaagaaatccagttgcagcttgagaagatgaagaagtatgcttcagttatccgtgttatcgcccacactcagattaaaaagatgaaaggtttgaagcagaagaaggctcaccttatggagatccaggtcaatggtggcactatagcagacaaggtggactacggttacaaattctttgagaaggaagttcccgttgatgctgtgttccagaaggatgagatgattgacatcattggagtcaccaagggtaaggggtatgaaggcgtggtcactcgttggggggttacccggcttccccgcaagacccacaggggtctccgcaaggttgcctgtattggtgcctggcatccagcctagggtgtcgtacacagttgcccgcgctggtcagaatggataccatcaccgtactgagatgaacaaagaggtttacaagatcggcaaggctggacaggaaagccatgatgcctcaactgagttgaca

SEQ ID NO: 452591 - DNA, 730 bp, Sorghum bicolor
cgtccgaattttttatctgcaccattgtcatttggaattgagaaagacacagaaggatggccatatatcgcatttgatctaaatcctgctgttgtaaagtcagctagaaaatcaggatttcgtgtgctatacggagatggttcacgcccttcagttctgcaatctgctggcataacgtttccaaaagctatcatggttatgtatactggaaaggaaaaaacaattgagtctgtaaacagattgcggcaagctttcactgcggttccaatatacgctagagctaaagacctctcgcatttgttagatcttaagaaagcaggtgcaacagacgttgtcctggaaaatgctgagactagcttgcagctaggttcgatacttttgaaaggactgggcgtcatgtctgatgatgtatccttcttgagtaagcttgtgagagactcaatggagctgcaagctcaggaagcactaaaagacattggggaccaagatgttgatatcatgaagcctcttcaggtaagagtttcagatttagtggatagcaatggtaacagttcaagaatggtagcccaggagcaggcgttaagtctaagcaggcgcccagatgtaaaggcaataaaaccggcagtgacaaacaggatacctgatatgaaggtggaaaatgaaaatccaggatatgactttgacagagtagaatctgaagatgggtggcatactgtctattggaatctga

SEQ ID NO: 452592 - DNA, 779 bp, Sorghum bicolor
  unsure (1)..(779): unsure at all n locations
cggtcgccacgcgccggagctgtcgcccccagaaataaagcagctcctccggggggcggcgaaccacttcccatcgccaaaaccctagccccgatccggtcgaggagcgctgcttccttgccatggcgagcaccactagccaggcgagcctcctactccagaagcagctcaaggatcttgcgaagaaccccgtggatgggttctcggcggggcttgtagacgatagcaacgtcttcgagtggcaggtcaccatcatcggcccgcctgacaccctatatgatggaggctacttcaatgcaataatgaccttcccccagaactatcccaacagcccgccatcagtaagatttacttctgagatgtggcatccgaacgtttatcctgatggacgtgtttgcatctctattcttcatccacctggcgaggatcccaatggttatgagcttgcaagcgaacggtggacaccagtgcatacggttgaaagtataggtttgagcatcatttcaatgctttctagcccgaacgacgagtctccagcgaatattgaagctgctaaggattggagagaaaagcgggatgagttcaagaaaaacgcaaggcaatgtgtccgcagatctcacgaaatgctctaaggaggaacatatggggagttgaacgagtgctgcaaccggtntgccgccattcacagccaattacctcgtgccagcattcttttgcttttcccctgtatattttccgttcagtgtcattcgtatggtggtgttgggtctcctcggacg

SEQ ID NO: 452593 - DNA, 1273 bp, Sorghum bicolor
cgtccgggccaatcccgagcagaggaccgaaacctcgagcgctcgcgccggcgaccacacgacgaagaggaggccgcggcacgagagcgccccagggtcccccctctcgtcgcagcagcagcagtaaggggaagatgtcgtcggcgttcagcggcgatgagaccgcccccttcttcggcttcctcggcgccgccgccgcgctcgtcttctcatgcatgggggcggcgtacgggacggccaagagtggcgtcggcgtggcatccatgggtgtcatgcgccccgagctcgtcatgaagtccatcgtgcccgtggtcatggctggtgtactcggtatctatggcctcatcatcgctgtcattatcagcactggaatcaaccccaaggccaagccgtactacctctttgacggctacgcccacctgtcgtctggccttgcctgtggtcttgctgggcttgctgcaggcatggccattggcatcgttggtgatgctggtgtcagggcaaatgctcagcagccaaagttgtttgtgggcatgatcctcatccttattttcgccgaagcgcttgccctctacggtctgattgtcggcatcatcctttcatcccgtgctggccaatcccgtgcagattaggcacacatttcagatgtcaacgccttgcggactgttaccgttacctggtcgtagctgggtcatgttctatatccatgagacaagaagctggagcactttttagaggcttatttttttatgctgtctagttttcgttcttctgttgagttgagaaaacaagaaaacttgtgtaaccatgggtggacttttcccttgtggtgtcattcttttccccgtcgtggtggtgggctgtggttgatgcttctttctgcacagtttttgctggggctgtaatctggtgaataagcgagtgcatgcaacgcaatgggagctgaagactcttgttcaatcctcttgttcagtcgttttctgtgatctaagaaaaaaaaaaaaaaaaagcctctaaaaagtgctccagcttcttgtctcatggatatagaacatgacccagctacaaccaggtaacggtaacagtccgcacagcattcacatctgaaatatgtgcctaatctgcacgggattggccagcacgggatgaaaggatgatgccgacgatgagaccgtacagatatgtggattgcaaatataggtgattcaagagctgttgtgtgtgaaagaagtactgctagtcaacttactggtgatcatgaaccccataccac

SEQ ID NO: 452594 - DNA, 973 bp, Sorghum bicolor
cgtccgcccacgcgtccggcaacgacggacaaccgaccatgaagccatgactaatatgaagacagagttcatgtccctctgggatggcttcaccactgtccggaatgctcgtgtaatggtcctggctgctacaaataggccttctgagttagatgaggccatcctaaggcgctttactcagatatttgagattggaattcctgttcagagtgaaaggagcaagatacttcaggttgtgttgaagggagaaaatgtcgagcctaatattgattacgatcacattgcaagattgtgcgagggctttactggatcagacatcctcgagctgtgcaagcaggcagcattctaccctattagggagctattggacaatgagaaaaatgggaggcaattagataaacctagacctttgagacaatcagacttggagagagccctatcaacgtctagaaagggcaagaaggctgcaagttcaggactgcagtcacccttgtgggttcagccgacagattcagaagacgatcaggtacagaacgcgatctttgagatatctaagctgatgtctcgaatagttcagaacagtcagtcagaaccgcaagagccttcttcaccttaatctaatccttttgctagatctcgtgaaaatctacagtggagtaaacgcaggcattacgtcgataccgttaggttttcttatgcagcttgcagaggttcagcatatgtattatttctttttgcgtggcgatgctgcacctggttttttgaagctaactgcagctggcaaagtggcaagtgtgccatagagtgtttaagttgatcattcaaagttcatgcccctatgggcagcaaactcagaactccatagttgtctggccaacaattggtcctggttgccttgtattttattttcagtttaactaatctagggtatcgaattacgccgtagtaatgcagaaagggccccttaagtctc

SEQ ID NO: 452595 - DNA, 583 bp, Sorghum bicolor
cgtccgcccacgcgtgcgcccacgcgttcgcgcagagctctcctcttctctctcgtcggcacacccgagctcgcgctctccttcctcgtccgaggtccaagtcactgcattgatggcgaccgacgtggctgagactcccgcgccgttggcggaggcggcccccgaggcacccgcggaggctccggcggcgcccgccgccgaggcgaagccggccaaggctaagaaggccgccgcgcccaggaagaagaccaacccgacccacccgccgtacgccgagatgatctcggaggcgatcacgtcgctcaaggagaggacggggtccagccagtacgcgatcgccaagttcgtggaggacaagcacaaggacaagctccctcccaacttccgcaagctcctgctcgtgcagctcaagaagctcgtcgccgccggcaagctcaccaaggtcaagaactcgtacaagctgcctgccgcacgcgccccggccgccaccaagcccaagcccaagccgaaggccgcgcccaagaagcccaagactggcgcaaagaagcccaaggccgccgccaagcccaaggcgaaggcacct

SEQ ID NO: 452596 - DNA, 755 bp, Sorghum bicolor
cgtccggagctggacccgctgctgaagccgaagcaggacaggtacgcgctccgcacgtcgccgcagtggcttgacccggccagcgccagcctgccgctgatgacgaagctgcgcgccgtgctggtggaccacgcgctcagcagcggcgacgcggagcgggagccctccgtgttctccaagatcaccaagttcgaggaggagctccgcgcggtgctgccacgggaggtggaggccgcccgcgtcgccgtcgccgagggcaccgcccccgtggcgaaccggatcgcggacagccggtcgttcccgctgtaccgcttcgtccgcgaggagctcggctgcgtgttcctgacgggcgagaagctcaagtcccccggcgaggagtgcaccaaggtgttcaacggcatcaaccagggcaagctcgtcgaccctatgctagagtgcctcaaggagtgggacggcaagccgctgcccatcaacgtcgtcaactaagacgccgccgccatccgtgcatggccggaggaggaggagaagaagaagaggaggaaaatacatgaaaaataaaacttgtaccccgtgtatgtccagaatcgtgcgtgtcgtcgtttcttcgttgttgacttttggttgtgattgatcgatccgtatgtgtgtgtggcgttgttctttcttctttgtgtagctgccctgtcaccgcctgcgatgtgcatgccatggcagacagcgttttctaagatcctatatactgatgtattttgggg

SEQ ID NO: 452597 - DNA, 720 bp, Sorghum bicolor
cgtccggtaactccgtaacgacaacccggtcatcgacgtccaccgtggcaaggcgctgcacggcggcaacttccagggcacgcccatcggtgtctccatggacaacgcccgcctcgccatcgccaacatcggcaagctcatgttcgcgcagttctccgagctggtcaacgagttctacaacaacggcctcccctccaacctcgccggcggccgcaaccccagcctggactacgggttcaagggcacggagatcgccatggcctcctactgctctgagctccagtacctgggcaaccccatcaccaaccacgtccagagcgcggagcagcacaaccaggacgtcaactccctgggcctcatctcctccaggaagaccgccgaggccatcgacatcctgaagctcatgacgtccacgttcctgatcgcgctgtgccaggccatcgacctccgccacatcgaggagaacgtgaaggccgcggtgaagaactgcgtgacgcaggtggccaagaagtcgctgagcctgaacgccaggggcgggctccacaacgcgcgcttctgcgagaaggacctgcagacggcgatcgaccgggaggcggtgttcgcgtacgcggacgacccgtgcagccccaactacccgctgatgcagaagcttcgcgcggtgctgatcgagcacgcgctggccaactgctacccctagcgccgtctggagacgttcatttt

SEQ ID NO: 452598 - DNA, 352 bp, Sorghum bicolor
cgtccgcctacatcgtggcgctgtgccaggccatcgacctgcgccacctcgaggagaacatcaagacgtcggtgaagaacacggtgacgcaggtggcgaagaaggtgctgaccatgaacccgtcgggcgacctctccagcgcgcgattcagcgagaaggagctcatcaccgccatcgaccgcgagggcgtgttcacgtacgcggaggacccggccagcgccagcctgccgctgatgacgaagctgcgcgccgtgctggtggaccacgcgctcagcagccgcgacgcggagcgggagccctccgtgttctccaagatcaccaagttcgaggaggagctccgcgcggtgctgca

SEQ ID NO: 452599 - DNA, 631 bp, Sorghum bicolor
ccgtccgcaaagtgcagacacatacactcacagtgtcggaacttggaaggggcagaagcagaaaaccgtatacctttgcagaatgaccgggtcccaatggagattccggtgatcgatctcagcggcctcaacggcggcgacgagcagaggtcgcggacactggcggagctccacgacgcctgcaaggactggggcttcttctgggtaagcaacaacgaatcatacatatatacatatatagctattgacaagttctttttacatgcgtcgtgctcatcaccaatataatcatctcgcgccgctcgatcgcaggtggagaaccacggcgtggacgcggcgctgatggacgacgtcaagcgcttcgtctacggccactacgaggagcacctggaggccaagttctacgcctccgacctcgccaagaacctcgacaccgccaccgacgacggcgaggctgaggtggagccgccctccgacaagggtggactgtggagtccacctacttcatccagcaccaccccaagaccaacgtcgccgacttccccgagatcacgccggcgtgcagggagacgctggacgcgtacatcgcccagatggtgtctctggcggagcgcctgggcgagtgcgtgag

SEQ ID NO: 452600 - DNA, 598 bp, Sorghum bicolor
cgtccgatcgcaagcactcccgcagaaatccccaccgaaattcctgtctcccagatcgccgcccttctcgccgtccgcaaaccctagtggacaaccgagcgcggagtccgcggggtcgcggcggcggcggcccgcgactccactaccggtggcggactcgctccccttgacagacggcagcacaaccttgctcccctcgaccgacgatggccctgctccctgcgaccatggtggcatcaggccttctgccggccgctgctacctcgtcgcggttgcggccaggccgggggatggtgagaagcagcgcgtggggcggatccagcacggtcgacttggatctggcctctggatgcgagaggtggcgacttctgagttactcgatctcggttgaccatctcgctgtcgccggagccatcctcccggggaagctcgacggcctcatactccccgactcctccgcataccactgcaatggtacctcctcctgtcgttgacctaggcagccagttctgttcttggatataaatgctgacgagagctctgcatcataacaggcagtaggtctagggcgcactggatctttggttgctggtgcgct

SEQ ID NO: 452601 - DNA, 978 bp, Sorghum bicolor
  unsure (1)..(978): unsure at all n locations
cgtccgcccacccccttctccgtgtctctccgcagcggcgggagcggttctccggccatcaccgggcgcatccggaaaaactatgaggaggtacagccccccttatcgtagtccccccaggagggcatatggtggcagaggaagaagcccccctcctcctaggagggggtatggaggacgcaacaaagagggcagtggaagccttttggtccgcaatatcccattaagcgtcagagcggaggagcttcgagttccttttgaaaggtttggccctgtccgggatgtttacattccaaaggactattactctggggagcctcgaggatttgcctttgtcgagtttgttgacccttatgatgcctctgaagcccagtatcacatgaatcgccaagttttctttggccgggagatagctgttgttcttgctgctgagtcgcgaaagaggccagaggaaatgcgcagcaaagctagagtcagaggttactctggtcatgaaggtcgccgatcttcatattatgggcggtctcggtcccgttcccgctctcctcgctataggggccgtcctcggtcaagatcatactctcctgctccaaggcggcgagatgactactcagcttctccaaggagaaaggaagcgcatcgcacatctcctcccaggcgcccgccaaaggagcatgacgaagataagaagcggaggtcctactctcctgccagtagagatgatgctgacaatggttatgagaagaggtcgcccccagcagacagtaatgggtcccctccgcaccgcaggtcccccaaggaggagtactcaggctcacctcccggatcccgctccaggtccgccgacgaatctcctgttcgcagtgacctgactgaccgtggatgctacaaaaatgatatgcacatgaccgtgtctctncggcacgagtcagtccaatgcctttggcaggccgagcttactattacccccttttgggg

SEQ ID NO: 452602 - DNA, 502 bp, Sorghum bicolor
cgtccgcggacgcgtgggaaaaaaaaaacttgcagcggcatccaccaccggagctgccatcatcggcccgtccctccgtgtcaaccccctcctcagaagttctatttgcagttcggcccctggccggtccgcccggccaccggaaggagccgctcgccggaggaaggcccccctgtctccttgccctgcggcgggttcatggggttctcgctgtaccccatgaagacgtccacgcggctgctctggagcactagcttcttccgccataagctcagctcctcctcctgcttcctctgagcccgccacgatcgtgttgtcggcggcggcggcggtccgctgctgctgcgcggtcctagcatccgttcaagtttgtgtttgtgtttgtgtttgtgttcgtgtgcgcgcacgcgcgtaccggcgtacgggtttcaagattgggttttgttgcgttcttggggagaggaagggactagggcgcgggcaagaatcagcatagcatgga

SEQ ID NO: 452603 - DNA, 359 bp, Sorghum bicolor
cgtccgcggacgcgtgggccgatgacacagcggactgagataatatatcacctaacctagtgtacatacataacacattctgtgtaactagttagccgtcagctaacagcatcgtgcaggtctcatgcatctcctagtacagtcgaaccgctcaggggattaggacccatttcagtccaacaatcccttctgctgattttatatctgttgtaccatctgtacaatatactgtgtatatatactcgatcgttgggaggcctttcacccctaaatccaaacactcttacgactcttctcaaaaaatatagagtattctgaatatttattatattaatattataagatattttacttataaa

SEQ ID NO: 452604 - DNA, 560 bp, Sorghum bicolor
  unsure (1)..(560): unsure at all n locations
cgtccgagtcaaaagcgaaaaacctcagaaaaaccccaggaaaccgcattatattctcacccaccactgtcctccgatccgttgcaactccactcggccgccccctcgcacccacccaccttgatcctctggtccgttggtagcctgatcgatccatggacacccacgtcggatccgtgaacggatcggcggcggcgccggcgtcgaacgacacggtgggctgcccggcgtcggcgccggggtgcccgatggcgtccacgccggcgcagcccgcgtcgacgctgtcggcgggggaggcgtcgctggggcgccacctcgcgcggcgcctcgtgcaggtcggcgtcaacgacgtcttcgcggtccccggggacttcaacctcacgctgctcgaccacctgatcgccgagcccgggctgcgcctcgtcggctgctgcaacgagctcaacgccgggtacgccgncgacgggtacgcgcgcgcgcgcggcgtcngggcctgcgccgtcacgttcaccgncggnggcctcagcgtgctcaacgccatcgcgggcgcctacagcgag

SEQ ID NO: 452605 - DNA, 630 bp, Sorghum bicolor
gcgtccggcggacgggttcgccatggggtccgagggatcctcgggtccggttgtcgttcccagaaactttaggctgctagaagaactagaacgtggtgagaagggcattggtgatggtactgtgagctatgggatggatgatgctgatgacatatatatgcggtcctggacaggaactatcattggtcctcccaacactgttcacgagggacgaatctatcaattaaagctattttgtgatacggattatccagataaaccaccgactgttcgattccagactcggatcaatatgacatgtgtgaaccaagaaactggattggttgatccaagtctatttcctatgcttggaaactgggaaagggaacatacaatggaggacatcctggttagcttaaaaagggaaatgtcaactcctcagaatcgcaggctgtaccaacctcatgaaggtaatgaggatcaaagagtagagcagaaagggctgtctgttagatgtgtcatcatgtaatctatgtgcattgcaatgtacagcattgaattgagtagcgagatgccaaggtgagagagcctctcaggaaatcctgtaattcaccttgatcatgccaccatcacaataaagtgtcgatgact

SEQ ID NO: 452606 - DNA, 384 bp, Sorghum bicolor
cgtccgctgctccttcccccaactcgcggtctcgcgctcaggctcggtcccggggatcggatcttccgcgcgtcggcggctccccctcggcggcgtccagcgacggaagggcagtcccaggctcggcggcggcgtcggcggctcccccaccttctctcgccagtcgcctcgcgccctcgcccgcgtcctccgcgcaccggccgacgaccctgcgtggatgccaattttttattgagaagttgaagactactagcttctttgatcctgaggtgaagaagtaatgatccgcccaggctcaaaggagtcacaaaattatgatatcaataatccaagagttcatcctcaaccaattgatgagaacatgaatcagaacggggactcaat

SEQ ID NO: 452607 - DNA, 767 bp, Sorghum bicolor
cgtccggcagcaacgatacagcctaaaagaaggaattcctagtttccttacgaatgttgctgcaatgattctaacaacaggaaagtatcttaatgttatgagagaatgtgggcacaatgttcaggtttccttgtcagacaatactaagcttatgagctttggctcaaaccaccaatatcttgaatgtataaaatctgcatatgattttgcaagtggtgaattgttgactctgatgaaagataagtatgatctcatcgggaaactgcgatccctgaagcgctatctactccttgaccaaggtgactttttggttcattttatggatattgctcgagaggagcttacaaagaaaccagaagaaatatctgctgaaaaacttcagtctctgcttgacattgctttgcggagtactgcagctgcttcagatccaagccatgaggaattaatctgctgcgtggaaagaagttccctccttaagaaactgggcactctgaaagacttggattgtgcttcccctgcagataagcttgctgcagcagatgttgatcagtcaatgcaattaagcattaccgggtttggaaacattctgccttagcaataaggtccagtggcctttatctcttgtaatttcaaggaaggctttgacaaaataccaattgatctttcgcctattgttccactgcaagcatgttagtcgccagctgtgtgcagcatggcaaatacaacaagtattccggtctgtcaagattctagggacaccaatttta

SEQ ID NO: 452608 - DNA, 1012 bp, Sorghum bicolor
cgtccgcggacgcgtgggcggacgcgtgggagactccaggcgccctctaactactttctccccagtccatttcgaactctctagacgcctcctcggtcctctctgttcgccgccgccgacccgtcctccctcctcccccctctccacgccgcagaaatggcgctgccgaatcagcaggtcgtggattaccccagcttcaagctcgtcatcgttggcgacggtggaactggtaaaaccacatttgtgaaaaggcatcttactggcgagttcgagaagaaatatgagcccactattggtgtggaagttcaccctctggattttagcactaactgtggcaaaatccgcttctattgctgggacactgctgggcaagaaaagttcggtggcctcagggatggctactacattcatggtcagtgtgccatcattatgtttgatgttacttcgaggctgacatacaagaatgttccaacatggcacagggacctgtgcagggtgtgcgagaacattcccattgttctctgtggtaacaaggttgatgtaaagaacaggcaagtcaaagccaagcaagttacattccacaggaagaagaacttgcagtactatgagatttctgcaaagagcaattacaactttgagaagcccttcctttacctcgcaaggaaactggcaggggatcagaaccttcactttgtcgaagctgttgctctgaagcccccggaagtgcagattgatatggccatgcagcagcagcacgaagctgagcttgcagctgctgctgcgcaacccctccctgatgacgatgatgacctgatcgaatagatgttctcaatggccttgttgatgtgagaggggactttttataagaattcatggtggctcaaacctttttagagttaggctttactctcttgatgtatccatgttgagaatgaaacatatgtatcctgttattgacgagggtttttggtgaaccagatcgttgaggtaatacagcatacgtttcagcgct

SEQ ID NO: 452609 - DNA, 464 bp, Sorghum bicolor
ccggaaccccggtcgccacgcgtccgaatcccaaagccgcctcctccctcgccgccgcgctcgcaggaaccagcgacatgggcgtctacaccttcgtgtgccgcaacaccggcggcgagtggactgccaagcagcactccggcgagctcgaggcctccgccgccaccccctacgcgctgcagcgcgccctcgtcgctgctgcatccgcggccgactccgcctccggcgtccagtcgtccttctccatggtcacccccacctccgccgtcttccaggtgatcggccggtgctgttggtggtggtgcaatgatggttagcggcggtggcggtgctgccgccgcatcaggtggtgctgcagctgaggctcccaaggaggagaagaaggaagaggagaaggaagagagcgacgacgacatgggattctccctgtttgattagagctctgtcactgtcatttggctccc

SEQ ID NO: 452610 - DNA, 751 bp, Sorghum bicolor
cgtccgagaaaccctaccccgcgcagccgcagccgcagcccgtcgccgccccgaactccggcgcgtgcccgagctccaccagccgctgccgccatgtcgctgatcgcgggggaggacttccagcacatcctgcgtctgcttaacaccaacgtggatggcaagcagaagatcatgttcgccatgacctccatcaagggtgttggccgccgcttctccaacatcgtatgcaagaaggccgacatcgacatgaacaagcgggctggtgagctgtcatcagatgagcttgagcgcctcatgactgtagttgccaaccctcgccagtttaaggtccctgactggttcctcaacaggaagaaggattacaaggatggtaggttctctcaggttgtttccaatgcccttgacatgaagctcagggatgaccttgagaggctgaagaagatcaggaaccaccgtggtctgcgtcactactggggcctgcgtgttcgtggccagcacaccaagaccaccgggaggcgtggaaagactgtcggtgtgtcaaagaagagataagctccttgaggcatattggtcttatcttgagtttcttttgtatgcagacatttgtgctttgatatgccacaggatgtttattatctgtaggatagatgagagttccgctttacaagacttctatatattgtagcaatcttttgctgcctgtgttccaagagggttgaattgaatgttctgtgaaacgggtaaaagtttt

SEQ ID NO: 452611 - DNA, 200 bp, Sorghum bicolor
cgtccgcggacgcgtgggtcagaacttgcgcaatggtgtttattgttccctgtagtcctgcaacaagcatttttgtttgagttttgagctggagacatggagttgatggattatcttaactaaagatgtggtgtctgttgaccttgctctttttgtcccttgattttgtcagtccttaatggcttcccttggtttaaaaa

SEQ ID NO: 452612 - DNA, 1108 bp, Sorghum bicolor
cgtccgcatatacctccgccgcgtggacgtcgcctgcgcgctcgacgtcaccggcgtaccggccctagtccaggcgcgcggccaccgcatcgagaccgtcccagagatgcccctggtcatctccgactcggcggagtccatcgagaagacctcccaggcgctcaagatcctcaagcagatcggcgcctacgccgacgccgagaaggccaaggactccgtcgccatccgccccggcaaggggaagatgcgcaaccgccgctacatcaaccgcaagggcccgctcatcgtctatggcaccgagggctccaaggtcgtcaaggccttccgcaacctccccggtgtggatgtcgccaacgtcgagcgcctcaacctgctcgacctcgcccctggtggccacctcgggcgctttgtgatctggaccgagagcgcgttcaagaagctagaggaggtttatgggagctttgacgcgccctccctgaagaagaagggcttcgttctgccgaggcccaagatgaccaacgctgacctgggcaggatcatcaactctgacgaggtgcagtctgtggtgaagccactcaacaaggaggtgaagcgcagggagaagaggaagaaccctctcaagaacatggctgctgtgctcaagctcaacccctacctcggcactgcccggaagatggccacccttgctgaggctgcccgtgtcaaggcccggaaggagaagctcgactccaagaggaccaagcttagcccggaggaggctgccaaggtcaaggctgcgggcaaggcatggtacaagaccatgatctcagacagtgactacactgagtttgagaacttcacaaagtggctcggtgtgacgcagtgatctgcgtgagttctagttaagttttgagtagtagtgttgctgaacctgtcttgagaggaaagaggacctatcaatctgttttatcctgcatcatcgtaacaagttaccctgtgggattttgagacgtttcatatccgttttgtttgtgcatttccgtgagaacatagtatttgcatatttgaaccagttatctgaattatgcttgggatatgtgcacttgttgctttctggcaaccttccctg

SEQ ID NO: 452613 - DNA, 648 bp, Sorghum bicolor
acgcgtccgcggacgcgtggaggacaaggaggcactagtcaagtttatagaggctgtttggcaaatggcaaggagctagcagtgaagatcctgaagtattctgatgaggtactgaaggagtttgtgacagagattgagattctcagttctctcaaccacaagaatgtgatatccctcgttggtttctgcttcaagaatgatgaccttctgttagtgtatgagtacttgcaaagaggcagcctcgaagagatactgcatggtgaaaaagaatgcaagagcatatttggttggactgagaggttcagcgtggctgtgggagttgctcatgctctggattatctgcatagtgataacaacagtcgcccagtgatccatagggatgtcaagtcatcaaatattctcatctcagaatgctttgaaccaaagttatcggactttggtctcgcagtctgggctgctgatgtaacttcccagatgacatgcaatgatgttgcaggaacttttggatccttagctcctgaatacttcatgcatggcaaggtgaacaacaaaattgatgtgtatgcttttgggtgttggccttctggagctcatctctggcaggaaaccgctttgcactggttgtccaaaagggcaggagagcctagt

SEQ ID NO: 452614 - DNA, 684 bp, Sorghum bicolor
  unsure (1)..(684): unsure at all n locations
cgtccgcacgaggctcccaaacccaaattaccactccctccaaatcctcatttccctccacgagcaccctcgactcgactccatggacggcggcggcgcgaaggcgaagaaggcggcggcggggcggaagctgggcggcggagggccgaagaagaagccggtgtcgcggtccgtcaaggccgggctgcagttcccggtgggccgcatcgggcggtacctgaagaagggtcggtacgcgcagcgcgtgggcacgggcgcgcccgtctacctcgccgccgtcctcgagtacctcgccgccgaggtccttgagctggcgggcaacgcggcgcgcgacaacaagaagaaccgcatcatcccgcgccacgtcctcctcgccatccgcaacgacgaggagctcggcaagcttgctggcgggcgtcaccatcgcccacggcggcgtcctccccaacattcacagcgtgcttctccccaagaaggtggccgagaaggcggccaaggagcccaagtcgcccaagaaggccgccaagtcccccaagaggcatagagtgctctccagtctcctctcttaagagggaggtccctacattaccattagcgccgtgctggtagattagatcatgtntagtgttactaccctctgtacgttcttgttcttgctgctaattggaatggttatctagtact

SEQ ID NO: 452615 - DNA, 688 bp, Sorghum bicolor
cgtccgcgcactcctccaatctccagagccctttgtcctctgtcccgagaagcaactcgcagcacagccgcggccatggactccaccgccgccggagcgggagggaaggcgaagaagggagcggccggacgcaaggccggcgggccgaggaagaagtcagtgtcgaggtcggtgaaggccgggctccagttccccgtcggccgcatcgggcgctacctgaagaagggccgctacgcgcagcgcgtcggcaccggcgctcccgtctacctcgccgccgtcctcgagtacctcgccgctgaggttctggagctcgccgggaacgccgccagggacaacaagaagacgcgcatcatcccccgccacgtgctgctcgcgatccgcaacgacgaggagctcgggaagctgctgtccggtgtcaccattgcccacggcggtgtgttgcccaacatcaacccggttctgctgcccaagaagacggcggagaaggcgtccaccggtgggagcaaggaggccaagtcgcccaagaaggccgctaagtcccccaagaaggcatagaagggtgtctatgcttatctgatgtttaccgtcgtattaccagtgatgtgttgtagatgggtgtggatggagattaaccggtcttgtagtatgttatctttaattcccagtacaagaaattcctagtttcttg

SEQ ID NO: 452616 - DNA, 564 bp, Sorghum bicolor
  unsure (1)..(564): unsure at all n locations
cgtccgtttttcgcggagagagagagagaggtggaggtgaagggaacgcgagagagagagagagagaggagagaaacgaagagaggatcgggatggcggcgctgcgatctaggatggcgatgttgggccgccgtagctgcggtccctccgtcgcatccatgggcggaaaagggatggagatccaccaggttttccgtcctgctccgccaccgctccgccccgcggccgtccgtaacctcgagagctggcggtgtttctccactgggggtggtgagccgaaaggcaaagcagatagtttcatgcgtctttggcaatgggccaaatatcgtgtggaaaatgcaggtccagttgccaagaccagggccgtcagtctgtatgtattggtggctatagggacacctacattatatatgatgaacacagtaaggaactggagaccgtccccttgaagacaagaatggatcaccaaacgacctggctttatttcagtggtgctatttatcctagttgtatcctgaagtattattagttcgattagctagcanacttctgaatctgaactta

SEQ ID NO: 452617 - DNA, 839 bp, Sorghum bicolor
gacaccacgaaccatacagaaatatgatgattaacgaagcaacatcagataacggaatggtcaggtagaacagactaccagacacaacggacttcacaaggtaatacatatgagttcaacaggacacaatagccctcaaaagtccattcatacttgctgggacagagtgacttgactggttatttaggtgataacgatttttggggtcggcacattcaccagtttggccagcttgtagccacacttctagcccatggcatacttctgcgtccaggagcgtgcagtggactcatacttggccctgtcagtcttgtacatgtgagcaatctcagggacaagaggatcatcagggttcgggtccgtgagcagcgaacagattgacaggagaaccttcgatatggttaaagcagggctccactgttccttaaggatgtcaaggcaaatgctgccgttgctgttaatgttcgggtggaaaaccttggtgcgaaaagacacctttggtggcttgaaaggataatccggtgggaagtgaatgttcaccaagaataccccacctgcaaatgggctgtccgagggccccatgatggtagcttgccaatggaacatgtcctcaccaacaggacctgcactgcaggaggtgggcgggtccttctgcaggtccttcaactccttcaggatcctcttcgacgccatcgatcaaacccgatcggtgccgggggggatcaggcgggggtggcgcgggatcggtgcagcggccgcctccctctcttctccgaggcgcgcggcggcgacggcgtgtcgcgggggctcgggccacaaacgggaggaagcctcgtgcc

SEQ ID NO: 452618 - DNA, 532 bp, Sorghum bicolor
cgtccggtgcgaccaggcgcgaaccctagccgagattagattggaggcgagcgccatcaccggaggagcaggaggaagaggacgacacgatgctgcgggttgcggggagaaggctctcgtcttccctctcgtggcgccccgccgcggcggcggccaggggccccctcgccggcgctggcgcccccgaccgggacgacgactcggctcgcggccggagccagccgcggttctccatcgactcccccttctttgtcgcttctaggggtttctcttcaactgaaacacttgtcccaaggaaccaagatgctggctttccagcaactgtggctgctgtgaagaatcctaaccctaaggtggtttatgatgagtataaccatgaaagatatcctccctggagatcccagcaagcgtgcctttgcttactttgtcctaagtggggggaggttcatatatgcatcactgctgcgtctcctcgtattgaagtttgtcctgagcatgtcagcaagtaaggacctgctcgcccttgcctcac

SEQ ID NO: 452619 - DNA, 742 bp, Sorghum bicolor
  unsure (1)..(742): unsure at all n locations
gtacccgctcgccaactacacgttcggcaccaaggagcccaagatggagaaggacacctccgtcgccgaccgcctcgcccgtatgaaggtcaactacatgaaagaaggaatgcgcacaagtgttgaagcaatcctattggtgcaagagcacaaccaccctcacatactgctcctgcaaattggaaatacattttgcaaacttcctggtggacggttgaagcctggagaaaatgaaattgagggtttgaaaagaaagttgtgcagcaaacttgctgtgaactcgccttcctttccacctaactggcagattggagagggtgttgctgtgtggtggagaccgaactttgagactgtgatgtatccttactgccctccacatatcaccaagcccaaggaatgcaagaaacttttcattgttcacctgtccgaaagagagtattttgctgttccaaggaatttgaaactgcttgctgtcccactgtttgaactctacgacaatgttcagcgatatgggcctgtcatctccaccatcccgcagcagctttctaggtttcagttcaacatggtgagctcttagggtgatgacatgacagcttatgtggccaaggcagctcttctgttgacctctgttgagaacttgagatggatcattgacatgctgagctagctgatgaacgtaccctgactgattntatttcattgtgctggatttttttaatctagattactactatctagacat

SEQ ID NO: 452620 - DNA, 820 bp, Sorghum bicolor
cgtccgtggatctatcataagattttaaagtttaattcataagtgcagaacaactgttagaatcatagttatcaggttggctttgtccattttgtttgctaacactgctgtagcaacaggagcagctgcaacaagctctggcaattagaatgtcaaaatgtagccaggtagcaaagtccatagtttctgatgtaattgatatatgttcataataagcatataacctgctctggcaatttttgttctgaatactagaactataatggactggacagttaatgcatataacctgctaatatatgtcgctttgttatgcattttgtcaacctgctggttttgcattaatcatttcgcaccaagaactaattgtgctgccataggaagagggggaggctgcatatgcatatagttatccttctagtatcagcagtggccttcacaattttgaagtttatggcatagattacaaagcaccatggcgtggacctatttcccggctgtcaagtactgtaataaatcctattactctatttggagagcctgtcagtttcaaacatttcttttcaatctggtattgattgctactgcctactaagtcttttttgcttaagttatatatatctttgttttggcagtacacttatatgcatagaatgtgtgctatttttctcccactcaaccgttacagtctttacattggactttcaggatctgagctttttaaagaatgtcagtttgggctgcaatgaggtgagttcttgagcttatagaatcaatgaatgaagcttttcgttcacaaaaaaaaggaatgaacttttac

SEQ ID NO: 452621 - DNA, 341 bp, Sorghum bicolor
cgtccgcgcgctgtggacgctggtggtcctgtcggcggcggtagcagcgctggcgacggagtggcgcgtggcggcgacggcggcagcggaggcggcgaacgaggtgctccgcgcgcaccagctgccgggaggcctgctgccggcggggatcacggcgttccatcacgacgcggccacggggcggttcgaggcccagctggaggcgccctgcaccgcgcgcttcgaggtcggccttcgctacaacgccaccgtgaccggtgtcatgagccccggccagaacgccgccatctcgggcgtcggcgcgcagggacctctcatgtggttccccagtcacgacatca

SEQ ID NO: 452622 - DNA, 510 bp, Sorghum bicolor
cgtccggccaatttcaagtgccgacgattgggtggcattgagaaggcatttcaagaggtaaaggccagaggttacaatcctgacctcgtcatattcaactccatgctttcaatgtatgcaaaaaacgggatgtacagcaaggtcaccgagatcttcgattcaatcaagcagagcgggctaagccccgacctcatcacttacaatagcttgatggacatgtacgcaaagtgtagtgaatcgtgggaggctgagaagatactgaatcagctcaaaagctctcaggtgaagcctgacgttgtgtcctataacacggtcataaacggattctgcaagcaagggctgatcaaagaagctcagaggatcctctccgagatgatcgctgacggcatggctccctgtgttgtaacctatcacacactcgttgggggatacgccagcctcggagatgttcagcgaagctaggagaggttatcaactacatgattcagcacaacctgaagcccatggagc

SEQ ID NO: 452623 - DNA, 1134 bp, Sorghum bicolor
cgtccgcccacgcgtccgtcgcacacccctaagattgagcttagcttagctccacactccagctccaagcacacagtcgtggttagagggccgtgaaaatgccgatcagcaggatcgccgtggggacccaccatgaggtgtaccacccgggcgccctcaaggcggcgttggctgagttcatctccaccctcatcttcgtcttcgccggccagggttccggcatggccttcagcaagctgacgagcggcggcgcgacgaccccctcgggcctgatcgcggcggctgtggcgcacgccttcgcgctgttcgtggcggtgtccgtgggcgccaacatctccggcggtcacgtgaaccctgccgtgaccttcggcgcgttcgtgggcggcaacatcaccctgttccgcggcctcctgtactgggtggcgcagctgctgggctccacggtggcgtgcttcctgctccgcttctccacgggcgggctggccacgggcaccttcggcctgaccggcgtctccgtgtgggaggcggtggtgatggagatcgtgatgaccttcgggctggtgtacacggtgtacgccaccgccgttgaccccaagaagggcagcctgggcaccatcgcccccatcgccatcggcttcatcgtcggcgccaacatcctggtcggcggcgccttcaccggcgcgtccatgaaccccgccgtgtccttcggccctgccctcgtcagctgggagtggggataccagtgggtgtactgggtcggcccactcatcggcggcggcctcgctggcgtcatctacgagctgctcttcatctcccaaacccacgagcagctccccaccaccgactactaagccggccgccggcgaccccccaccaagcttgggttccgttccgtgcgcagctagcagatcatcaattctctcgatctctggatctccccctcgccgtttagtttctctcgtgcatgtgcatgcatcgtcgaacatctcaagctgctactgctgctgctgcgccggccgccgctcgatcgtcgcatcgtttgctttcttggacaagtctgtaaccgtgaattccggacccgtttgcttctgtaaaatttgtgcatttgcctgagtattcaccgagttccacgta

SEQ ID NO: 452624 - DNA, 543 bp, Sorghum bicolor
  unsure (1)..(543): unsure at all n locations
cgtccgttctcccgctgtcccctacccgcgtgcgctccctctcgtggcggcgactgggtgaccgccgccgtacgccaggcgctcaggtctcgtcgacccctccttcgccggcgaatatcacccttcagggcaatgatgggaggctggggggtttcggatgggtacgagggatcaaagaggccacgaatgatgatggaatcgaatccctacttcgcagtgaacgcagggagtccattggatgtctcaaagagggccaggatggtggaaccaggtgctccctattttggggctgtgggaagcaacgctggtggtgccagcggtggcttctaccagcccttcaacagcaacttagctggtgcaggggctagcactggcatccaaagctttccaggtgtccggctgcgaggtctcccttttgattgcaccgacattgacatctgcaagttctttgtggngctggacatagtggattgcctcctggttaacaagaatgggcgctttaccggtgaggcgtttgtggtctttccaacagccatgcaagca

SEQ ID NO: 452625 - DNA, 517 bp, Sorghum bicolor
cgtccgagagaacatgtctatcaatcttgatcatccgaacctcagcggggaaacaactgtccaaaatgctgttacagaagttgctgccatggttggggagaatgtgaaactcagaagaggcttcatgctgtccacaactgcacatggtgttgtttcatcttatatgcatacctgtccccagccaggtatgggtcggattgctggattggtcacactagaagcagaagatagcattactctccttgatgctgtcaaaagtgttgggtcatctattgcgatgcagattgttgcaacaaagccattattcttatcaaaagaactggtttctgcttccgctctagaaaatgagcgtgaaatacttcgaacacaggccgaaagttcagggaaatcccaaatggctatggataaaatggtggaaggccgattgaggaagtactttggagaagttgtgctcatggagcaaaaatatgttttaaatgacaacacacacgtgaagaccgtgctgaatgacttgtcg

SEQ ID NO: 452626 - DNA, 524 bp, Sorghum bicolor
cgtccggtttaagcgagtgcgagggaggccggaggcgacgacgacgggcgccgcgtcggagaagaagaagcagccaactctcgtatatgtcttcttgccccttttccgatctggtggtggtcgtagcgctcatcgtcgccgtcgtcgccgtcctcctccgcgccctcgcctgctctagccgatctatgcgcaaggggctcaacggctggaacaaatcctcgtcgatgctcagggacgggttcggggtgaagtattccggattcctccacataaggccgtgcggcttctgtcgaggagactgacggattcgaccgatttgtgctcggctccgtcaaatttttgcactcagagaaagtgtcttgtttgttctttagtagttttcccccttagttttggcaattttggtgagagttctctccggctgaggagatagaagagagatggctccgttgaaccaccaccaggttctcatcaagaaggccctggcgaagaaacccaacagcaccaagaggatgactgggttt

SEQ ID NO: 452627 - DNA, 1052 bp, Sorghum bicolor
cgtccgccctcaccaaccgcagcagcgagactgagaatggccgcggcgccgtcgtccctcgcgtcctcccacctctcccgcctcgccgacctccgccgcgccgcggcggtggccactcccgccgtcccacagcagcttcgcatcggctgctcgcgccgccgcgcccagcgcgtcgtcgccatggctggatccggcaagttcttcgtcggaggcaactggaagtgcaatggaacaaaggactccattagcaagcttgtttctgaattgaatgctgctaccctcgaaactgatgtagatgttgtggtggcacctccattcatctatatcgatcaggtcaagaattcactaactggtcgcattgaggtttctgctcagaatgtgtggattggaaaaggaggagcctacaccggagagatcagtgcagaacaattggtggacattggtgttcagtgggttattcttggacactctgagcgtaggcatattattggtgaagatgatgagtttattgggaagaaggctgcatatgcattgagccaaaatgttaagcttattgcctgcataggagagctcctggaagagagggaagcagggaaaacttttgatgtatgttttacgcagatgaaggcttttgcagatagtatttcaaactgggccgatgttgtaattgcatatgagcctgtttgggctattggaactggaaaagttgctactcctgagcaggcccaggaagttcatgccgctgtacgcgattggttgaagaccaacgtatcacctgaagttgcctctagcactcgaataatctatggaggttctgtgaatgcagccaattgtgcagagctagcaaagaaagaagatattgatgggtgtcttgtggtggcgtgcctccttgaaggcaccggatttcgccaccattgtcaactcatagactgccaagaaaggtactgggtgacgcgccctgttagaaataatgttgcaatcagtgtgtcagctcatctgccacgccataaagcctgggattgttggaggtgcttcgcttgagaatgtgattg

SEQ ID NO: 452628 - DNA, 801 bp, Sorghum bicolor
cgtccgcccacgcgtccgcgacccacgcgtccgcccacgcgtccgattatcaaacacccaatggatcttggcacgataaggggacggctcagccatgggcagtacaggaacccgaaggagttcgctgaggatgtccggctcactttccataatgcgatgacatataaccccaagggtcaggatgtgcatttcatggcggagcagttgtcaggaatctttgaggcacagtggcctgagattgaggctgaggttaactacctcgcatcatgtcctccattgccgaagaagtttccacctccaccaattgacctgcgcttcctagagaggtcagattcgatgagacaccacatggcattggacaccaattcaagaccgatcagtcatactcccacttatacccggactccatcaatgaagaaaccaagggcaaaggatccaaataagagggacatgacaatagatgaggagcgtaagcttagtgagaacctccagaatttgccgccagagaagcttgatgctgttgtgcaagtcattaagaacaagaacctatcagttatgcagcatgatgatgagattgaggttgaaattgatagcatggatgctgagacactttgggagcttgacaggtttgtggccaactacaagaagaacctgtgcaagcaaaagagaaaggctgagcgagcgatgcttgccagacaagatgcagagttgcgtgcacagcaccagtaccagcaccagcaccctatacaaccaccgcaaccaatctcagacacccaagatcctgttggtgaaaaatcttca

SEQ ID NO: 452629 - DNA, 1456 bp, Sorghum bicolor
  unsure (1)..(1456): unsure at all n locations
cgtccgccccaaaataatccccacctcccgctgctcccccgcctccgccgcccgccatggcctccctcgcctcggcctcaacctcactcctcttcccgcaggccacctcatccaggagccgcgtccggctctccacctccctgggcttctccgcgcagccggcgcggctgcggagccgggcggcggcggcgggcgggcagcggcgcgggcgcctgctggtggtgcgcgcggcgaggggcaagttcgagcgcaccaagccgcacgtcaacatcggcaccatcggccacgtcgaccacggcaagaccaccctcaccgccgcgctcaccatggtgctcgcctccgtcggcggcagcgcgcccaagaagtacgacgagatcgacgccgcgcccgaggagcgcgcccgcggcatcaccatcaacaccgccaccgtcgagtacgagaccgagacccgccactacgcgcacgtcgactgcccaggccacgccgactacgtcaagaacatgatcaccggcgccgcgcagatggacggcgccatcctcgtcgtctccggcgccgacgggcccatgccgcagaccaaggagcacatcctcctcgccaagcaggtcggcgtccccaagatcgtcgtcttcctcaacaagaaggacatggtcgacgacgaggagctgctcgagctcgtcgagctcgaggtccgcgagctgctcagcaactacgagtacgacggcgacgacgtgcccatcatcgctggctccgccctcaaggcgctcgaggccctcatggccaaccctgccctcaagcgcggcgacaatgagtgggtggactacatcttcaacctggttgatgaagtggataactatattccagtcccacagcggcagaccgacctcccgttcttgctcgctgttgaggatgtcttctccatcaccggtcgtggtacagttgccactggccgtatcgagcgtggcaccgtcaaaggttgtgacacagtcgatatcgttggaatccgggacacccggacctgcaccgtcactggtgttgagatgttccagaagaccatggatgatgccatggctggggacaatgtcgggctgctactccgtggtatgcagaaggacgacattgagagaggcatggtgctggcaaagcccggctctatcacaccgcacaccaagtttgaggctgttgtgtatgtgcttaagaaggaagagggtggccggcactcacctttcttccctggttaccgcccacagttctacatgcggacaaccgatgtgacggngagtgtgactacgattatgaatgacaaggatgaggaggcgaagatgtgcatgcctggtgaccgtatcaagatgattgttcagctcatccagcctgttgcttgtgagcagggtatgaggtttgctatccgtgaggggtggaagaacgttggtgctggtgtcatcaacaaaatcattgagta

SEQ ID NO: 452630 - DNA, 404 bp, Sorghum bicolor
gtacaaggagtacgccgggagcttcgccgtcgtgccgggctccggcggcggcgagacgcggatcgggaaggtcaccctctgcatcaccgacgtgctgtacgacctcgacgctgaggacgacagctccgtcgacgtcgttatcgtgccgcgtacagatgccaaggtcaccatcaacgttcgccccatcatcaagaatcgaaactagcagcgtacgtacgtatgtgtactcgtgtgtgcatgtgtgtgtgtggtcattcgtcgaccatcgtttaatttcatgcagtcacgcatagcgcgcaccggtagggtggtgtgtactgtccgcaagaataaaagtactgtaccagctgattgtattgaggccttgtttagttcgtaaaatttttcaagattccccgtcaaaa

SEQ ID NO: 452631 - DNA, 870 bp, Sorghum bicolor
cgtccggaccaacttgaagctttgcaaaatttggtttgatatgggtgaatacggtcgcatgagcaagatattgaaggagctgcataaatcttgccaaagggaagatgggtctgatgatcaaaagaaaggcacacagcttttggaaggctatgctattggaattccaatggtcaccggaaccaaggattattaaaaggtttagggattggtttaaaaggctctttccattaaatccgcgattcctcatcccagaatcatgggttttaatccgggagtgtggggggaagatccttatggctgagaggcagtggcctgaggctgcgactgatttctttgaagctttcaggacctccgaggaagcaggcattcctcggagaatccatggcctaaattatctggtccttgccaatatgttgatggaatctgaagtgaatccttttgatggacaagaggccaagccgtacaagaatgatcctgaaatccttgcaatgacaaacgtgattgcagcgtaccagaagaatgacatcatggaatttgaaaagatcctgaagagtaatagaagaacaataatggatgatccttttatccgtaactatattgaggacttattgaagaacatcagaacccaagtgctgctcaagcttattaaaccatatactcgaatcaggataccattcatttcacaggaactcaatttcccagaagaaggatgtcgagcagctggtggtatcgctcattctggacaaccgtatccaaggccacatagatcaggtcaacaagctactagagcgtggagaaaggtccaaggggatgaaggagtacagtgccatcgacaagtggaacacgcagctgaagtccatttaccaaaca

SEQ ID NO: 452632 - DNA, 386 bp, Sorghum bicolor
cgtccgcccatctcttcttctccacagtccacactgttcacctcctctcccctctcctcctctcttcgatccccaaatccggaattgaccagcccaaatcgtcgtcgccccggccgcatggagtggacggccccgaagcccgcctcctcgccctcctcgcctccccttctctgggactggggagaccacgccgccacgggctcgggctcctcctccggcgacgccccggcgcggcgcggtgctgggaaggagcgggaggcgaagcgtgccaggggcgaggacggcggcgggggagctgaggtgaggtgtcaggtcgaggggagcggattggaccttaccaggggcatagacttccaccggaagcacctggtgtgcgagggccacac

SEQ ID NO: 452633 - DNA, 504 bp, Sorghum bicolor
gatctagaactagagcagtttatgatattgatcattatttcatgatcgtatgatatcaaccttgcaagttcatcaattagcagctgcaacactgatattcaaaacaaataattttgttcgacgtatgaccaatatctccaatgaatccaagaaatttgaagcattaggcaacacattgctatgcttgaaggcatgagcttccttatttcttcaagaagatttcagcattgtcacaaatgtcatcctggtactctgcctcgattcaacatgttgaacatcaagtatgcttgagaagttgagagcatgagcgtccttgtttcttcgaaaatatttcagcactataaaagagcttcactgttactctgcctggatgtaacaaggtagaaatactagtcactgaactgtatccagccactggagaagggttcatgaatcattcattatgcttggtgggagtagatatattccatgactacgagctagcagattaattggggtatcact

SEQ ID NO: 452634 - DNA, 769 bp, Sorghum bicolor
  unsure (1)..(769): unsure at all n locations
ggcacgagggataagagagggccctcggcttcccctccctcccctccgctccagctccagctcccctccatcctcggccaaaaatctgcggcgagctccgctccgatccgatccgatccgactgctccccacgccgttgaggccgagcgggggtccaggagaggagaggagaggcgcggcgccgcggctgccaccgtaccgccgccggaggagagaggggagaaggaagaggagccgtacccgtccgcttgctccgcttccgccggacctatcgacccgatggactcggagcactggatctcgcgcctggcggctgcgaagcgcttctacgcggcgcagctcggccacagcgatcgggcggggatggaggagctggacatggacgaggaggtcaggcccgagttcgcctgcccctactgctacgaggaccacgacgtcggatccctctgcgcgcacctggaggaggagcacccgttcgagccccaagccgcggcttgccctgtctgctctgagatggttacgaaggatatggttaaccatattactatgcaacatggatatttattcaagaatcgtcgccggttgcgcagattcatcattccaggcagccaggccctttctttactgagccgagatctacgggaagcccatttgcaggtgcttcttggaggcggacatagatcaagcaacaataacagcaccacanatatttcagctgatcctcttctgtcatcattcggncctagcttccctacatcagatgcagagc

SEQ ID NO: 452635 - DNA, 685 bp, Sorghum bicolor
  unsure (1)..(685): unsure at all n locations
cgtccggtggaagcgcgaccccgccctcgacgccgccatctcccgggaccgccgcttccgccaggcgtcccgcctcgtccgcgaggtgctactctccccaggccgccgcctcctcttccgctacctcaccaagcgccgcgagcgcatcaagctccccgtccgcgtccccacgttcctcaggcgctaccccaccctcctcgccgtctccgctcccccggagcccgtcgcctcgccctccccgcacctcctcgctttcctcgacttcgcctcccgcctctacgagctccacgcccccttcctcgcctccaggctcgccaagctcatcatgatcgcctccacgcgtgctctgcccgtcagcaagatcgccgccgccaagcgcgacttcggcctccccgacgacttcctggtctcgctggtcccgaggtaccccggtctctttcgcctcgtcggtgaccccgggcccgactcgtccggaaacgcgttcctcgagctggttgcttgggacgatacactcgccaagtcggtgatcgaagttcaggctgacaaggaggccgatgtcgtcggaattaggcccaggccaaacttcactgtgaaattgcccaaggggttctacctcaagaagaaaatgagggagtggatgagggattggctngagttgccatatatctcaccttatgcagatgca

SEQ ID NO: 452636 - DNA, 449 bp, Sorghum bicolor
cgtccggtctaagagctatattcatgattttgagagaagctgtagggaccattttaggaggagatgctggggtattggactaggatttggatttagagtggttgctcttgaccgcaatttcaaaaagcttaatgtggattctattgttgcggattacaagaagtcaaagagcaggatcatactactggactacgatggaaccctagtaccacaaactacaatgaacaagactccaagtgaaactgttgttaacatgatgaataccctgtgtgctgataagaagaatgttatttttattgtaagtggaagaggaagggatagccttgaaaaatggttttacccttgcccagagcttggcattgctgctgaacatggctactttatgaggtggaccagagatgaacagtggcaaatacaacatcagacatcagattttggatggatgcata

SEQ ID NO: 452637 - DNA, 720 bp, Sorghum bicolor
cgtccgcggacgcgtgggttctctcgttcgctctctctccgcgacgactcggctaccgctctacgccaggttcccacgtcttcatcaggcccttctccaagcacccaccagttaattgcagttttcgctaagcgtctttgggatatcaagtttgttgttgtccaagaagaagaaatatgcaggcttctagggctaggcttttcaaagagtataaggaggtacagagagagaaatcagctgatcctgatatccagttgatttgtgatgattcaaacatattcaaatggactgctctcatcaagggaccctcagagactccttatgaaggtggtgtcttccagcttgcctttgctatcccggagcaatatcctctactacctccccaagttcgatttctgaccaaaattttccacccaaacgtgcatttcaagactggtgaaatttgcttggatatcttgaagaatgcatggagccctgcatggaccctccaatctgtttgtagggctataattgcattgatggctcatccagagccagacagtccacttaactgtgactcaggcaatcttctacgatccggtgacatcagaggctttcaatcgatggcaaaaatgtatacaaaacttgctgcaatgccaaagaaaagctaagtttgcatgatgtaatggaacatcgatggcaaaatgtatacaaaaattgctgcaatgccaaagaaaagct

SEQ ID NO: 452638 - DNA, 588 bp, Sorghum bicolor
cgtccgctgactttattgacaatcattggaaggtaaagaaagagattcttgacaagctaggattggattcgtcaccagtgaaatccaagaagaataaaagcatatccacgtacttctcgaagagatgtttacctccagaagaggctgtcaatgctctggctgcttctcctgagttgcggttgaaatctaaaaccaaaagtggcactgaagctcctcagatcaatctgttcccctcaaagcagtagaatttttaacaagataccctgaaagttggatcaggggtcatgaagctatgaacccagatgagcagaaagctcagcggttcatgtacaaaggctatggaagtgcaactcagttttgcatcatcatcgatggaagatgaccttagtgcaactttggtttttgacaacatggagatctggattatgtttccagtgttggacatgttgtaactttagctcgaaagaggtttattcatgaggatattcagtaattattggcctgatggataacattgcctatgtgcgcacgcatgttgaatgccatcgcactgtgggtggacattccttgcaaacatgagtggctgtc

SEQ ID NO: 452639 - DNA, 654 bp, Sorghum bicolor
cgtacgctgtgtatggctctagcgaaaaggttgtgctgcatctcctctatgtcagaaggatgatggatctgaaatgaccaagccttacagtcatcagacggcatccatcatcgatgatgaggtccgggactgggttggcaaggcctataagaaaacagttgaattgataacagagcataaggagcaagttgcgcaaatcgcagaattactgcttgagaaggaagtcttacaccaggacgatctaaccagggtactaggagaacgtccattcaaggcactggagccaaccaactacgacctctttaagcaaggtttccaggatgatgatgacaagagccaagcaacatcagagaacgctgagttgcctgatgattcatctcccccacttggtgaggttgtacccacgtagtttgtttccccctcaaagttagagctgtacattgagtgctcattctcgatagattcttgtttgttgtggccccataagaaaactgtataaattagcgccctcgctgattatgccaatgtggaaatgcatttggattttcacaaatgcatttggatgccttgggctcttcatggcatcagccaaatgttctgaattcttgtatccgaaatgttttgaaaaattctgtctgactggggagttggcgc

SEQ ID NO: 452640 - DNA, 628 bp, Sorghum bicolor
cgtccgcaaagaccaacttccgggaggttgccatcaaaggtttctgggacatgtacgacccagagggctactctctgtggttctgtgactacaagtacaacgatgagaacacggtgtcctttgtgaccctgaacaaggttggtgggttcctgcagcggatggacctggctcgcaagtatgcctttgggaagatgctcgtgataggctctgaggcacccttcaagttgaagggcctttggctcttccgtggccaggaggttcccaagtttgtaatggatgaggtctatgacatggagctctacgagtggaccaaggtggacatctctgatgaggcccagaaggagcgtgtcaatgctatgattgaggaccaggagccctttgagggtgaggccttgcttgacgcgaaatgcttcaagtgagtgtgcttgcctggagccagaactgtttaggccttgaattggatgtttatggaggagtttgcccttttacttgtgtctatgttgatctggtataccttgctgtgaactggttaaagtttgtgttggtttgagaatttttgtctatcttgtggtgcctcagccttcctcatttgaatgttttgccgtaacaatctggccatggttttttt

SEQ ID NO: 452641 - DNA, 945 bp, Sorghum bicolor
cgtccgatctcctccatcgctcactgggtcagctatatcattggtttcggttatgcaggcaagaaataatgctcgggtgctgatatctggatcactcgacctgtttagcaaccggttcctgaagtctggtgttcaaaaggctggtagcaaaacgagatacgagagggctggaaatgagcaatttgtgaccgagacaagcaaatgggttttccatgagagggggcatctaaaggctgttaatgttaagcatcacaaggttggggaggccaatgaaccaggcatgtaccgcattaatgatgacctggaatactctgttgagatctatgaatggtccggaacaagctggaagccatatgttgctgatgatgtgcaacttcaattttttatgatgagtccttatgttctgaaaactatgtcgactgacaacaagggtttatattcaacatccttcaaagttcctgatgtttatggagttttccagttcaaagttgagtaccaaagattgggatatactggtctgtcttttacaaagcagattccagtacgcccttacaggcataacgagtatgagagattcataacatcagcttacccatactacactgcctcattttcaacaatgggtgctttcttcatattctcgcttgtgtacctgtaccacaaataagggactcatgggagcacacaagtttctggaggctgatgcgacctagatctgtggcactgaatgtgtgctataagccaagtgttacctggtgcaattttatggaaccatatttttgtagtgccaacttagataacatttgacgaccgtgaccgcactcatgagaatttacttgtgctaggatgttcgatctgcctcactttttcttggatcctttctgatcaacacttgtgaaaacgtctacagtatagcattgaaatgatgagcatgtagtgattttg

SEQ ID NO: 452642 - DNA, 474 bp, Sorghum bicolor
ccgccgccgccgttgcagctgccgctgccgctgccgccctcgtcccacgcctcaccggccgccgatcggcgccggcatctcgcataccggagatctgccgcagaagaatccgatccaaaccccgtaccttttcttcctccccctccttccccattgtccccgccgctgccatggccaccgacggcgccgcctctgatgctgggtccaagaagaagctgctcatcttcgactccgaggaggatctcgcggtttctctggcgaagtacactgcggagctgtcggagaagttcgcggccgagaggggcgccttcaccgccgtgctctctggcggatccctcatccaggcgctcaggaagctgacggagccgccgtacctggattcggttgactggagcaagtggcacgtcttctgggtggatgagagggcgtgcgcaaggaccatgtggatagcaactacaagctcgcccttgatgg

SEQ ID NO: 452643 - DNA, 348 bp, Sorghum bicolor
cgtccgaagacgaactcggtgaactctttccggttcgttcctctccctgcctatatacgcccgtttctctctcctcgcgcaacatcggacagccacacaagcgaggaatctagtccagtcccggcggcaatggagtgcgttttgggcgtggttggccgcgacttcgcggtggtggcggccgacacctccgccgtgcagagcatcctcgtccacaagaccgacgaggacaaggtgatggtcctcgactcgcacaagctgatgggcgcttcaggggagcctggtgaccgggtgcaatttacggagttcatacagaagaacctccacctgtaccagttccgcaacaccatt

SEQ ID NO: 452644 - DNA, 1062 bp, Sorghum bicolor
cgtccggtgctgaggacataacttttggctatactgttgctagctctgctatccaagatatacctgctcagatgtcagtagatggtgtggtttctgtgaacaacatatctaatgaggccaatgatatgtacagtcctcatgactgtgatggttttctattggaggagctgtctagatttctgaatgattctcctggagagtgctctggtcttcctccgatgtctgaagctgaggctcatgcttttgaagtcagctcttttggcctctacaatgaattatcagggcttgttgggttaggaggagtggaaaacaccagcaatgtggaaactacagattaccagctgccacctgacagagaactgtctgctgatgattacatggaactaactgatctccttgctcctgatccaagcttccccattgaatttcctgctgaggacaatcaatatatgcagtatcctcttgctcatttcaatggacattatgacgtccctacaatgtcaggtcctttggaaccaacaatgcctagcattttcgatgcttttcctccttccaataatggagtcctcgccacagatgtggcagccaactacatggacccaaccatgcagttccctttctcatgattggtttccaattgtcatggagttctctgttgctactacaactctttacgaaccttggatgttggggacgtcatcgatgtcatacttgggtgcatgaaatcgtctgctgctcttctgaaccaagctgaccaggcctcatgaaattgtctgctgctcttctgaaccaagcaaacaatgactggtatttcttggaagcacggtgcttggatcaatctgcatcgactactgcaagctcccaaccggttgagctgaccgtcaatctcggcgctctgctgagtatcaataagacttggcgtgtaaatctttggttatgttattacctgtgtgtattgcaacctgcatgattgccatctttaagcaatttggcttatgtattgacaatatgcaaaccattatgattgtcgtaatatggatgtttaattaatcctttatgttt

SEQ ID NO: 452645 - DNA, 608 bp, Sorghum bicolor
cgtccgtgctggccaagtccggcatcggcgacgagtcgtacatgccgcgctgcgtgttcgagcccaacgccaactgcgcgaccatgaaggagggccgcgccgaggcgtcgacggccatgttcgcggcgctggacgagctcttcgacaagtgccgcgtccgtcccaaggacgtgggcgtgctggtggtcaactgcagcctcttcaacccgacgccgtcgctgtcggccatgatcgtgaaccactacaagatgcgcgggaacatcctgagctacaacctgcgcggcatgggctgcagcgcgggcgtcatcgccatcgacctggcccgcgacatgctgcaggccagcggcgccggccctgccgtggtgggcagcacggaggccgtctccttcacgtggtaccccgggaagcgtcgctccatgctcatccccaacaccttgttccgcgccgggtgcgcggcggtgctgctgttcaaccgacgccgcgacttacaccgcgccaagtaccagctggagcacgtggtgcgcacgcacaagggcgccgacgaccgcgccttacgctccgtgtaccacgaggaggacgagcagcggatcaagggcctgtccatcagc

SEQ ID NO: 452646 - DNA, 686 bp, Sorghum bicolor
  unsure (1)..(686): unsure at all n locations
cgtccgagagatgcaaaatacaagtgctgtaaagatgaagcattttaaagaagaatctgcccacataattcatgagtattttctctcagacgatgtcccagaacttattcgaagccttgaagagctctctgctccagaattcaatcccattttcctcaagaagcttgtcacacttgctatggacagaaagagtagagagaaggagatggcctctgtactcctttcttcactgagattagaattggtttcgactgaagatatcatgaaggggttcataatgctcttgcagtcagcagaagacactgcccttgacattgtcgatgctccaagtgaacttgccctcttcctagctagggcagtgattgatgaagtattaattccgctgaatttggatgaaatcagcattaagcttcgcccgaacagcagtggtagccaaactgtccagatggcccgtgcgctactgtcagctcgccactctggtgagcggatactgcggtgctggggtggtggcactggatgggctgtggaagatgccaaggacaagatcactaagctcttggaggaatacaacacaggtggtgacctgngagaagcctgcagatgcatccgtgatcttgggatgcccttcttcaaccatgaggtggtaaagaaggcactagtcatggcgatggagaagcagaatgaca

SEQ ID NO: 452647 - DNA, 354 bp, Sorghum bicolor
tcccggtcgaccacgcgtccggccggatgtgcttctctgttctctcccggtcccagattcatcggcctgcagcagagcaacgcccctcccttccatctccgagctgccatgccgcgccatggacagcgaaactccactgcgtaatccactaccgggaccttctgaagtgatctccttggcctgaaacttggaggcgagcgaggtgccatggttctcgtggtgctgggctgctctcctgcatcgccgcgccccgcctgcactcccaattccaggagaagatgcagcgccaccagacagaaaatcatcagatgctctctgaatgaggaaacactactgagcaaacatggagtagta

SEQ ID NO: 452648 - DNA, 646 bp, Sorghum bicolor
cgtccgctatagaaatggcaaagaaacttcctaaggaagtggtgatagatttgcttgcaaaactggaagtggggtcagcctgtagcttatgtgatgacacacctgaggatgctattgtgacaatttgtggtcatgttttctgctatcaatgtatacatgaacgaataacgactgatgagactatgtgccctgcccctaattgcagtagaacattaggttttgagttgttattttcgtcaggagctttaaagatttccatctctggcgaatccagttctgcaggagctagttcatctgcagataacgagtcatcttcaatcagtcaaatcagctttgtctcatccaagatacaagcagccattgatatactgaattcaatcattaacttgaatgcccttactggaagtgataccatggaatcaaaccgaagtggagtagcccctgtgaaagccattgtctttttccagtggactggcatgttggatttgctggagaattcactgaataccaatcttatacagtacaggagactagatggaacaatgtctctcaatttaagagataaggctgtgaaggattttaacactgacccagaggttagagttatgattatgtcactgaaagctggtaatcttggtctcaacat

SEQ ID NO: 452649 - DNA, 811 bp, Sorghum bicolor
cgtccggatcctggtgttgatgcttattctgctgctgctctgagggctagtccatatgcagttcctggcttgcgcgctagtgggtttatgggcagccaggttattctgccgcttgcacataccttagagcatgaagagttcttggaggttattaggcttgagggacacagcctctgccatgatgaagttgttctgtcacgagatatgtatcttctgcagttgtgcagtggcgtggatgaaaatgcagctggtgcttgtgcacagctagtctttgcacccatcgatgaatcttttgctgatgatgcaccactgctgccctcaggcttccgtgtcattccactggatgcaaagacggatccaccatcaggcacacgcacacttgacctagcatctactcttgaggttggatctggtgggactactcgtgcttcaagtgatgcctccagcacctgcaacacaagatcagtgctgaccattgctttccagttctcatatgagaatcacccccgggccgcccaggcagcgatggccattcaatatgtcaggactgtggtggcatccgtgcaaatggtggccatggcaatagctcctttccgtcttggcggacagcttggaatgaggcaaactccaggatctcctgaggcgcacacgcttgcaaggtggatcggcaggagctacaggtttcacacaggagccgagctccttcgcacagacacccaatgcactgatgcttccttgaaagcactgtggcaacactcggactcgatcatgtgctgttccctgaaggctgctcctgtgttcaccttcgcca

SEQ ID NO: 452650 - DNA, 612 bp, Sorghum bicolor
cgtgcgcggacgcgtgggcggacgcgtgggcggacgcgtgggcttgactggtctccaatgcacaaagatccaagtttctggcgtgagaacatgaacaattttgaagaaaatgatttccagatcctacgagttctcatgacaatcattgacacatcaagtgacaccaccgctcttgccgtggcctgctacgacctctcacagttcctccagtaccatccatctggccgaattgtggtggcagacctcaaggccaaggaccgagtcatgaagctcatgaatcatgagaacactgaagtgaggaaaaatgcgctgctctgtgtgcagaggctcttccttggcgcaaagtatgccagtttcctgcaggcttgagagaaactgagtcttttgtatttagatccagaggacccctggccatttctcagaatgtctgttgagaacgaaaaaccttgaaaattcttttccagtatatcctattgttatttgattcctgaaactgattgtataataaataatcagagccataccatgctcgttgtaataaagtgtccatgggcttgttgattcatttatgtaaattttgacttgtaactttagcaaacctctttttttgtt

SEQ ID NO: 452651 - DNA, 744 bp, Sorghum bicolor
cgtccgaaaaaagttgtaagatattgactgatataattagtgcacgaccaaagcttcagaatggcatgcttccaaatggagatgcttcaaattcaaagagcaaacttacttcaacacatgatgtattgagaggtttggttgattggctctgttcacagctgaggaatcctacacacccgagctgctctattcctacttctatccattgcctctccactttgctcagagaaccatatgttaggacattatttgttcaagctgagggcatcaagctgctcattcctttgatatccccagcttccacacaacagtcaattcagttgattatttgtccaccacaagggttatgccaagactagtagaggttgtcaagggctctactaaagagaaggtggtcagagttgttgtgttgtccttccgtaatttgctggcaaagggtgcgtttgctgcccagatgatcgatcttggattgccgcaaatagtacaaaacttgaaagctcaagcatggactgatgaggatctgttagatgctctgaatcaactagaggtgggactcaaagaaaacctcaagaaggtgaagttcctttgataagtacaaacagcaagttcttcttggtcaccttgactggtctccaatgcacaaagatccaagtttctggcgtgagaacattaacagttttgaagaaaatgatttccagattctacgagttctcatgacaatcattgacacatcaagtgacacca

SEQ ID NO: 452652 - DNA, 329 bp, Sorghum bicolor
cgtccgcttgagtatttggagaggtatccaggagatcatggatgaagaaatggatgaagatgtcgtagtcaaggctgtggactgcgcgagccaatcagaggtagatatcaagctcaaacagtttatcaaaggctactcagatggcagcaaaggaggagatggtcacttgttgatgctgaaattgaaagagtggccccgacccagtgtcttggaggcgtttctgttgtgccaaagaccagaatttattgtcaactttcctcttggtgattttattcatcctagatggggtctcctaaaccttgctgcctagttacccccacatgccttac

SEQ ID NO: 452653 - DNA, 633 bp, Sorghum bicolor
cgtccgtacaaggaaaggtttagcagcttaaagaatttggttctgatcatgtttcaggatgatgcagtcctgatacctcgagaaacagcatggttcggttactaccctgatggagcctttgatcctgttctaccacctcagaagacgaagctgtatgaggaagactggatcggtttgaagacactggataaagcagggcggggtgaagtttgtgtctgtggcgggaggtcacctcggcatctccaaaagtgacatgaagaagtacattgtgccttacctgacaagcaaagcatcggtgaagaccctcctccggtggagcctttctgatttgctaggtggcacttggcacgctgcgctggggctgattggagggtgatggtgctgtgcttgattccgccatcgtcgtgattaatcaatatgatgtgatttgatggacttggggtctggtttccaacagtgggttgctgtgaagcttgattgttacgctctacttggtcgatttatggcgtgggccttgtttagttccgaaaagtgaaaagatttcggtcctgtagctctttcgtttgtctgtgacaaatattatccaatcattgactaagtaggatcaaaagattcgtcttgtgatttacagct

SEQ ID NO: 452654 - DNA, 450 bp, Sorghum bicolor
  unsure (1)..(450): unsure at all n locations
cgtccgggccaggtgatggttgctcatggacaaagctttatgaagccgtggtggaagctgtggaacgggaagaacatggttccacgggcgttggcgttggaggtctacctgtcccctgcagcttcggctgcggctgtggctgcagtttttgaagtgcaaactactgtagcttgaactgctgcagccgcagccatagctgcatccagctcaaacgagcagccagctcaagcgaataggccatcacttgttcataggatggaatgagctccagaactagttgcttggtatgttcctaggggttatgtatatgaatatatatgggcacatgaatcacgattctactaatatctctttgtatatcggagctattagggcagttaatgtacataatacacatactacatggctctattttgattgcccttgtggcattgtctcgtaaaanaaaaa

SEQ ID NO: 452655 - DNA, 430 bp, Sorghum bicolor
ccggtcgaccacgcgtccgcgccgaccaggcggcgcacatcgaggccgaggcgcgggccgtcgccgccgcgcgcgcggaggtcgaccaagtccacgccgacggccaggtgctcgccgcggcgcgcaccgacctcgtcaaccgtcttcagggcctacgggagaagctcgcgcacaagaaggctgaggcgagtaagactgattccgtccgtgcgcagattgaaaccatgcgccgggagatccagaagggcagtgctgcggttgatttcgaaaagaaggcacactctgataacctcgaacaatgtaaagcaatggagaaaaatatgactttctgtggctagtgagattgagaggcttcgaggagagcttgcaaatgctgaaaaaggggccaccgctgtcaacccagtagcagctgtggtaactctggtatgct

SEQ ID NO: 452656 - DNA, 423 bp, Sorghum bicolor
cgtccgccccctcgtctccactcctctgctcctcctcgcgccgccgccgccgacgcagcgacgcgacgcgacgcgacgacaggtaatggcttccgccgcggtgctccggaacgccggctcccgccggctcttctcctacccagccctgcgggcgaccgcgatctcgggtcccgccgcgctacccgatgcgcccgcggcggcggcggcggcgccggcccagccggcggctatggccgggaccctctgggcgaggtccatggccacctttacgcgcacgaagcctcacgtgaacgtcggcaccattgggcacgtcgatcacggcaaaaccacgctcactgctgccattaccaaggttcttgccgaggcagggaaaagccaaagccggtgctttcgacgagatcgacaaggctccggaagagaaag

SEQ ID NO: 452657 - DNA, 688 bp, Sorghum bicolor
  unsure (1)..(688): unsure at all n locations
tncacnancaccggctccctggagcgagacgaggtgttcgtgccaaagaagaaggaagcgctggctggtacaccccgtacgtgtacaacaaccccgtcggccggctggtgcacatcgttggtgcaggctcaccctcgggtggccgctgtaccccgccaccaacgcgtcgggacccccgtacccccccttcgcctgccacttcgacccctacggcccgatctacaacgaccgggagcgcgcacagatcttcatctcggatgctggcgtcatggccgtgtcgtttggtctgtacaagctggcggcaacgttcgggttctggtgggtggtgcgcgtctatgccgtgccactgctgatcgtgaacgcgtggcttgtgctcatcacctacctgcagcacacccacccggcgctcccccactacgattcgactgagtgggactggctgcgcggcgcgctggccaccatggaccgcgactacggcatcctcaaccgcgtgttccacaacatcacggacacgcacgtcgcgcaccacctcttctccaccatgccacactaccacgccatggaggccaccaaggcgatcaagcctatccttggcgagtactaccagttcgacccaactcctgttgccaaggcgaccctgcgtgaagcccgggagtgcatttacgtcgagcctgagaaccgcaagggc

SEQ ID NO: 452658 - DNA, 1027 bp, Sorghum bicolor
cgtccgggctgatcatcttttgtacccaaacccaggatctggattggttcatgaactacatctgcaatatttccattttcttggaagtcgacgggggaaggcattgtatgaaggcgatacttgttgatttgccatttgcaacgttcttcttgagcaagttgaaacaaatgcacaattttttaaatgatcttccttcattggatccggaattgtaccgtcatcttctatttttaaagcattacaatggtgatatctcagagttggaactatactttgttattgtaaataatgaatatggtgaacaatgtgaagaagaacttctccctggtgggagggaaatgcgtgttacgaatgataatgttattacttttatccatcttgtcgccaatcatcggttaaactaccagatccgtgcacaaagtacacacttcttgagaggttttcaacagcttataccaaaagactggattgatatgttcaatgaacatgaaattcaggttcttatatctggctctttagaaagcttggatatcgatgacttgcggtcgaacaccaactattctgcaggatatcatccggatcatgagcttattgagatgttttgggaggttttgaagagcttaagttcagacaaccagaaaaaatttctcaagtttgtgaccggatgttctcgtggtcccctcctcggatttcagtacctcgaaccaaaattttgcattcagagagctggtgttccaggactggaggagcatgcagatcgcttgcctacatcagctacctgcatgaaccttctgaagcttcccccttataaaagcaaggagcagatgcaaaccaaactgttgtacgcgataaattcagaagctggttttgatctaagttgatcatgatcgggattcagtatttgtgcagtgtagatagttgctagagaacagcttaaaggcacccagggccgaaccatcaaccatcggccccatttgaagccccatgaagtaaaaagaaaaaggcagtgttcttagagtagttgatg

SEQ ID NO: 452659 - DNA, 684 bp, Sorghum bicolor
  unsure (1)..(684): unsure at all n locations
cgtccgcggacgcgtgggcggaagcttggacaaggtttccacctggatggcgatccgcaggggcccttcgtacgccgtcgcggcactcctcgcgctcgcctctgtcgccgccgtcgccggcgaggtcttcttccaggagaagttcgaagatggctgggaaagtcggtgggtcaagtctgagtggaagaaggacgagaacatggccggtgaatggaaccacacctctgggaaatggaatggagatgccgaggacaaaggtattcagacctctgaggactacaggttctatgctatttcagctgagtaccctgagttcagcagcaaggataagaccctggtgctgcaattctctgtgaagcacgagcagaagcttgactgcggtggtggttatgtcaaattgctgggtggtgatgtagaccagaagaaatttggtggggacacaccttacagcattatgtttggaccagatatctgtgggtacagcaccaagaaggttcacactatcctgaccaaggatggcaagaaccacttgatcaagaaggatgtgccttgtgagactgatcagttgactcatgtttacactttgattatccgccctgatgcaacatacagcattctcattgataacgaagagaagcanactggcagcatctacgagcactgggatattctgccccctaagca

SEQ ID NO: 452660 - DNA, 429 bp, Sorghum bicolor
tcgacccacgtccgctctccgccacggagcagcagcccgcaaccaagcagcaaggtatggttagtgacgagacaagatggtgcaccagggcgaggagctgccgcaggcatggtggttcgacagccacaacctcgcgaggccatctccatggctgaacagcacgctttcagagctggatgacaagacgaagcaaatgctgaagctgatcgaccaagacgcggactcctttgcccagcgcgctgagatgtactacaagaagcggccggtgctggtggacatgctgggcgacctgtaccgcacgcaccgctccctggcggagcagtacgacctgctgaagcacagcagcggcacgcggcacacggtgttcggcctgtcctcctgcacgcagagccggtcccaggcgtcgtcgacgaatggcaagtccacgcc

SEQ ID NO: 452661 - DNA, 464 bp, Sorghum bicolor
cgtccgcgacaaacgcagagcgccatcgaatcgtctcgtctcgtctcgtcccctccctcccctcctcttcctcgcccaatcccagacaaatccaatccgaaatcatctcccccctcgcctcgcctcgccgaggaagagcagagagaagcgacgccgcgttccttcctcccgcgtcgagctcgatcttcccggagccaccgcgggaggcgcagacgttgggacagcctcgcgcgcgcgtcccacgccggtatgcagagccagatcgtgtgccatgcttgccggaccgttctactctacccgcgaggcgcgtccagcgtctgctgcgccgtttgccaggccatcaccaccgtgccgccaccaggactggagatggctcagcttatatgtggtggttgtcgaaccttgctgatgtatactcgcagtgcagacaccgtaaggtgttcatgttgcaacacagtcaatct

SEQ ID NO: 452662 - DNA, 447 bp, Sorghum bicolor
accaccggtgctggtgatgccttcgttggatccctgctcgtcaacgtcgccaaggacgactccatcttccacaacgaggagaagctccgtgaggcgctcaagttctccaacgcctgcggcgccatctgcaccaccaagaagggtgccatcccggcgctgcccacggtcgccaccgcccaggagctcatcgccaaggccacctagacgctcacgcacgccgccactccacttcgccttcgccatcacccctcgacgtcctcaatttgaattcattagggagattgttgttagcgtccgtctctgctctaagctgagacgggtttgttgggttaattaatttagctttttctggttttgtggtgtgagtgtgagagagaagaacatggttttcgccccggggcattaataaaaatgttggcatgcgtggtggataatttttttagcttc

SEQ ID NO: 452663 - DNA, 589 bp, Sorghum bicolor
cgtccgggcagcgatagtacaggatcgtatcgaggatgactctctcgcgacggtttctcaatctgatcgtggacagccaaatccgtggcgtcaggacgttgcgccgcatcgacctaacgcgccagcaattcttcatccccagcgccagtgatgactctaacagtgatggctttgaagatgatgatgatgatgatgttggcaccctctttgtcatggagggctatcccagtatggagccaacctccgatgaccagagccccaacgaccagccaagtgatgagttcgaggcatacgtatacggtaagcgtaagctggcacactgcaagtcctggaagtgccaaccactgccgccaccgccgtatgtccgtgaccccacgtggatgaagttccggccacagatcaccaccttacgcagtggtcggcggcggcgcccagatcttgatatcagcggagagcgccggaacttactgcatggacacggcgacccacaaatggagccaagtcggccggtggatgctggccttgcacgggaagatcgaatatgtgccggagctcgatctgtgggtcggtttctcttgccaggatcagc

SEQ ID NO: 452664 - DNA, 612 bp, Sorghum bicolor
ggcacgaggaccaaacctacccgcgcacagtggatggagtacgagtctaccacgcttcaccatttccagaaacaaaagccggacaaagctacggaaggaggaagaaggcttgtgcagaatcagaacccagcaccatggcgggatccgcgttcctcaacgccctcgtcctccgcgcgccatccccatccccgtcgctctcgtgctcgtcctcgtctacgcgccgcagcgccggcgccttcgcgttcccgaacccaccgcgcctcccatctctgcgttctgcgcgccgcgtcgtccttgcgcgggcggcggcgccgggcgcgggcggtgaccccgagcccgaggacgacgagtgggggccggagcccgagggcgggtccgctgtcacgggagcgaccgcggtggcggaggcgcctgaggcgccggaggcgagagaggtcgcggagctcaaggcgcagctgaaggacgcgctgtacggcacggagcggggcctgcgggcgttcaacgaggtccgggcccaggttcgctgagctcatcacgcagctcgagacgcgcaaccccacgccggcgcctaccgaggcgcttacgctcctcaacggcaagtggatcctcgcg

SEQ ID NO: 452665 - DNA, 584 bp, Sorghum bicolor
cgtccggctgggcgggctggtgcacatcggcctgggcgacccggtggtgaacaagtgctgcccggtgctggaggggctggtggagctggaggcggccgtgtgcctgtgcaccaccatcaagctcaagctcctcaacatcaacctctacctgcccctggcgctccagctcctcctcacctgcggcaagacgccgccgccgggctacacctgtaccatctgatctcgatttggctagcaacccccatgcatgtgcatccatgaacatgggttctggagtgagctagcattctttgttcggtagagattgaagagagatcgacatgagaggatgtcgtctgcttcgttcctagctagctgaagggctccgatccggcagaggaaagaggacctgcaggtcgatcagctaattgacgatggatcgaccatttcccatgtttattggttggctctgttggggttctactttctagatgggtttcaagtggtctttcggcgattcgcagcttgatggttggttaagctgattgatgcaaaaaggggttatggtgatgtaataatcccgtatttgcatgaaaggatgactc

SEQ ID NO: 452666 - DNA, 466 bp, Sorghum bicolor
gcgccgctctcctctcctctcctctccagtctccaccccggtccgcgtctccccggccgcgccgccgcccccaaacccacctccccgcgcgtgcgccgctgccgcgagatccggggcgcgatgtggcgcacctgcgtctcgcggggcctctccagggccaaggcctccgcctccaggctcctctccacggcatcgtcgtcctacacggtggtggaccacacctacgacgcggtggtggtgggggccggcggcgcggggctaccggcggcgatcggcctctccgagcacggcttcaacaccgcgtgcatcaccaagctcttccccacgcgctcgcacaccgtcgcggcacagggaggcataaatgctgcgcttggaaacatgagtgaagatgattgggggtggcatatgtatgacactgttaagggaagcgattgggctggtgaccaggattcttatcagtacatgt

SEQ ID NO: 452667 - DNA, 397 bp, Sorghum bicolor
tcgaccacgcgtccgcccacgcgtccgcggacgcgtgggcgcgtcactctccatgatcagctacatcccagatcccctcgaagtcattggtatgttaaagcccgtccccaagcgcacctctgacggtgcttatgagctgttcctcatggctcgtgaatctcacgatggtctgcccatggcttttgacatcgaccggccgccctttctctgcgtgttctctctgttgatgggggcaaacctgacttgtgcatgggagatgaagaagagggtgagctggaatgtgccggtgagcgtctatgaacgattcatgacggacatgaccttctcttttcaagggcagggtatttgggttgatctgtcgcaagccatcatgtactgtgacctgcaaaccactgac

SEQ ID NO: 452668 - DNA, 706 bp, Sorghum bicolor
  unsure (1)..(706): unsure at all n locations
cgtccgctcaccttcaaatatagcccaagatatggtatctgaactaagcggactctaagagtgtagtgcggctgaattattatttcaattctggtaccacgcanggaaaacccaagttcttgctactcagtgatgaattgcttcagggtacatatgcttcagatatttccaacttcacacgcttatagaaatcggtaaggaacttcacttatctttttgacatgctgcttcttttataggctgtattctcaacagttttgagactacaaaatgttgcttcagtgttacaattcaacagatccatttatttttggatatttccaacttcatgcgcttacagaaatcggctaggaacttcacttatctgtttgacatgttgcttcttttatagactgtgttctcaacagtgatattactatatagatttgagactacaaaatgttgcttcagtgttacaatccaacagatcccaaaatctttgtgccatacttgcagtgaatgtccctataggcaatggaagaagcttgcgatgcgttcacggaagcagacaagtgtaacacagcccacctcccaaatgcagctccaactgtagctagatatggatctgtcactacactattctccatgacattgatgctcattcggagacccttgctaaatcatcacataccacgttcttagttgttccattgctagatacatttgt

SEQ ID NO: 452669 - DNA, 818 bp, Sorghum bicolor
cgtccgacgcagggaaaacccaagttcttgctactcagtgatgaattgcttcagggctgtattctcaacagttttgagactacaaaatgttgcttcagtgttacaattcaacagatccatttatttttggatatttccaacttcatgcgcttacagaaatcggttttgatatactgagaaacacactacttacattcagctgggcaacctatgtgttccctccttgatgctcaaacggggaatcattcatgcaattaagcactaccatgatttgagaacttgatgtaggattttgtattggttcttgggtcaagaaaggagattcctaatcctgccggcttcggcgcgctctgcgatacctccggatcaatagaggcatcaatgaaacactgagccacatcgggaggttcaggaaacctgcaaggaggattgatgcagtgaatgagcacctaagcaaaggagtggatgtgtgtccgaaccgccaaatgtacctgcaaaacagaccaactacgcttgtggaagcgaagatcatttctggctttccaaataaaccacagatatgtggtgatttgcactaaaatatccaccggaatttggggtgtaattatctacgccaagcagtgttgaaccccatcctgttcctgtggcaaagcagaagagagcaaaggaatttttgccagagaaccaaactgctcttggcaaactcatagtgggaagaaaaggtgaacatcattttcaggaaatccacaaagagcacaatctttttcaatatcagtgagggcatttgcatgctcaccagtagcaatggctctcctaat

SEQ ID NO: 452670 - DNA, 546 bp, Sorghum bicolor
cgtccgccagaaagctcgccagcagggaatcttcatttccagctctggagaccaaacccatgccatgagtggaaatggagcattgacttttgacatagaataggctagatggctagaggaccaaaataagcagataaatgagttgaggactgcagtgaatgctcatgcaagtgacagtgatctacgacttattgtagatggcataatggcacattatgatgaaatattcaaggtcaaaggtgttgctgcgaaggctgatgtatttcatatactttcaggcatgtggaagacacctgctgaaaggtgcttcctgtggcttgggggttttcgtccatctgaacttttaaagctcctagcgaatcacctcgagcccctaaccgagcagcaaatgctgggtttgaacaacctccagcaatcttcccagctggcagaggatgcactgtcacagggcatggaagcactgcagcaatctttggcagagactttggctggatcctttggtccatcaggttcttcaggaaatgtggtcaactacatgggttagat

SEQ ID NO: 452671 - DNA, 850 bp, Sorghum bicolor
ggcacgaggcccacccgtcccttcccgcgccgccgccgcccccccacaggtaaggaggaggagcaggaggcgaggatgtctcaccgcaagttcgagcacccgaggcacggctccctcggcttcctccccaggaagcggtcctcccgccaccgcggcaaggtgaagtcattccccagggatgaccccaagaaggcttgccacctcaccgccttccttggctacaaggctggcatgactcacattgtgcgtgaggtcgagaagcctggatccaaactacacaagaaggaaacgtgtgaggctgttaccatcattgaaacccctcctctggtcattgttgggcttgtggcatatgtgaagactcctcgcggcctccgcacactcaacactgtttgggctcagcatcttagcgaagaagttaggagaaggttctacaagaactggtgcaagagcaagaagaaggctttctccaagtatgctctcaagtatgacaatgatgctggcaagaaggaaattcagctgcagcttgagaagatgaagaaatatgcttctgttgtccgtgtcattgcccatacccagattaagaagatgaagggtttgaagcagaagaaggctcatctcatggagattcaggtcaatggtggtgccatttgctgacatggtggactatggctaccaagtcctttgagaaggaggtccctgttgatgctgtcttccagaaggatgagatgattgacattattggtgtgaccaagggtaagggttatgagggtgtggccactcgttggggtgtcacccgccttcctcgcaagacccacaagggtctgcgcaaggttgcttgtatcggcgcatg

SEQ ID NO: 452672 - DNA, 637 bp, Sorghum bicolor
cgtccgcaacctttcaaataatcagctgaatggttcaattccagagctcggttcgctgttcacattcccgaagatttcatatgagaataactctggtctttgtggcttcccactgttgccatgtggacacaatgcaggctcaagttcttctaatgaccgccgatcccaccggaaccaggcttcactcgcaggtagtgttgcaatgggactcttgttctcgctgttttgtatagttggtattgtcatcatagccattgagtgcaagaagcggaagcagatcaatgaagaggcaaatacctctcgtgacatatacattgatagccggtcacattctgggactatgaattccaacaattggagactctctggtactaatgccctcagcgtcaaccttgctgcattcgagaagccactgcagaaactcacctttaatgatcttattgtggccacgaatggcttccacaatgatagcctaattgggtctggtggttttgggggtgtctataaggcccagctcaaggatggaaaggttgttgcaatcaagaagcttatacatgtgagtggccagggtgacccggagttcactgcagaaatggagacgattgggaggatcaaacatcgcaaccttgttccgctc

SEQ ID NO: 452673 - DNA, 520 bp, Sorghum bicolor
cgtccgtgctatcgagtttattgtctcgacattctatggtcaagttgtaatgctatccactcatccatatggttgtcgagttattcagagggttctagagcattgtgatgatcctaagacacagcaaataatgatggatgagattctccagtctgtttgcttgctagctcaggaccagtatggcaactatgttgttcagcatgttctggaacatggcaaaccacatgagagatcggctattattgagaagctaattggccaaattgtgcaaatgagccagcaaaagtttgcctcaaatgtcatcgagaagtgcttagcctttggaaatcctgtagagcgtcaggttctgattggtgagatgcttggatccactagtgaaagcgaacctcttgaggtaatgatgaaagaccagtttgcaaactatgtggtgcagaaggtgttagaaacttgtgatgatcagcagagagagatgatcctaacaaggataaagacacacctgaacaccctcaagaagtacaca

SEQ ID NO: 452674 - DNA, 608 bp, Sorghum bicolor
cgtccgaaaaaaaaaaaaatctctgtttcgttagtgccttgcgtgaggaggtcggagtcggaggcagccgaaaactcagggtctcgagtttcctcggagcggaggcgatggctgggaagggaggaaaagggttgctcgccgccaagaccacggcggccaagtccgccgagaaggataaggggaagaaggcccccgtctcacgctcctcccgcgccggcctccagttccctgttggacgtatccaccgtcagctgaagcagaggactcaggcaaatggccgtgttggtgccactgcagctgtgtactccgctgccatcctggagtacttgactgctgaggttctggagctggctgggaatgctagcaaggatctgaaagtcaagcgtatcacccctcgccatctgcagctggccattcgtggagatgaggagctggacaccctcattaagggaaccatcgcaggcgggggtgtcatcccgcacattcataagtccctgatcaacaagtcttccaaggagtgaagactcagggtgtgcatccttagtttaaactggacttttgtgctctcctctgtgagtccctgtcgtcgtgtaggttttagttgagct

SEQ ID NO: 452675 - DNA, 521 bp, Sorghum bicolor
cgtccgcgtcaacctagtcaggagatcacatcagaagagaaaacacttaccatcccctcaactaaagatcaaatgaatggttcaatgcatgaaaatgatgactattctgctcatgacattagacgttctattcgtgaagctgctttatcaaagccattgaggaatacagagaggccacaagataaaaatagtgatgatgcttcagagcacttctttattccgctgtcaactggtgctgcaaagaaggatatggattcagtgacaaatggacataaccgaagattaggcttgttgccatctcagatgaagttctcaaagagcacaagtggcatttactacaatgcggatagcccaatatacacaagtccagttctgttaagtgaactgaatgggcatgattcgatcagtgccatgagttttcttgacccggctggtggtctggcaacatcagtcctttctcactgatgatgctctggatcaagtattctccctctctttttatggatcttcgtgttcacgat

SEQ ID NO: 452676 - DNA, 605 bp, Sorghum bicolor
cgtccggccacttgccccgcaccactcgctcggccctcccaatcctcgcgcctccacttcgtgttccacaacgcgagccgcaaggtgcggctgtgcgcccctccattgatcgaggcggcggtggctcttcaaatccaaggagtacgaggctgcggcggtcaaggtgtggatctggtgagggaggcatcgatctgccatctgttcccgaaggcgtgttggatccggtgagggaggacgcattcaggatgaggcagctggagtggcaacgagctcgagcctaggagttggcggcagaagagggtgctcgaccattcctcccctgcatgacgtgcttcattccatggctggagctgcacccgtcaagcaagcacgagcccagcagttagcgccggtcagctctgtcggacgccgaccctctcttgttaatcagtttagcctaatttgcttttcatattccacagcgatacagtgccattgatcttcatgtgcaaagcgattggtgcaaatctcaacacatgaaaattagctttttgggttagagtacatataatgcaactcatatttcttggtccagtgagcatatatttagcaatgaactccggaca

SEQ ID NO: 452677 - DNA, 406 bp, Sorghum bicolor
  unsure (1)..(406): unsure at all n locations
cgtccgggcggcccctccccggcgcccgcgcccgcgcgctgccaggtcgacggctgcaacgtggacctcaccgacgtcaagccctactactgccgccacaaggtctgcaaaatgcactccaaggagccccgcgtcgtcgtcaacggcctcgagcagcgcttctgccagcagtgcagcacgttccaccagctgcctgaatttgaccaactaaaaaaaagctgccgcagacgtctcgcaggccacaatgaacgccggaggaggccacctcctggacctcttgcaacacgatatggtcgccttgctgcatcattcggtgaagagcccggcaggttccgaagctttatgttggatttctcatacccaagggttccaaccgccatgagggatgggttncagagttcgacct

SEQ ID NO: 452678 - DNA, 478 bp, Sorghum bicolor
attcccggcgacccacgcgtccgctcctcccatataacccagccgcccgggatagggctacccgtctcgccgccgattcgctgtagctttcgcctgagctgcccgtgcgagttctgcgccgcgccttgtactaccccaagtcagtagcctcctccaggcggcggcgttttcgtgccgagttagggttagggtttctgtggttgcggagatggaggaggtgacggagggagtgtacaatctggcgattaccgagccgcacaagaagaacaggatccaggtctccaacaccaagaagccgcttttcttttacgtcaacctcgccatagaggtacatgcagctagcacgaggaggtggagctctcggcccttggcatggccattgccactgtggttactgttgctgaaattctgaaaaataatgggctcgctgttgaatagaagatcatgacatccacagttgatgtcaaggatgatacaa

SEQ ID NO: 452679 - DNA, 1060 bp, Sorghum bicolor
tcgacccacgtccgaaagaagggagaagcatatagcaccagcggaacacgggaacggcggaagaagcaaacaactagaaattccccagctctgttccttgcgtgcggtttgatctcgtcgaggcccggccgaagttccccaatccgccatcgaattcgatggcggccaacgccgggaacaagatccgcaacgccaagctggttcttcttggagatgtgggtgctggcaaatctagcttggttcttcggtttgttaagggacagtttgttgaattccaggaatcaacaattggagcagctttcttttctcagaccttagcggtcaatgatgagactgttaagtttgaaatctgggatactgctgggcaggagaggtatcatagcttggcccccatgtactataggggtgccgctgccgccattgttggctatgacatcacaaatccggcctcctttacccgtgccaaaaaatgggttcaagaacttcaagctcaaggaaatccgaatacaatagtggctcttgctggaaacaaggctgatatgctagatgcgaggcaggtgccagcagaggaagcaaagacgtatgcccaggagaatgggctcttcttcatggagacatctgctaaaagtgcaatcaatgtgaatgacatattttatgagattgcaaagagattgcttcaaggacaacaggctccaagcccacaggctggaatggttctgaatcagagaccaaacgagaggatggtcagctcttcttcatgctgctcttgaagctgtgtttcaacctcattagtgctgttatgaaatgtatcagaggaggttaagcaaaatatcccatctcgcctgtgtggctgacttccaggctgatgtgctccccttctcctgctcctcgtttcttttcacatgtttgtcatgtaaatgccaatactagaatgtcactgcatggacagaagtgttaccaaagtgttgattgtgctcttatcatttgagtgtgcccctccttaagttctcaaatttgcatatatacaaggtggagttttatttaagtttttaacttggtt

SEQ ID NO: 452680 - DNA, 1131 bp, Sorghum bicolor
cgtccgaagaaattctctatagcgtcaacttctcagctgagctcctctcagaatttactgaatcaaaggcaccacttaaattccagttgaccaagcaacattacttctgagtcctatgcagaaaagtttggtccatctagcggttcttttgcacaaaggaattcaaaagcgcagaagaaaactttgaacatgcaaccaagacagccaacaaatgataatgacataaacagacatcctcaaacattgacaagaagagcttcttatccttgtgagaactatgaaactgaaagaaaaggattagggaaaagaactctgggggatcctcaagttacaatgggtacttcaatggtagtggatggctcatttgtatcatctgtgtcctctgataactcagttgaagaaagcagctttcgacaactgcaggatgctgttagtcagctggatgtgcaaaccaaattgtgcattagggatggtttataccgattggcacgaagtgcgcaacataggcaagtttttccaaatatgatgaacaacaatggagatagccaggatgtaaaggatttgcagaatgcagaaacttcacacaagttcgtcgatccccggagcatcgagacgcagacaaacccgatcgatcggtctagagctctgctacttttccaccagtcatcggaccaggcggctgtagctgtcgacgatgcctcgtcactaaaatcccctgctggtaacaaacagcacccgggccctgcctctaaccaaggcctgatgccagcttcatcggtgtattccccaggaggtcaggggacccccaaggatgtacagtccctggacaagtactgaatttgtggcgctgctctccatgacctggttaaagcgccatgatgtggagcgttcaacgtccgtgattttcaatgcaatatttttacagacgtatgggggggctttcacatgatgtttctaggcttatatgtaaaaacaagcatattgtgtacccagtagtctgtagtcggttccaatcacattggttttgacatatgcttgtatcctattgttagacggccgctgtgctccctagtgagtgttgactcacatttcttgtgtaatttaaaaagaaaaaattcttttcccctagct

SEQ ID NO: 452681 - DNA, 910 bp, Sorghum bicolor
cgtccggttgcggcttatattcttgaccatcccgttagtgatagtaaatctggtcacagtgtagggttttctggtgtgcctcccaccacattggtccgaaccttacatagggggaagagcttcaagattggttcactgcagatgttcatggagaacaatggaagcactgaagatatgggtcctcgaccttttcctgtcaaggaggttcacaaaatagcagtactagatattaggttagctaatgctgatcgtcatgctgggaatattctagtgtgcaaggagggagaacttggcaactacaagctgattccaattgatcatggttattgcttgccagagaagtttgaagattgtacatttgagtggctctactggccccaagcccgtgagccattcaatgatgaaaccattgaatacatcaaatcacttgatgctgaagaagacatcaagcttctcaagttccatgggtgggagctgcctccacgatgtgctcgtgtcctgcgcatcagcacaatgcttttgaagaaaggtgcagctcgtggcctcacaccacatgacatagggcgcatactatgcagggaaactgtgaataggggctctgagattgaggatatcattcaggaagcagaggatgctgttctcccagggtccagtgaaaacatgtttgtagaaactgtatctgaaatcatagaccatcaccttgacaaggagtgagtttagaaattcagaataactgatctagttgttccagctgtatccggtttgttgtaagtattgttgacaaggcactggtcaagggactaatgatttcatttgtttgtatcctcaaatgatttcacttggttgtaattgctcagagtacttagcttatgcacattttgtgaataataagtttgttcagttagacctt

SEQ ID NO: 452682 - DNA, 643 bp, Sorghum bicolor
cgtccgatcgtgtatgatgagtctaaccatgagcgctacccgcctggggaccccagcaagcgtgcatttgcctactttgtgctgagtggtgggaggttcatttacgcatctttgctgcgacttctcatcttgaaattcgtcctgagcatgtcagcaagtaaggatgttctcgcacttgcctcacttgaagttgacctctcaagcattgagcctggcaccacggtaactgcgaagtggcgtggccagccagtcttcatcaggcgcgggacagatgatgatatcaagttggccaacagtgttgatgttgcgtccctccgccacccagagcaggatgcagagcgtgtcaagaaccctgaatggctggtcgtcattggggtctgcactcacctgggctgcatcccgctccccaatgcaggagactttggcggctggttctgcccgtgccacggctcacactatgacatctctggtaggatccgcacgggtctggcacccttcaatctggaagtgccgacatacagcttcttggaagataacaagcttctcatcggctgagatttctgttagtgctgcctatggccctgtcgctttgtgtttgatcgacacatttaccttatctcttgcctggtttagggataccttt

SEQ ID NO: 452683 - DNA, 704 bp, Sorghum bicolor
  unsure (1)..(704): unsure at all n locations
acgcgtccgaagagagagagagagagaggagcaaaccctagctccagcttgcctcctactccgccatcatccagatccggccggtgcgtgcgatggcgctgcgcgttctggcctcgtaagctgaggttccctgccacgtccgttctccagcgggcgtcgacccccgtggtgtcgccgccggcgagctcccgacttctcacctcccactcctctcagagtggaggagccaagagagcagtgaatgagaccaggaatgctcgaccaaggtggaggaattacaagaaactggagaagcgttttttgcgcgatatggagaaggacatgaagaatttcaaggagctttcattagctattggacaacttgccaaggaatggtggtactcacttcctctggtggtcttgcggttttgacaaccggctgggcgtatgccattggtgttttcgattggaacagaatgggggacaatgaaccttcggcttaacaaggtgttgcgtagatgcacctcatgaataatctatgagacttttatgtttatgtaagaggaatggaatggtgcggacaaggagaagactgtatgcttgttaagtaatttattagnttgatgtttgactgtttggtttgtggtatgaagcgatccatcacaatctcactacttagtttttttgtgtttggtttgtggaatagaataagttgatctgttgcc

SEQ ID NO: 452684 - DNA, 864 bp, Sorghum bicolor
  unsure (1)..(864): unsure at all n locations
cgntccggggaagtacttctgtggattgtgcaaactctntgacgatgatgtctctaaacagcagtatcactgcaacggatgtggaatatgcagaattggagggagggagaatttcttccactgttcaaaatgcggatgttgctattcaattgctctgaagaatagtcatgcatgtgttgaaggggcgatgcatcatgactgtccaatctgctttgagtacttgttcgagtcgacgaatgatgtttctgtcctgccttgtggtcatacccatcatgtaaagtgcctcaaagaaatggaggagcacttgccggttgcatgccccctttgcttcaagtcggttcgtgacagcgcccgggcatgggagagactcgacatggagcttggcaactctgtctgactcctgtgatgataaaagggtccgcatattatgcagcgactgcggggctatatcagatgtgcagttccatttgattgcgcacaagtgccagaattgcaagtcatacaacacccgccagatctgaagtaagaattgcaagtcacacgacaccgtgagatctgaagtaacaaagccttgtggggtttctgcattcttcaagaagcgtgatggctccttcccgtgagctggtgagcactgggatatctggcaagactccactgggtcctgcggaggcaaacagctcgagattatgtgtctgctgctagctgccatccttcattatacatcttattagcctactaggtcctcttgccccttcactcctgtcgctttgtgattctagtgtgataatgttatatttcctgttgcttgaagattgtagcatcggagttcgtagatgagataatngttcaagctttgtagctgga

SEQ ID NO: 452685 - DNA, 547 bp, Sorghum bicolor
ggcacgagggtccagagtccagaccgggaccgggcggcctgcgtctcgtccccgacccccgcaccgccaaaccctagttcacggcggcgatctggcggcctccgttccgctgcgctccggctgagttgccaatttgggataatcttgttctctctgggtgaatcaagatgtctgggaatgatgataagccacatgctgctgcggacagaataaaggcagccacgttatcagtggccaagggattgagcagggctcaagctgaacgagctgcggctgctgctgcccgcaatgtcaatgcctatgggcagaaggaagagggaccaagccgctggcaggagaggaaggaagccaagagacagatgtatctgatgagtacagagaaggctgcaaagctgggcactgtgaagccaaaagcttcagaaacttcttctgttggcgcgtatacccaatgccagaagtgtttccagcatggtcactggacatatgagtgcaaaaacgagcgggtttacatatcacggccctcaagaacgcagcagcttaagaatcc

SEQ ID NO: 452686 - DNA, 922 bp, Sorghum bicolor
  unsure (1)..(922): unsure at all n locations
gacccacgtccggntggttgaaaatgctacagaggcacaactnnggacagcaaggaaagtcacaatacatcagactacaacaaccctcatagcagatgcagccagtaaagatgaaatccaagcgagggttgcacagctaaagaaggagcttgctgagactgattcagtttatgatactgagaaattggctgagagaattgctaagcttgctggtggtgttgctgttatcaaggttggagccgcaactgagactgagcttgaggaccgccagctaagaattgaggatgcaaaaaatgccacttttgcagctatagaggagggcattgttcctggaggtggtacggcatacgtgcacctatctaccgttgtcccttcgatcaaagaaaaaattgaggaccctgatgagcgccttggtgctgatattattcaaaaggcattggtagcacctgcttcattgattgcacacaatgctggagtagagggtgaagtggttgttgagaagatcaaggacagtgtgtgggaggtgggctacaatgcaatgacggatacatacgagaacctgattgaggctggtgtgatcgaccctgctaaggtgactaggtgtgcgctccaaaatgcggcctcagtagctggaatggtcctaaccacacaggcaatagttgttgaaaagccaaagccgaagcctcaagtggcagagccatcagagggaagccttgccgtgtaaattttaacattcttgaggcagctgtctagacggttgagatcagttgaaagggtagaactttggtttgagaattttgattcaggtccactgaaaggtgtagagtaggattgccattttgcagatgaagagtaattttaatctggtctgaacttgtccaaatcagagaaatttgcatcaccatttttcaaagagagattt

SEQ ID NO: 452687 - DNA, 1026 bp, Sorghum bicolor
ctagttttatctacacatccatatgcaccactctgctggcacacatatcatcatcttgtgctcatgtgcagggagaagatgattcaactcctgctccccctagagctagtgagtcatcttcacaagctattcctattggacatgctggaaaccaaagtccgggcatgcttacctacaatgctgaacaggatgctgttttatcttccggaaatagcactcctgaatcgagtcctcggctctttaacaggagacactccactggacagtcaactacagacagggctggaccatctgatattcagtctttcttagactccctgaagtctcgcttaaatgctgtctctatgaagtacaaagaatctattacaaagagtactcgagggtggaaggagagactcttttcacgcaattcgtccgtggcggatcttggttctgcagtgagaagagaagttaatgctggaatcgcgtccgtgtcacggatgatggagcgtctggaaactagaggaaatagcagaacaggtgatagcccgacagcatccacttctgaagttcctcctgctacagaatcaagcaatgaaagggttacagagagcaactctgctgctgctgctgctggtactactaccactacaagtcccagtgctagcaacgccgcagccccttgtgttgcgacatccggatcaaactaggacaagttggtcagtctggcggcagagcagaagtgcagatgctgtcatttttcctcatccactgcataaacggccggctgcaagtaaaactggaatggtgatttgatgtattggctcgataaaaaaggtggcggtgcgtgtggcctagggaaagtccgatttcatcttctctgttttttgtctctttgtaaaaaagtttcttctgagggcagatgtttcccggtataaataacggatatgtcatcttcatagtgcgcggatcagttataaatatgattggaacagcaaagtttactgctgttatacagttattatactgtggcgcgatttcttgttt

SEQ ID NO: 452688 - DNA, 577 bp, Sorghum bicolor
cgtccgctcgcaaccctcgacctctgccgcagttcagctcccctccgccctactccaactactggaatcgcagatccatctggttctgatcgattccttcacctgctggtgaggaggcctggcttgcttggattgatttttctgccccgatttgcagcggccagcggagatgaactgcgagacctgtcagctgaaggagctggagctggaaccgacggagatcagggatgtgctgcgatgcattttgcacaccatattcttccatagaaccctcagcctggttcgccccaaagatgttgactgtgatttccttgagatcacttatgtacaatgtggtctaccggaactagaaaaggaagttgatgaaaagatagaccagttcactgcttgggtggagaaacacccaaatcgcagaagccagatatgcctctccttcttcgacgagaaacacagacacccaggttggtttgtcaacaaaacagagcgcatttattgggagcaatggttcatcaatttgcatatcatgagccccaaaagatacagcatggtaaacagctccaaagggctgacaaacatt

SEQ ID NO: 452689 - DNA, 835 bp, Sorghum bicolor
cgtccggcggatccgtcctgcaaaaaactcctcccccaacttctccgccggatccctgagaggagtcccggagatgtcggactccgaggagcaccacttcgagtccaaggccgacgccggcgcctccaagacgtacccgcagcaggccggcaccatccgcaagaacggctacatcgtcatcaagaaccgtccctgcaaggttgttgaggtctccacttccaagactgggaagcatggccatgccaagtgccactttgttggaattgacattttcactggaaagaagcttgaggatattgttccttcttctcacaactgtgacgttccacatgttaaccgtgttgagtatcagctgattgacatttctgaagatggatttgtcagccttttgactgagagtggcaacactaaggatgacaccaagcttcccagtgatgaagctctgcaagcccagatcaagagtggatatgatgaaggaaaggacatcctcctgaccgtgatgtctgccatgggcgaggaacagatctgtgctgtcaaggagattgggggcaagaactaaagctgctgcttcgctccggctgtttgtgggcaatacctgttgtcttgtgcttggagttgagaagccaagttgagatacatacataggcgtttaagttatctgtggttttgggtttacctggaatgtgttgagatggtgcgagtacttgtggtacttggttattgatctctggtatctttttgaactgagtaatggtgtaactctggtagtgcatcaatgggaattacaatatatatttgttaaattatttgatttggctttggccgccgtgttgat

SEQ ID NO: 452690 - DNA, 729 bp, Sorghum bicolor
cgtccgatggtgcaccgtcctttcattcgcaaagcagtgagcaacatattctaccagtttgtctttgagactgatcggcacaatgggatcgcagagctgctggaggtctttggcagtgtcattagtggttttgcattgcctctgaaagaagaacacaagatctttctttggagggttttggttcccctacacaaaccgaaatctgttggtgtgtatcttcagcagctgacctactgtgtaacacagtttatagaaaaggacccaaagcttgcaagctcagtgataattggtttgttaagatattggccaataacaaattgtcagaaggaagtgatgtttctcagtgagactgaagagatgtgaggagtctaccagccaggcagaattccagaaatgtatggtaccattgtttcggagaatcactcattgtatcaccagttctcacttccaggttgctgaaagagcgctcttcgtttggaataatgatcacattatcagcttgattgcacaaaaccgccaagtgatcatgcctcttgttgttccagcactagagcagaatattcagaatcactggaaccaagcagtcctgaatctgactgtgaatgtcaagaaaatgttttctgagatggacgatgatctcttctcatcatgcctggccaagtacaaggaggaagaagaaaaacgtgtgtcgctagaagcgaagcgtaagcttacctgggagaagcttga

SEQ ID NO: 452691 - DNA, 718 bp, Sorghum bicolor
cgtccgacgagagggttatttgaagatcaagaagctcgctgctcagcactagatgttaaactgttgttactgttttttgttagtgtgcagctaatatctttgaaattaattgcgtgataaaggtcatgtcctctgtaacctgcagctcaacttttttcatcagtgtttattttccatggtctgagcttagaaagtgtgcattctggttgccaagatgcatgaacatctacaagtctatcacttaacacagcttatgtgaacaagatatagcaatcagaagattaaatactaattattgagtcctaaagctagatggttatatatggttatatgtgtcccctcctattatactgccagagttagatcaactgatagactatggtcactagatttgttcctaggtacataatatcgattgaatgctgatctattaatttattgtagtcagtaaaaaatgttgacaacctcatctttttttctggtatttttttcttttttcccgtcttctaggtttccttacctattccctttcattaatattccttcttttgttttcttgcacccatgtttcttgtttgattcataccttaatctgccttcaatggtcatttgatttagcatcgcgcatgtatgggttccctgatattcttattttttttggaactggggtaaatttattactcagcagctaacacatcattagcaacaagtacctgaa

SEQ ID NO: 452692 - DNA, 701 bp, Sorghum bicolor
cgtccgcaggagaccagcacccgcgccttccccctcgccgtcgcgcgccccacgctcaattttactatgtctgggatggcatctgatgatgcacctgctcaagtgagtgttgaaggagatgtttcagataaaaaagtagaagttcaagaccagaatgaagtgagtgggatgccctcacgacaagaggaggaggcggtaattaagaaaaagtatggaggaatattacccagaaagactccacttatatctaaggaccatgaacgagcttactttgattctgctgattgggctctaggaaagcaaggtggtgtccccaacaagcctaaaggtcctcttgaagcacttcgaccaaagcttcagcctactcaacagaatgcccgtgcccgtcgaacttcatatgcatctgcggacagtgatgagactttgaacttgtctcctgaggatctgatcccgcaaggagagcccagccagcaaggagaacctgtcgaggacaagaacaaggaataagcatgctcagcatagctgttgtgtactccttttatacagaagatgccatttgccgccctcacactaaaaaacttttttgccttgataataagtagtgtggactcagtccaacaatcccgttgagggtgaggttgagatgtgcagattgaactggatgtgagatgtggtatatgcagtatccgctacactgggct

SEQ ID NO: 452693 - DNA, 843 bp, Sorghum bicolor
  unsure (1)..(843): unsure at all n locations
ccacgcggccgggaatggaccaagctggcgaggaggagcaacggngcagccagcagcaggacgnggggaagctcttcaaccgctggaccttcgaggatgtccaggtcaacgacatctcgctgaacgactacctggcggtgtctgcgacgaagcacgcgacgttcctgccgcacaccgctggccgctactccaagaagcggttccgcaaggcgcagtgccccatcgtagagcgcctcaccaactccctcatgatgcacggtcgcaacaacggcaagaaggtcatggccgtccgcatcatcaagcacacccttgagatcatccacctgctcactgacgccaatcccatccaggtggtcgttgacgcgatcatcaacagtgggcctcgtgaggatgccacccgtattgggtctgctggtgttgtgaggaggcaggctgtggatatctcacccctcaggagggtgaaccaggccatctacctcctcaccactggtgccagggagagcgctttcaggaacatcaaaaccattgctgagtgccttgcagatgagctgatcaatgctgccaagggctcttcaaacagttatgccatcaagaagaaggatgagattgagcgtgttgccaaggccaaccgttgagtggagcttgtatcctggtgcacttgcactggaactattatgccgctggcagtcgtattagttcttgtttttgccaatgtttaagactttttgagacctatatctgtggttttggtttcagtgaacaatgaaaattactgagatatgtagttgtttggggacagaaatgcgaggtgcctgttttattgggaaaaaaaaaaaanaaaaa

SEQ ID NO: 452694 - DNA, 765 bp, Sorghum bicolor
cgtccggatcttcctacattaactgagaaagataaagaagacattttgggctggggtgttccaaatgatattgacatgattgctctatcctttgtccgtaaaggatcagatctggtgactgtcagacaggttcttgggcagcatgccaagcgcattaagttgatgtcaaaggttgaaaaccaagagggtgttgtaaactttgatgagatcttgagggagactgatgcttttatggttgctagaggtgatctgggaatggagattccagttgagaagattttccttgcacagaagatgatgatctacaagtgcaacattgctggcaaacctgttgttactgctacccagatgctcgagtcaatgatcaaatctcctaggccaacacgtgctgaggccactgatgttgcaaatgccgttcttgatggaactgactgtgtcatgctcagtggtgagagtgctgctggagcctaccctgaggtggctgtgaagatcatggctcgtatctgcattgaagcagaatcttccctggaccacgaggcagttttcaaggcgatgatcaggtccgcgcctcttccaatgagtcctctggagtctcttgcatcatctgctgtgcgaactgccaacaaggccaaggccgccctgattgtcgtcttgactcgcggtggcaccacggccaagctggtcgccaagtaccgccccatggttcccatcctctcttgtgtcgtacctgtgctaacgacagattctttcgactggaccatcagc

SEQ ID NO: 452695 - DNA, 534 bp, Sorghum bicolor
cgtccgcggcaccgcggcagcgcatcaagccggatctggagaggggtacacgatcgccggccgcgtcaagatcgatggtgcgagtgcgaagggctttggtcttccagccaagacatcaaacacaaaagtgatacttaatggcggccagagggttacatttgccaggccggatggttactttgcattccacaacgtgccagctggaactcatctgattgaggtctcctcaattggttacttcttttccccagttcgagtagatatcagtgcaaggaatcctggttatattcaagcagcattgactgaaaccagaagagttctaaatgagcttgttcttgaacctctaaaagaagagcagtactatgaggttagggagcctttctctgtcatgtcacttttgaagagtcccatggggttgatggttggttttatggtcttaatggtcttcgtgatgcccaagttgatggagaacatagatcccgaggagatgaagcaagctcaagaacaaatgaggaacaaccccgtatcattctc

SEQ ID NO: 452696 - DNA, 974 bp, Sorghum bicolor
  unsure (1)..(974): unsure at all n locations
gcgcgtccgtgaaccatgagcgccgtggcggtctcgtcgtcgtcgtcgctgaacccggacgcgccgctctgtatggcggcggcgctgctgcaggtggaggacttctcgccgcagtggtgggacctcatcaccaccaccgcctggttccgcgaccactggtcccgcgagcacgcccacctggacgagatggccgagcagctcgacgcggctggcctgctgcccgacgaagaggacctcttctacgacgaccagctcgagcaggcccccgccgccgtcgacccagcgcccgccgccgccgtcctcaagacaggtacggatctacctctctctctcgctccgattctagatttgccttgaagacgaatcgcagtgagctcatgtgtgaacgttggtgtgtttttttttcctccgccagatgaggtgctcaaggcgctgaacctgacctccccgaagggcggcgacgccccgcgtgggttccgggagaagcccaggcactccgagaagccgaccaagtacgccggcagccccaagagcagcgccccccgcgtgatccaccagcctcgctaggttcgcatcgcatggggaactcagcaaggctgctgcccctcttccagcctctgctccctggctgctgccgttgcggtctgctctgctctttcaacaaagtttcaagtcaagtactggtggtgggttcgagtagtgatgagtagtagtacaactgtagaagttccttctgtgtatagcaagcaagtaaaaaaaatgaccaaaaatataacaaaacgcagctggtctggtagtttactgctgctgctctctaagtcgtgttcagtccctctggtgtgtctaggtctactagggaaaccccgcaaaaatggaaaagggtgaaggtggagtcccagtgttaggatcaaggatgcaccttntgaagtaaaaatgtgtgatgtgtgcaatggcaggcagtctaatgttacagt

SEQ ID NO: 452697 - DNA, 1020 bp, Sorghum bicolor
gtcgacccacgcgtccgcctgccgttccccttctccttcagttctccccagctgctgcgtgctgctgccctccctccgtccgcgtccagatcccgcccaccaaccgatctggtcggcctccagcatggcggcggcgggggcgaaggcgaaggcggcgggagccctggcgctggcgctggcgctcgtgctcgcgctcgcgggggccaactccgagggcgacgcgctctcggcgctgcgccgcagcctcagggaccccggcggcgtactccagagctgggaccccacgctcgtcaacccctgcacctggttccacgtcacctgcgaccgcgacaaccgcgtcacccgcctagatcttgggtaatttgaacttatccggtcatctggtgcctgagcttgggaaattggagcatctgcagtacctggaactttacaagaatagtattcagggaacaatcccttctgagcttggtaatttgaagaatctgataagcttggacttgtacaagaacaacatttcagggacaatacctcctacccttgggaagctgaaatcccttgtattcttgcggctcaatggcaatcgtttgactgggccgatcccaagggaactcgccggaatatctagtctcaaagttgttgatgtttcaagcaatgatttatgtgggacaattcccgcatctggaccatttgaacacattcctctgagcaactttgagaagaacccacgcctcgaaggtccagagctacaaggcctggccatatatgacacaaactgctagagggcaccatgaagaaaagaatcgctagaaagtaatgagcgcacaatgttaccaaaattgggtgatatagatttattaggtctggttctgctgccactctgtaatcctccctgcatagctcttatttgtaacttgctgtctgcacgaaagttaatgtatgttttagcagaatgctttctgtccgtgaaagtaaacttgaaactgcttattatgactgaaatgatattgtcatttctgctgc

SEQ ID NO: 452698 - DNA, 486 bp, Sorghum bicolor
cgtccgagagcgcacaccatgggaagagggcttgaagaagacaattgagtggtacaccaccaatcctgattactggggagacgttactggtgctttgctccctcacccaaggatgttgatgactcctggagttgaaaggcataactggactgaggagatcaaatctcttacttcttcaccagctgaagctagcacaacagctcctgcaaccagtaccaaaagagccactgatgctcctcaaaagcctttgttcaagttcttaatctatggcaggactggatggattggtggcctccttgggaagatttgtgaaaagcaagggattccatatgagtatgggaaaggacgcttggaggagcgctctcagctgttggaggacattagaaatgtgaagccaactcatgtcttcaatgctgccggagcactgggagaccaaatgttgactggtgcgagacccataaacaggacactatccgcaccaaatgt

SEQ ID NO: 452699 - DNA, 781 bp, Sorghum bicolor
cgtccgcatcctatgacacagtttaccacgggggtaatggctcttcaggttgagagcgaatttcaaaaagcatacgacaatggattgccaaaatcaaagttttgggagcctacttatgaagactgcttaaatttgattgctcggcttccaccagtggcttcttatgtttaccgcagaattttcaagggtggaaaatcaatagaagctgataattctctggattatgcggcaaatttctcgcacatgcttggttttgacgaccccaaaatgctggagctgatgcggctctatgtaacaattcacactgatcatgaaggcgggaatgtcagtgctcatactggtccatctggttggaagtgctctgtcagatccttatctttctttcgcagcagctctgaatgggttagctgggccgctgcatggccttgcaaatcaggaagtgcttctatggatcaaatctgtaattgaggaaactgggagtgatgttacaacagatcaactcaaagactatgtctggaagacactaaagagtggaaaggtcgttcctgggtttggtcatggagttctgcgtaagacggacccacggtattcatgtcaaagggagtttgccctgaagcatttgcccgaggatccacctttccaattggtgtccaagttgtatgaagttgtacctccgatcctcactgagctgggcaaggtcaagaacccctggccgaatgttgatgctcacagtggagttttgctgaaccactttggactatctgaagcacggtattacact

SEQ ID NO: 452700 - DNA, 806 bp, Sorghum bicolor
cgtccgcccacgcgtccgcaagtttcaagaggcacacagtgcaaatcacaaggtggatcaactaggagctgcaagaaggtccacaagcaaggaatcgcacttggcaggtctgtggatcttacaaagttcaatggctacacggaattgattgctgagctggatgagatgtttgacttcaatggtgagctgaaaggttctaacaaggaatggatggttgtgtacaccgacaatgaaggtgatatgatgctggttggggatgatccctggaatgagttctgcaacatggtccacaagatcttcatctacacaagggaggaggtccagaggatgaatccgggcaccctgaattcaaggtccgaggacagccctgctaattcaatggaaaggggctctactgctagggagacacctggcagcctatccgcctcttcccttaactctgagaactgctaatgcctttgcagctggtcgtctgaagtaacaactgggaggaaaaggcaatgtatccataggtttcctagtggaccttaaatgcttttcttttatatatgcattggacgagcccatagtaccctagtatttatagatggtgctcgtcctggtggtctaagttgaaccctcttattcgctgcagttttggtttctcctttcggtgaggtaggttagttggttcgcttgtcgtaccacctaatgtacgcgtagcaaaccaagcgaagccctcccgcgctttccctcggcacaaagcgttgtacatatatcatctggtaatcgtctctcctgtgtcccgtgcttaaagcttcgctgct

SEQ ID NO: 452701 - DNA, 819 bp, Sorghum bicolor
cgtccggtgtgtccgtcctcccaccaccaccgcacgctccgcgctttcgctttctcccgtcttcccaagccttcgcttcgcttcgcttctcgctgcggatcccctctctgtttctagccatggccgggagaggtaaggcgatcggctcgggcgccgccaagaaggccatgtccaggagctccaaggccgggctccagttccctgtcggaaggatcgccaggttcctcaaggccggcaagtacgccgagagggtcggcgccggcgccccggtctacctcgctgccgtgctcgagtatctcgctgctgaggttctcgagctggccgggaacgcggctcgtgacaacaagaagacccgcatcgttccgcgccacatccagctcgccgtccgcaacgacgaggagctctcccgcctgctgggcacggtgaccatcgctagcggcggtgtcatgcccaacatccataacctgctgctccccaagaagtccggcggcggtagcgccaaggctgctgctggtgatgaggactagatccctgaccacgcctttcttccggtggtggcacttcctgtgggtgcggccgtatcaacttgtgcttgtgtagtagtacgttctagacttgccttaggtgttgtgttgggggatgtgttcctgtgtaccgctgctaaactaggttactcttgtgcttgctaaggattagttctgtatttgttgctataaacggtgcatcctttggatgactggttgatcaaacctggtattccaatttacagtttgtgttggatgggttcaaatttttggtcagtccagttgaaaattttgg

SEQ ID NO: 452702 - DNA, 520 bp, Sorghum bicolor
cgtccgggacggtggacagcagcagcgaactcgaggccgtcgctccgccacctccgcactcgcctgtcgcctctcctcgctacggagggacgggaccttccgatcgcctccgccatggctggacctggtgttctcaatgagcgtatcctttcttccatgtcccagaaacatgttgctgctcacccatggcatgatttggagataggaccaggggctcctgaagtgttcaattgtgtggttgagattcctagaggcagcaaggttaagtatgagttggacaaggcatctggtctgatcaaggtggaccgtgttctttattcctcagttgtttacccacataactatggtttcattccacgcacactctgtgaggatagcgaccccatggacgtcctcatactgatgcaggaacaaggtgtccctgggtgtttcctgcgagctcgtgctattgggctcatgcctatgatcgatcagggcgagaaagatgataagattatagcagtctgtgctgatgaccctg

SEQ ID NO: 452703 - DNA, 340 bp, Sorghum bicolor
  unsure (1)..(340): unsure at all n locations
cgtccgcgcgcagcggtccttccccttctctcgccgccgccgccgccgtcggcccgcccgtcgccgatggcttccgccaagttcggtgctgtcgcgcctggtggagaaccgaggcgcgctgtcgaaaaggtcgcgcaacgacgtgtctgtaagggagggggactggaattgtcctcagtgtggtaatgtcaacttcagttttagaaatgtttgcaaccgtggagcctgtggtgcaccccgtccatcaccgagtccaagtcctagaatgatgccagcacctcctcctggtggatatgaccggtcacctctattttacggaggaggtggtggcgtcncacct

SEQ ID NO: 452704 - DNA, 421 bp, Sorghum bicolor
cgtccgcgtgacaccccgcgcggcacctccgcctccccaccctcgctccctctcaccgcccgccaccgccgagatggtctgctcccagctcaccgccgcgggggcctcctccctcgccgccgcagcggttcgttcccgggcgcattccccagccgccgccttcgcgcaactacggtcgacgcctcgcattgcgagcgctggcttgtcggttaagggaaacagggcggctcttccgttggtcgccgccgcggggccggccgcggcggcgccggtggccgacctggacggccccccggccacggagaagcagcccatcattgtcatcgataactacgacagcttcacctacaacctctgccagtatatgggggagcttggattgaacttgaagataccgaatgataactgccctagagatgta

SEQ ID NO: 452705 - DNA, 663 bp, Sorghum bicolor
cgtccgcggacgcgtgggcgcgcgacgagggcgtccgcagcctgtggcgcgggtcgtcgctcacggtgaaccgcgccatgatcgtcacggcgtggcgagctcgccacgtacgaccaggccaaggaggccatcctggcgcgccggggaccgggagccgacggcctcgccacgcacgtcgccgccagcttcaccgcgggcatcgtggccgccgccgcgtccaaccccgtggatgtggtcaagacgaggatgatgaacatgaaggtggcgcccggcgcgcccccgccgtacgccggcgccgtcgactgcgcgctcaagacggtgaggtcggaagggcccatggcgctgtacaaggggttcatccccaccgtgatgcgccagggacctttcaccgtcgtgctcttcgtcacgctcgagcaggtgcgcaaggtcttcaagggcgtcgacttctgaggaccggcgccgacgaagatgatgatgatgacgacaaccgccgccgccgccgccgccgctatgctacccgttcgtcaccgcgttcgctgctacgaataacccgctgctgctacctagaggcggcgactattatgccttcgcttgcattgcatcccgtgttagcctttgtgttcctctcttgatgcatcctgttgtatctggatggatttgacc

SEQ ID NO: 452706 - DNA, 580 bp, Sorghum bicolor
ccggtcgaccacgcgtccgtatggactcgttatgaggagtgcgtgaccaagatgcgcctcatgtctttgcttgatctgagcagccgttgctctggcgaaattccctattctgcaatcactgttgaacttaggatcaatgatgatgaggtggagcaatggattgtaaaggcaattgcatccaagatattggattgcaagattgaccagcttaaccagactgtcatcgtcagtcggcatatggagaggatcttcgggatggcacagtggcatggtctgcgcacaaagcttggagtttggaggggaaacattgccagtgctatcaacacaatacaagctaacaaagttactgaagacgggacacaagggatgcaaggcttgatgatccgctgatttgaggcgggtctgtgaattgagactatagcgtgggagattagaagagcaatctttttgtatgagacaaattgtaatgatttacttagatcctgtgcccatgttggatagatcctaagcatgctaagcagtatcgttgttccttgtatttggtcaggcagtcgtgcagtgcaaggcacaatgtttttct

SEQ ID NO: 452707 - DNA, 818 bp, Sorghum bicolor
cgacccacgcgtccggcgatcaccaaggttcaatggcccgggttccaaggggtccagtttcagaagccctttgtctaagctcatcgagagcgttgacgagggcagtgatggccatgaagatcaaaacgagtctgatcgaatcttctatgctggatggaatacacccaacaatcctagcagcagcaaacctataggtcagaatggcaatgcttcaaaaagtgccatgaacaggagtgctgatgaacaacttccatcaagtatgtgttttgtcaggctgtcggatatgagtgcagatgagtgggatgtattccttgaaaaattcaaggaactgctgaaagaggcactacacgagagcgcaaggacagcagcaggtcaaaggatgaagcagcgcctgggcacttcatgcaagttttgagtagggcaatagtgcatcagagaagaaaaatatgcagtgctatttgtactgcctgcttatggagtgagtacaggatgaagatatcatcgtatgaggcaccttcaaccttgtgcaacggtgtaggttgcaacagctatgtccagcaggtagataggaccacaagcatatgtagtgatggtgtggagaactgctacgcatgtttatattagctatatgtttaagaagggaaatgcttaataataaatgtttgtcagcctgtgtatattgggttgatgttagatactgcagccttagcatgcaatttctttcttagttgctgaaaattctttgtagcttgtgatgtgacctgtgagctgtgtaaatattgcaccttttttgtttaaataatgcttacctggtgttg

SEQ ID NO: 452708 - DNA, 666 bp, Sorghum bicolor
  unsure (1)..(666): unsure at all n locations
ccggccttgtttttttttttttaacagacgcagggctgcttccttcaaacctctcaacgatactagtatttacataggtcagtttgttcgcaatcccttctcaagatcatacacgaagaaggaaaacgaaatcgcactacatggatggccaccaatacaaacaaaaatccacggtgagccgccatggccgcatggctggcggcagggagggaggtcctaactactctacagacagacaaagaacggcgtgggcgctctgcccggcccgtgtgtctagactcgaggctctcttctaccagcactggtccgtctcccatgtgcggcggggccggccgtagacgccgccgccgctccacgggcgctgcgccacggccacagcgccgcggtcgtagcgcgcgcgggtgtccgggtcggaaagagaagtggaagacattgtcaacactttgctgaccaagaaccttgtgataaggtgtgatccaatttatgaaaactgtgaggcctggcaagaaaaagctatcatcatggcctgctcatttggagatacataatgaacaagtgttcactgaaaatgatggtttttttgcttggatgtttctgaaaaggcggaccttgtggcagacaattctttcatttgtttggcctctntttgcactggcagtctgctta

SEQ ID NO: 452709 - DNA, 561 bp, Sorghum bicolor
  unsure (1)..(561): unsure at all n locations
cgtccgcggacgcgtgggcggacgccgaatctggcgtgagatccgcccgactctcgctccgttccggcgctctcggccgggtaaggttccaccttccaccgacgacatggcggggaagggagccaaggccacggccgccaagtcgtcggacaaggacaaggggaagaaggccggcggccccgtctcgcgctcctcccgcgccgcacctcaggagaaggagaagtcagctccgaagaaagatgtttatcaattgttcgctgagaaggttagggataacaaacaactggaatcgagatgggcaatcatgcaagaaactcgtgtggagtattttcgtggaaaagatttcaataccttcatcaagaatcatccagaagtcagggaaattttggggccagataaggatttagaagtggaagacattgtcaacactttgctgaccaagaaccttgtgataaggggtgatcgaattatgaaaaactgtganggcctggcaagaaaaaactatcatcatggcctgctcatttggagatacataatgaacaagtcttcactgaaaatgat

SEQ ID NO: 452710 - DNA, 469 bp, Sorghum bicolor
cgtccggtcattgtcaatttctcccaggataaatcatggcgtgttcgttatatggttgccaatcaattatatgagctctgtgaggctgttggcgcgctgagcctacaagagctgatttggtgcctgcatatgttcgactccttcgtgataatgaggctgaagtgcggatagcagctgctggaaaagtaactaagttctgtcgcatattaaatccacagatttcaatccaacatattcttccgtgcgttaaggaattgtcatcagattcatcccagcatgttcgttcagctttagcctcagtcattatgggaatggcccctgtactgggcaaggatgctaccattgagcagcttcttccaattttcctctctttgctgaaggatgaatttcctgatgttcgacttaacataatcagcaaacttgatcaagttaatcaagttattggaattgacctgctatcccaatcact

SEQ ID NO: 452711 - DNA, 550 bp, Sorghum bicolor
cgtccggagagagagcaactgagcaagagagtggacggcgaaggcgacgatgagggggtggcgagaggaggtggaggtggtggctctgtcgctgcggggctacggctacggcaacgaggaggatgaccggccggagaagccgcggcggtacggggtgacggagatgcggagccccttctactccttccgccccgcagaccaggcgctccaggaaatattggattctcttggtccatttgttgatggtttgaagttttctggaggatgccatagtttgatgggaaaggatttggttagagagatcactgatctagcacacaagcatgacatttatgtgagcacaggtgattgggcagagcatttgctgcgtcaaggaccctcttctttcaagcaatatgtagaggaatgcaaggccttagggtttgacacaattgagctgaatcctggatctctcaacctccctgaagaagctctgttgagactagtgcgcctcatcaagagtagtggtttgagggcaaagccaatgtttttagtgaaagttgacagttct

SEQ ID NO: 452712 - DNA, 526 bp, Sorghum bicolor
cgtccggactgatgttcaatgtttgcataggtggcagaaggttctgaaccctgaacttgttaaagggccatggtccaaagaagaagatgagatcattgggcagatggtaaacaaacatgggccaaagaaatggtcgaccatagcccaagctcttcctggacgtattggaaagcaatgtcgggaaagatggcacaaccatcttaatcctgggatcaataaggacgcatggacacaagacgaggaaatcaggctcatccatgctcatcaaacttatggaaacaaatgggctgagttgacaaagtttttaccaggaaggacagacaatgcaattaaaaatcattggcacagctcggtgaagaagaaagttgattcatacagatcatctggtttactggctcaattccagggtctgacacctgttgaatacactcctggtggtttaaatgttgattcttcatctgccatgaccaatcaaattagcgaagacagtggttttaatgtttttcgggaggctgaagattcaatg

SEQ ID NO: 452713 - DNA, 524 bp, Sorghum bicolor
cgtccgcccacgcgtacgattatgaagatttctgccatattgccacagtctgcacggagcagattggtcagaaatgcaaacgtttcttcagcccttcaaactttatgaagtttgagaaggatgattctgggaggattgctatcctaccattttatctttatgtcatgcgaacagtttctcttactcaagcaagaattgatatgagtgagcttgatgaggattctgatggtttccttcagcctcatgaaatggaagcatatattagaggactcatccccaatttggcacaattgcgtgacatgcccactgcattggtcctgttgtactgccgtatagctgcacgcaagttctttttcttctgtgatccacacagacggtggaaagcatgtataaagaaagtgttgctgagcaattgtcttcaagagctaatggaactacatcaggagagtgaggaagaggtaaccgataccgagcaggccaaaaattggttttccttaacttcaactcagcgcatatgtgacatg

SEQ ID NO: 452714 - DNA, 488 bp, Sorghum bicolor
cgtccgatctttgtcttcttcctcaaccgtcatgcactcagcaatcgctagaccttaccatctcagagtcactctcatgcgcacacacagccagtggtttgtcgctagcacagtagaagcaagaaggtgcgatccgcccagatctggtcgctgccgctcctcctgctccttccagctgctgatccaagcgcgccgtgagcatcgtccaggagcaggtgcgtcgtcgagtagcaaccaggggcacagactaagaaacgcaatcccacatcacgggagagtgctactttttctcttacaaatttcctgattggttttttacccccacaaaggggtagggacccgttcttggggtatctatgttcctctttggattttttttttgggtggatttggggttgggcttcctaaattttttggagatatatgttcttcttgaatctattttggtttctgaagacaggggaagcgagatctcgagagagggagac

SEQ ID NO: 452715 - DNA, 318 bp, Sorghum bicolor
cgtccgattaacattatacttggagctgcaaaaggcttgtcttatttgcatcatgactgttcgcctcgaataatacatcgtgatattaagtcaagcaacatcttgcttgatggcgattttgaggcccgtgtgtcggactttggacttgcaaagcttttagaggatgaagaatcacatattactacaatagttgcaggaacatttggttatcttgcaccagagtatatgcaatttggcagagccaccgagaagactgatgtctacagttttggggttttggtacttgaaatacttagtggaaagcggcctactgatgca

SEQ ID NO: 452716 - DNA, 360 bp, Sorghum bicolor
gcgtacgggtcctgcgcgagggcacgtacctggacgtggacacggagctgcgcctggtcaaggaggtgaagaagtcgctggccatggcgaacgctggcgacggcgacggcgacgcgcacaccgacgtcaagatgacggagcggaaggcgatgaaggagctgggactgcagcgggcgcggcacttcgggtggtccaacacctacgtcttcaccaagggccaggggggagtggtcctgggccagcagctccgcggcgtctgcgccggcgacggaggcgacattccccgtggggtgatgcggcccagcatcatcaccagcgtgcgggacgacccggtgcccgggtggatgcaggggacgcgca

SEQ ID NO: 452717 - DNA, 129 bp, Sorghum bicolor
tcgaccgacgcgccaggcgtacgggcgttgtaattttccgagatattgtatttgcggcggcagcatattccgtactctggttaaatctgtgtttgacagaaaagctgggggggggaattgttaaaatgg

SEQ ID NO: 452718 - DNA, 460 bp, Sorghum bicolor
cgtccgctgccgcagattgctgaacttgctgatcttgcacgatgcataccgaatactcctctggatgaagaaagtgcatgtatcccaaatggttacctgcatagaagatcttcaagaaattgttaaccgcacgaagcatgaggctctcacagtgcagacatttggaacacgtatcgaagaactacacagggagaagtatctgcagctctgtgactcagtccatatggacaaggctgattcagccagcaccataatggatgaggaagacgacgttgttcgtagcttgcgcgcaagtcctgtccatccagtcaaggatcgcacttcaattgatgactttgaaatcatgaaacctattagccgtggagcatttggacgtgttttcttggccaagaaaagaactacaggagatctttttgctataaaggttcttaggaaggcaaatatgattcggaaaaatgct

SEQ ID NO: 452719 - DNA, 723 bp, Sorghum bicolor
cgtccggtggaggagttatttgaagaaggctctgcaatgttagaagaaaggttgggtaggaatttgtccttgaaagcagcttcaccaccttttcgctgtgcaatctgccaagtggaccaagagccattcgaagatttgatgacagataatggaggtggttactgctcttccccatacgctccatggggtggtccacatctctgtttggactgtcggaagaagaaagatgcaatggaaggtaagagatctagccgctctacagcatgcaggtgaaacaatcaagactctgtttaagtcaagcctgcggcctgcctgcttcacagagaaaagaagcaatgagaggacaataagttgctggatccaagtataattgtttgctgaaactaactgtattgccagcccggtacaaaacatatttggttggtgagcgctaactagtctgttacctgcgtacaacccatatggaaaagtttgatgttgcggaaatagctccaatgacgaggttgtagtttgacggtaccctgtagtgtgcctcttgtgcagggaaacattgacctgcctattgctgcctgtgattccccccccccccctcccccttctatataatagctactgagggttctctttgtattattcgtggaacatatttttggtgggattgaagtaagtacgaagcaatgtacgttatgtgtaaaatattccttgagtaatgacctgttattg

SEQ ID NO: 452720 - DNA, 591 bp, Sorghum bicolor
cgtccgggggaagaccggaagagagcaatggaggcaagggtcgcagcaggagtgcccgaagacgaagagtccggcctcctcccccgcccgtccgccaccggccgccggccttcttcccgcggcccccgcttcccgcctccaccggcggcctgggtgacggtggacggccccctcgggctgccgctggaggacgcgggaggacacgcccgccgcttcttcctctggggtttcgcgtgcctccccttcctctgggccatcaactgctactacttctggcccgtcctccggtcgccggccgcatcctcgccctccgccttcgcctccatccgcccccatgttgtgcgatcggcaattggcttcaccatcttctctgttgttctgataacctgggccacgactttcattgttggaggcgagcggttatttggaccagtgtggaatgatctagtgatgtataatgttgccgacaaggcttggcatcactggattcatgggatagcctgtgatgtcttcctcatttcgactggacttggtccaaccaagtccgaaatgatctgttctatggatcttcgtaagaattgctactatctg

SEQ ID NO: 452721 - DNA, 707 bp, Sorghum bicolor
cgtccgaccgtgtcgccctcgctcggtctccagcctttgctttgtgcgcagccgcagccgctgctttttcctgcctcttcatcctgcccgagggcgaaacccccaaaccctctccctccctccctccctcccgttgcccggccgatccatccaccggcgatgacgctgggaagctccggcgccggatcgagcgtcgtcgttcctcggaacttcaggctattagaagagcttgagcgtggagagaagggcattggtgatgggacagtgagctatggaatggatgatgcagatgacatctatatgcggtcatggactggtaccatcattggccctcacaatactgtacatgagggtcgcatctaccagcttaagttgttttgtgacaaggactatcctgagaagccaccatctgtcagattccactcaagaatcaacatgacatgtgttaatcacgagacaggagtggttgatccaaagaagtttggtttgctagcaaactggcagcgggactacacgatggagaacatcctaacccagctcaagaaagagatggcatccccacagaaccgcaagctagtacagcctccggaggggacattcttctaaagacgccagctactcatgtccttccatggtgactcaagaaacagcttccgcacctggtttctatatatctaatatatgtctagggtaatctcccagatatc

SEQ ID NO: 452722 - DNA, 798 bp, Sorghum bicolor
cgtccggcccaaccccatctctctctctctctctctcggcctcgcccaccccctcgatcgatcggccggtcggcgatgacgccgggaagctcggccgccggatccggcgtcgtcgttcctcggaacttcaggctcctagaagagcttgagcgtggagagaagggcattggtgatgggacagtgagctatggaatggatgatgcagatgacatctacatgcggtcatggactggcaccatcattggccctcacaatactgtccatgagggtcgcatctaccagctgaagttgttctgtgacaaggactaccctgagaagccaccatctgtcagattccactcaagaatcaacatgacatgtgttaatcacgagacaggagtggttgatccaaagaagtttggtttgctagcaaactggcagcgggactacacgatggagaacatcctaacccagctcaagaaagagatggctgcctcacagaatcgaaagttagtgcagcctccagaagggacattcttctaatgaagtgttcactggcccatcatgggatccaacaacagtaacgataagttgttttatgggttaaaaaacagctcctacatctggtgccagtgtctgtctttatggttttttttattatgctatgttcttgtatctgtgaaccgcagtgaacaacagaagcatcttccttgcaattcttgcatgggttgttgcaggttccagggatgtatctttgaaagtggcgtagtgccgtgttaagtaaacaaatgcgtcttatatctataatattagtgttga

SEQ ID NO: 452723 - DNA, 626 bp, Sorghum bicolor
cgtccgactcactgcattccagcgcctggacttcaccagtgatgatgtgctggattgcttgaaagaggagaacattattggcaaaggtggtgctgggattgtgtataagggggcaatgccgaatggtgaacttgtggctgtgaagagactcccagcaatgggccgtggctcatcacatgatcatgggttctcggcagagatacaaacacttggtagaattcgacaccgtcatattgtgcgcctgctaggcttctgctcaaacaacgagactaacctgctggtttatgagtatatgcccaatggcagccttggggagatgctccatggcaagaagggtggacacctgcactgggatactcggtacagcattgctattgaggcagccaaagggctttgctacttgcaccatgattgttcacctttgatacttcaccgggatgtcaagtcaaataacatacttcttgactccaactttgaagctcatgtggccgactttgggctagcaaaattcttgcaggactcgggggcatctgaatgcatgtctgccatcgctggctcatatggctacatagcgccagaatatgcatacacacttgaaggtcgatgagaagagtgatgtctatagc

SEQ ID NO: 452724 - DNA, 1017 bp, Sorghum bicolor
cgtccgcatgggcacagttgtggatgccgctccagctgttgtggctgaggaggtcactgagaacatgttgggtggcaagaaagttacagttgtatttgttctaggtggtcctggaagtggaaagggcacacaatgtgccaacattgtggagcactttggattcacccatcttagtgctggagatcttttgcgtgcagaaattaaatctggctctgagaacggaaccatgatcgagaacatgataaaggagggaaagattgttccatcggaggtgactataaagctgttgcaggaggcaatgataaaaaatgaaaatgacaaattcctgattgatggatttccaaggaacgaggagaatcgtgcagcgtttgagaatgttaccaaaatttctcctgcgtttgtgctattctttgactgttctgaggaagagatggagagacgtctcttgggccgcaatcagggaagagttgatgataacattgaaactatcaaaaaaaggtttaaaacctttgttgaatcaagtctgcctgtcattgagcattacaactcaagggacaaggttaaaaagattgatgctgcaaaaccaattcctgaggtgtttgaagacgtcaaagccatttttgccccattttcttcaaaggctgaatagagcaatttaagggacatgataaaggtgatacatggtgtcataggcaccacacaaacatatctgtgattatgaaccctttaatatagaacaaaagttttggctcatatgagctaccagcatatcagtaggcaattcgatttgttaccagcaataagtagatctgattcccagtggtcctgctagagtaacattttaccactgtgttgtttatgtatcctttgatgttgtgttgtaccattgtgtaattttactttacgcactgatgagaccttgtgccattccaccaggtttcttgttttattgaaagtgtaaaactgctgtcatattctttatgcgttgaaatatattcattgcaccgaacttttgtc

SEQ ID NO: 452725 - DNA, 673 bp, Sorghum bicolor
  unsure (1)..(673): unsure at all n locations
cgtccgctatttcagagctattgcaagaaattgatcgtccgatcatcctgtcaatctcaccaggaactgaagttactccagcattagctgagaatattagtgatcatgttaacatgtataggataactggagatgattgggacaactggaaggatgtgagctcacattttggtgtgtcgagttccttcgctgctgctaagaagatgggggccaccgggttgcgaggaagatcttggccagacttggacatgcttccatttggatggcttactgatccaagtgtaaatcagggccctcacaggaaatgtaaccttactcttgatgaacaaaaatcacagatggcactttggtcaatggctaaatcacctctcatgtatggaggagatttgaggaatcttgacgatagtacattaaacataattactaatcctgctttggtgaggataaaccactatagtagaaataacatggagttccattatgtgtacagtgaaaggacatcaaatgaagaacatcctggtcactntaggtctncttatcctgttcaccttaccaagaatgatggcatgttttgtcagtctcactacttgcagtgacgatgcagctatggatggtatatgtttncacaagatgggaaccagatcatatatgcaggaactatgaaatactgaat

SEQ ID NO: 452726 - DNA, 421 bp, Sorghum bicolor
  unsure (1)..(421): unsure at all n locations
cgtccgcgaggcggcggcggtctccgtcgcgaggctaggccagcgggccgcacccatggcgtccgtggcggagctcaaggagaagcacgccgccgcgacggcgtcggtcaactccctgcgcgagcgcctccgccagcgccgggagacgctcctcgacacggacgtggcgaggtactccaagtcgcaggggaggctgccggtgagcttcaacccgacggatctggtctgctgccgcacgctgcagggccatagcggcatggtatattctctggattggacccctgaaaagaattggatagtcagtgcctctcaagatggaagggttaattgtgtggaatgcattgacangccagaaaacgcatgccataaagctgcattgcccatgggtgatgacgtgtgcttttgcacccatggacaatct

SEQ ID NO: 452727 - DNA, 564 bp, Sorghum bicolor
cgtccggcctggggcgcagatcgtctccagagggactccgcagggaggattccatatgccgttgcgctgaagcgcaaccacgaggcgtgtgcggcgctgctgaacccttcgtcggcagagcccatggtgtggccttccccgctcaagttcatcagcgagctagacccggaggcgaaggctctcctggaagcggcactgatggaagccaacagggagagggagaagaagatcctgaagggcacaaagtactctccgccatcatcgccaccttccacttgcgagcatgagattgatgccgatgccattgatgatgtgtcgtcagagacgagcgacacggagctgtgctgcatctgcttcgaccaggcgtgcacgatcgaggtgcaggactgcgggcgccagatgtgcgcgccgtgcacactagccctgtgctgccacagcaagcccaacccgacgacgctgacactgccgtcgccggcctgcccattctgccgcggcaacatctcacggctactggtggcccgagcaagcaccgcgtcgttggacgccgacaccgacaaggctgct

SEQ ID NO: 452728 - DNA, 745 bp, Sorghum bicolor
cgtccgagggtttcaaaatgagtaaatcagtcggtaatgtagtggacccagagaaaatcattgttggtggcaaaaaccaaagggaagaacctggctatggagcagatgttctccgtctatgggtttctagtgttgattactctaccgatgtgttgattggtccacaaatcttgcgccagatgtctgacatgtatagaaaactacgaggcacgatgcgatttctgctgtcgaatctccatgattggaagccggataattctgtgccctacaatgacctgccaaaaattgacaagtatgcacttttccaactggagactgtcatggcttccatgaaggatagttatgaaagttaccaattctataaagtatatcagatgcttcaaagatttgctactgttggtttgtccaatttctatttggatgttgcaaaggatcggctctatgttggaggccgagttagcttcacaaggaaaagctgtcagactgtcctcatggcacatctgctctaccttgttagggccatttccccgattatgcctcacttagctgaggatgtctggcagaacctaccctttcaatacaccttgcaggatggatcccctgcaaactttgtttttgacctgaaatggccagaaaagaatgaagaatggctctcagccccaaaggatgatgttgatttcctgggtgttatcctggagctgaggtcagaggttaacaaaattttggaaaatgctcgcactggaaa

SEQ ID NO: 452729 - DNA, 1718 bp, Sorghum bicolor
  unsure (1)..(1718): unsure at all n locations
cgtccggttatcttgtcgctccacacccaccatcccattcagtttgcctctcttcttctcttcaagtcccagccacaaggcttggactcttggagggaagaagacaagcttagccaaagaacaaacgccgccggcacgcacgcagagatggcgatctgcagcgcgcacactaccaccacctccctgcactccccatgcacgaccaccgtctccaacgcagctggcttcagacagaggcaagtcattttcttcaccagcagcagcaaccgtaggagctgcggcggcggcggcggcggcagaaggcatcacggaggggcacggaccagctgcttccaggtctcatgctccgtcgacaagccggtggtgattggcctggcggcggactccgggtgcggcaagagcaccttcatgcgccggctcaccagcgtctttggtggcgccgcggtgccgcccaagggcgggaacccggactccaacacgctcatcagtgacaccaccacagtgatctgcctcgacgactaccattccctggacaggaacggcaggaaggagtacggtgtgaccgccctcgacccaagggccaacaactttgatctcatgtatgagcaggtgaaggcgatcaaagatggccaggcagtcgagaagcccatctacaaccatgtcactggcctcctcgacccgccggagcttatcacgccgccaaagattttcgtcattgaaggtctgcacccaatgttcgatcagcgtgtgagggacctcttagatttcagtatctacttggacatcagtgatgaagctaagtttgcatggaaaatccagcgggacatggcagagcgtgggcacagccttgaaagcatccaagccagtatcgaggccaggaaaccagattttgatgcttatattgatccgcagaagcagtatgctgatgctgtgattgaagttctgccgacccagttgattcccggtgacaatgaagggaaggtgcttcgtgttaagctcatcatgaaagaaggggtgaagttcttcaacccagtttatctctttgatgaaggatcgagcatcagctgggtgccttgtggaagaaagctcacatgctcttaccctggcatcaaatttgcctatggcccagacacttactttggaaaggaggtatccgttctggagatggatgggcaatttgacaaactagatgagctcatctacgtggagagccatctaagcaacctctcgaccaagttctacggagaggtgacacagcaaatgctaaagcatgcagacttcccaggaagcaacaacggaactggtctcttccagaccatcattgggctgaaaattagggacctctatgaacagattgttgctgagagggctggtgtaccggcggaagcagccaaagtttaatgatgcatgcattcagatctcctatcctaaaactacagctcttcaagctcaatgagaacaaccaccttcacatctcttcttgtaattagttcggatatatggcaagctaggaggaggtagaagaaatgtcattgcagaaactcaggaaaaccacgtgcaatgaaatttctagaaatccctctccttggagggcggtcttatataatcgcttcttcacttgtttagacgtatatcttcttccatacttcattgcagaattgaaagaaattaaaattaaaggggcctactactatcaagtgtaggaatttgaattcnna

SEQ ID NO: 452730 - DNA, 603 bp, Sorghum bicolor
cgtccgatttgttgatgtttctcccgaagagttgcagcaaaagaacctccaatcttcactggagacagtagatgtaaaacatgatagtacagacagtgaaagtaaggaggatattgaggaaaaagttcccacacatggagcgacttttaagccgaatgaagatgctgctcgtgggccaactgtacctagtaactcgggacctatgctatccgttgagacaattgagaaaatgatggaagatccaactgtgcagaagatggtgtatccctacttgcctgaagagatgaggaacccagattcgttcaagtggatgctgcagaatccaatgtaccgtcaacaactacaggatatgctaaataacatgggtgcatctcctgatcaatgggataaccgcatggttgatcacctgaagaactttgaccttagcagtccagaagtgcggcagcagtttgcgcaagttggcatgactcccgaggaagtggtatcgaaaataatggcaaacccagatgtagctgttgcattccaaaatccaaaaatacagacagccatcatggactgctcgcagaaccctctaaacattgtaaaataccaaaacgacaagga

SEQ ID NO: 452731 - DNA, 686 bp, Sorghum bicolor
cgtccgattagtgcttcaactgtagattttcatccatcaagggagggtgtttcggcaatagaatttgatagaaagggaatataccttgcatcagtgacgctctcagggtgtctgacagtgcatgactttgagaccttgtactgctctaaatacagcccatcatgcagtatgccagatgaatcatcaaattatgtgatccatatatctaaccgaattcccctaaattctgtgcgatggaatccaggaaaccaagacgagattgcttgcacatcaagtcaaagtgacaaagttttcctctttgatattggctatgtctcatcagcaccaactgaagttttgcataaaggaaaatccaaattccctgcgctctactctgaatcatgcaagagtctgactgatataacttttacttcagatgataagtcacggatgtttgcgtgtggccttgatggggcagtgtacatgtgggacaggcggtcaagtaagacacactgtcttgagcttatggcatctccagaatctcagttcaacactgtcaagctaacagtggataatcggactgtgtttggtgcactaaaaatggacaatccatgtttgggatctccgtggaggagggcatcagctgcttttaaagccacaatgagggtcaacaattgctatccgtgaagctatcaacgttgttgggc

SEQ ID NO: 452732 - DNA, 733 bp, Sorghum bicolor
attccgggtcgaccacgcgtccgcggacgcgtgggtttcctcagctccgattttctgttttacgtatacctcagtcgtctgtgctctgaattcagttccgtctgttgcgttggatttctatcactccaaagaatttttaagtgctcctatcactagttgatttgagtattttagttttggaacgtgcttgtgttgggcggtgattttgggacagcggctaaatatttcgaaagaaatttgaggctcccattcaccccccctctggtcgccgtttacggtccttcactgttctattcgaatatcctgtataactcttcaatctccattaaacattttataataatggtctatgatgctagtagtgcagcattcagtttcggtcctggttgtgagacatacattgactcttacatgttcaatgggattttagaggatctttcacgtcgaaagccctgagaagacagctcaagatgattaccagaaacttgcctctgctgtatatctccaagtcagcaccatcagtcaggctctcatcttcgtgacaaggtctcgcagctggtcatttgttgagcgcccgggctttctattagtgtttgctttcttggtcgcacagctgatagctacattgatagttgtatacgctaactggggattcacttcaatcaaaagcattgggtggggcttggctctgtgtgtgtggctctacaatctcgtttttacttcccactcgata

SEQ ID NO: 452733 - DNA, 500 bp, Sorghum bicolor
  unsure (1)..(500): unsure at all n locations
cgtccgcccacgcgtccgagcacagctgcgagctagagggaaaggcagggaagacaagaagcctgaacctgcaaaagtgcagggtgaaaggggcagtgttgattcacttcttaagctgcttaggaaacactctgtggaccagagaaggaagagcagtgacgacaaagaacagaattttgatgtaatgaggagaaacaacgattctggaaatagacaaagttcaaccatctttggcacaaaaagtgacatccaggaagagcagaggaagccacctccggcacccttcaaaaggccagcttcaaatttcaggcgaaggtctcctgttcctggagtgaagttccagcctgctatcaatacggacgtagacagagatgccgatcgcaagtccatcggcagtaatgtcgccgatgctgtacagaaagctaagacagttcttgatgaganggactgtacagatgagcctgactccatgtcttcgtatgaacctgattctgtaatag

SEQ ID NO: 452734 - DNA, 655 bp, Sorghum bicolor
  unsure (1)..(655): unsure at all n locations
cgtccgcccacgcgtccggcacttacaaggacattcagccggggagcatcatcccttacctcgtccgcgtcgtgctcctcgtcgacgtccccatcatcggccgcatcaagatcccgatccagaaggacggcgagatccccatcccgtacaagcccgacgtcgacgtcgagaagatcaagttccaccacttctccttcgaggagaccaccgccacgctccacctcaagctcgagaacaagaacgacttcgacctcggcctcaacctgctcgagtacgagatgtggctcggcgacgatagcatcgcctccgctgagctcacccagaccgccaagatcgagaagcaggggatcaccaggatgcaggtgcccttcagcttcaggcctaaggactttggatccgctgtctgggacatgatcaggggaaggggcacggngtacaccatcaagggaaagattgatgtcgacactcccttcggcaacatgaagctgcccataagcaaagagggtggaaccacctgcatcaagaaggacgatgacgacgatgacgacgatgacaactgaactgaggcaggactggagcgctgctgttacctttcacacaaaatgcagcaaagccaaaaaaggatgtggngatcgtcatccacctgataccctta

SEQ ID NO: 452735 - DNA, 1316 bp, Sorghum bicolor
  unsure (1)..(1316): unsure at all n locations
cgtccgcccacgcgtccgggccgtgcggcccttgatgcccggttcaaggtctctggtatcccacacctggtcatccttgatgcaaaaactggtgaagtttacactgaagatggtgttgaatttgtgagtgagtatggcgtggaggcttaccctttcacaccagataggatcaatgaactgaaggaacaggaaaaggcagaaaaggagaatcaaactattcaaagcgtgcttggcacatctactcgagactatctcatttcaaacaagggagacaaggtacccatctctgagcttgaggggaagtatgttggtctgtgctttgtggtggatggctatggaccagtcattgaattcactgattcgcttgctaagatctatgagaaactcaaagaagtgggggagaaatttgaagttgtagctgtatccttggacagtgagagtcagcatttatatgagagttttgcaaagatgccttggcttgcaattcctcaaggtgaccagaagtgtgagaagctggttcgttactttgagcttaggtctcttcctacactagttctgattggccctgatgggaagacactgaacagcaatgttgcggacataattgatgagcatggttttgaggcatgggagggcttcccattcagtgctgagaagctggaaattcttgctgagaaggcaaaggctaaagctgcatctcagaccttggagtcccttctaatcagtggtgatttggactttgtcattggaaaaggtggagcaaaggttcctgtatcagaacttgttgggaagactgtcctcctctacttctcagcaaaatggtgtggaccatgccgtgccttcctgcccacacttgtcaaggaatacaacaagatcaaagagaagaacagtgattttgagatcgtcttcatctccagtgacagggatcagagctcattcgatgattttttctctcaaatgccatggcttgctctacccttggaagatgaaaggaaggtatccctgaagaagaccttcaaaatccgtgggatcccttcacttgtcgccatcggtcctactgggcagacagtcagcagggacgcaaaggcccagctgatgatccacggtgctgatgctttcccattcactgaggagagactcgaggagctgcagaagaagctggacgagatggcaaaggggtggcctcagaagctgaagcatgagctgcatgacgagcatgaactcgtcctgcttgcgccgggtacgtacggctgcgacgggtgtgaagagatgggcagcacatggtcctacangtgcgatgagtgtgactttgatct

SEQ ID NO: 452736 - DNA, 495 bp, Sorghum bicolor
  unsure (1)..(495): unsure at all n locations
cgtccgcttctctctctcgccgccccaaaatccttcctcagagatactcccggccgacaactcccgcgcgtgccgatccctggcgaaatagcgagcgcaaccgccaccgagaggtcgtcccttctcttccagtccgcgtcctccttgctgctgcgtcccggagcggagttgagtcgagatacaaccggccgattgatttctctcctgcgctgtcaggttttaattgaggtagagaaagatacctttctgtccggtcatggctttgccagctgcagcagctgtttttcttgatgagaacatgcagatacataaagaaaacagggttgatgcaccaagtgccaaaccactgaaatcatcagcaaaacctgagaggaaggctcttcaggatgtgtctaacattcgtaaaggcactggtttaaagaacagatccaccatcaaagagaggtccaccttgaaagaaaggcctgcacttnacgatgtgtttaacaaccttaa

SEQ ID NO: 452737 - DNA, 639 bp, Sorghum bicolor
cgtccgcgtacgccgactcctcgctgcaggcggcgctgtcgcaggactccctcgccgtcgccggcgacgccgtgaagacctacaccttcgggtgcctgcagaaggccaccggcacggccgcgccgccgcaggggctgctggggctcggccgcggcccgctgtcgttcctgtcgcagaccagggacatgtaccagggcaccttctcgtactgcctcccaagcttcaagtcgctcaacttctccgggacgctccggctcgggcgcaacggccagccgccgcgcatcaagacgacgccgctgctggcgaacccgcaccggtcgtcgctctactacgtgaacatgaccggcatccgcgtgggcaggataggggtgcccaatcccgccgccggcgctggcgttcgacccggcgacgggggcgggcacagtgctcgactccggcaccatgttcacccggctggtggcgccggcgtacgtggccgtgcgggacgaggtccggcgccgcgtcggcgcacccgtgtcctcgctgggaggctttgacaacgtgcttcaacaccaccgccgtcgcatggccgcccgtgacgctgctgttcgacggcatgcaagtgacgctgccggaggagaacgtggtgatccacagcac

SEQ ID NO: 452738 - DNA, 423 bp, Sorghum bicolor
ggcacgaggtaggagaggatgtagaatctatattatacaagttactcacggtggcagattttaatgtgcaagcagcacagcaagggatggtgtacatagatgaagttgataagatcacaaaaaaggctgaaagtcttaacatcagccgagacgtatctggtgaaggtgttcagcaggcattgctgaaaatgctggaaggcacgatagtcaacgttcctgagaaaggagcaaggaagcatcctcgtggtgataatatacagatagataccaaagatattctgtttatatgtggtggtgctttcgtggatttggagaaaactatatcagagagacggcaggattcttctattggttttggcgcgccagttcgtgcaaacatgagggccggtggcatttcaagtgctcaagtgacatcatccttgt

SEQ ID NO: 452739 - DNA, 537 bp, Sorghum bicolor
cgtccggcagcgcaccgctacagtccaaaaccaaaaccccaatcgcagagagaggcagagagagagaggggtccatccatggcttccgccgtcgcttcccaggtggccttgccgaagcccgtcttcctcatggacatcctcgcctcaccgcccgcctccgcccgccccctcttcagcaccggagacgcgccgccacgctcctcctccgacggcgtcaaggacaccgacggcgtcaaggactccacaggcggggacgccgccgccgccgaccgccgcccggagcgcgtccccaagctcttcaccggagacgtgctggacctgttccccgaggctgcgatccgggacctgctactggcgctggcggaagatggcggcggcgcggcgtccatgaccggcttctccccgcgcgggtcgtcgtgggtctccaaggatgatgccgacgcggtgcagctgaaagtggcgatgccggggctggggaaggagcacgtgaagatgcgaatggagaaggacaccctgggatcaagggggagggcgaca

SEQ ID NO: 452740 - DNA, 569 bp, Sorghum bicolor
cgtccgcccacgcgtccgtccacgcgtccggttgtgaactctcctgcaaatgtccttacccctgctgtgcttgcggaggaggcgtcaaagatcgcttctacttacagtgatgtgttcacagccacaatactagatgtagagaaatgcaaagaattaaagatgggttcctacttgggagttgctgcagcttctgctaaccctccccacttcatccatttgtgttacaaaccgactgatgggaacgtcaagagaaagctggctattgttgggaagggtttaacttttgacagtggtggctacaacattaagaccggaccaggctgcagcatcgaactgatgaaatttgacatgggtggctctgcagctgtatttggtgcagctaaagctttgggacaaatcaagcctcctggagtagaggttcactttatagtcgctgcctgtgaaaatatgattagtggcacaggcatgagacccggtgacattgtaactgcttctaatgggaagacaattgaggtaaataacactgacgcggagggaaggctaacacttgctgatgccttggtctatgc

SEQ ID NO: 452741 - DNA, 496 bp, Sorghum bicolor
cgtccgcccacgcgtccgaagagcacatatgagtccatcaccaaaggaaatcctatgtggaatgagctctcagtctcaacaagcactctctacccctgggatccaacatctacatacatccatgagcctccttacttcaaggatatgacaatgactcctcctggcccgcggccagtgaaggatgcatattgccttctgaactttggagacagtatcacaactgatcacatctcacctgccggaaacattcacccagacagcccagctgcgaaatatctgaaggagcgtggtgttgaaaggaaggacttcaactcatatggtagccgaagaggaaatgatgagatcatggctaggggaacctttgccaacattcgtcttgtgaataagttcttgaagggtgaggttggacccaagacaatccatgttccatctggggagaagcttgcagcttttgatgctgctatgaaatacaagaatgaaaggcatgacactatta

SEQ ID NO: 452742 - DNA, 555 bp, Sorghum bicolor
acgcgtccgggcaaaacgaatagtgctggacgctaaaattgattacccagcagcctgcaatgctatggagacattgcttgttcataaagatcttataaatgctccaggtcttgatgacctactgctagcactcaaaacagaaggagttgctatttatggagggcctgttgcacatgaactattgtgcattccaaaagcagattcattacatcatgaatatagctctatggcctgcacaattgaattcgttgatgatgtacagtcagcaattgaccatatacatcgttacggaagtgcacatacagattgcattgttactacagatgataaagtagcagaaactcttttgcgtcaagttgatagtgctgctgtattttataatgcgagcacacgattctctgatggggctcgttttggattgggtgctgaggttggcataagcacagggcgcatacatgctcgcggaccttgtgggtgttgaaggtctcttaacaacacgctggatcatgcgagggagtgggcaagtggtgaacggtgacaaggatattgcataca

SEQ ID NO: 452743 - DNA, 474 bp, Sorghum bicolor
cgtccgagcacgcgtgcgtccacgcgtgcggctcaatgctatccgaaaggcctgcgcctccctggaagcggagtaccaaccaaaggtgactcttgttgtggttcataagcgccatcatactagattatttgctcacaaccacaatgatcagaattcaattgacaggagtggaaacatactcccaggtactgttgtagattcgaagatctgtcatcctactgcatttgacttctacttgtgtagccatgctggcattaagggcactagcgcggccagctcattatcaggtcttgtgggatgaaaacaacttctctgctgacgagttgcagactcttacaaacaacctctgttacacttatgcaaggtgcaccccctctgtatcgatcgttccaccagcgtattatgctcacctggctgccttcagggctcgtttttacatggaaccagagacttctgacagtggatcggtggcaa

SEQ ID NO: 452744 - DNA, 763 bp, Sorghum bicolor
  unsure (1)..(763): unsure at all n locations
cgtccgcaacctattgaaggtttatatcttctactcatcacaaacaagcagagcaatattcttgaagatctggacactttgaggctcctctccaagcttgtgcctgaatactccccttccctggatgaggagggtgtttgtaaaacagcatttgagattatatttgctttcgatgaagccatctctcttgggaacaaggaaaatgtaaccgtgcaacaagtcaaacaatattgggagatggagagccatgaagagaaggcacacaagttgatgatgcaaaccaaaatcaaatgaaaccaaggatctcatgaagaagagggctaatgagcttgacaaaatgaggatggaaagaggcaaacttgacaaaggaggatactcatcaatatctggtccacgcatgattgaaaaaactttcagtgacatgagcatcagtggttctggatttggtagtggttctggattaggtggactgagcactgacatggactcatttgccagcaagcccaaaggtcgtccatctacagcagctactgcacctggtaaaggttttggtatgaaattaggcaagacgcagaagacgaatcaattcctcgaatctttgaaagctgaaggagaagttattttggaggatgtacaaccaagtgcagtttctacaagatctgctctntcaacaagtgaccctgtcacagtgactatagaagagaagctcaatgttgttgttaaaaagagatggtggtattaataactttgatgttcaaggaac

SEQ ID NO: 452745 - DNA, 537 bp, Sorghum bicolor
cgtccggcccgatctcctgctcctctgcaacgcacgcacgacacgctcccatcccgcaatggcccagactatggccgccgcctccgagctggtcaccctgaagcgcgggttcggcggcaacgacgggttcggcgacggcagcggaaatggaggaaccgtcgccgaggagaagcccaaggcgcgccgccgggaggcggacccggcggcggcgctggcctcggcgcggcacgagttcggcgagcacggcggcgtgaacatgtccatcgaggcgtcggcgacgttcacggtgatggagccggacaccatgcgccgtctcttcgcgggcgagctgggccccgaccgcggcgacatgtacatctacagccggcacttcaacccgacggtgctggcgctgggccggcagatggcggcgctggagggcaccgaggccgtctactgcacggcgtccgggatgtccgtcatcttcgccgtgctgatgcatctggtgggcgccggcaggcacgtggtggcgtcgcggtgcctgtacggtggtaccca

SEQ ID NO: 452746 - DNA, 423 bp, Sorghum bicolor
gattccggtcgacccacgcgtccggtcttaataaaatctaacagtgggggcctcccctgctgtttttcctggttcaaaaaggacaaaactaaatcatcttacattttggaatggagataaatcttacagaatcaactgctgggacaaagcactaaatgttctatgcatgtcatttttccatttcagaaggagtacatccattacaagcagttaaaagggtggaaccatttggttgtgtacaaatctggcatacatggacttggtctctacacatcagtctttattccacgcggctctatggttgtagagtatgtgggtgaaattgttgggcaacgggttgctggcaaaagagagatcgaataccagtccgggaaacggcaacaatataagagggcatgttatttctttaggattgacagggag

SEQ ID NO: 452747 - DNA, 640 bp, Sorghum bicolor
gtggagtggatccccaacaatgtgaagtcgagcgtgtgcgacatcccacccattgggctgaagatgtcctcaacattcatcggcaactccacctccatccaggagatgttccgccgcgtcagtgagcagttcacagctatgttcaggaggaaggccttcttgcattggtacactggtgagggcatggatgagatggagttcaccgaggccgagagcaacatgaacgacctggtggctgagtaccagcagtaccaggatgccacggccgaggacgatgaggagtatgaggaggaagaagaggaagagcacgctgactaagccatcctctgcagtgcttggtacagagatgagagatgatatcccttgtatcgctgttagtcagtatgagtcgattgaggtgcgtgtggtggtgatgttaggtactactagatgggtggtattgcttatggatgtgatgttgctgtgacaaaactccatttccttttgtattatggttgtccccaagttgttattaccatgaggtggaaggtagcttaactgattgttgctatgccttatgcatcagttcaagtggtttatgtggtattagagaattctactgtgttaaatgatggtttatcagcagttcgtgtgaagtttt

SEQ ID NO: 452748 - DNA, 489 bp, Sorghum bicolor
cgtctaccttcatcggcaactcgacttccatccaggagatgttccggagggtgagcgagcagttcactgccatgttcaggaggaaggctttcttgcactggtacactggtgagggcatggacgagatggagttcaccgaggccgagagcaacatgaatgacctcgtgtcggagtaccagcagtaccaggatgcgactgccgatgatgagggcgagtacgaggacgaggaggacgtgcaaggagatgaaatgtgagaggctgtgatagtgtgaagcctggtggttctagggcaggcagaccttgatgggtttggtgtcccctttcgtattgttgccgtgttactactgctagcgtaccaccctcgtggcccattctgtcgctgttgatgcttgtattttccttgtgctatggaaccttgcttttggtacgatgctacttatgctgccagtattcttggcgtttaaggttccctgttgtgaattttagcct

SEQ ID NO: 452749 - DNA, 592 bp, Sorghum bicolor
  unsure (1)..(592): unsure at all n locations
cccacgcgtcctgccacgcgtccgcaaggacgttgaggtgcgctcatctaccaaagaagactacaatgaagatccagtgcctaatgactcagagaactgtgacttctgctatcatacaaccaaattttccacaagtggttctccctctaaacatcacagaaggcgacgaagcagacaacgctcctgcagaacaagccaggccaacctaccaaaggaccttatcaggcggtctgcaaagccccagagccaccgacgtcccccagaaggcgattctcgagaggatgaaatccaagggcgagtccaagtcctatcagcttgggcaccggctgtcccttaaatggagcactggggctggtccaagaattggatgtgtcaaggactacccaatggagctccggatgcaggctctggagatggtggatctgtcgccaagagcatcgacgccggcggcggcaaggagactgcctccttgctcccccactaaagtcacgtcgccaacatcaccgctcgcaccaattcaggcctccctgccgcaaccaanttangaatttaaaggancttattatgccacgcanatagcacgagaccatgc

SEQ ID NO: 452750 - DNA, 682 bp, Sorghum bicolor
gcgtccgcccacgcgtccgggatggggtgcacccccacagtctaattcgcagctatagaactgcaggcaatatggcaatccaaagggttaaagagcgagcagttagcatagaaggaaaaagccttgaagagaagaaaacattgctagccaagtgtgctgctacaacactctcttcaaaacttataggcggtgaaaaagaattctttgcttctatggttgtggatgctgtccttgccattggcaatgatgacaggcttaatcttatcgggattaagaaggttcctggaggtaccatgagagattcttttctggtgaatggtgttgcgttcaagaagacattttcgtatgctggatttgagcaacaaccaaagaagttcctgaacccgaagattcttttgttaaacattgaactagaattgaaatctgagaaggaaaatgcagagatcaggttatctgaccctctgcaataccaatcaattggtgatgctgaatggaacattatttatgataaactggataaatgtgtgaaaagtggagcaaagatagttctgtctcggctagctattggtgatcttgcaacacagtatttcgcagatcgagacattttctgcgccggccgtgtcactgaagaagatttgcaacgtgttgctgcaacaaactggtggaactgttcaaacttctg

SEQ ID NO: 452751 - DNA, 1555 bp, Sorghum bicolor
  unsure (1)..(1555): unsure at all n locations
cgcgtccgctcctcttctccctcccctgactggagagagagaacctgaaccttcccgagaggatagataggggggacggaaggcacccgcatcgaggaaaccaaaagagaggcaatctctagaaccctctcttccacctccctctctccctcccgcgccgatccattccattccattccattccaactcaatcccccccacccagcccaaacaatggcgtcggacgggagcggcgtggtgacggtgtacgggaacaacggcgcagcccttctggaaccctcaaagcagcccaagtcggcgactttctccgtcaaggtcggcctcgcgcagatgctccgtggcggggtcatcatggacgtcgtcaccccggaacaagcccgcatcgcggaggaagccggcgcctgcgccgtcatggcgctggagcgcgtccccgccgacatccgctcgcagggcggcgtggcgcggatgtccgacccgggcctcatccgcgacatcaagcgcgccgtcaccatccccgtcatggccaaagcgcgcatcggccacttcgtcgaggcgcagatcctcgaggcccgtcggcgtcgactacgtcgacgagagcgaggtcctcacacccgccgacgacgcgcaccacatcaacaagcacaacttccgtgtccccttcgtctgtggctgccgtgaccttggtgaggcgctccggagggtccgtgagggcgccgccatgatccgcaccagagggggaggccgggaccggcaacatcgtcgaggccctcaggcatgtgcggtccgtcatgggcgatgtccgtgcgctccggaacatggatgatgatgaggtgttcgcgtatgctaagcgcatcgccgcgccgtatgatttggtgatgcagaccaagcagctgggccgcctccctgttgtgcagttcgcggccgggggtgtggccacgcctgctgatgccgcgctcatgatgcagcttgggtgcgacggcgtcttcgtcggctcgggaatcttcaagagtggcgaccctgctcgccgcgcgcgtgccatcgttcaggctgtcacccactacagcgaccctaccatcctcgccgacgtcagcgccggactcggggaggccatggtcggcatcaacctcaacgaccctaaggtcgagcgatacgccgccagatccgagtgaacaaccctatccgctccaccatcgtcatcttctctcatatatttgtatcacccatccatccatctgccttcgatatgcatctccactccgccggcttcatccttctcttcttaataatttctgcattacaaacagtagcttattttggctcatggctctccatcagtgataacgggactgaatcaatgggtagaaacaaagctatggtactatgcagaacctctntatttttgtgtcttcttattagctactgcattaagttagactaggctcccctggtttatcatgtactcaatcaaatgttgaacgggttgtatgtctgtcgctctgccagccctgcttatggcttatgaatgatgaatcaatgaatgaatcacatgttcttc

SEQ ID NO: 452752 - DNA, 711 bp, Sorghum bicolor
cgtccgactcccctcccgacccactcgcccaaaaccctagcgctctcgcccgctcgacgccgccgccggagcgagctccccatcttcctccgggaaccatggcgacccagatcagcaagaagaagaagttcgtcagcgacggtgtgttctacgccgagctgaacgagatgctgacgcgggagctggccgaggacggctactccggcgtggaggtgcgcgtcacgccgatgcgcacggagatcatcatccgcgccacgcgcacgcagaacgtgctcggtgagaagggtcgcaggatcagggagctgacctctgtcgtccagaagaggttcaacttccccgagaacggcgtcgagctctacgccgagaaggtcgtcaaccgcggcctctgcgccatcgcgcaggctgagtccctccgctacaagctcctcggaggccttgccgtccggagggcttgctatggtgttcttcgcttcgttatggagagtggtgctaagggttgtgaggtcattgtcagtggaaagctcagggcccaaagagccaagtccatgaaattcaaggatggctacatgatctcatctggtcagccagtgaatgagtacattgattcggctgtgagacacgtccttctcagacagggtgttcttggtatcaaggtgaagatcatgctcgactgggacccgaagggcaaggttggtccaatcaccccttctt

SEQ ID NO: 452753 - DNA, 517 bp, Sorghum bicolor
cgtccgggctggcccgagtgcaacgtcatcgaggaggaaggcccgtacgaggacctcgcaggggacagcggcctctcccgccgttgccagatcatactcgggttcctcaccttcgacctcctcttcaccaccttctgcctcatcatctggggcgccgcccggccgtacgagcccgaggtcgtcgtcaagagcttggtgatggacgacttctatgctggtgaaggcgcagaccacagcggtgttccaaccaatattgggcacaacaaactgttctctgcacatagctgtgtacaaccctgccacaatgtttggaattcatgtcacttctggccccatccatctgatctattcagagatctcaatagcagtcggtcaggttcgcaggtactaccaaccgaggaagagccaccggacggtgacggcggtcatccacggcgagaaggtgccgctgtacggcgccggcggcagcctgatgctgtcaacgagcacgggcgggacggtgcacctgacgcttgac

SEQ ID NO: 452754 - DNA, 577 bp, Sorghum bicolor
  unsure (1)..(577): unsure at all n locations
cgcgtccggtctcggtctctcgctctccacgccggcgaccggagaaggggcagcgcgcgcaggcgacgcccacggcgacggagacggccaatctgtggccctcgcgcgccggcttcggcccagccccgcggcgacgctccaggattgaagggggcatgagaaggtggacattgtcgctctagtgatttgattaccggagatggtgttggtggcaaagcagcaccgctgcacacactctgcgagctgcgtttgcatcaagggccacctcagtgaggatgctctgtacctcgtcttcaagcacatgaactggaacccgaggctgattgctatcctgtcatgtgtgtgcaagtggtttgacgaggttgccaagcaggtgctgtggaaggagttctgtaatgcgtgggctccgaagatgatgctggatttgcattcaggtggcagccacattggtgatgggaactggaaagcgctgcggaagctgctcatctatngcaatggctgcacacaagggggactgtttaataacatccatgttccaggcccatttgtgttcaggacacgcttatttaggactgca

SEQ ID NO: 452755 - DNA, 643 bp, Sorghum bicolor
cgtccgctcatcgccgccgccggcccaaacccctctctctccccctataaaaccctccctcgcctcctccactcacaaaccacaagctcgatcatctcgctccagctcatccgatcgagcaccttgcaaacctgcttgattgattgtttgatcctatttcaagctagtcattagtgtactctcgtgtctcttggttggttggttaggctgtagttgagtgaggagttctcgagtgatcgaccactactcacggtcatggcgtctcgtcgtgtgtccctgctgctgggcgtactgctgtcctactccgccgccgtcgccgtcgccgtggcggcggccaacttcagccaggagttcgacatcacgtggggcgacggtcgtggcaagatccaggacaacgggcagctgctgacgctgacgctggaccggacctccgggtccgggttccagtccaggcacgagtacctcttcggcaagatcgacatgcagctgaagctggtccccggcaactcggccggcaccgtcaccgcctactacctgtcgtcgcagggcaacacccacgatgagatcgacttcgagttcctcggcaacgtcttcggcgagccctacacgctgcacaccaacgtgtttacccagggccagggac

SEQ ID NO: 452756 - DNA, 457 bp, Sorghum bicolor
cgtccgatagggtttcaggtcctcctgaagctgaaaatccgaatcgaaggggacatagcagtagtgatgagatgctcagtgctagcagtagagcagatgatagtagcagcaaggatgctaggtctcttttcagtggcgaggatggttacaaatctcggagtgcagtatctttgcccagcaaccaagttcaggctgagtggattgagcagtatgaaccaggtgtatacataacacttacaactcttcgtgatggcacccgagatctaaagcgtgtacgcttcagtcgaaggcgttttggggagcatcaggctgagagctggtggaacgagaaccgtgacaaggtctacgagaagtacaatgtgaggagctccgagcgagtatcgtcggcatcatcgatccggtcagctcgatgaccccctccttcctactcactgcccagcagtggccatcagaaaac

SEQ ID NO: 452757 - DNA, 569 bp, Sorghum bicolor
  unsure (1)..(569): unsure at all n locations
cgtccgctggcacagtcaaacatgaaagaaatggaaaaacatattagcagtcttcaagaggaggtaaagggtcatcaagataaggccactgaccatcagcaaatagaagaatcgctgagaagcacaatctcagaactcaaggtggtacaagaggcactggagctgtcaaagtcacaagtggcagatttggagcagaaacttgcctcccaggatgctgatatcagtaaactaactgaagagttgaatctccattgttcgtctgaagaatcccttaaagagaagactcttaaactagagactgaacttactactgctcttgaggaactacaagcaaagctattgagtttgcaggaaatggagacaaaacttgatgagcagtcaaaaggcagacaaacaagtgaggctgcactagagaagcaaaatgggcagctcatcgtattacaggctgagcttgacaacttgaaggatgaaaatgaaactctncaagggtctcttggtgatcttaactcaaaattttctgagaaagatccatgctgcatcaggctgagatgagcttgctaagcacaaat

SEQ ID NO: 452758 - DNA, 369 bp, Sorghum bicolor
cgtccgcccacgcgtccggaggatgtatattttgatgatgaatctgcagaggtagtaatctcctcccttcgccttggagacgaacaagaaagtggctcgctctttacaaattccaactggtttgcatttgacgaggacaaaccactgaatgatggtttggttagttcagaagcttccccatctccaaattcggaaatgtccgcactaaaagaggatgatgaaaatgatgaagtcattcttggcgaggaggttatggatgacacaaaaggttctgaaccacctctacctgtccccaacaaagacgcaaatgaagagtctggtcacaccggcttggcaaatggtaccattgacacattggaagatgatatc

SEQ ID NO: 452759 - DNA, 1007 bp, Sorghum bicolor
cagcagtatcttccgtcggccggcgacatgagccgcggcacggtcgcggtgtatgaccgccacatcagcatcttcttcggcgagggacgcctgtaccaagtcgagtactcgttcaaggctgtgaagtctgcgggcgtcacgtaaatcggagtgcgcggcgcgaactccatctgcgtcgtcacccagaagaaagtgccggataagttgctggatcagacgagcgtgacacacctgttcccgatcaccaagtttgtaggattgcttgccactggccttacagctgatgcaaggtcattggtttcccaagcaaggaacgaagcagctgagtttcgttttaaatggggctacgagatgccagttgatgtgttagcagagtggatggctgacaaagctcaagtttacacgcagcatgcatacatgagaccccttggagtagttgctatggtcttgggctacgacgaagagaaaaatgcccagctattcaaatgcgaccctgctggtcacttctttggacataaggcaactagtgccgggctcaaggagcaggaagcaataaattttctggagaagaaaatgaaggatgatcctaaattcacctatgacgaaactgttcagattgcaatatctgcattgcaatcagttctccaggaagatttcaaggccactgagatcgaggttggtgttgtgagaaaagaagaccgtgttttcagagctctcacaacagaggagatcgatcagcacctgacggcaattagtgaacgggactgaggtcatatgttcatgtcagcgctccacacactgggccgtgccattgtgcttcggcactctcatttagtttcatagtcatcaaaggaactgagtgtaccatttcatgtctaacactgaaaacaagccccccctcgatgtactcgtttcatatctttctgtggttgattgaatttggtacgttttggtttttgttgccaactatgtttgaatggctgagcgattgtagttcatgtcgctgt

SEQ ID NO: 452760 - DNA, 928 bp, Sorghum bicolor
cgtccgggccgctgtaccgtaggattgtcgtcagcttctcttggcgccggcagatgccacggctcgcgcttacactcggcctcgaggaagaaatggctgatatcattgaggaactaattgctaagaggcagcagcttgatgctgtgaatttcgcttacgaggctgggcttcaggagaagttccctccagttcctcttttgaagtcctacctggaagactctaagaagacatcaaccgctgcttcagataattcaagcactagcagtggccaatcagggagcaatgcgaacaagaaagagcagtctgcactgcgagctgtcattaagtgtgttgaggaccataacctagaagctgagttttcactggaggatcttcggaagcaacttgaagagctggagaaagccaagactgagaagaaaaaggcagcatcaagcgctaccagtggcagcagcagcggccctgcaaccaagcgcatccgtgcaagcaatggaggcccaatgcctcctgccaaggcaggtcgtctcactaacaatgcttgtgtgtcttctttcccagctcccaccacatttacccagtctccctcccatgcctcatatgccacgacctccccttcccatacctcatatgccacgacctccccttcccacaccgcatatgccacgacctccccttcccacaccgcatacgccatgacctccccttcccacaccgcatatgccacagcctccccttcccacccaacatacgccacagcctccccgtcccacccatcatacaccacaggctccccttacccctatgacaggccggttggacatggcctctactgcaaccggagcccgccggtgatcagggagccatatgtttacccagctgaggaggtagccagtgtcaacgtcggcattcccatgccatactccaccggacg

SEQ ID NO: 452761 - DNA, 408 bp, Sorghum bicolor
cgtccgccgcaagattgggttcgaccttgactatgatgagaaagacacaagctataacaggatcaagagccttgtgactgaggagttgaagcagtacttccggccagagttcttgaacagattggatgagatgattgtattccggcagctgactaaattggaggtgaaggagattgcagacattatgctgaaagaagtgtttgacaggttgaaggccaaggacattaatctccaggttacagagaagttccgagatagagttgttgacgaaggttataacccgagctatggtgccagacctttgcggcgtgctatcatgaggcttctggaggataggctggcagagaagatgctggctggtgaggtgaaaagaaggtgactcctgcaatcgctgatgtggattcagat

SEQ ID NO: 452762 - DNA, 681 bp, Sorghum bicolor
ggcacgagggctgttcagtgctgctcgtgtttggtggatgttccgtgtatttggacatgataaaatttgggtgttagatggaggtttgccacaatggcgtgcttctggatacgatgttgaatcaagtgcctccagtgatgccatcctaaaggctagtgcggctggtgaagcaattgagaaagtgtacctgggtcaatcggttggtcgaaccacatttgaagcaaagctgcagcctcatcttctttggagtcttgatcaggtgaaagagaacatcaagacccagacacatcaacttatagatgctcgatcaaaacctagatttgatggcgcagttcccgagccacgaaagggcattagaagtgggcatgtgcctgggagcaaatgtgttccgtttcctcaggttcttgacagctcacaaaagctattgcctccagatgagctccgtaaacggtttgagcaagagagaatatcacttgatcaacctgttgtgacctctcgcggcactggcgtgacagcatgtgtgttagccatgggccttcataggctcggtaacaccgacgtggccatttatgaccgatcatggactgaatggggcgcccatcctgacactacagttgcaactgctgattaatctcttcatcgagaacgtgtcatgctcttcatagaggactctcgaatgta

SEQ ID NO: 452763 - DNA, 616 bp, Sorghum bicolor
cgtccggtcaggtcggacagggagagcaggtaatactggtgttgctgtcatgctttatgagcccagatataaatacagtgtcaacagactagaaagggagtctggggttaagtttgagcatatctctgcgccacagcctactgatgtagcacaatctgctggcagtgaagctgcagatgccatttcgagtgtgtcggatagtgttattcctgtcttcaggcagcaagcagagcagttgctaagctcttccagcctgtctgcagctgacttgcttgccaaggcacttgcaaaggcaggtggttacacggacataaagaaaagatcattgttatctctcatggaggattacactacactacatcttcaaattggcagaccgatgtggtcacctgggtttgcttttactatattgaaaaggttcatgccagaagagaaacttgcagatgtaaaaggtgcaaccctcaccgctgatggaacaggggttgtatttgatgttcctgcagcagatgttgaagattacattcaagcttcggagaatgctgcacaggtgacaattgatgaagtcaagcaactgccacccttgcaagagaaggagcagtcaagaggcaactctagc

SEQ ID NO: 452764 - DNA, 551 bp, Sorghum bicolor
cggtcgacccacgcgtccgattcgagaacacgaagaaatacgacgacaaaggagaagccgagcagcgacactgcatacggactttagacatggagggccagttccaggatggcaaggaggaagtcatccaagcatggtacatggatgacagtgaagaggaccagaggcttcctcatcatcgcgagcccaaagaattcattcctctcgacaaactttcagagctaggaatattaagctggcgcctaaatgctgatgattgggagaatgatgagaagctcaagaaaattcgtgaagccaggggttactcttacatggacatttgtgatgtgtgcccagagaagttgccaaattacgaggctaagataaagaatttctttgaagaacacttgcgtactgatgaagagatacgatattggcttgagggtaggggctactttgatgggagggacgaaaatgatcaagggatcccggtagcagtgaagaaagggggcatgattggtttgcctgcaggaatgtatcaccggtttacattggataccgacaactacatt

SEQ ID NO: 452765 - DNA, 802 bp, Sorghum bicolor
cgtccgcatctccatccaaccacctgcccctcgcggcctagcgtctctcctccccagatccgccccccctcccgtcgtcgtcccccgtccccgttcgaaggcgcggcagaggcgagcgattccgccggatttgattcgacatgaatcccgagtacgactaccttttcaaacttttgcttattggtgattctggtgttgggaaatcatgcttgcttctcagatttgcggatgattcatatttggacagctacatcagcacaattggggttgattttaaaattcggacagtcgagcaggatgggaagaccataaaacttcaaatctgggatactgctgggcaagagcgcttcaggacaatcaccagcagctactaccgcggagcccatggaatcattattgtatatgacgtgacagaccaagaaagcttcaataatgtgaagcaatggttaaatgaaattgaccgttatgcaagtgacaatgttaacaagctccttgttgggaacaagagcgatctaactgccaacaaagttgttgcaactgagacagcaaaggcgtttgctgatgagatgggcatcccattcatggagacgagtgccaaaaacgccaccaacgtggagcaggccttcatggctatggctgcatccatcaaggataggatggccagccaaccagcagcggccaacgcaaggccagcgacggtgcagatccgtgggcaacccgtcaaccagaagacgtcttgctgctcgtcctaagattgcctgatttcattggttccttgtgactattactaccgtttgtgcga

SEQ ID NO: 452766 - DNA, 422 bp, Sorghum bicolor
gaccacgcgtctcgacttaacacacgcttacggctgcataacgacgattatgagcggttgcatcccattcctgtcaagaagggagccaacttccgtgacctaaagggtgtcaaggttggagcaaacaatattgttgtgtgggatccagaaatcgagcgcgtgaaactttcatctgggaaaccactggttcctgactatgcgatgtcattcatcaaagggtacatcactcaagccacttggacgcctgtggtgggatgagacagttcctacaggtgtagccagagcagagcctcacaaccagattatattgcatccgactcaagcaagagtcctgactatccgggagaacgcaaggttgcagggctttcctgattactaccgattgtttggcccatcaaggagaagttaatcaagttggaatg

SEQ ID NO: 452767 - DNA, 605 bp, Sorghum bicolor
cgtccggccgccttctcctcctcctcctccggcgacctagagagaggggcagggaagagaagggcgcgacgccggctgtcgagtaggcgggccggcgggcggagatgtttctggtggactggttctacggggtgctggcgtcgctggggctgtggcagaaggaggccaagatcctcttcctcggcctcgacaacgccggcaagaccacgctcctccacatgctcaaggacgagcggctcgtccagcaccagcctacacagtatccaacttctgaagagctgagcatcgggaagatcaagttcaaggcatttgatttaggaggacatcagattgctcgccgtgtttggaaggattactatgctaaggtggatgcagtggtctaccttgtggatgcctatgacaaggagcggtttgctgagtcaaagaaggagctagatgcgctcctatcagatgactccctggccactgtcccattcctgatcctggggaacaagatcgacatcccttatgccgcttcagaggaggaactccggtaccacctgggcctgagcaacttcaccactggcaagggcaaggttaacctgggcgagtctaacgtccggccc

SEQ ID NO: 452768 - DNA, 430 bp, Sorghum bicolor
cgtccggaaatattcttcccgtcgaaaaccagagagagagggaaagggacaaaaggcgagagataggccggcggcgtcgtcgtctgatctgctgcggagcgcgaagaggagaaagagggagatcgccggagttgcagagatgttcctggtggactggttctacggggtgctggcgtcgcttgggctgtggcagaaggaggcgaagatcctcttcctcggcctcgacaacgccggcaagaccaccctcctccacatgctcaaggacgagcggctcgtgcagcaccagccgacgcagtacccgacgtcagaagagctgagcatcggcaggatcaagttcaaggctttcgacctcgggggccaccagatcgcccgtcgcgtctggaaagactactacgccaaaggtgattgctgtgggtacttggtggatgct

SEQ ID NO: 452769 - DNA, 617 bp, Sorghum bicolor
  unsure (1)..(617): unsure at all n locations
cccgggncgacccacgcgtccggaagtattgaagctttggctgggctagtgatgacttcagcacgcacaaacctggagaaggctgaacaatatgagaagaagctgaagccattgccaggcctcaaaggagttaatgttgagagcttggagaagacatctggtgcaaggcatgttgaagggccccaagatatgaaggttgatgttcctgaggaagtgaagaggccgcgggcgaagaagaggaagcggaagcctagatacccgaaaggctttgatccagcaaacccagggccgccaccagatccagagagatggctaccaaggagagagcgatccagttaccgtccaaagaggaaggatgagagggctcaggtcagaggtgctcagggagctgtgtctagggagacagcagcaaccaatgccggtggttcctcaaaaggaagccaaaccaccagttcatccaagacaccagcggcaaatactgatcagccaaaaactagcaacaaatccaggaagaagatgtacaggtcttagatcaaagttttaaagtcataacacaaaagatatgactctgttcagatatatatgtgattatttctacttgttgactggctggcatg

SEQ ID NO: 452770 - DNA, 688 bp, Sorghum bicolor
  unsure (1)..(688): unsure at all n locations
cgtccgcacgtgatgaagaaagggcaggatatcgtcctgctagagatactgaggctcttaacgcgtcctacgaacgttttctgcgtactgggcaaattcaatcctttggtggtggacctgctggagaacctattaggcctgctgttggtggcaatgctggctacccagttgatgaccgttcgatgatggctgctaggggtatggatagcagaaatattggtttcggtggtggaatgccagagccaccccttccacctgatgcctcaaacaccttatatattgaaggcattccaactggctgtacacgtcgagaagtttcacacatcttccgaccatttgttggctttcgtgaggttaggcttgtaaacaaagaaccgaaacatcctggtggtgaccctattgtcctgtgttttgttgatttcgcggaacctacacaatctgctattgccatggaggctttgcaaggctataagtttgatgagcatgatcgcaattcacccaatttgcggctgcaatttgctcgatttacgggtccaagggggaattcaggacctggtggcggtcgtggtaggcgataagttcttggcgttccttttgccaggcctgttcacagcgaacacccatgtgggatcttgttagttngatcaccgttccagagatattactctatacttccataggaatagga

SEQ ID NO: 452771 - DNA, 485 bp, Sorghum bicolor
cgtccgccccgcacccgccgcagcttcgtcttcgtcgttccgtccaaggcaaggcaagccaagtcgccgcggagaggaaacccgccgagaagaggagatggcccgtacgaagcagaccgcccgcaagtccaccggaggcaaggccccgcgcaagcagctcgccaccaaggcggcgaggaagtcagcgccgacgacgggcggcgtgaagaagccgcacaggtataggcccggtacggtggcgctccgcgagatccgcaagtaccagaagagcacggagcttctgatccggaagctccccttccagcgcctggtccgcgaaatcgcccaggacttcatgacggacctccggttccagagccacgccgtgctggcgctccaggaggccgccgaggcctacctcgggggtctcttcgaggacaccaacctctgcgccatccacgccaagcgcgtcaccatcatgcccaaggacattcagctcgcacgcc

SEQ ID NO: 452772 - DNA, 549 bp, Sorghum bicolor
gccgcaccatccgctaccctgacccgctcatcaaggccaatgacaccatcaagattgatttggagaccaacaagattgtggacttcatcaagtttgatgttggcaatgttgtcatggtgactggtggtaggaacactgggcgtgttggtgttatcaagaacagggagaagcataagggcagctttgagaccatccacgtcgaggactctctgggccaccagtttgccacccgtatgggtaatgtgttcactattggcaagggcaacaagccgtgggtgagcctgcccaagggcaagggtatcaagctaagcatcatcgaggaacaaaggaagcgggatgccgctgcccaggctgctgccgcataaatcctcagaatgtgcttggagttttgcttatgtctagtttgtctgcaaggatatagaactctctgttgccagactatatcatgtttaagtttttgcctgatggttgttgattcgtgaacgatgtttgcagctagctctaatgctgtaacgcgactatctatcttattgaactgttgtcgcctcc

SEQ ID NO: 452773 - DNA, 406 bp, Sorghum bicolor
ggcacgaggctctgactcacctagctcacctgcagcaggtcattcagcacattgcaggtcatccaatccaacacaccgatcagcagcaatggcggcaggtctgcaggtgtgtcggacagccggcgtccaccgacgtcgcgagggtgctgacctgcctcttcgagaagaacctcgagttcgagctcatccgcaccgacaccttcaagaagtcgcacaagctcccggagttcatcaagctcagggatcctactggacaggtgactttcaagcacggtgacaacacaatcgtggattccagggcgatttgccggtacctgtgcacgcagttcccggacgacaggtacaagaagctgtacgggacggggtcgctggagcgggcgtcgatagagcagtggctgcaggcaga

SEQ ID NO: 452774 - DNA, 389 bp, Sorghum bicolor
ccatatctccaggttcgacccacgcgtccggcgccgtgcaccggaaggtcccagggagcggcacgaggaggccccattgcggcatggctgctgctgctgcggcggcctccggcggcgggtgccagctcattggcgccgccgcggccacgctcctagcggcggtccttgttgcggccgttctggggcgccgccgccgccgggcccggccccaggcgcctctggtggaagccaaacccgcgccggacggaggctgcgcggtcggcgacggccggacggacgtcatcatcgtcggcgccggagtagctggatctgcgctggcatacacgctgggaaaggatggccgtcgggtgcatgtcatcgagagggatctgacagaacctgacagaatt

SEQ ID NO: 452775 - DNA, 169 bp, Sorghum bicolor
cattgtcctctctgttgcattgcacactcatataaacaaaaaaaaaagattggagtcaatattatatgcatgttccaactagggttgctacttgggggaggtttagggtttgggcacactcacatgaattgaaaatattggactcactattatatgcatgtttgaacta

SEQ ID NO: 452776 - DNA, 664 bp, Sorghum bicolor
gttggactttcagagcagataaggcgggagatcacaaccatgcggttggtggctcataagaacattgttgagcttcatgaggttatggcaacacgaaacaagatctactttgtcatggaatatgtgaaaggtggcgagctctttgacaagattgagaagagtggcaagctcacagaggctgttgcacacaagtacttccagcagctcattagtgctgtggattactgccacagccaaggtgtgtatcaccgggacttgaagcctgagaacctgctgttggatgagaatgagaacctgaaggctctcagatttcggactgagcgcacttccgagtgagtctaagaggcaggatggcttgctccacaccacctgtggaactccagcatatgtagctccagaggtgatcagcaagacaggctatgatggtgcaaagtcagacatctggtcttgtggggttgttctatttgtacttgttgctggttatctcccttttcaaggcccaaacttgatggagatgtatcgtaagatacagaatggtaatttcaggtgccccagttggttttcacacaaactcaagaagctattgtacaagatcctggaccccaacccaaacacaagaatttcagtccagaagataaaagagtctacctggttccgaaaggtc

SEQ ID NO: 452777 - DNA, 325 bp, Sorghum bicolor
cgtccgacagccgccagccctacgcggtgtcgcgtcgagccggccaccagacctccgcggagtcctggggcacggggcgtgcggtgtcccgtatcccccgcgttcctggcggtggtacccaccgcgccggccaggcagccttcggcaacatgtgccggggcggacgcatgttcgcgcccaccaagatcgggccccgcaccgcggtaaatcactcgcggtgcatgctcgcttcgcacacgccgcctgctgccggcacggggcgcccagtcgtggttcattgcagttggaaccagctaactagctggccccattaagcagctctgtc

SEQ ID NO: 452778 - DNA, 470 bp, Sorghum bicolor
cgtccgcccacgcgtccgtggagccagcttggtgggttcggttgccaccaaagcgcccccgcgaaatctcgccgccgaccgccatggcagccgccgacgcgacgcgtacgctgctcgttgcgctatctctcgccgtagtcgcctgctgcttcccgcagctggcggcggcggacacgaacggcgtctacgagccgtgcagcgacgcacggatccagcgcggggatggcttcaccttcggggtggtcttcgcgggatacaacaccttcttctccggcaacacacagctctccccctgcgaccgccgcctcaacctcgctgcctccgggcagctcgccctcttccgccccaaggtcgacgagatctccctgctcaccatcaacaccaccaccggattcaacccagcttcagctggtggattcatggtagcatttgctggtaggaagtatgcagctagatctgttccgatattt

SEQ ID NO: 452779 - DNA, 510 bp, Sorghum bicolor
  unsure (1)..(510): unsure at all n locations
cgtccgcggacgcgtgggcccgacgaggccatctacctcaagatcaacaacaaggtgccggggctgggcatgcgcctcgaccgcagcaacctcaacctgctctactccgagcgctaccgccgcgagatcccggacgcgtacgagcgcctgctgctggacgccatggagggcgagcgccgcctcttcatccggagcgacgagctcgacgcagcctgggccatcttcacgcccgtgctcagggagctggaggacaggaaggtggcgccggagctctacccctacggcagcaggggccccgtcggcgcgcactacctngccgncaactacaacgtcaggtggggagacatcaccagcgatgacgccgccttctagttccatccatttacgactccgagtaccaagtgattttttttgttcgtgtacccaactaggaattggtccatccctggaattccaaaggacgcgggccatcgatttaacctggtcgcttggttgaaaaggcctgcctgg

SEQ ID NO: 452780 - DNA, 1400 bp, Sorghum bicolor
cgtccgaacccatttccctccctcccgttccgtccccgcccctgtctgtctcttctgcttcccccccgcgcgccgccgcccgctggtgatccccgtcgccgcggaccagcagcagcagcagcagcagccatgtcgtgctcccacctctccaccgcctggtcctcctcggcgctcgccagcagcgcctccaccacccagcggcgcggaagctccgccccgcgctcgggcctcgtggggcggtgctccctccgcgagctccgcacccgcatcgactccgtcaagaacacgcagaagatcacggaggccatgaagctggtggccgccgccaacgtccggtcgcgcgcaggaggccgtcgtctcctcccgccccttctcggaggcgctggttgaggtgctctacaacatgaaccaggagatccagacggaggacatcgacctgcccctcacccgcacccgccccgtcaagaaggtggcgctcgtggtcctgaccggcgagcgcggcctctgcgggagcttcaacaacaacgtgctcaagaaggcggaggcccgcatcgaggagctcaagcagctgggcctccagtacagcgtcatcagcgtggggaagaaaggcaacgcctacttccagcgccgcccctacatcccgctggagcgggacctggaggtgaacggcgtgcccaccgtcaaggactcgcagtccatctgcgacctcgtctactcgctcttcgtctcggaggaggtggacaaggtggagctgctctactccaagttcgtgtcgctggtgcgctccgaccccatcatccagacgctgctccccatgtcccccaagggcgagatctgcgacatcaacggcgtctgcgtggacgccacagaggacgagctcttccgcctcaccaccaaggagggcaagctcaccgtggagcgcgagaaggtgaagatcgagacgcagcccttctcccccgtggtgcagttcgagcaggaccccgtgcagatcctcgacgcgctgctcccgctctacctcaacagccagatcctccgtgccctgcaggagtcgctcgccagcgagctcgccgcccggatgagcgccatgagcagcgccaccgacaacgccatcgagctcgccaagaacctctccatcgcctacaaccgacagcgccaggccaagatcaccggggagatcctcgagatcgtcgccggtgccgaagccctcgcctgagcccttgtgacttgtgtggtgcggggctcctgctatatataattctttttctcactttcctgctgtccactctgcctgtaattcctgattagcacaaacgcaacggagttccgtgttcctcgcgacatacagtacacaagaatttcaatccagagatgccaaaatgtataatctgagtattctaaaa

SEQ ID NO: 452781 - DNA, 627 bp, Sorghum bicolor
cgtccggcctgacctcattgtgttgggtactggctctgaactggagattgcggaaaaggctgccgatgagttgaggaaggaggggaagacagtccgtgtcgtctcatttgtttcttgggaacttttcgatgaacagtcagatgaatacaaggagagtgtcctgcctgcagccgtcaccgcaagaatcagcattgaggccgggtctactctcggctggcagaagtatgtcggagcccagggcaaggccattggcatcgacaaattcggtgcgagtgctcctgccggaacgatctacaaggagtatggcatcactgtggagagcgtcattgcggcggccaagagcttttaagagttaacaacaacagtcttgagttttttgtcatcattgatgccaaaggaacactgtacctcgaggtcttgtgccccaaagcttggaataaacaatggagggagcggaaggatgcctgcatttggagcgcgtgagtggtattttaggcctgtaataaacaatgccttttccatttatgttggttttattcggtgaccctcacacgaacacgattcatgaaggtgagcctggttattaagtaaatcaggtgctggtttttggtaaaaaaaaataaaaag

SEQ ID NO: 452782 - DNA, 551 bp, Sorghum bicolor
cgtccgagaacgaactaaaacccgcaaccgcgaagccactagtagaaggcggcggcggcggcgatggggagcgacacggagacggagaagaagaagaccccggtggcgctgatgcccatcgcgaagcccctcgctggaaagaagctctgcaagcggaccctcaagctcgtgcgacgagcctctgaggccaagtgcctcaagcgcggagtcaaagaggtagtcaagagcattcgccgcgggaacaaagggttgtgtgtgattgctggaaatgtttctcctattgatgtgattacacatgttcctatactatgtgaggaagctaatgttccttacatatatgttccatcaaaagaggatcttgcgactgcaggaaccacaaagaggccgacttgttgcgtcttggttctgaccaaaccaaccaagggggagctcagtgaagaggtgaaggataaactgaagtcagactatgaccaagttgtaacggaagtgctgaggctacgtctgcaatgttctgaggaccatattatctgagaatcaggcaactccatgtg

SEQ ID NO: 452783 - DNA, 600 bp, Sorghum bicolor
  unsure (1)..(600): unsure at all n locations
cgtccgcggacgcgtgggtcggaagggcgatgacctcttctacgagcacaccctgaccttgactgaatctctgtgtggcttccagtttggtttgacacacctggataacaggcagctgctaatcaaatcaaaccctggcgaagttgtgaagcctgattctttcaaggcgatcaacgatgaaggcatgcccatgtaccagaggcccttcatgaagggcaagctgtacatccacttctcggtggatttcccggacttcgttgagcctggagcagtgcaaggcgctggaggctgtgctcccaccccaagccggggtcgcagtacactgacatggagctggacgagtgcgaggagacgatgccgtatgacgtgaacatcgaggaggagatgcggaggcggcagcagcagcaccaggaggcatacgacgaggacgaggatatgccgggcggtgcgcaaagggtgcagtgcgcccagnagtagttgcctgctatcagtagtagcagtgataatgtttgacggtgtgcggcaaatttgttgtttcgcattgtgcgactactggtgggtcaagttttcctcgcatttaatgtcacaacactttggtac

SEQ ID NO: 452784 - DNA, 1117 bp, Sorghum bicolor
cgtccgggtgagaggcatgtgaccctcttcactcgcttgaccctcttcatcactcgcttctccaagaagacacgcaccaaacaccaccctagagaaggcgagaacgcactccgtccctcccctccaggaccgtctcctcgcccgctcctctcttccgtttctccccttctctgggctcggagaatcggagagaggcacgcgcggccatggcgtccagcgcctctcggttcatcaagtgcgtcacggtcggcgacggcgccgtgggcaagacctgtatgcttatctgctacaccagcaacaagttccccactgactacatacctacggtgttcgacaatttcagtgcaaatgtagttgtggatggcaccacggtgaatttgggcctttgggataccgctgggcaggaagattacaaccggctgaggcctctaagctaccgaggtgccgatgttttcgtgcttgcattctcacttgtgagccgagctagctatgagaatatcatgaagaagtggataccggagcttcagcattatgcacctggtgtgcctgttgtgttggtaggcacaaaattggatcttcgtgaagacaagcactacttgatggaccatcctgggttggtgcctgttaccacagcacagggtgaggaacttcgtagacaaattggtgctatgtattacgtcgaatgcagttcaaagacacagcagaatgtcaaagctgtgttcgatgctgccatcaaggtagtaatccagcctccaactaaactaagagaaaagaagaaaaagaaatcacgcaagggatgttcaatggtgaacctcttctgtggaagaaaaatgctatgcttcaagtcctgaatgatctaagagggtcgtacatgaactaataccatgagtgtggccccaagtttgtgaaacttgaaatctcgatgtgcttgttgcgcatgtgtatatttgcacctttggttattaatcactagaggtagatgattgaaactagtctgcttaagcgatgtgcactgctggtgtggttagctctactgtatgagttaggcagtcagttcgacagaggccaaagagacaatgagattttgttctttcatggcaatgtcacagcttttgtg

SEQ ID NO: 452785 - DNA, 505 bp, Sorghum bicolor
cgtccgcggacgcgtgggcggacgcgtgggatactgtgctcctggatgcaataagttggaggattcctttggtcagtgacataccaactattatatttggtgcggatgtaacacatcctgaaactggggaggactcaagtccatcaattgctgccgttgttgcttctcaagattggccagaagttacaaagtatgctggattggtttgtgctcaggcacaccggcaagagctcattcaggacctttacaaaacatggcatgatcctcagagaggcactgtaacaggcggcatgatcagggagctcttaatatccttcaggaaggccactgggcagaagccattgagaataatattctacagggacggtgttagtgaaggccagttctaccaagttctcctttacgagttagatgccatccgtaaggcatgtgcatccctagaaccaaattaccagcctcctgtaacatttgtggtagttcaaaaacgtcattataccagaatttt

SEQ ID NO: 452786 - DNA, 925 bp, Sorghum bicolor
cgtccgctgctcttcgccccgccgccgccccgccgccgtcgcctgcctccctcagccgccgtcgccatgggcagaaggcctgcgagatgctatcgccagattaagaacaagccataccccaagtccaggtactgccgtggtgtccctgaccccaagatcaggatctacgatgttgggatgaagaagaagggtgttgatgagttcccctactgtgtgcaccttgtctcttgggagaaggagaatgtctccagtgaggctcttgaggctgcccgtattgcctgcaacaagtacatgaccaagtctgcaggaaaggatgccttccaccttagggtccgggttcacccgttccatgtcctccgtatcaacaagatgctttcgtgtgccggggctgataggctccagactggaatgaggggtgcctttggcaagcctcagggtacctgtgctagggtggacattggtcaggtcctcctttctgtgcgctgcaaggacaacaatgctgcccatgctagcgaagctctgcgtcgtgccaagttcaagttccctggccgccaaaagatcattgagagcaggaagtggggcttcaccaagttcagccgtgctgactacctgaagtacaagagtgagggtagaattgttcctgatggtgtcaatgcaaagctgctcggtaaccacggcagacttgagaagcgtgctcctgggcaggctttcctcgaggccgttgcttaagtggaatccacagtgggactgcggatccagacgttttgctttagcctatcttactattttgctttgtggaacatgaatttcaagtgtctcggttattacagtgccttatgtgaaccaacctatcttgtgctgaacatcgctatgcatggaagtagttctcttttgtgtctgaatgctgagaattaaatgttttgca

SEQ ID NO: 452787 - DNA, 600 bp, Sorghum bicolor
cgtccggtccgatcacggtggcggaggtcggaaaccacaacctatgaagcaggaggtcccgccggctgttgatcccagcaatagagccgtctactataacgatagatctcctcccgccgacttgaaacgagacatgcctgtgggaacggaagctgccagctaccgcctccctggatcagctccggacgcccctgcagctgccgcggcaacacaggtcccacctggatatgtccttacccagatgcatgtgcctcagccaccgcagcaacatccaccaccacagcagcaacagcaaccacaacaaccagctcctcagcagattgtttctgctggaaatcagcatttcatccacaaccctgccactggcaccttcattccaatccagtcctattaccaccatcctgttcctcagcaggcaccccagactgtgccgaggccgcaacaggcacctacattcgacccaaatacggggatgtattaccttcctatgcagcagaatgcacatcagccatatagcatgcctcctggtgcacaagtcactttgccacctcccacacttgttgacacaacgccaaagccgaccgtgccaattcctcagat

SEQ ID NO: 452788 - DNA, 484 bp, Sorghum bicolor
  unsure (1)..(484): unsure at all n locations
cgtccgggaccagggcagctgcgggagttgctgggctttctcaacaatagcagctgtggaaggcatcaaccagattgttacgggcgacttgatctccttgtctgagcaggagcttgtcgacgtgcgacacttccatacagaccaggggtgcaatggaggtctgatggactatgcgtttgagttcatcatcaacaatggtggaatcgacacagagtctgattacccttacaagggcacagatggccggtgtgatgccaacaagaaaaacgcgaaggttgttactatcgacagctatgaagatgtaccagcgaacagtgagaagagtctgcanaaagcagttgcaaaccagcccgtcagtgttgctattgaggctggtggcaatgcatttcagctctacagctcgggtatcttcactggaaagtgtggaacagcgttggaccatggtgttactgccgtcggctatggcacagagaatggaaaggac

SEQ ID NO: 452789 - DNA, 599 bp, Sorghum bicolor
cgtccgatgagactgagtatactgtgcttgcacaagtaatcacgacgagtctgcacattgccgagatgatggctgttgctgctccagaggagttggttaatctgaagaagttcctaattgatttcctggagccatttgcactgaaacttggctgggatgctaagagtagcgagggccacctgaatgctttgttaagaggcacactattaactgctcttgcagaacttggccatgagactaccataaatgaagctgttcgtcgatttaatgtctttttggaagacagagagacgccgctcctccctccagatgttagaaaggctgcatatgttgctttgatgcagacagtgagcaaatcaaacaaaactggctacgaatcgctattgaagatatatagagagactgatctaagccaggagaaagttcgtgtgttaggttctttggcatcatcccctgaccctgatgttgtccgtgaagcattggatttcatattgtcacctgaggtgaggaatcaggacgcaatatttttgctaagaggggtgagttcatgggcacacgatgtcgcatggcaatggctgaatgacaactgggactacata

SEQ ID NO: 452790 - DNA, 362 bp, Sorghum bicolor
  unsure (1)..(362): unsure at all n locations
cgtccgcaaagctggaaatctccagaatattcagccattaactcgagcaagggtcccaatagtgaagcttatggatccggaaacagggctttcctgtgatatatgtgtcaataatcttttagcagttgttaacacaaaacttttgcgagattatgcacaaatagatagaaggttaaggcagttggcattcattgggaagcattgggcttaaattcgacggtgtaaatgaaacttaccaaggaacactttctagctatgcctatgtgataatgtgcattttcctnctacaggtgggaagaatactcccntgtgtacaggaaatggaggccacttattatgtggggggggatgaaaataactgt

SEQ ID NO: 452791 - DNA, 943 bp, Sorghum bicolor
cgcggacccgtcctacaccgccgacggcttcgagatgagcgtcggcgtcaaccacctcggccacttcctcctcgcccgcgagctcctcagcgacctccagtcctccgactacccctccaagcgcctcatcatcgtcggctccatcaccgggaacacgaacacgctggcggggaacgtgccgccgaaggcgaacctgggtgacctgcgcggcctcgccggcggcctcaacggcattggcagctcggtgatgatcgacggcgccgggagcttcgacggcgccaaggcgtacaaggacagcaaggtctgcaacatgctcacgatgcaggagctccaccgccggtaccacgaggacacgggcgtcaccttcgcgtcgctctacccgggctgcatcgccaccacgggcctgttccgcgagcacatcccgctgttccggctgctcttcccgccgttccagaagtacatcaccaaggggtacgtctccgaggaggaggccgggaagcggctggcgcaggtggtgagcgaccccagcctgaccaagtccggcgtgtactggagctggaacaagaactcggcgtccttcgagaaccagctctccgaggaggccagcgactccgacaaggccaagaagctgtgggagatcagcgagaagctcgtcggcttggcgtgacggcctgatcgatgcccaccgtggccggcgccggcagccggtgacagttttttcctagggcatgttcgtagttggtctcagccgacgtgtggtgcacccgtgtcagagtgccaagacagaaagtgtacacgtgtaaaatatgtgctactgcgccgtgatggtttttgcagtggccgaggctgtatgtaactctagccttttgctttgctttggtaattttaatttactggtaataagaggacgacaaatgggggggggggggggggggagcggacg

SEQ ID NO: 452792 - DNA, 451 bp, Sorghum bicolor
cgtccggttccctccacccagcgccgccgccctccgccttgtcctccatgaccggcgccgcgacaacgccttcacgtcaagcctggacgccaccgaggccccggcgtcctccgcgaccgcggcgtcgtgcggactcgcgaccgcggacggccacgcggatgccacggccgcaccgggacgcaggcgcttgagttgtccgcgacgagcacccactgcgccaccgagagcccgagacgacggcgcccttgcctcgacggctgacatgacgcccagaagccaccttcgccgagccgtggccagccgcgacgctgccctcgccgcgtcgagcttcgaccacggctggccgcgcgggcgccacagcactgccgagccgcctcggtgccccgcgacgccgagcaccgccgcgccgagcttcgactgcgaccttgcccaggagcccgcggcgtcccca

SEQ ID NO: 452793 - DNA, 468 bp, Sorghum bicolor
  unsure (1)..(468): unsure at all n locations
cgtccggcaaggttggtgggaagctggaggacactgagcttgtatatggaattattgttgacaaagatatgagccatccacaaatgccaaagagaattgaggatgctaagattgccatcctgacttgcccatttgagcctccgaagcctaagacaaagcataaggttgacattgatactgtcgagaaattccagacactgcgtgagcaagagcagaaatacttcgatgaaatggttcagaagtgcaaggatgctggtgcaaccctggttatttgtcagtggggttttgatgatgaagccaatcatttgttgatgcacagaaatctgccagctgtcaaatgggttggtggtgttgaattggaatngattgccattgctacaggaggaaggattgttcctagattccaagagttgagccctgaaaagcttgggaaggctggattagtcagagaaaaagcatttggaacaa

SEQ ID NO: 452794 - DNA, 588 bp, Sorghum bicolor
cgtccgagcaaaagcacttgccaggccagcttcctacacaaccaagtactttggatgtgagcttggtgcacagtccaaatttgatgagaagacagggatttccttggttaatggggctcatgatacttctaagctggctggtctccttgaagtattcatcaagaagtatgtccagtgttatgggtgtgggaatcctgagactgagattctcatctcaaagacccagatgatatcactgaaatgtgcagcctgtgggttcgtctcagatgttgacatgagggacaagctcacaaccttcatcctgaaaaacccaccagaacagaagaagggaggtaaagacaagaaggccatgaggagagctgagaaggaacgcctgaagggaggtgaggctgctgatgaggagatgaagaaactgaagaaggatgcaaagaagaagggtgcatccaaggagcccactggcaagggttcaaagaagaaggctactgctggtggctctgatgaggaccactcaacctttacaacttgcagccgtgatggtgaccatgcagctgcagatgaggaagaagatgatgatgatgttcagtggca

SEQ ID NO: 452795 - DNA, 415 bp, Sorghum bicolor
cgtccggtgactttcatggatattgtggcttacttgaagcccaagtatgttctcatggaaaatgttgtagacatactcaaatttgctgatggctacctaggaaaatatgctttgagctgcctagttgctatgaagtaccaagcacgccttggaatgatggtggcaggctgctatggtctgccacagttcaggatgcgtgtgttcctctggggtgctctttcttccatggtgctccctaagtatcctctgcctacatatgatgttgtagtacgtggaaacaccccaaatgccttttcgcaatgtatggttgcatatgatgagaaacaaaaaccacacctgaagaaagctttgctttcttggtgatgcaattgtagatttaccaaaggttgaaaaccatcaacctaaataggttatg

SEQ ID NO: 452796 - DNA, 518 bp, Sorghum bicolor
cgtccgagcagaatgacacaactgcagtaaagtatgaggaggcagcacttgtatcatcatctggtgattacagaatgcctttggtatggatagacttggaaatgaccggtttggatattacaaaagatcggattttggagattgcttgtatcataacggatggtaaacttacaaaacaaattgagggtcctgacttggttataggccagagcaaagattgtttagataatatgggtgaatggtgcaaaactcatcatgcagctagtggtttgacagaaagagtgctgcagagtgaactttctgaacatgatgcagaggcaaaaggtttagactttgttaggaagcacataaattcaggcactccattattagctgggaattctgtttatgtggatttactatttctgaagaagtacatgccacagcttgcagctgtcttctctcatgtaattgttgatgtgagcagtataatggctttatgcgtacgatggtaccccaaagaaaggaaacaaactccg

SEQ ID NO: 452797 - DNA, 1313 bp, Sorghum bicolor
cgtccgcccacgcgtccggctggattccctgaaaccgttcctgttagaactgtcaaccgacaatgttcatctgggcttcaggcagtagccgacgtcgcggctgctataaaggctggttactatgacatagggattggtgctggtttggaatccatgtccataaattccatgggttgggaagggcaagttaacccaagaataactgaactccagaaagcacaggattgtcttctgcccatgggaattacttctgaaaatgtcgcccatcgatatggtgtaaccaggcaagagcaagaccaggctgctgctgagtctcataggagagctgctgcagccacggcctctggaaaattcaaggatgagatcgtccccgtgccaacaaagattgttgatcctaaaactggagaggagaagaaagttgtgatatcagttgatgatggggttaggccagggaccacagcatctggattggcaaaacttaaaccagtttttaaaaaggatgggactacaactgcaggcaattctagtcaagtgagtgatggtgctggagctgttcttctcatgaaaagatctgtggctctgaagaaaggacttcctattcttggtgttttcaggagctttgccgctgttggagtggatccagctgttatgggtgttggtcctgctgtggccattcctgctgcagtgaaatctgctggccttgagattggagacattgatctgtttgaactgaatgaggcctttgcctctcaatttgtttattgctgcaacaagttgggcctggaccgttccaaagtaaatgtaaacggaggcgcgattgcccttggacacccactgggtgcaacaggtgcccggtgtgtggctactcttctaaatgaaatgaagcgccggggcagagactgcagatttggcgttgtcaccatgtgtatcggatctggaatgggggcagcagctgtgttcgagcggggagatgctgtggatggactctccaacgtgagggacacccagacacaaaattttctgtcaagggatgcaaagtagaggtgcagaaaaatcatccatccgagagcaacataagcctgctacattagtactaatacgacatccgtatatttttttcttcacaaacactactctgtatacgacaaataaaagggcgtcatgcagtatcctcttgtagccacctaagatgcgaaatcagaaaagaaaagggccgggtgttgtagacagctcaatgttctgagcttgttctgttattgccttttgtctcagactgaacaaacagcaaaaatcttgctcgttgccttgtgtgt

SEQ ID NO: 452798 - DNA, 542 bp, Sorghum bicolor
cgtccgcccacgcgtccgctcggccttcgcttctgtttcttattaggccgccctctacactcctcgaaataacaatcgagggcggtcaagagaaacgagagcggcagacaccatggagagctcgaggatcatcgtcgcctccctcctcctcctcctcctggccttcgcagccaccgccgaggcccgcgtcgtccgcgagctgatcggcgagaacgcatgccagcagacatgcaaccaggtgcacttcaagaagatgtgccagagcttgacgaagctcccgaaggtgacgacgccgcgggagctcctgctggcgtcgatgcgcgtcgcggcggagaaggcgaaggaggccaagagccgtgtggacgagtacgcggcgaggtcccacgagggccggccgatggagtccatcctcagttcctgcagcttcgggtacgacaacgtggtgcagacgctggaggagacggagaagatcgtcgccacgcagggaacccaggtggacttgaacaccaagctgtcggacgccgtcacgagcgccggcgact

SEQ ID NO: 452799 - DNA, 980 bp, Sorghum bicolor
cgtccgcgctcaccgcgaagaagtcgtcgccaaggaacgcaagaagaaggtgaagatcacggtggagagcggcggcaagccgttgccggacgcggagctgtctgtggtgtgggtggccaaggggtttcccctgggcaacgccatgaccaaggagatcctggacatgcccgagtacgaggagtggttcacgaagcggttcaagtgggcgacgatggagaacgcgatgaagtggtacagcacggagtacaacgagggtgaggaagggttcgtggtggcggacaagatgctggcgctggcggagaagcacaacatctcggtgcgcggccacaacgtgttctgggacgaccagagccaccagatgccgtgggtgagcaagctcagcgtggacaagctcagggccgccgtggcgaagcacctcaagagcgtcgtctcccgctacgccggcaaggtcatccactgggacgtggtgaacgagaacctccacttcagcttcttcgaggagaagctgggcaaggacgcgtccggggagatcttcaaggaggtggccaagctggaccctaagcccatcctgttcatgaacgagttcaacacgatcgagcagccctgcgacaaggcgccgctgccgaccaagtacctggccaagctgaggcagatccagtcgtacccgggcaacgaggacctcaagtacggcatcggcctggagagccacttcgccaagcccaacatcccctacatgaggggctcactggacacgctggcggcggccaaggtgcccatctggctcaccgaggtggacgtcaccaaggggcccaagcaggtggagttcctcctcctcctggccttcgcagccaccgccgaggcccgcgtcgtccgcgagctgatcggcgagaacgcatgccagcagacatgcaaccaggtgcacttcaagaagatgtgccagagcttgacgaaactcccgaaggtgacgacgccgggggagc

SEQ ID NO: 452800 - DNA, 474 bp, Sorghum bicolor
cgtccgcggacgcgtgggctcgtgaggaagcatctcaggctttaactgaaatgaatggcaaaatgatatctggaaaaccattgtatgttgcatttgcacagcgcaaagaagatagaaaagcgatgttgcaggcacagttttctcagatgcgccctgcagtaccaatgacacccactttagccccacggcttccaatgtaccctcctatggctcctcagcaactcttctatggacaagcaccgccagctatgatagccccctcagccaggatttggtttccagcaacagcttgttccaggcatgaggcctggtggtccccatatgccaaattatttcggtccggttgtccaacagggccaacagggtccacgcccaggtatgaggcgtggagctggagcccagggccagcaacctgttgccaccattcagcagcagattgtccgcgccgaccggatgtaccgtatccaactggtc

SEQ ID NO: 452801 - DNA, 863 bp, Sorghum bicolor
cgtccgcccgattcacccgtaacgagttctgcctcgagtccaagtccaccatcggcgtcgagttcgccacccgcaccctccagattgaagggaaaaccatcaaagctcagatatgggatactgctgggcaagagaggtaccgtgcaatcacaagtgcttactacagaggagctgtgggtgcacttttagtctatgacatcacgaagaagcagacatttgaaaacatacagaggtggctccgtgaactccgtgaccatgcagactccaacattgtgattatgatggttggtaacaagtctgaccttaaccacctgaggtcggttgcagaggaagatggccaggcattagcagagaaggaaggcctatccttcctcgagacatccgcgcttgaagctcttaatgttgagaaggcgtttcagaccgtcctctctgatattcatcaaattataagcaagaaggcacttgcagcccaagaggcagcaggcagtggacctccaagtcaaggaaccaccatcaacattgcagattcatccgccaacacgaagagagggtgctgctcttcctaggtgcaaacaaagacatgctgctgccgctgcaaaaagaaaaatatcatggatcgtacaacacttcaggtgttatgtaggtgactccttttggcctgtaactctggtgggttgtaatcacaattcatacttctgcaaagaaattctcctctcaggtagatatgatgtgtagttttgaaattttggtagagaccaatgtttggcagacttgcgtggagtccagcttcatgttttctttcaatgttctatcttagtagtcttctgctgaaaaaacaaatatcagacatttcttgtatttct

SEQ ID NO: 452802 - DNA, 1231 bp, Sorghum bicolor
  unsure (1)..(1231): unsure at all n locations
cgtccgcccaccaccaccaaccttagcacaccaaaaccaaggagagtacgtggaggagcagccatggcttcatcggtggccgccgcggcgagcacattcctgggcacccgcctggcgacccggcgccacagaacgggcgcatcgtggccggttcggttcggttggcggcaaggcgaacgtgctccgaagaaggtggcgaagacatcgacctcctctgaccggccggctgtggttccccgtgcacgccgtggcgcccgactacctggacggcacgctggtcggcgactacggcttcgaccccttcgggctcgggaagcccgtggagtacctgcagttcgatttggactcgctggaccagaacctggccaagaatgagcccggcgtcgtcatcggcacccgcttcgagtcctccgacgtcaaatccaccccgttgcagccctacagcgaggtgttcggcctccagcggttccgcgagtgcgagctcatccacggccgctgggccatgctcgccaccctcggcgccctctccgtcgagtggctcaccggcgtcacctggcaggacgccggcaaggtggagctggtggacgggtcctcgtacctgggccagccgctgccgttctccatctcgacgctcatctggatcgaggtgctggtgatcggctacatcgagttccagcgcaacgccgagctcgacccggagaagaggctgtaccccggcggctcctacttcgacccgctcggcctggcggccgacccggagaagaaggagcggctgcagctggcggagatcaagcacgcgcgcctcgccatggtcgccttctcggcttcgccgtgcaggccgccgccaccggcaaggggccgctcaacaactgggccacccacctgagcgacccgctccacactaccatcttcgacacgttcggagggtcctcttaagcccgccattcgtccgccccgtccatcgaccggaacgtgttcttggattaattaactacgatctctatgatcctggggatggatcaacccgtcgtgcgtggtctcgttttgtgatgagtgggagagagaggatgacaagatcgatcctttgttaatggagatctcgttaattaggagagctaccgctgggacttggtggtttgtaatatatgatccaaccagtgatgaatcaatgcattcacttgtgtacacnnnnnnnnnnnnnnnnnnnnnnnnnnnnnnnnnnnnnnnnnnn

SEQ ID NO: 452803 - DNA, 1350 bp, Sorghum bicolor
  unsure (1)..(1350): unsure at all n locations
cgtccgacacccaccaccaccaacctcagcacaccaaaggagaggaggaggagcagcaggacagccatggcttcgtcagtggccgccgcggcgagcacattcctgggcacccgcctgtcggacccggcgccgcagaacgggcgcatcgtggcccggttcggcttcggaaagccgaaaaaggctgctgcccccaagaaggtgtccaagatctcctctgaccggccgctgtggttccccggcgccgtggcgcccgactacctcgacggcacgctggtcggcgactacggcttcgaccccttcgggctcgggaagcccgtggagtacctgcagttcgatttggactcgctggaccagaacctggccaagaatgagcccggcgtcgtcatcggcacccgcttcgagtcctccgacgtcaaatccaccccgttgcagccctacagcgaggtgttcggcctccagcggttccgcgagtgcgagctcatccacggccgctgggccatgctcgccaccctcggcgccctctccgtcgagtggctcaccggcgtcacctggcaggacgccggcaaggtatagtttcatgcatgtatccatggagttcgttcgttccaagcgcatgcgcttcaacgatctaaccatcctgtgaattgatcgatgtgacggccggcgtgcaggtggagctggtggacgggtcctcgtacctgggccagccgctgccgttctccatctcgacgctcatctggatcgaggtgctggtgatcggctacatcgagttccagcgcaacgccgagctcgacccggagaagaggctgtaccccggcggctcctacttcgacccgctcggcctggcggccgacccggagaagaaggagcggctgcagctggcggagatcaagcacgcgcgcctcgccatggtcgccttcctcggattcgccgtgcaggccgccgccaccggcaaggggccgctcaacaactgggccacccacctgagcgacccgctccacaccaccatcttcgacacgttcggagcatcctcttaagcccgccattaattgctccgccctgttcgtcgatcgaaacgtgttcttataaattaactatgatctctatgagcctggagagatggatggatgaacccgtcgtgcgtggtttcattttgtgatgagtgagagagagagagtgtatgagggttgggggcaggacgatcgatcctttgctaatggagatctcgttaattaggagagctgcagcagggacttggtgatttgtaatatatgaaccagtgatgaattaatgcatcattcacttgtacacatctaaaatgagcagacccgggatataagacgcgccnnn

SEQ ID NO: 452804 - DNA, 559 bp, Sorghum bicolor
cttcgtcagtggccgccgcggcgagcacattcctgggcacccgcctgtcggacccggcgctcgcagaacgggcgcatcgtggcccggttcggcttcggaaagccgaaataggctgctgcccccaagaaggtgtccaagatctcctctgaccggccgctgtggttccccggcgccgtggcgcccgactacctcgacggcacgctggtcggcgactacggcttcgaccccttcgggctcgggaagcccgtggagtacctgcagttcgatttggactcgctggaccagaacctggccaagaatgagcccggcgtcgtcatcggcacccgcttcgagtcctccgacgtcaaatccaccccgttgcagccctacagcgaggtgttcggcctccagcggttccgcgagtgcgagctcatccacggccgctgggccatgctcgccaccctcggcgccctctccgtcgagtggctcaccggcgtcacctggcaggacgcccgcaaggtggagctggtggacgggtcctcgtacctgggccagccgctgccgttctccatctcgacgc

SEQ ID NO: 452805 - DNA, 495 bp, Sorghum bicolor
  unsure (1)..(495): unsure at all n locations
cgtccgggagagagaaagagaggcggtgaaggagatagcacgggggctttatcggagatggatgccggagcaaaggtgccgaagaaggccgcggcagggcgtcgcggcggcggcggcccgaagaagaagccggtctctcgctccgtgaaggccggcctccagttccccgtcggccgtatcggccgctacctcaagcagggtcgctacgcccagcgtatcggcaccggcgcccccgtctacctcgccgccgtcctcgagtacctcgccgccgaggtcctcgagttggcggggaacgcagcgcgggacaacaagaaaaaccggatcatcccgcggcacgtactgctggcgatccgcaacgacgaggagctcgggaagctgctggccggcgtcaccatcgcgcantggcgggttctgcccaacatcaaccctgtgttgctcccaaagaagaccgctgccgccgccgccaaggagggcaaagaggagaagcacccaaga

SEQ ID NO: 452806 - DNA, 796 bp, Sorghum bicolor
ggcacgaggccgacgccctccaccgcctcgccacgcgcgctgttgagatcctccacgccatggccatccccattgagctatccgaccgggagtccctcgtcaagtccgcgtccactgctctcaactccaaggtcgtctcccagtactccaccctcctctcgcccctcgccgtcgacgccgccctctctgtggtggatcccgctcaccctgaccttctggacctccgtgacatccgcatcgtcaagaagcttggtggcaccgtggacgatactgagctcgtccgtggcctcatctttgacaagaaggctagccatgctgctgggggcccaagtcgggtggagaatgccaagatcgctgtcatacagttccaaatctcaccacctaagactgacattgagcagagcgtcattgtatcggactatgcacagatggaccgcatcctacgtgaggagcgcaattacatcctcgggatggtcaagaagatcaaggcagctggatgtaatgtcttgctcattcagaagagcatcttgcgggatgcggtcactgacttgtctctgcactatcttgctaaggcaaagattctggtggtgaaggacgtggagagggatgagatagagttcatcaccaagaccctaaactgccttcccattgccaacattgagcacttccgcacggataagcttgggtatgcagatgttgttgaggaaatctctgttggggagggcaaggttgagaagatcactgttatcatggacatgggtaggaccgcaactgttcttgtcaggggattcgacct

SEQ ID NO: 452807 - DNA, 612 bp, Sorghum bicolor
cgtccgccaaattctccctccgtcagaagcgcagcatctctctcgagctgccaccagttgagcgctctgatgatgtggaggtcaggcagcatgctaaatcagcaccttcatccccagttgagggatcagggtatgacttcttcaatgatgatgcaattgctagtgctattgcaacggagaatctgaggaggattctccagttggatatcactgatcattgagtaatgggaggatggaagggtggttcctgtgtacataggttactcgttcactgacagctctctacttgcattggtagggtatagggtaacgatgatagatacttggtggttgtaagatatggtcaggctcatggtggaggtgtagcttgtaggtgaagctacttcgaaagcttagatagttttagttgatactgccctgttaggtgttgtgaaggtgggctctgggttgaggatggccggtggtgtgcagggcagttatagtattcacctatatgcttccttcatctcttaggtgtagggtttaaacctcttaaaacagcatcatttgcatccatagttacctgttctgaactgacggtggtactttgccatagcagcagcctcattttct

SEQ ID NO: 452808 - DNA, 583 bp, Sorghum bicolor
cgtccggaaagatggaggtgaatcagagaccaaggatggcctgtctgatgagcagagagatgctgataaaattggcaaggatgatactgagaagaaagatggaggtgaatcagagcagaaagatgctgataacaaagggcaggcatcatcagcggcaccccttttctcgtttaagaatctgtcaagtggtcaaaatgctttcacaggtctgaccggaactggattttcaagcacctcattctcgtttggctcagtgtctaaagatggctcaagtgctggtcccctatttgggctgaaaactgatgggtcttcgttcccttcttttaatcttggtgcttctaacaacgggagttccgccacagcgcttgctacttcagcagaggcacccaagaaatttgctatgaccgagggccctgttgaaactggtgaagaaaatgagaaggctgtatttactgctgactctgctttgtacgagtacctagatggtggctggaaagaaagaggaaaaggtgaactggaagctgaccgtccttgatcttgccgcgagagagcccggctcgtcatgaggacaaaaggcaactac

SEQ ID NO: 452809 - DNA, 738 bp, Sorghum bicolor
cgtccgtgctgtggttaaggttttagaattggctctaaagaaacaaaagcctttactgattgttgcagaagatgtggaaagcgaagcattgggcactctgattattaacaagcttcgtgcaggcatcaaggtctgcgctgtcaaagctcctggttttggagaaaacaggaaggcaaacttacaggacctcgctatccttactggaggagaggtaataactgaagagctaggaatgaaccttgagaatgttgaacctcacatgctgggtacatgcaaaaaggtgaccgtctctaaggatgacactgttattcttgatggatctggagacaagaaatctattgaagagagggcagagcagatgagatcggcaattgagaatagcacttcagattatgacaaggaaaagctccaggagcggttggcaaagctctctggaggtgttgctgtactgaagattggaggagccagcgaagcagaagttggtgagaagaaggatagagtcacagatgcactgaatgctacaaaagctgccgttgaagagggtattgtaccaggtggtggtgttgctcttctctatgcatccaaggagcttgataaattgcagacagcaaactttgatcagaagattggtgtgcaaatcattcagaatgctttgaaaacacctgtacacaccattgcctccaatgctggggtggagggagcagtatttgtgggcaagcttttggagcaagaaaatac

SEQ ID NO: 452810 - DNA, 708 bp, Sorghum bicolor
cgtccgctcccacagagaaattatccgacggcctgctcttcccggagctccgacggaagccacccccaggaatacccaccggcgacgggaggcggcggccggcgattagaagcgatggcgttcacgatgcgagcggtgaaagtgcctccgaactcggcctcgctggaggaggcgcggcaccgcgtcttcgatttcttcaagcaggcatgccgctccatccccaccgtcatggagatctacaacctcgacgacgtcgtcacgccctcgcagctccgctccaccatcgctaaggagatccgcaagaaccagaacgtcaccaaccccaaggttattgatatgcttctgttcaacgggatggaggagctgaacaacatagttgaacatgcaaagcagcgccatcatgtcattgggcagtatgtgatcggccaagagggcctggtgcatgaccttgggtcaaaggatcaagggaactccgacttcctgaagaaattctacacaagcaattacttttgatctgagttgcagatttccaccatctggaatactcagggtggtgctctgaataagacactgaggacctgccagcatcagttgtttcacaatcctgtggtcaatataatattgctgttagctatttgctttgatgcacttaccaaattgatgtttatgagtcgatttgattctacaaagactgaacattcttgagtc

SEQ ID NO: 452811 - DNA, 1148 bp, Sorghum bicolor
attccggtcgaccacgcgtacgcgaccgcgtcagaaaaggagtctgacatctcaaaactagagcgacagattacattatccgagataaagtacatggaggagataaagaccatgcaagtggagacaactgaaaagaatgaagcactaacagccaagttgcaggaacacgcagacctacagcatgagaaagatgagttggaacgacagttgctggaagttaggaaagaactggatggtgcctaccataccatagcaaatcaggaagaacaagcttctgtgagagagataaagtgggacgcttttaggaagtattcagaggatcgtctggaagctgagcagcagcgtgctgaggagctggaactacaagtagaagctcttaaacaacagctccaagaagctgagatccgttacaagcaaaaggaagaacaagtttctctaagggaggttcaatgggaagcggatcaaaatcattcactggaagctcagcgtcactatgccacggacttggagaaacaaatcgaagatcttacacagaagttacaatcagctgatgcacactacaagcagaaggtcacagaagtaaacaagagtgttgaattggagaagaaggtgcaggaccttgagcagaagctgcagctagcttattccaagtctgaggaacaggtaacggatgctgtggaatcgagaatcccggaagtcagcctggattcatcaacaagttcagtcaaacagcaagacagaactctggctgctgacaaggcctcaccgagcccaaccctgcaagaagtacaggaaccttctggcatcatggctttcaagttcatcctgggagttgccctgctatccatactcattggtgtgtttcttgggaagcggtactagtgctcagtttgtggaagtcggttgatgcccatcagctcatggaagatcccactgttaatattgctctcagcgaaacttggttattaatttgtagctgaattggcttaaccagcagaagtttgaaaggattggtggccttggtggtaatggttcgacgactttctggaagaagtcggagatcttggaaagccttttattctcctggtggtgaggttttgtcttaattttcatctttttgagtaagggggggcaaggaatttgatttt

SEQ ID NO: 452812 - DNA, 975 bp, Sorghum bicolor
cgtccgctatatctcccggccgccgctcctccctccccgccgccagccctatcttttcgatctcgcccactccgtctcccttacaggcggcggcggccagggctagcgcacgcggcggcaaccatggcagtcggcaagaacaagaggatctccaagggaaagaagggtgggaagaagaagaccgtcgaccccttctctaagaaggattggtatgacatcaaggccccgtcggtgttcagtgtgcgcaacattgggaagactctcgtgtccaggacacagggtaccaggattgcatctgagggtctgaagcatagagtctttgaggtttgcctagctgatcttcagggtgacgaggatcaggcttaccggaaaatcaggcttcgtgctgaagatgtgcaaggcaggaatgtgctcacaaacttttggggaatgtcatttactactgataaactcagatccctggtcaagaagtggcagacactcattgaagcccatgttgatgtcaaaacaactgacaactacatgctgcgcttgttctgcattggcttcaccaagaggcgtccaaaccaggtgaagagaacctgctatgcccaggcttcccagatccgccagatccgccgcaagatggttgagattatggccaaccaggcttctacatgtgacctgaaagagcttgtttcaaagttcattccagaagttattggtaaagagattgagaagtccacctccagcatcttcccactccaaaatgtcttcatccgcaaggtgaagatactcaaggctcccaagtttgatctcgggaagctcatggaggttcatggtgactacaaggaggatgtgggggtgaagcttgagaggcctgttgagggagatgaggctgggcaggaggttgctgctgccgagtagtttatttgctactactataatatctagaagattttggacagtagattgcttatgatgtgaacttcatag

SEQ ID NO: 452813 - DNA, 916 bp, Sorghum bicolor
gacccacgcgtccgtccactcgttcgcggacacatatacagtcgcgcgcttttaggaaggattcagagggtcgtgggggaggtgttcatagctggacttagtagctgtaactacaagtagaagctacttaaacaacagctccaagaagctgcgagccgtttcaagcaaaaggaataacaagcttctctaagggaggttcaatgggaagcggatcaaaatcattcactggaacctcagagtgactatgccacagacttggttaaactcttgtgttacctaaacaaggtaccacgattgcatcttgcggactgcagcataaagtctttgaggtttgcctagctgatcttcagggtgacgaggatcaggcttaccggaaaatcaggcttcgtgctgaagatgtgcaaggcaggaatgtgctcacaaacttttggggaatgtcatttactactgatcaactcagatccctagtgaagaagtggcagacattaattgaagcccatgttgatgtcaagacaactgacaactacatgctgcgcttggtctgcattggcttcaccaagaggcgcccaaaccaggtcaagagaacgtgctatgctcaggcatcctagatccggcaggtaaagtttctgtccttatcacatactccatacctataaagaaagccgtttaggacagcgatacagtctccaaagcctaactttgactccttatgtttataaaaatatttatcaaaaagtggtatatttatatttttatgaaagtatttttcaagacacattttcaaactcaacaacttaacagttattgatgatttatattcccaatgcatgatccaaaccttgtccaaaatgactttctttatatgtatggagggagtacgtagcagaattatataactgtgttagcaacgacgaca

SEQ ID NO: 452814 - DNA, 549 bp, Sorghum bicolor
ggtttgatcctacccgtcatgctgagaaggtccctattccttcccgtgttctaacaggctgccgcgagaagtgcatcatcgagaaggagaacaacttcaagcaggctggtgagagatttcgatcctttgaccctgccaggcaagaccggtttatccaacgatgggttgacgcactgtcagaccctcgtgttacccatgaacaccatacgatttggatcaactactggtctcagtgtgatgcctctcttggccagaagctggcttctaggctgaacctgaagccgaacatgtaagattgacaaggaagaaagcaggcgccggtggccgaggatgcaacatggagcgtgatgcaacacatgttggatcgtgcgatgttgagaacggctgttacacctatataatcgaataaacagggatgtgcgcgttgtagtatgctgatgatcggtggtggttatatatcctggaacttttggtgtacacatcttttctggaaagacgtaataataaagaagaatgtgtcaatgtggtgggcaacagtagcagacgatg

SEQ ID NO: 452815 - DNA, 589 bp, Sorghum bicolor
gttaagttcctgcactgacatgggtggagtaagactatgggatgtgagaactggaaaaattgtccaaactcttgaaaccaaggcatctgtcactagtgcagaagtaagccaggatggcaggttcatcactacagctgatggctcaagtgtaaaattctgggatgcaaatcacttcggccttgttaaaagctatgatatgccgtgcaatgtggagtcggcttcacttgaacctaagtctgggagtaaatttgtagctggaggagaagatttgtgggttcatgtattcgatttcttcactggtgaagaaatagcttgtaacaaagggcatcatggtccagtccactgtgtccggtttgcacctggtggtgaagcatatgcatcaggttcggaagatggcaccattcggatctggcagcttagcccggctaattctgatgacaacgaggcggccaatgcaaatggcaagacaactgctggggtgaacgaggttacaaccaagatagaaggctttcacattcccaaggaggggcagaccgaggggtaggacctcatgtgccttgtggtgcttgtggttcttattgcgaggaga

SEQ ID NO: 452816 - DNA, 746 bp, Sorghum bicolor
cgtccgggtctctctagatgcagcggcaggtgcggcgatggcgccccccatgggcggcgcaccggaggccgcccccgcccctgctcctggatctcctttctccctccttccccgacgtgttccgcgctcctccgaggcagctgcggcaacagcagcacactggacggtcagtggcgaggcctcgtcgcggacgtccctctccctctccatctaccgatgtggcgcttgcggtggggacatggcggccctctgtgtagggcaccggcgcgagcgcccccggcttgtcggtggccctcgccacggtgtggtcgcggctggtcgccgccgttggctgcacctaccccttctccagcgtcgcctggtgcaggtgctccggtagatccgctattccttgtgctgtccgctcgcagagtgtccaatggtttttggcgacatatttctgcttcggtgctccacgacatggtcgaagcgatacaagattctagatttgaagcacaattttttttcattagtctgctgcctctcagcctaaagctttcctccagaattatcgatgtcaggccttgcaaaaacgtcaaattcccaatttgctttgaccatggcaatcaagaaacttgcagagtcagcttcagaaatagcaagtggcaattgataaatttcctcggttcattgaaacgagagggttatttgaagatcaagaagctcgctgctcaacactagatgttaaactgttggtactgtttttt

SEQ ID NO: 452817 - DNA, 543 bp, Sorghum bicolor
  unsure (1)..(543): unsure at all n locations
cgtccgccagcaactcatttctttcttcgagagagggcaaatcggcaaggggagcccaccggagagcaagggagcgggtgacgtcatcgtcctccagggtttctcgatcggcggcgatggcgaccagggcggcggcgaggttcctgcagcgcaggctcctgtcttccggcggcaaggtcctcagcgaggaggagaaggccgccgagaacgtgtccatcaagaaaatggaacaagagaagctggagaagctcgcacgcaagggacccagttcaggacagcaagcttcatcaaccacaggctctgcaccaaatgatgtgaaggttggccctgggccaacagagtcagcgtctgcaagtgtgtcatccgacgagaacaggaactaccctgtcctggcaggcacagttgctgccctgagtggtctgggtgggtatctattgtcaaagcccctaagaagtcggaggaggttgtggactgaagaagggcttgtgaatgcaaactgcggatggtccttattcacnctggtttactttctgcgcatagact

SEQ ID NO: 452818 - DNA, 491 bp, Sorghum bicolor
cgtccgcccacgcgtccgcgaagcttaagctagctagcaatggctgcggcggcgactcctcctggtggtcgtcctagcagcagcagcatttcacggcgcgccgccgccgtggtgccggccttgctgctgctggcggcggcgatggccgcctccgccgccgacgcgcagccttccccggggtactacccgagctccaggttcaggccggtgccgttcaaccgcgcctacaccaacaagtggggcccgcagcaccagacgctctccggcgaccattccgccctcaccatctggctcgacaggaccggcggtagtggtttcaaggcgaagcacgcctccaggaccggctacttctccactcgcaatcaagctccccgccggctacaccgccggcaccaacaccgccttctacctgtccaacaacgaggcgcaccccggtttccacgacgagatcgacatggaagttctgggcacgatcccaggcgagccctaca

SEQ ID NO: 452819 - DNA, 406 bp, Sorghum bicolor
tcgaccacgcgtccgggcgcgggaggagcaggcgctgctgtcgacggagatcgtgaaccgcggcgtggagccgtcgggcccggacgccgggtcgccgaccttctcggtgcgcgtgcgccgccgcctgccggacttcctgcagtcggtgaacctcaagtacgtgcgcctagggtaccactacctcatcagccacggcgtgtacctggccaccatccccgtcatcgtgctcgtctgcggcgccgaggtgggcagcctcagccgcgacgagctgtggcgcaaggtctggggggaggccacctacgacctcgccaccgtgctcgccttcctcgccgtcctcgccttcaccatctccgtctacatcatgtccaggcctaggcccgtctacctcatcgacttcgcatgctac

SEQ ID NO: 452820 - DNA, 632 bp, Sorghum bicolor
catgacattcttttacacgagcggtaagtagaggctcacgaggtgctcatcgttcatggagaaccgcaaggaggatcatcatgtcacggcggttgggtggatgaccgtgccggcgttcggggactgtgacgtcaagaacggcgccttgcctgactacttcatggacttctccatgatccgcgagatgcgcaagcagaacaagcgcgagctctccagggccagcctcggcggcgacgaggacctcctccagcagcagcagcagcagcagagtagcaaggcgcagccgcccaagtcctccgccgtcgtcgccgacgaccaccaccgccggccgctgcacgacgactcccctacgggaaggaagaagttcctgagctatttccattgctgtatcagagcatgaggaattccaaaacttcctgcagtgtcacagcacataactcctgtgcaaatagctgttagatttcttctgtactgtaaagtctgcataatttgtaatcctcctctggttctgtaatcttgtcactcatgcgagcgatgacgagagcaaggacggattgcagggaagaaaagctcatggttcatgctgtgttttttcttcctagtcaaaatcgatggctcgcaacttttagtgc

SEQ ID NO: 452821 - DNA, 705 bp, Sorghum bicolor
cgtccggccatggaggggcccaaggtgtgggcagcgggctggcagaacgcagtcgccgagatcggtcccaacttcgtctggtgggtggcagcgcagagcgtgttctaccacttgtacaaccaagtatcctacatgtcgctggatgagatctcgccgcttacattctccattggcaacaccatgaagaggatttctgtcattgtcgcctcctgggtaatcttccaaacgcccgtccaacccatcaacgcgctcggagccgccatcgccattcttggaaccttcatctactcccaggcaaagcagtaacgccttgtcaagaccactgttccagctgctgcctgctgctgcatgagtattgctgagaatatgcaactgttggatggctgaaagctgcagctgcaactagcagccgaacaagcactagatggcctcagttcaccgtgaatcaactcggtgctcgaacataacaacttatgactattgagaatatctactaagaacccctctgtataatattactagatcctcgttttttgtattttctttcctaggactagcttccagtattcctgagctcctcatttccttgtgttctcattatgactatgatggtgtagagagagatggatccatctaaattaaagtgcaagaattttatttcaaaaaaaaaaaaaaaagggccggccggccttttttttttttttt

SEQ ID NO: 452822 - DNA, 689 bp, Sorghum bicolor
  unsure (1)..(689): unsure at all n locations
cgtccgcaagatattcgtcatgactcagttcaactcagcttctcttaaccgtcacattcaccgtacgtatcttggtgggggaatcaacttcactgatggatctgttgaggtgctggctgcaacacaaatgcctggggaggctgctggttggttccagggcacagcagatgctgttaggaaatttatctgggtacttgaggattattacaagcataaagctatagagcacattttgattttgtcaggagatcagctctatcgtatggattacatggagcttgtgcagaaacatgtagatgacaacgcagacattactttatcgtgcgctcctgttggagagagtcgagcatctgactatggattagtcaagttcgacagttcaggccgtgtaattcaggtctctgagaaacacaaagggggctgccttggaagaaatgaaagtggataccagctttcttaatttcgccattgacgacccaactaaatatccctatattgcttcaatgggagtttacgtttttaagagagatgttctnttagaccttctaaagtcaaggtatgctgaactgcatgactttggttctgaaattctgcccaaagctttacatgagcaccattgtacaggcgtatgtcttcactgactactggtgaggacatggaacaatcagatcatttcttgatgcaaacat

SEQ ID NO: 452823 - DNA, 593 bp, Sorghum bicolor
cgtccgaatcctcagtcctcactcaggctgctctctctcagctcgtgctctctcgatttctccgctcgacatggcgctccaggcggcgacgtccttcctcccctccgccctctccgcgcgcaaggaggggtcggtcaaggactcggcgttcttgggtgttcgtctcgcggatggcctcaagctggagaccactgctctcggcctacgcaccaagagggtgagcacgtcggtggccatccgcgcgcagacggcagcggtgtcctccccatcagtgacccccgcgtcgccgtcaggcaagaagaccctccgcaagggcacggcggtcatcaccggcgcgtcgtccggtctcggcctggccacggcgaaggccctggcggagacaggcaagtggcacgtcatcatggcctgccgcgacttcctcaaggcgtcgcgcgcggccaaggcggccggcatggacaaggacagcttcaccatcgtgcacctggacctcgcctctctcgacagcgtccgccagttcgtcaagaacgtgcgccagctggagatgcccatcgacgtcgtggtctgcaacgccgccgtgtaccagcccaccgcca

SEQ ID NO: 452824 - DNA, 565 bp, Sorghum bicolor
cgtccggttcgtcagagatggacttcttcagtgaatacggtgatgctaacagatacaaaatccaagaggtcattggcaaaggaagttatggcgttgtttgctcagctattgaccaacataccggtgacaaggtggcaatcaagaaaatacacaatatcttcgagcacttatctgatgctgcccggatccttcgtgagatcaaactacttcggctattacgccatcctgatataggtgagatcaagcatataatgctgcctccatcaaggagggacttcaaagatatctatgttgtatttgagctgatggatacagacctccaccaagtcatcaaggcaaatgatgatttaaccagagagcatcatcagttctttctctatcagatgctccgtgcactgaaatacattcatactgctaatgtttatcatcgtgatttgaagccaaagaacatattggccaatgctaactgtaaacttaaaatatgtgattttggattggcaagagtggcgttcaatgacactcctacaacagtattctggacggattatgttgctacaagatggta

SEQ ID NO: 452825 - DNA, 925 bp, Sorghum bicolor
cgtccgctcagccaaagggttgtatgccctacattgtatattattatttttcttaagtgtgtttattcagattgtagataattgctctcttgtttttggtatcaaagacactttcttatctggtcccctattacacaggcaaagagaagacgaggtagaaccccaacacctgggaagtatcttggcacaaaatcttcacgtggacggaggtactccccaagctactcacctgttagaagggaccgttacagttcccgctactcgcctgatcggagggaccgttacagttcccgctatcggagggaccgttacagttcccgctactcacctgaacgtgacctgtcttattctcctgatggtagaggccggtcatactctccatatgacagaaggcgatcatactctccccacggcaggcatggatcttattcccctgacgatcggcgtcgatcatactcaccttactacagaaacgcgatatcgttcaaggtctccataccgctacagaagacggaggtcaccttctgtttcgccatactacagccggcaccggtatagatctgtctccaagtcacccagtgtttctccaacaaggaccagagagcggagctattcccacagtttatcgccacagagaagctactctcgcagccattccccagaatcggagagatcaacgagctactctcctaagaaagggagtagaagggaaccctcatgtagcagatattctggcaagaggcgtcgttcaagggaaagctactctcatagccgcagttcatactccaggtccgtgtctagggagcgctcagcttgatctgcgaggggtatcggcctaggttggtataagatgccccggatccctatttgacagaaccggtggggtttcatgatcaatatatgccggctattgggaacttgagaa

SEQ ID NO: 452826 - DNA, 745 bp, Sorghum bicolor
cgtccgcgcacactcccgcagtagccgccgccgccgccgcccagccacaggaaggaggaggaagaagatgccggcggggcacgggctgcggtcgcggacccgcgacctgttcgcgcgggcgttccgcaagaaggggtacatcccgctcaccacctacctgcgcacctacaagatcggcgcctacgtcgacgtcaaggtgaacggcgccgtgcacaagggcatgccgcacaagttctaccacggccgcaccggacgcgtctggaacgtcaccaagcgcgccatcggcgtcgagatcaacaagcaggttaatggccgcatcatcaggaagcgtatccacgtccgtgtggagcacgtgcagccctcccgctgcacagaggagttccgcctgaggaaggccaagaatgaccagctcaaggcggatgccaaggcacgtggtgatgtcatcagcaccaagaggcagccattgggtcccaagcctggattcatggttgagggcgccaccatcgagaccgtcacttccattccgtacgatgtggtcaatgatctcaagggaggatactaggttgtttggtctatctaccagcagtaccaagttctccatctgtggtactcctgtgcgtacaattttgctcactctgagcagtagtatgaaaccattgtgtgttcctgttgaaagatttcccattctaggtgcaaacctgagtttccgagaacggcttatacctggatctttgcttttaagaac

SEQ ID NO: 452827 - DNA, 380 bp, Sorghum bicolor
cgtccgcccacgcgtccgcgctcccccccacacccgcttcagccgccgccacagccctcgccgccgcgcgtagcaagcaggagcagccaggatgccggctggccacgggctgcgctcgcggacgcgcgacctcttcgcgcgccccttccgcaagaagggctacatcccgctcaccacctaccttcgcacctacaagatcggcgactacgtcgacgtcaaggtgaacggcgccgtccacaaggggatgccgcacaagttctaccacggccgcaccggtcgcgtctggaacgtcaccaagcgcgccatcggcgtcgagatcaacaagcaggttaatggtcgcatcatcagggagcgtatccacgtccgtgtggagcacgtgc

SEQ ID NO: 452828 - DNA, 754 bp, Sorghum bicolor
  unsure (1)..(754): unsure at all n locations
cgtacgacaactggcattctcaactgttgggacaccagattatattgctccagaggttctgctaaagaagggatatggaatggaatgcgattggtggtctctgggcgcgatcatgtatgagatgctagttgggtatccaccattttacgccgatgatccaataactacatgccgaaagattgtgcactggagaaaccatttgaagtttcctgaggatgcaaagttgtcaaatgaagcaagagatctcatttgccggttattatgtgatgttgaccacaggattggcagtgcaggggcagatcaaataaaggcacatccttggttccgaggagttgcatgggataaactttatgaaatggaagcagcatttaagcctcaagtaaatgatgaactggatacacagaatttcatgaaatttgaggaattggaaaatcctccggccaaaacaggctctgggccttcaagaaagatgatgctaaactccaaagatctgagctttgtggggtatacatacaaaaactntgatgcagtgaaagctataaaaatttcagatctgcaaaggaattcatctctaacaaggccttccattggttcgatattcggtccaccaggcatggattctcccatggaaccaaacgggagggacacacatatgcacacagtttcatctggtgatccaatgattccctaacctgcagtgcttgttgacctcagcnaattcccgaactaaatagcatgcacgcctggatgatgt

SEQ ID NO: 452829 - DNA, 395 bp, Sorghum bicolor
  unsure (1)..(395): unsure at all n locations
cgtccgaataaatctggaggtaactgctcttctgtgtcacttgacccactctcttacccaccagatgatctgaaaactcagccacaacaaggcattggaaagagtcatcatattgctacaatatgtggagcaactgttggttcagtagcttttgccgctgttgtagttggtatgcttctttggtggcgtcataggcgaaatcagcagatcttttttgatgttaatgatcaatatgatccagaaggttgtttgggtcatctgaagcgatatgctttcaaggagctccgcgcatctactaataattttaactcaaagaacatcttangtgaaggtggatatggcatagtatacaagggttatttgcgtgatggctctgtcgttgtgtgaaaaggctg

SEQ ID NO: 452830 - DNA, 633 bp, Sorghum bicolor
tgttcaattgctgttgaaactgctgcagatcgtcaccctggagttgagcagtatgctatcaggtcaatttgctgatgcattagatgctgttccactagccttggctgaaaacagtggtttgtcaccaattgataccttaaccgcagtaaaagcccaacaagttaaggagagcaacccccactgcggtatagactgcaatgatgttggcaccaacgacatgaaagaacagaacgtcttcgagacccttattggcaagcagcaacagatcttgcttgccactcaggtggtgaagatgatcttgaagatcgacgatgtcatctcaccgtccgagtactgacgaagtctgaaggaaaaaggaagggatggctatgctggatgacagttcagtaggcagcattgctgatgtgacattggtgtactccgtatccaggcttgctccatgtatctcgtgagctgcctgcctgcctaccactttttgtgtgaccgtttgtggaaattgtttgtatttcaccgatgagtatgcgtatggatgtagtctagactctagacaacaagttttttgtgatggttgcagtattgatacttttgtagtgttttcgccacttggctgaagctatcttttttgtttgatgc

SEQ ID NO: 452831 - DNA, 447 bp, Sorghum bicolor
cttgactatcttgttggcgctgttgccaacccaaagaagccattcgctgcaattgttggtggatcaaaggtgtccacaaaaataggggtgattgagtctctattggctagagcagaaactgaagatgcccaggtggaggaaactactgctatttcaaccaatggtgataatgatgatccattgcgccgtttccttcctccacctgtgactacaaaatgctctgcagcattacagcacaaaattaacaggttccttgcatacaaaagggctggaaagagctttaatgctgaagtgcgcaacaggaaggactacagaaatccagactttctgcagcatgctgtgcggttaccaagaaattgatcagatagggacctgctttggtaaagatgtgtctgatccttatgggtatgacaaaggcgactactatgatgagatagaagcttgaat

SEQ ID NO: 452832 - DNA, 1805 bp, Sorghum bicolor
gcccgctccccgtcggcgcctgggctttcctcggcctcacggccgccgtcgccacgcacacgctccccttcgccgccgccttcgccgccttcaccaacgagatcatctggctcatcgtcatctccttcttcttcgcgcgcggcttcgtcaagacgggcctcggcgaccgcgtcgccacctacttcgtcaagtggctcggcagcagcacgctcggcctgtcctacgggctcgccctcggcgaggcctgcatcgcgccggccatgcccagcaccgccgccagggccgggggcgtgttcctgcccatcatcaagtcgctctccctctcggccgggagcaagcccaaccatccatcgtcacggaagctcggaacatatctggtcatgtcgcaattccaggcagctagtagctcaagtgctttgttcctgactgctggggcacaaaatctgttgtgcttgaatctagcagaaaagtttggtgttattatcgcaaatccatgggtaacatggtttaaagctgctagtttgccagctattgtttctctcctagcaacgccatacttgctatacaaaatctttccccctgaaataaaggacacccctgaggccccggcattggctgcagagaagcagaagcagatgggtccggtgactaaaaatgaatgggctatgattggcacaatgattcttgcagtcgcgctatggatttttggggatgctattggtgtgtctagtgttgtggctgcaatgcttgggctctccattcttctcctgcttggtgtgctggactgggctgatatcttgaatgagaaatccgcatgggatacattggcttggttttcagttctggttgggatggcagcacaactcacaagcctggggattgtttcttggatgtcaagctgtattgctaacctgcttcagtctttctcattgagttggcctgcagcattttgtgttcttcaggcctcctaccttgtgatccattatctattcgcaagtcaaactgggcatgttggagccttgctactctgcattctgcattgcatgtagcagcaggctctagggctttcagcacttgctttggcgttcaacacagatttgtttgggggaataactcactacgtagtggggcagggcagcgtatactttggagctgggtatcttgaccttcctgatgttttcaggattggttttatatcaaccttgattaacacattgatctggggaggtattgggaccttttggtggaaatttttagggctctactgacagcaggcgccgtcaacgtaccggtggtgttggaagtgatgacagcagctggattaagtggaggcaggacaacattgaattggataattcagttgagatgtgattctggggagatgagatggtgcattgtattgttactcccaaaaccgtttccccggtcagagggaagtcttgcaaatgtgaaatggaagaaaaatgcgctgctggtagttgcacttgcacggagttggagctgggctcgggggctgtttggaagctcagtatttatcctaaaacccttgtaaattacaggtttacgcgcgactgtcacaatatatgatgagaaaagcgcgaccaatctcatcgcgcatgatgccttagagcactcacaatgcagactctatcatagagtctaaagttatttattatctcgaacaatgtggacttagagtctaaataaaaaaaaaaaaaaaaatttttttatctctttcttaaataaatatgctatcccatcagtaaaatccctttaataatatgtaattaattatcttggcctcc

SEQ ID NO: 452833 - DNA, 420 bp, Sorghum bicolor
  unsure (1)..(420): unsure at all n locations
cgtccgctcccttcacttcctcgggaagcctagggtttagggcttcaaccgccagcgatgtacggcggcggcggcggcgggcactacgacggcggcggcggcggtggcgccgccaacgccaactcgctcttcggcggcgggggcttcatgccctcacagtccacggcggtcccggagagcagcggcctctccaagggtcggagcgcgcagacgctgctcccgctcaccgtgaaacacatcatggtcgcggcgtcaggccagcgatgacaaatctaatctcgccatcgacggcgttgaggtgtccacggttaggcttgtcggacgcatgttgtataaggggcaccgtgtcacagatgttacaattcactcttcatgatggtaccggcaagatagatgtngaatcgtgggaaaatgagtctt

SEQ ID NO: 452834 - DNA, 768 bp, Sorghum bicolor
cgtccgcgaagatgggcctggacaagcccactgccaccgccgccgccgccgctgacggccagtcgcccaagaagaagaagaagcctgctgcaccgaggccgcctggcgtaggcaatgaccccaccaaagccggcgtgaagcgcgggccatcggaccggcagggggagctggccgtgaagaagaaagccaagctcgataagatcaagacactgtccagcgagaagaaggccgccggtctcggtctggagcagaaagacaccaccgctgtggcagcggcggcggcacagcagcagcagcaagcagcacgggcggctgcaggcggcggcaaggacaacaagggcgagatgggtggtgcggcggccaagaagaaggagccggcgccggcgcccagggtccggaccccgtcgccgacggcgctgatgatgaagttcccgctcaagagcacgctgccgtcggtggcctccctcaaggcccggttcgctcggttcggcccgctggacgtcgacggcatccgcgtgtactggaagtcccacatgtgccgcgtcatctacaggttcaaggccgacgcggaggccgcgctccggtacgccaaggccaacgccatgttcgggcaggtggacacgcagtaccacctccgcgaggtcgagtcatgggcggcggtggcggcgcctgaagcgcccccgcagcaacagcagcagcagcggtccgaactgcggctcatggagacggcttcgttcatgccgggaagctccggcaatggcgctccgc

SEQ ID NO: 452835 - DNA, 894 bp, Sorghum bicolor
  unsure (1)..(894): unsure at all n locations
gacccacgcgtcccggagattcgtgctgtatgcaagaaatttatgcaagatccgatggaaatatatgttgatgatgaggcaaagttgaccctccatggtcttgtacagcactatatgaaacttatcgaggctgagaggaaccnnaaactnaatgatctcttgatgctctagatttcaaccaagttgtgatatttgtgaagagtgttagcagagctgccgaactgaataagttgctttgtgagtgcaacttcccatcaatctgcattcattctggaatgacccaggaagaaaggctaaccagatataagaacttcaaggagggtcacaagagaattcttgtggctacagatttagttggcaggggcattgacattgagcgtgtcaacattgtgataaactatgacatgccagactcagctgatacatatttgcacagggttggaagggctggtcgatttggcacgaagggacttgcaattacctttgtttcctctgcttcggattctgatgttcttaaccaagtgcaagaaaggtttgaggtagacataaaggaattgcctgagcaaattgacacttccacctacatgccatcataagaagagccgccaatgctgcaatgcattctcactgtgcttcaactgaggataatagagcaggataggggagtcggcagtttggagtactcccgtcggttacttttggaactgtatgcgatctggaggatttgttttgcctcctttgtacttttaaaaaaaggcagtcaggatgatctgtattttaagacaatgctgtctgtttgggttttgcctacctaacttgttctgttatgttaggattttgctttgtcaaaaattaattcacttattgtgctaagtgagcagcatatttgttgtt

SEQ ID NO: 452836 - DNA, 612 bp, Sorghum bicolor
  unsure (1)..(612): unsure at all n locations
tcccacgcgtgcggggcggggcatggtgttcaccgngtacggcgaccactggcggaagatgcggcggatcatgacggtgcccttcttcaccaacaaggtgggggcgcataaccgcggcgggtgggaggaggaggcccgctctcgtggatgatgacgtgaggaaggacccgcgcgccgccgccgagggcgtcgtgatccggaggcggctgcagctcatgatgtacaacgacatgttccgcatcatgttcgacacaaggtttgagagcgagcaggatccgctcttcaacaagctcaaggcgctcaacgccgagaggagccgactgtcgcagagcttcgagtacaactacggtgacttcatccccgtcctccgcccgttcctccgtggctacctcaaccgctgccatgacctcaagacgcgccgcatgaaggtgtttgaggacaacttcgtccaggaacgcaagaaggtgatggctcagactggtgagatccggtgcgccatggaccacatcctcgaggccgagaggaaaggcgagatcaaccatgacaacgtcctctacatcgttgagaacaataacgtcgcaacgatcgagacgacactgtggtcgatcgagt

SEQ ID NO: 452837 - DNA, 600 bp, Sorghum bicolor
acgagagtattcacgttttgtattgccttacttggggcaaacttgcatcaacacatgttatgctggtttgaactaagccttgtaacccacaagccaagaaatgaccttcacaaatgtctagaggctaaagttgctcttcttcaaaattttacattattttttttttcacaaggttcataaatgagatgatagaaattggatgaggggaatggaagtacaattggcagttgtaacacatctgccggcaagtttattgtgcaccaaagatccagattccagtgcccggtttgattggccaaattaatccaccggcactggttccattgcttcagcctcctttctcaactcatcaaacagcgcagatgacaagtatcgctccccaaggcttggaagaacagtcacaatgagttttcctttgttttccggcttctttgctagttcaagagcagcaacagtgttcgctcctgatgatatcccaaccaaaagaccctccttgagtgccaattctcgagccatcttaacagcatcctcacctttcacctcaagaaccttttccattacatccatatccaaaatgtctggcttaaaccctactccatt

SEQ ID NO: 452838 - DNA, 622 bp, Sorghum bicolor
cgtccggtgacatctgaaggcctttgccatgatgggtgcgctcgcatggcaggccaccataataaagatgtggtttcgtgtgctgggtgggagatcgcacagggagttgtttttcatccctgggttctcccaacctttgtgtccctgtgccctgcttcatgttgttggcttctcgtcttacgcatcatcatcacggcgtgctgcagattgaacggagctacagcgcagcacacacggtacaactggatctaaatgctaaattttcaatgtacagttgcaatttagaacgcacaaatttatgtaaatccatgtatgtacatctgcccaaagttacacgaaagcgtcaccaatcgtctaactgtacacacctacactgctccgtccatacttttcactcatccaacgcttgtctcccatgacgccataaagcactaacacagcactaacaaatgcggcaggtgtcagcctatggaccatttgaccatttcgacgacgatagacatttaactgcataattctggggatagcatctgaaatgtacagatcaagtatcaatgaaattagggatgaagtattcattatctggttagtttatttaactctgatgtctgaaaatttgggc

SEQ ID NO: 452839 - DNA, 476 bp, Sorghum bicolor
  unsure (1)..(476): unsure at all n locations
ttggattggcaggggcagatagtattgagtgccacgcaagatcagtgctgcaacatggaaagttgaaattccgctgactttggagactcgttgatggaagaccaaattattgagttttatatgcactctggtcacaggtcttattcttcataccatgaatctgtatatttttggtggtggctggtttgtattcacgctgatgttactggaccacagattgactgtactggttgaggcgaatctaatagtgacagtgttgagtttgtggaaactggtatactggggtaggcctatatcgttcttttattaccatggtgtgctaaaaacatcatggcgcctgtaattcgtccaggagatcttggtattgtcttcccgtgtgacatgtgactcacagttaatttgatactgtgctacctgagtacgctttgatcccttaaaaaaaaaaatnaaataaaaaataatataatttattatat

SEQ ID NO: 452840 - DNA, 723 bp, Sorghum bicolor
cgtccgcggacgcgtgggcgcacgcgtgggcgagcagccgagcgagtaagcgaagacccccgcttcccccaagctcaagagcaccatggcgtcggcggcagtttatggcggcctcaaggggaagcttggcgtagaggatgcccccgagctgcagctcaaccgcatccgcatcacactctcatccaagaacgtcaagaacttggagaaagtttgtgcggatttggtgaagggagccaaggacaagcaactgagggttaagggacctgtcaggattcctactaaggttctccacatcaccacccgcaagtccccttgcggtgaaggaacaaacacatgggatcggtttgagttccgcatccacaagagggtgattgacctaatcagttcccctgatgtggtgaagcagatcacctccatcaccatcgagcccggcgttgagggcgaggtgaccattgcagacgtgtaaggacagggcagttcagcaatgtcatcaactatctatatctttgtgttgcttttgttttgtgctccttgtgtgcttgtaagagagatatcgagttattcttagcatataagacttttctttccccccctataatcctatcgtagctgtatgtctgatctgtggcctgtgagctgttcaacttaaaaattttgattcagtaatctggtttatcagggcaacatggttagtgccaatcgacttatcgatcacactgtcca

SEQ ID NO: 452841 - DNA, 435 bp, Sorghum bicolor
ggcaccgggcacgccgccgctgacctgccccgacgccggtgaataggagcaggagcaagagggattcgggatggccaagtcaaagaaccacacggcgcataaccagtcgtacaaggcgcacaagaacggcatcaagaagcccaagcgccaccgccagacctccaccaaggggatggaccctaagtttctgaggaacttgaggtactcaaggaagggcaacaagaagagtggtgaggctgaggcagaggagtaaaatgagtggtggctgagtttgtggcgacaaatgcatctcttgtatcgctagggttttagttgtgaacttaattctcacttctgtatgatcgaaggagataccatcaattggtaccaaagtgatttttttttgtcttgtcgcctatctggaatttaattaaaaccatcagttgtccttttgcg

SEQ ID NO: 452842 - DNA, 771 bp, Sorghum bicolor
cgtccgcccacgcgtccgcggacgcgtgggtggatttctccttggacatttgcaatctctgggtcttgatttccctaaaaacatcagcgtgattgctgtatgccccaagggaatgggtccatcagttagaagactttatgttcagggcaaagagattaatggtgctggtatcaatgctagctttgctgttcaccaggatgttgatggaagggcaacagatgtagctctagggtggtcagtagctctaggttctcctttcacatttgctactactctagagcaggagtaccggagtgatatttttggcgagcgaggtattttgcttggtgctgtccatggcatggtggaggctctttttaggagatacacagaacaaggaatggatgaggactcagcatataaaaatacagttgagagcatcactggaattatatcgaaaactatttcaaagaaggggatgcttgaagtgtataactctttgaccgaagaaggaaagaagcagtttattgaggcctacagcgcagcatattacccatgcatggacatattgtatgagtgctatgaagacgtttcttctggaagtgagattagaagtgtggtgttggctgggaggagattttatgagaaggaagggcttcctgctttccctatggggaatattgatcaaacacgtatgtggaaggtgggtgaaagggtccgttctaccaagccacaaggtgatcttggtccattgcatcccttcacttctggagtgtatgttgcactaatgat

SEQ ID NO: 452843 - DNA, 509 bp, Sorghum bicolor
cgtccgcgagagacagcgggtcgacttaatgcttcattaaatggatcagcccttgcatgatgctctgtgcaatgttaagaaaaccctgcaattgaatacggtgacaactttttcaaagatgtgagctatattattattattagtattgacgttgtatgcgttgagcccgtctctgctcgaaaaaaagaagccatgaagcatggaggcgaacatgattgccaatcgatgtgagctgcctaaatttgagtttgagtatcgggagagctgaatgctttttcaattctagaggtcacctgagcgttacatgctgtcaccaagtcacacctcaaacagctcctgtggctccgacacgtaaggcagaagttgatttatttggtctacactcaacttactgcaatatcaattctttttaccgttggaggtgaaccaggaatcatttaaaaatgattttacctgcggcagttggttgagttgagaacaccatttaattagcaaactattttttaatg

SEQ ID NO: 452844 - DNA, 725 bp, Sorghum bicolor
cgtgcgatctactgtcaaatgcaagatggtggcttgaagaatataagtttgatggatttcgatttgatggggtgacctccatgatgtatactcacgcatggattacaagtggcatgtgaccgggaactatggcgagtattttggatttgctactgatgttgatgcagtagtttacctaatgctggtaaacgatcttattcatgggctttatccagaagctgtatccattggtgaagatgtcagcggaatgcctacgttttgtattcctgtccaagatggtggtgttggttttgattatcgccttcatatggctgtcccagacaaatggattgaacttctgaagcaaagtgatgaatattggaaaatgggtgatatcgtgcacaccttaacaaatagaaggtggctagaaaagtgtgtcacttattgtgaaagtcatgatcaagctttagttggtgacaagacaattgcattctggttgatggacaaggatatgtatgatttcatggctctggacaggccttcaacacctgtcatcgatcgtgggatagcattacataaaatgattaggcttatcacaatgggtttaggaggtgaaggctatctaaatttcatgggaaatgagtttgggcatcctgaatggatagattttccaagaggtcctcaaagtcttccaaatggctctgtcattcctgggaataactatagctttgataaatgccgtcgta

SEQ ID NO: 452845 - DNA, 289 bp, Sorghum bicolor
cgtccgggagctttaaccgccgggtacggtgggctcaaaggtagccatggccaggcggcggccaccacgattccacgcccgtgtcgccgccgccgtgttcctgctgctgctgctgacccccgccccgacctcccagctcggcctgggcgccgccattgccgcctggatccacggctcgccgcctgctcctcctagccctagcactgacgacgacaccgtcaccgtcttcttctcgggcgcgccggccagcagcccacggagccaggagtacgcggcgctgcaggcgctg

SEQ ID NO: 452846 - DNA, 537 bp, Sorghum bicolor
  unsure (1)..(537): unsure at all n locations
cgtccgcccacgcgtccgtgacgttatacgttttcattactatgttcagtaccatctatatatacaattatcagaggcagcaacatatgcaagaaagaaaaaggttatcctgaaaggtgatttacctattggtgttgataggaatagtgtcgatacttgggtatacccgaccttgtttcgcatgaataccgctactggagcacccnctgattattttgacaagaatggacaaaaattggggttttcctacatataactgggaggagatgtctaaggataattatgggtggtggcgaggtcgtctgacacagatggcaaagtacttcacagcatacaggatagaccacatcttgggtttctttaggatatgggagcttccagatcatgctgcaacaggtttagttggngaaattagaccttccattcctcttagtcaggaggagcttntaagtgaaggtctatgggatttttaatcgaatgagccaaccatacattcgtcaggaaattctaaaggagaagtttggatccttttggaca

SEQ ID NO: 452847 - DNA, 563 bp, Sorghum bicolor
cgtccgcccagatcttcctccctcaggttcaacgctggccaccgaccccaggtcttctacacctgatctgcacggtagggccacggcgccctctcctgcatcgcttggcgctcgtctctgcctaggcggcggcgacgcagatcgacggccctgcgcaggcggtgcaccggcgtcctcctcctgcatctcctcctccacttcctccctctccctctccctctccctgtccctctctgcggcctctcccggaacggcgcctcaacctggatgtccggcaaactctgcaacagcatcgccgacctagggttccgtcctccgtgtcaccggccatcttggatcggctggaccctggcacaagggcggcgctggccgctttggtgcaggtgacgcggacgacgaaggccaccaccgcgtcctcgcggctagtcacccagggttccgcggccgtagcggctgcacagggtcatccctcgttccccttctctcgtactgcacaaagctcatccaccagattatagtgttggttattcccctaaaaatataaatctcaaccttgttttaaa

SEQ ID NO: 452848 - DNA, 750 bp, Sorghum bicolor
cgtccggcagaaacagaaggcggtggagcctctggtttcgtcgtcgtcgtctccctcagccccccgttcccccccacacatcactccactctggtcagcttcctgtatatatataagtaggtcacctggctgtgctatccatccatcgctgcaaccaaccatcggttcaaagagagattattgtcgatcgatcgactcgaatcgaagatcgaggctaggtctcgaggcagatcgatggagaggatgagctcgtcgctgcagtcgtgggtggaggaacacaagctctcaaccatcggagctgtgtgggcgacggcggtgggcgcgtcagtggcgttcagcctgcgtcgggcgctcggcgcgtgccaccagcctgcgcctcatccacgccaggatgcacgcgcaggcgctcaccctcgccgtccggggcggagccgcgctcgcgcaccactactgcggcagcagcgccgggaagcagcggcaggaggagctggactacggcttctactcccagctgccgcccgccaccgacgccgacggcaacgagaacgagcgctggagctggtagcaaggacaaggaggaggagaaggagcgacaagaaagaggaacaaacaacaataaattagtagcaataatgggtgggtggcctggttagcaatcatgcgtgacgtggcttcgtcctaatcctaatcctaatcctaatccccgcccgtggtttacattatccatccatccatccacatcaatgaatg

SEQ ID NO: 452849 - DNA, 566 bp, Sorghum bicolor
cgtccgcccacgcgtccgcccacgcgtccgcccacgcgtccggctcccccacctccgctgccgccgccgcggcggcatctcccggcgtcgcccgcagcgggggcctcctgcgccgctcgcgcccagtccccggcgtcgtgaggtgtaaaaagattgattctctgagggcaatcaatggagcactgccttgtattccggtgtccgacaggtcgctactgactcctgtaaacttgccggttttccgggatccaaacatgaggaacgacacgaggctgcgcatcttctcaggcacagccaatccttccctttctcaggaaatagcaagttacttggggctagaacttgggaagatgaacataaagaggttcgctgatggtgaaatatatgttcagttgcaagaaagtgtacgggggctgtgatgttttccttgtgcaaccgtcgtgccctccagcaaatgaaaatcttatggaacttctgatcatgattgatgcctgtaggagagcatcagctaagaatattactgcaggtatcccttattttggttatgcaagggctgacaggaagtc

SEQ ID NO: 452850 - DNA, 519 bp, Sorghum bicolor
cgtccgcgacgctgatgctggagatgctgcgtgggaagcggatgctgttcgtgggcgactcgctgaaccgggggcagtacgtgtccctgctgtgcctcctgcaccgtgccatccccgacggcgccaagtcgttcgagacggtggactcgctgagcatcttcagggcgaaggactacgacgccaccatcgagttctactgggcgcccatgctggctgagtccaactccgacgacgccgtggtgcactccgccgacgaccgcctcatccgcggcgcgcccatggacaggcactccagcttctggaagggcgccgacgtcctcgtcttcaactcatacctctggtgggtcgccggggacaagatccagatcctgaggggcgccgacaatgacccgagcaaggacatcgtggagatgaaatcggaggaggcctacaggctggtgctgtaccaggtggtccggtggctggagcgcaacgtggacgccaagaagtcgcgggtgttcttcgtcaccgcgtcgtcaa

SEQ ID NO: 452851 - DNA, 408 bp, Sorghum bicolor
cgtccggccgacgtttccacgctccctccccttgtccccactccaatggcgccctccctccacgccgccgtgtccgcctcgcccttcctcctagccggcagcggcagcagccgcaggcccctgggcgccgcccccatccgccgggccgggctgcgcgtggctgcgcttaagtacgaccctgccaaggtggcgccgcagaacgaccgggtgcttgtccgtatccagcagatccctgagaaatctgctggtggtgtattgctaccgaaatctgctgttaagtttgagagatatctgatgggcgagattctatcggtcggtgctgatgttagtgaagttgacgctgggaagaaggtctcttctcagacatcaatgcttatgaggtggaccttggtaccgatgagaagcact

SEQ ID NO: 452852 - DNA, 428 bp, Sorghum bicolor
  unsure (1)..(428): unsure at all n locations
gcgcgtccgcccgcttgcctttccccacctgtcgcggcgctcgccagtctagggtttcgccccccttcgggcggcgatccgtccccgccgggcatgtcnaancaaggagggaaggccaagccgctgaaggcgcccaaggtcgacaagaaggagtacgacgagagtgatcttgcttatttgcagaagaagaaagatgaggaaaaggcactgaaggagctgaaggccaaggcacagaagggcgcaattgggggctcgggtctcaagaaaagtggaaagaaatgagcctggtcacctgtctctaatacttagagaatgataaggtggctgcttatctgtgttgcgcttcactatatgtgattgtaaccgtgctacctattgtgttctgtgttttgcaaattgcaatgttgcagttggttgcttgatcaaaa

SEQ ID NO: 452853 - DNA, 337 bp, Sorghum bicolor
cgtccggccctttggaaaggacttggattccgctgaagaattaagtgcccaacttggggagctattcgaggaacaccaactatacagaatagaccattacctgggaaaagagttggtccaaaacttgcttgtccttcgttttgccaaccgcttgttcttgcctctttggaaccgcgacaatattgataatatacagatagtattcagggaggactttggaactgaagggcgtggaggatattttgaccaatatggaatcattcgtgatatcattcagaatcatttactgcaggttttctgtttggttgcgatggaaaagcctgtctcccttaagcct

SEQ ID NO: 452854 - DNA, 574 bp, Sorghum bicolor
  unsure (1)..(574): unsure at all n locations
cgtccgcaagcttttactgcagaacagataaatgatgcaacttatgtcgatatccatggtaataaagctgtctttgacagcttgagaaacaaccccaaagtaagctatgatgggaggcgtttctcttacaagtccaagcatgacctgaagggaaaagatcaactgcttgttttgattaggaagttcccagaaggtcttgctgttgtggaagtgaaggatgcatatccaaatgtattggaagatttgcaggctctgaaggctgcaggtgaggtttggctgttatcaaacatggactcccaggaggacattgtataccctaatgatccaaaagcgaagatcaaggttgatgatgacctgaagcagctcttccgtgaaatagagctaccacgtgatatggtcgacatagagaaggagctacagagaaacggtttcaagcccatgaccaatactgccaaatgacgagcagctgcccagatcaatggcgtgaaacccaaagnnaacccaagaagaagcagcgtggatcacaaagcggaccaagctcacgaatgcccatctgcctgagctgtccagaatc

SEQ ID NO: 452855 - DNA, 488 bp, Sorghum bicolor
  unsure (1)..(488): unsure at all n locations
cgtccgcccacgcgtccgcccacgcgtccggtgggtcgccaagaacctggtcccctactacccggcgacgcgggtcaagttccttctcgtggggaacgagatcctctccgaccactccatcgccaactccacctggccgcgcctggtcccggcgatggagaacatccaccggagcctccgcaagaggggcatcagcagcgttaagattggcaccacgctcgccatggacgcgctcgccgacggcgccttcccgcgcccaccgtcggccgccacgttccgcgccgacatcgccgaggcagtcgtgcgcccgctgctgcacttcctgaacgggacaaactcgtactacttcgtcgacgcgtacccctacttcgtctgggccgacaacaacctcaccgtctcgctcgactacgcgctcttccagggcggacgcctncgctacgtcgacccgggcaccagactcacatacaccaacctgctcgacgaaatgc

SEQ ID NO: 452856 - DNA, 551 bp, Sorghum bicolor
cgtccgcccacgcgtccgccctttttgctactgatttctttgaagtcaaggctgtgaaagaaattgagcctgcacttaagaagcagctcatcatctccaccgccctgatgactgttggtattgctgtaatcagctggttagcccttccagctaagttcaccatctacaacttcggtactcagaaggatgtctccaactggggcttgttcttctgtgttgcaattggtctgtgggctggtctgattattggttttgtcacagaatactacactagcaatgcatacagtcctgtgcaagatgtcgcggattcgtgcagaaccggtgctgccactaatgtcatttttggtctcgctcttggatacaagtcagttatcatcccgatttttgctatcgctgttagcatctatgtcagtttctccattgctgcaatgtacgggcatcgctgttgccgctcttggtatgctgagcacaatcgcaactggtcttgccattgatgcttatggtcccatcagtgacaatgctggtggtattgctgagatggctggaatgag

SEQ ID NO: 452857 - DNA, 570 bp, Sorghum bicolor
gagtatgaaagttcattcagtgaagatgagaagaagcaatccaagcaactgaagatcagctgcaacttaaacaatgctgcctgcaaactgaagttgaaggactacaaggaagctgcgaagctttgcaccaaggttctggagctagatagccaaaatgtcaaggctctctacaggagggtgcaagcgtacattcaacttgctgacctagagctagcagaggccgatatcaagaaggcactggaaatcgatcctaacaacagggatgtgaagttggaatacaagaccctgaaggagaagatcaaggagtacaacaagaaggacgcgaaattctacagcaacatgttcgctaagatgacaaagtaactggcactggccaaagacagtatggcttcttgggtagaggatgtagtgaagcaaaggattacaagcaatgccattttctgctgcccaaggacttcgcctgttgcttaacattcaacctttggcatactttgtagtcaattagcgcgcatggatgcttggatatgtgaaactgaggaacaattacttcgaggattattattggctctg

SEQ ID NO: 452858 - DNA, 616 bp, Sorghum bicolor
cgtccgctgaagacggaactttgccgcttcagcggtcagaagatttatcctgggaaaggtagttcatttattcgcgctgattctcaggttttcctttttgccaactcgaaatgcaagcgctacttccacaaccgtctgaagcctgcaaagcttacctggacagcaatgtacaggaagcagcacaagaaggacatccatgctgaagctgtgaagaagaggcgccgcaccaccaagaagccatactccaggtcaattgtgggtgcctccctggaagtgatccagaagaagagagctgagaagcccgaggtgcgcgatgctgctagggaagctgctcttcgcgagatcaaggagcgcatcaagaagaccaaggatgagaagaaggcaaagaaggcggaggtgaccaagtcccagaagtcgcagtcgaagggcgcggttcagaagggttccaagggccccaagctgggcggcggcggcggcaagcgctgaaagaactgaagatgtcatttgctgctgaccttgcaatcgctcctcattagcctacctaccttgtttctccagagccagttttgtagtacctgtacctgggttaaatttgcagttcctttcaccgttgctt

SEQ ID NO: 452859 - DNA, 507 bp, Sorghum bicolor
cgtccgcccacgcgtccgcccacgcgtccgaaagaaaccaaactcggctcgagagagatcgcatctgcttgcctgcccaacccaccttccctttcctccctccgtccctccctcctcgccccagcgacgcggcacaccggagaccgagcaaagcaagccaccacacagaggcaaggagaggaggaggagcaggaagccggaggcgaacaagatgtcgtcggtgttcagcggcgatgagacggcccccttcttcggcttcctcggcgccgccgccgccctcgtcttctcatgcatgggcgcggcgtacgggacggcgaagagcggcgtgggcgtggcgtcgatgggtgtgatgcggccggagctcgtcatgaagtccatcgtgcccgtcgtcatggctggtgtgctcggtatctacgggctcatcatcgccgtcatcatcagcaccgggatcaaccccaaggccaagccatactacctctttgatggatatgcccacctgcgtccggc

SEQ ID NO: 452860 - DNA, 509 bp, Sorghum bicolor
cgtccgcggacgcgtgggcgccttcatgttccgggagacggcgcggctggacccgggcgccacgctcttcgtcaacgactacaacgtcgagggcggcaacgaccccaacgcgacgcccgacaagtacatcgcgcagatcgccgcgctgcagcagaagggcgcggcggtgggcggcatcgggctgcaggggcacgtcaccaaccccgtcggggaggtcatctgcgacgcgctcgacaagctcgccaccaccgacctgcccgtctggctcaccgagctggacgtcagcgagtccgacgtcgacctccgcgccgaggacctcgaggtggtgctccgggaggcgtacgcgcacccggccgtcgagggcgtcatgttctggggcttgatgcagggccacatgtggcgccaggacgcctgcctcatcaacgccgacggcaccgtcaacgacgccggcgagagggtcgtcgatctccggagggagtggacatcgcacgcgcgcgggcatatcgaca

SEQ ID NO: 452861 - DNA, 551 bp, Sorghum bicolor
cgtccccaaggcgcagggcgtgttccatgtcgacatgatcatgctcgcgcataaccccggcggcagggagcggtacgagcgggagttccgtgacctcgccaaggccgctggcttctctgggttcaaggccacctacatctacgccaacgcctgggccatcgagttcatcaagtaaaaatgcagacagagtcctccgtacgtcgctcgctgcgatgagatggcacatgtcatggatggtcctcatcgccggccggctccatcgccgccgtcttcttcttctggttgctgctgctactgctgtcgcacatgcatctacttttgcttactttgctttcttcattcatcgatcctgcattataattaatggcctagcctgcctccgatgtccgatccatacatggtggccatatatatctttggttcgtcttgttgagctgttgcatgttcttggattctaaattgctgtcgaattgtctctgcgccatgtaccagtaataacaatcaaggttatacttactatatacaatgacatgcatgccggtttatttctc

SEQ ID NO: 452862 - DNA, 500 bp, Sorghum bicolor
cgtccgatctgcagctgcatcaggggcacaggatcaggcagaaactgatcacatggctagcgggtgctacagatcagcagaaactccagcgaatattacaaataatgctatatctcagtcccagcctcaatggacaggtccatcccctgtggatgactctgcagtaaacagtgaaatgcttaacaaccagcagttggcaatagatgaaggaacgatcagtgtgtccagtaattattcccaagagttacttaactcgttgactcacgcccttcaaagctcaggtgtagatttgtcccaagccagcatctccgtgcagatcaacctgggaaagcgtgctgtcaagagacctgttgctccttccaactccaaggaaccagctgatccagcatctagtaacgaattaggccatcagctgatgatgttgggtgccggtgccgacaatctctctcacacaacgaagcggcataaacccggcaacagctgatgaccgctcacactca

SEQ ID NO: 452863 - DNA, 587 bp, Sorghum bicolor
cgtccgccaagagttcttcttgttaggcaaggcataagcagaagcaaaaaggtctcgttggcgatggcgagctcgggagtttcgtggacgctgccagaccacccgaagctccccaaggggaagccggtggccgtcgtcgtgctggacggatggggtgaggccagccccgaccagtacaactgcatccatgtcgctcagactcctgtcatggactcgctaaagaatggtgctcctgagaaatggacactagtgaaggctcatggaacagctgtgggtctcccatctgatgatgacatgggcaacagtgaagttggccacaatgcacttggtgctggtcggatttttgcccaaggtgctaagcttgtcgatagtgctcttgcctctggaaagatttatagtggagatgggttcaactacatcaaagaatctttcgaaagtggtactctgcaccttattgggttgttgagtgatggcggtgtccactctcgtcttgaccaactgcagttacttctgaaaggtgccagtgagaggggagcaaaaaaaatccgtgtgcacatgcttaccgatggacctgatgctttggatgg

SEQ ID NO: 452864 - DNA, 532 bp, Sorghum bicolor
cgtccgaacgaattgaacaaggtagctgtaatgaatgttcttcttcctcacagagcagatcgcatcaaaccattatttgtagtggactttctgcgaagcaaggataaacagttgcgggttgccaccctgtggtgccttctgaacttgatttaccccaaatgtgaagcctcatctggtagagttgtcagattacaaaatgctggagtgatccaacaagtgaaatgcatgataaatgacccctgcttggattgcaagcttagagtacgtatggtgcttgaacactgcgtggacaatgccgatgattgtttcatgtgagcaaccagtatgtcatcttgacaaccaaagtttatggaaccatattcagaccacgaaagaggaaaatcggtgtgcttcctgatccattatatgctctgaacagtgatacatggacaccatattcagatcaggatagtagaagaaattagtgttgtcttgctgatctcttcatgtcggctagagccaactgtcatttcttcaccatggagaacctgac

SEQ ID NO: 452865 - DNA, 869 bp, Sorghum bicolor
tcgcgtccgaattagcgctcatcaccccccgccaccctcgcctcccagtagtaacaagagtccttcctcctccggcgtcctgctctgccctcctccagtcccaccacccccaactcctccggcttcactgcggcgcggggcttcgctccggatcggctcgagcagaagaaaatgcaacgggcagtgcaagccgtcaggtcacatggcagtgtgcttaaatacgctgttctacaacacatcagcgctcccaaaccagcaatgcttcctgctgtcttttctcggttcatgtcagtttcatctgctcgcctagaggatagtggatttgaaactgccactgtatcagatgtcttgaagtctaaagggaagagtgctgatggatcttggctctggtgcaccacagaggatactggctatgatgctgtcaaatcgatgacgcagcacaacgtgggagctttggtggttgtcaaacctggagaggctaaatcaattgctggcattgtcactgagagagattatctaaggaaaatcatagtgcagggaagatcttccaagtcaactaaggttggcgacatcatgaccgaggagaacaaactgatcacagtgaaccccaacaccaaagtcctgcaagcaatgcagctgatgacagacaaccgcatcagacacatcccggtgattgacggcacagggatgctggggatggtctccatcggcgacgtcgtgcgcgcggtggtcgccgagcacagggaggagctgaaccggctcaacgactacatccagggaggctactaggacgactgtcatgtgcagcgacgcaacccccaatgaagtccgcctttgtgaaatccaataacaaggaacaatgatgatga

SEQ ID NO: 452866 - DNA, 667 bp, Sorghum bicolor
cgtccggacaaatggagatgtgctgctgctcctttaactgcgatgatgagtgtcaagaggcatttacgtggccctggagcaatccctataggaagaccttccattcatccttcccccattgacctaaaagggaaggcttatgagttgctgcgagagaaggcttcaagcttcctcctcgacgacttctacaggactccaggaggcattcagttcgaagggcctggttcagacgcaaagcccatcacactgaccattgagaaccaggactacatgggcgacattgagatactgaaagagtatcttggcaaggttaggaccatggtgaagccagggtgctcccgggagatcctgaaggcagcaatcagctccatggtgtcggtgacggatgtgcttaccgtgatgtcccaccccctcaacaccgagctgcccctctaccatttcaagtgagcgagggcatcagtctgctttcgtctgggttatttgtagagtgccttttgtaacagcagaagattctgcttcattggctgccggtattttgtttgggtgagaagcactgggttgatgccaataaacactgaaactgtccttgatcctgatcctgaactgtagttattgctggattgaaaaatgcatgttttcgaccttggtcggctgcagtttaaagtgc

SEQ ID NO: 452867 - DNA, 563 bp, Sorghum bicolor
cgtacagacgtctccacggccacgcccgcaggcagcagcagtcctagtcgtctctctctctctccccgccccgctctgcctcggcttcccgccggcgggaggatgaaggtcaccgtcgtgtcccggagcggccgggaggtcgtcaagggcggcatcgacctcaaggactcggccaaggtcgcggatctgcaggaggccatccatgccaggacaaagaagtattatccttctaggcagcggctcaccctccctcttcaacctggaaaaggtgggaagccagttgtcctcaatccaaaggccagcctgtcagaatactgcgagaagggttctggatcattgacagtggtcttcaaagatttaggaacacaggtctactacagcacgctgttcttctttgagtacttgggtcctctcatcatctaccccatgttctattatttgcccgtctacaaatacttcgggtacgagggagaacggatcatccaccctgttcagacctacgccatgtactactggtgcttccactacttcaagaggatcatggagacattctttgtgcaccg

SEQ ID NO: 452868 - DNA, 479 bp, Sorghum bicolor
  unsure (1)..(479): unsure at all n locations
cgtccgagcaaatccaagcgcttaaaccacactcatcagatcaaccacaaacagcctcccgagcagaactcgctcgtagccccgagaaccaacagccctcctcctccccctgcagcgagatggctcccgagcttgccggcaagatgaccgccaaggccgctgccgccgccgccgccgcggcggcgacgaagcccgcgacgagggcgtacgtgacgttcctggccggcgacggggactactggaagggcgtggtgggcctggccaagggcctgcgcaaggcccgctcggcgtacccgctggtggtggccgtgctgcccgacgtgccggagtcccaccgccgcatcctcgtctcgcagggctgcatcgtccgcgagatcgagcccgtgtacccgcctgagaaccagacgcagttcgccatggcgtactacgtcatcaactactgcaagctccgcatttgggagtncgtggagtcgagaaga

SEQ ID NO: 452869 - DNA, 607 bp, Sorghum bicolor
cgtccgcccacgcgtccgcccacgcgtccggctgaggtcaagggccggtcttggcaggccacagcaacccaccggctccttcctcttcctgggtccgaccggtgtaggcaagaccgagctggccaaggctcttgccgagcagctgttcgacgacgagaacctgcttgtccgcatcgacatgtccgagtacatggagcagcactcggttgctcgcctcatcggagcaccacctggctacgtcggccatgaggagggtggacagctgactgaacaggtgaggaggaggccgtacagcgtgatcctcttcgacgaggtggagagggcccatgtcgccgtgggcgacaccctgcttcaggtcctcgacgacggcaggctgacggacgggcaaggcatgacggtggacttcaggaacaccgtgatcatcatgacatccaacctcggcgccgtgcacctcctccccgggatggtgggcaagaactccatgaaggtcgctcgcgaatctggtcatccaggaagtgaggaggcactttcgtccttgatctgttaaaccgcttcactaagatcgttatcttcgacaccttttttttcactgtccaattttatttaa

SEQ ID NO: 452870 - DNA, 562 bp, Sorghum bicolor
ggcacgcggacgctctcatccattcccattccttgcaagcgtagccacctctcccactcactctctcgcagctgctaagcgaagccatgggcaaggacgacgtgatcgagagcggcgccggcggcggcgagttcgctgccaaggactacacggacccaccgccagctccactgatcgacgcggcggagctgggttcctggtcgctgtaccgcgccgtgatcgccgagttcatcgcgacgctgctgttcctgtacatcaccgtcgccaccgtgatcgggtacaagcaccagacggacgcgacggcgtcgggcgccgacgccgcgtgcggcggcgtgggcgtgctgggcatcgcgtgggcgttcggcggcatgatcttcgtcctcgtctactgcacggcggggatctccggcggccacatcaacccggccgtcaccttcggcctgttcctggcgcgcaaggtctccctggtgcgcgcgctgctctacatcgtggcgcagtgcctgggcgccatctgcggcgtcggcctcgtcaaggcgttccagagcgcctacttcgacaggta

SEQ ID NO: 452871 - DNA, 618 bp, Sorghum bicolor
  unsure (1)..(618): unsure at all n locations
cgtccgcccacgcgtccgattacaatgaagctgatccagtgacacatcaggggttggacctcacaaggattacaactagagaattgatctcgaaacatggattgagtgatgacactgtagattttattggccacgcgctcgctctgcacagggatgatcgttacctaaatgaaccagcccttgatactgtaaaaaggatgaagctttatgctgagtctcttgcacgttttcaaggaggctcgccttatatttatccattatatgggttgggtgagctgccacccgcgcgtccgcgtctaagtgctgtttatggtggtacatatatgttaaataaaccagagtgcaaggttgaattcgatatggagagggaaagtgtgtggtggtacttcacaaggtgaaacggctaaatgcaaaaaaagttgtctgtgatccttcttacttgcctatcaaggtaaggaagattggtaaagttgcacagttcttctttattatgagccacccaattctcaacacaaatgagttccactctattcagnatatttgtgctcataagcaactttgtcgcatggtagacatatatttgttcttgtgctcatatacacataatttgtgctccaa

SEQ ID NO: 452872 - DNA, 556 bp, Sorghum bicolor
ttccgggtcgaccacgcgtccgaccagtcaacactgacctgcgagctagctagtgaggtcgggcggccgtccatcccaccgcacaccgccggtccagtccccgccggtgccggagggggtgaagccgtgaagttgaagttaaaccaggtctgctcgaatccatttcatactgactcggagaatcttctggatcttatctgttatctcctctactcttagaggcctccaccatggaacatgacggcaagaacctgactgtcactgaggttgtgcgctcggtgcagctgctcaagattgacggctattccgccacctctaccatggtggggtcatcggagttcatcaaacccagatccagatggaacatcgatggccacgagtgggaggtccatttctaccctgatcactgtcagttcctcgaggacgaggacgtcatacccccatttgacgacttcatccaatgggtcgctctgaagctcatccttgtcagtgaacctcagagggacaagctgagggtgaatctgagctgccggcttgtatgccccagccagcggat

SEQ ID NO: 452873 - DNA, 631 bp, Sorghum bicolor
cgtccgctcccccaccccatcccggagctctctgctcgcgcaccctcacctgcccgcgccgccctccaccaccaccaagatgaacaaggagaggctcatgaagatggccggcgccgtccgcaccggcgggaagggaaccgtgcgcaggaagaagaaggctgtccacaagacgggcacgaccgacgacaagaggctgcagagcacgctcaagagagtaggggtcaacaccatccctgcaatcgaggaggtgaacatcttcaaggacgatctcgtcatccagttcttgaatcccaaagtgcaagcttctatcgcggcaaacacatgggtggtcagtggatctccacagacgaaaaagctacaagatgttctgcctgggatcatcaaccaacttggcccggacaacatggaacatctgaagaggattgctgaagagatgcagaagcatgtggctgctgccggtgctgcggcgcaagtcaaggaagaaaacgatgatgatgttccagagcttgttcctggagagacttttgaagaagtagctcaggaggcaaaagcctgatcatagactccaaatagtgaaatgttactcgaccacccctgtgaagtcatggttttcgagtgatggcactcttgc

SEQ ID NO: 452874 - DNA, 577 bp, Sorghum bicolor
cgtccgcccacgcgtccgataatagtggctgtggtggtggcctcatggattatgcttataagtttgtggttaaaaatggtggaattgacacagaggaggactacccctatcgtgaagcagatgggacatgtaacaagaacaagctgaaaaagcgaattgtgacaattgatggttactctgatgtaccttccaacaaagaagatttgttacttcaggctgttgcccagcaaccagttagtgtaggaatatgtggcagcgctagagcatttcaactatactcccagggtatctttgatggtccatgtccaacatctcttgatcatgctgtgctaattgtgggttatggctctgaaggtggcaaggattactggattgtgaaaaactcttggcgtgaaagttggggaatgaagggctatatgcatatgcatcgaaacactggtgattccaagggtgtctgcggtataaacatgagggcatcattctgtaccaaatcaagccccaatcctactacttcatcatgcccaggtgcaaccaagtgcagtctgcttacatactgtgcttgaagatccacctgttg

SEQ ID NO: 452875 - DNA, 534 bp, Sorghum bicolor
cgtccgagagtatgctcagaagatgaattacgccattccatcttatatttgcactaagcaagcgtcaggtgtagctcctttcatatgcactgtgggagattggtggcatacaatacattggtgctgcggctagaacaaagaaggaggcagagataaaagctgcccgaactgctcttcttgcaatccagggtcaatcagaaggttgtgcaaatggtgctaaaaagtacattgctgttcctggacatacgcccggtaaggagacagatacaaaaccaactgatacccccaaaccacttaaagtgaacaatcgtggttccaaaaggaaatggaacaagaagaaattggtggggatggctaaccaaattgttgatgctcaaaaggatgtagaggggcttggaatgcttctacagtatgaccatgaggaagctggaagaatagaatatgagttatctagagatactgcaatggttcaatttaacaaggaagttatagtgatgcaacctggtgagggagataggatagtgcaaccggagt

SEQ ID NO: 452876 - DNA, 339 bp, Sorghum bicolor
cgtccgctcaaaattcgcagcgtgtccctccctccctccgtccctgcgctcgtcctccccctctcttcctcgcgttcctccaccccgggcgcaaaccctaaccctaccgtcgctcgccccgcggcgcctgcgaatggcgcgccccgtgtgagtgtgtgagagagggggaggagacctagagcccgctacccgggggaggagagagagggagggagagcgaagcgatgtataagcaggggggagcggggggaggggctgggctggaccggaagcggatcagcgacgcgctagacaagcacctcgagaaggcggtcgcgtcgccgtccacgtcgagggggt

SEQ ID NO: 452877 - DNA, 456 bp, Sorghum bicolor
cgtccggcaccataaattaggtttatttgtgttccatgtaatgatcattatgtacctttccataggttacatcttgatgtctttagatgcctgaggcaatgctcatgacctaagatcactcttcctcttacatcttttttctatatcgacaacttaggcaatcaccatggtcagtgttggtgctatttttgccaactctttctagctgtcccatgatagcagaggcaatggtcaattggttgtctatgttttcttgcatctattcctgcctctgctggcctgtcacatactatgcggctggaacttgctcttggttatgagatctgaggttgtgttgccattgcctgtgataatttcttcgctttgcctgtttgttacgtgtgagcattgcctgtgatgacatactattgcttctgagcacatgccctatcccgatgattacattggcatacactt

SEQ ID NO: 452878 - DNA, 720 bp, Sorghum bicolor
  unsure (1)..(720): unsure at all n locations
ctcgttcattggagactcacgcactgtcatgatatcatgcatttctcctagttctggctcttgcgagcatactctgaacacattgagatatgctgataggtgattacttacctccattgtttctgttgctataactgctcatattatcataatatgcacaacacattctcatttttcagagtgaagagtttgtcaaagggaagcaatgccaagaaagatgtatctttggcagtgcctatgagagagtcgagtccttccccactgacttcagttgtaccttcattctctgcatctgaggtgatgaatgatatcaccgagagaagtaattttggttggcccaagcagcagtatgttaaagaacagcctgctccaacattcgctgaacgaatgcccaaggtgaaggattcggtggagttcacatcatcatatggtgcttattcgaagcaacaaagaagcaagggctttgtggcaccaaacatggctgaagtaccagatataatgtaccagcagggaaggcaaccaacaaggaaggctagagataccacttttgggaaggatatgagaaattccgttacttacccaactagaagggttgagccagatgaagatgagcatctaaataatcttctccaggtagtgctatctttatgagattntcttgtcacaacatgactgaggtgaacattgacttggaataattgctgcaggaagaggaagact

SEQ ID NO: 452879 - DNA, 620 bp, Sorghum bicolor
acgcgtccgcccacgcgtccgggtccaacctttctgttcttccaagaaaatgctggcaacatcgctcaccgtttggaatttgttcgactaatgatgcagcgactacagtgcaatgtttttatgctttcttatagagggtatggtgagagtgatggttatccttctcagaaagggatcacgtatgatgcacaggctgcacttgatcatctagctcagaggaaggacattgacacaaccaggatagttatctttggaagatctttaggaggtgctgttggagcagttcttgccaaaaacaatcctgacaaggtggccgctctaatactggaaaatacatttacatccatactggacatggctgggattatgcttccattcttaagatggttcataggtgggagctcttctaaaggtccaaaacttctgaactgtgttgttcgctctccatggaatacacttgatattgttggacaggtcaaacaacccattctcttcctttctggattgcaagatgaactagtcccccctccacacatgaagatgctatatgacaaaacctctgatcataacagaaattgcagatttgttgattttcctagtggtatgcatatggataccct

SEQ ID NO: 452880 - DNA, 613 bp, Sorghum bicolor
  unsure (1)..(613): unsure at all n locations
accccccggncgacccacgcgtccgccaaatcactgaagtaaacgaaatcttcaaagatcttgctgtgctagtccatgatcaaggagcaatgatagatgacattgactcccatatagagaatgctgttgtggcgacttcacaggctaaaggacagctttcaaaagctgctaaaactcagaagtcgaactcttcgctgatatgcttgttgctggttattttcggagtggtccttctcatagtgataatagtacttgcagcctaaaagcttggaaggcagctgaggttccaaaatctgatcgagcttattgtgacaaattccttcataagttatttttgctgtgcagccaggaatgaatcctggtatccgcctggaggtatccatgtggtgattggcgatctgcctgtggtatggtggtgtgtgtatgtggtgatgatgtatctggaatgcatgggtggtttacataaaagtattactctttcctgccagtgtaggggcctcttgtctcatatgcccgctttgtttatatattgtaatgtgtgagtgcgtgctgtagaacaaggttggattatctgtggtatgaagtttctcgattccatcagaaacgcttttct

SEQ ID NO: 452881 - DNA, 553 bp, Sorghum bicolor
  unsure (1)..(553): unsure at all n locations
cgtccgctcactgctgccgactcccctctcccctcccctagacacagacacagacacagccagccagccagccaaaccgctcaccgcacacgccgaattgaagcacccagccagccaccatgtacgccgacgccgggttcggcttcgccgccgcctactcccccgccctcgcttcctcgcagccccagccaccgccgcccttcgactacgccttctcctccgcgcccgtgccagcgctaaccatgcccgccatggaccacgacgccttcgccgccgcctccgcccacctggggagcttggtacagccatccatggtatcagaatatgacctcggaggagaaggggacctgttcaaagctccagaagccatcatcgaggaaccgctgctcagccctgatcctgtcgcagctgcgttttcaatgatgactggcaatgaaagtgccatggatcaaactatcaaggatgcaggcatcggcaccatcccaaatgaccctctnctgaggtgaagtgttatatgagtgcgagaaggaactcatggagaagtctgcaatcg

SEQ ID NO: 452882 - DNA, 570 bp, Sorghum bicolor
cgtccgcttttgtttggacggaatatcaccaggctctatgatctaaagggatcttcaaggtcaagatataacgcagattcaaatggtagcaacaaggttcttcttgaccagaacttaattgaagcaatgccaacttcaccgatttttgttgggaacaaggcaaaacggctactggaaagagctgtttggaatgatacttctttcctagctggaattgatgtgatggattattccttgcttgtgggagttgatgaggagaaacatgaactggtcttaggaattattgattttatgagacagtatacatgggacaagcaccttgaaacatgggtaaaatcttctggcattctaggtgggccgaagaactcatctccaactgtcatttcacctatgcaatataagaagcggttccggaaagccatgtctgcttattttattgtcattcctgaacaatggatgcctgcgataatcaatccaagcaaatcatcatcaaacatttgccaagaagattctcaaaatgggtctcaagagtgataggatgtttgaccgataagtccagtttttgtcatg

SEQ ID NO: 452883 - DNA, 438 bp, Sorghum bicolor
cgtccgatgcccaggcggccgtagccaggtgcactacagcagccagcatcttcctcctccgagcagagcaacagaggaaacaagaatggccatgcccaccttccaccttgctcctgacctgccgcccgtttcccgcctctgcttcgggacgatgacgatgggagagcagagcggggcggcatgctcgctgcgcctcctcgacgccgcctacgatgccggcgtcaacttcttcgactccgctgagatgtacccggtcccacagcgcagtgagacgcgcgggcgtagcgaggagctcctcggccgctggttgcgggcccgccgggccccacgagacagcgtcgtcgtcgcaaccaaggttgcccggccttctgggcagatgacatggattcgcggcgggccgacgtctctagattcgcggaacatcgcagaggcaatcga

SEQ ID NO: 452884 - DNA, 537 bp, Sorghum bicolor
cgtccgcccacgcgtccgcagatagaacaggggacacacagagtgttctcctagcacgcagcagatcgggtgcgtggcgcagtcgcaatggcaatggcaatggccacggccaagctcgtcctcctgatggtcctcgtggccggcagctcctgcggcggcagcgcctggcgggggccactgagcctcctccggacgctgccgacgacgacggcggcgcagtccgtcgaggccgccgcggagcgcctgaaggaagacctgtcgtcggcggcgtcgtcggcgtcggcggcgtcgtcgctgatccacgcgctgcggcccctgatgggttccgcgggggacctgggcctgcgcgccggcgtgccgtgcgacagctggcgcctggccgtggaggcgtacaacaagcgcgactggacgacggtgccgggcagctgcgagggctacgtcggccactacatgctcggcgggcactaccgccgggactcccgcgtcgtcgtcgacgaggccatcgcgtacgccgaggggctcaagctcgccggcaac

SEQ ID NO: 452885 - DNA, 511 bp, Sorghum bicolor
  unsure (1)..(511): unsure at all n locations
cgtccgcccacgcgtccgctcgagggctcctctcccattccgatcgccaattcgccatccacaccgcctgcgactgcgaggctgcgacccttcttccccctctgcaccactgtcacggcgtcacgcgcgtgcgctctccttctcccacgagttcgtcagcctgctaagtgttaagatggcttcaagcactagtcagacagaagctccagccccatctgtccccaaaaatcctgcaatggcatcatgccggaagaagaaaacagatgatgctaccttccttgaagatctgaaagaccacatcgatgagttcattcatgcctccatggatgagcacaagacctgctttacgaagacgatccaaaagatgtttgggatgtcaaaggctgttgcagagagatctgcggcagaagcaaaggaagctgaagttgaaagtgctttgccacttcagacnagcgtctctcagtagaatttcatgttggtagtttcttgctcgatgccaaacttttatacc

SEQ ID NO: 452886 - DNA, 621 bp, Sorghum bicolor
  unsure (1)..(621): unsure at all n locations
cgtccgatccagcctcgccgcctcaccccagcattcccttccacctccacctcgccggaatcccgaatccacctcaacctcccatgggttcgcaggccatcgaggcgcaccgcgcgggcgcggaggtgtacaccggcgcggcgctatgcgccgagaagtcgacggagctactgtcagaggtgcacctcccgctaggcctgctgccgctggcggacatggaggaggtgggctacaaccgcgccacgggcttcgtgtggctgcgccagaagaaggcgctcacgcacacgttccgccagatcggccgccaggtgtcgtacgccgccgaggtcaccgccttcgtcgaggaccggaggatgaagcgcatgaccggggtcaagaccaaggagctcctcatctgggtcaccctctccgacatgttcctcgacaaggacgaccagtccaagatcaccttcaagacgcccactggactcggtaggaccttccccgtctccgccttcgccaaggaaggtgacgccgcggccaagcccaaggacgcctccgccgccgccaacggtaacaaggnagccgtcgccgccggtaaggctgctgccagcaagtgaggtggcggcggcgtccgaactc

SEQ ID NO: 452887 - DNA, 684 bp, Sorghum bicolor
cgtcgcggggaactttatctggccaaaggcaaggacagcctgtatttatttgtaaactcgaaggttataggagtggaacagcatctgggacacgggcagcggactggccagaaactatgcacattgttcgcctcatagcccaggagcatatgaacaacaaacaatatgttggcaaggccgactttcttgtttttcggactttaaatcagcacgggtttcttggacaactacaagagaagaagctgtgtgctgtgatacagttaccatcgcaaactctgctgctgtcaatgtctgacaaagcaggttcgtttgattggcatgctcttccctggggacatgggggtgttcaaaccgcaggtcccaactcagcagacaccaatgcagcagcagcagctacaacaacagcaacttcaacaacaacagttacagcagcagcagctgcaacaacaacacatgcatatgcagcagcaaggcctcccacttcagcagtcgcagatgcaacttcagcaacagcagcagccacagatgcaaccgatgcagcagcagccaacacagatgcaacaccagcagcagcaaccttcgcagatgcagccgatgcagcatcagcagccgcagccacagcagatgcaatcgatgcagcaccagcagcagatgcagcaccagcagcagcagcagcagcagatg

SEQ ID NO: 452888 - DNA, 650 bp, Sorghum bicolor
cgtccgcccacgcgtccgcccacgcgtccgggcctcagagacttgcctggcatacatatcccacagaggccggagctgatcctgatcgcgcacgctcagcacctgcttgagggcatggctgcaaggagggctgcttcctccgtcctctctcgcttcctcctcacaaggccttcgccttcgccttcgccttcgcctgcttctgctgcttctcccgccggcaaatccgccctcctaggagcagggggccctcttcacaggttcagcactgcaccggcagccgctgctgccaccgcagaggagccaatccagcccgccgtggaggtgaagcacacccagctcctcatcaatggcaacttcgttgacgccgcttctgggaagacgttcccgacgctggacccccgcaccggccaggtcatcgcccgcgtcgccgagggcgacagcgaggacatcgaccgcgccgtcgccgccgcccgcagggccttcgacgagggcccgtggccgaggatgaccgtctacgagcggtgccgggtgctgctgcgcttcgcggacctgatcgagcggcacgcggaggagatcgcggcgctggagacgtgggacaacgtgaagacgctggcgcaggcggcgggcgccgagaggcccatggtggcgcg

SEQ ID NO: 452889 - DNA, 442 bp, Sorghum bicolor
cgaccacgcgtccgcggacgcgtgggtcgagtcctcccctggccgggtgtccctctctagtttctacccccaacattggcctgacgcagctgccatgtagcccgtgcagcgttcccactctcggcttcaccggagacggcgaatacttcgcggcaacaccggcgacggcgagtactacaacgggcgctgactgtggtgctggtgccctgttgatagggcagggcagctggcgttcggccatgtagggcaactatacatctttggcagagcttcatcttccgtgggaagatcgtaatggagtgcgtggatatccagaccatctctttgatgagtcatagtagagatgcactatcatgtatccattatcttcattacaacagcacctttgagaattattagtgaagtgtaaaagaaaaaaaactaacctaaaaaactatctagg

SEQ ID NO: 452890 - DNA, 575 bp, Sorghum bicolor
cgaattcccggtcgaccacgcgtccgccactttcccccatccttctccgccgtcgccgtcgcggtcgcgtcccggtccgaagagcctccaactccgatggccaaccgctgggtccgacccgaggtgtacccgctgttcgcggcgatgggcgtggccgtcggcatctgcgggtttcagctcttccggaacatcaccggcaacccggaagtcagggtaaacaaggcagggagggcagctggtgtgcttgagaaccatgaggaggggaggcgttacgccatgcatggcctaagaagctttgtgcatgaaaagacccctgagatcatgcctgctattaacaagttcttcactgaccccaagtgaagcatgttgatggttctactgctacttgccattggggattgtacccttttctggcagttcgatgtgttgtgccgtccataaattggaagacatctcttactcttattaaaagtaccgtatgagtgctttggtatgggcttgctttatgtatgatggtgaatgagtttggtcgtccctctttgatgttcatactccagtcatctgtcatgtggatt

SEQ ID NO: 452891 - DNA, 555 bp, Sorghum bicolor
cgtccgtccaaagcaggcactgtcagcagcgacgaggcagcggacgacagccgcgaccgcgagcggagcaggggaggggaagggaatggaggaggagcaggggaggttgacgacgatgacgccgggggtcctcaggttgttcggcgtggacgtccgctggggcgacggaggggaaccggaggagttgccgatggacctgaaaaagagctccagcatgcccaacctcaccatccaccagccgctgctgccgccgggggaggccggagacggcaaggggtacgcctccgacgacgcggagctggcgtccggccagcagaagcgccgccgccgcaaggcacaggagaggaagaaaggaattccatggacggaggaggagcacaagaaattcctggaaggcctaaggaatctgggcaagggggactggaggggcatctccaagggcttcgtcaccaccatgaacggctacgcaggtggccagccatgcccagaagtacttcctccggcagaccaaccccggcaagaagaagcgccgggcgagcctcttcgacgtcggca

SEQ ID NO: 452892 - DNA, 861 bp, Sorghum bicolor
acgcacgaccgacgcgtgcggcactaagggaggcattatgtggaaaagatgttcctgccaaggtgtatgttggaatgcggtattggcatcccttcactgaagaagccatagaacaaataaaacgggatggtatcacgaaacttgttgtgttgcctctataccctcagttctccatatcaactagtggttcaagtctccgtttattggagagcatattcagagaggatgaatatctcgtgaatatgcaacatacagttataccttcctggtatcaacgtgaaggatatatcaagtctatggcaactttgattgagaacgaactgacaaaatttccagtaccccaaaaggttatgatatttttcagtgctcacggagttcctctggcatatgttgaagaagctggtgatccatataaagcagaaatggaagagtgtgtcgatcttatcatggaagaactggaaaaaagaggaataacaaatccgtgcacacttgcttatcagagtcgagttggaccagtggaatggctgaaaccgtacactgatgagacaattattgagcttgggcagaaaggggtaaagagcctgcttgctgttcccattagttttgtcagcgaacacattgaaactttggaagaaatcgatgtggagtacaaagagttggctttagaatctggcatcaagcactggggacgagttccagcattaggttgcgaacccacattcatttcggatcttgctgatgctgttattgaaagcctaccttatgttggcgcaatggcagtttccaatcttgaggctcggcagtctctcgtacccctcgggagcgtggaggagctgctagcagcatacgactcgaagcgcg

SEQ ID NO: 452893 - DNA, 807 bp, Sorghum bicolor
cgtccgcggacgcgtgggctgggagaaacttctacattcaagccatatttgcataggtatatgactccatatttggcatcagagagcagttctcctatgtggtatgctgtcaggcgtgcatctgctcatatcatcgtgttgtctagctactctccatttgtaaaatacactcctcaatggtggtggctgaagaacgaattcaagcgtgtggacagggaaaagacaccttggcttatcgttctcatgcattctcccatgtacaacagcaatgaggcacattatatggagggcgagagtatgagggctgcttttgagaaatggtttgtgaagtacaaggtcgacttggtatttgcagggcatgttcatgcttatgagagatcataccgcatttctaatgtcaactacaacataacatcgggaaatcgatatccagtgccaaacaaatctgctcccgtttacataacagttggtgatggaggcaaccaggaaggacttgcttcaaggttttatgacccccagccagactactcagcgttcagggaggccagttatggtcattcacttttacaactgaaaaacaggactcatgctgtctatcagtggaacagaaatcatgatgggaatcctgttccagcagacaccgtggtgtttcataaccagtattggacaagcagcacgcgccgcagaaggctgaagaagaaccatttccatctcgagaaccttgaagatctgatttccctattctaagaaagccagtctcgcagaatgtcacgcagcttgaactttgtggaaaaaacgcagcataac

SEQ ID NO: 452894 - DNA, 1109 bp, Sorghum bicolor
gcgcgctagacaagcacctcgagaaggcggtcgcgtcgccgtccacgtcgagggggtcggcgggcggcggcggcgggcgcgaccaccaccgcctcgttgtgccgtcctccgtctcgaccatcctcaagggccactgctccgaaggggagtctgattctgatagtgaagcatcagatgttagcggctctgacggagaagacacctcatggatttcatggtactgcaaccttagggggaatgagttcttctgtgaagtcgacgatgattatattcaagacgacttcaacctttgtggcctcagcagccaagttccttattatgattatgctctcgatctcattttagatatcgagtcatctcatggtgatatgttcaccgaggaacagaatgagcttgtagaatcagctgcagagatgctttatgggctgatccatgcacgatacattcttaccagtaaaggactggctgcaatgctggagaagtataagaactatgactttgggcggtgcccacgtgtttactgctgcggtcaaccatgcctgccagttggacaatcagatatccatcgatctagtaccgtgaagatatactgccccaagtgtgaagacatctactacccacggtccaagtaccaaggcaacatcgacggcgcatactttgggacaacgttccctcatctgttcctgatgacatacgagcacctcaagccacagaagccctcgcagcgctatgttcctcgtgtctttggcttcaagctccacaagccatgagcctcatgtatttggcttttaagcaccacaaccacaagacgtggcacactgggggggaaagactggagttttgcaaggtcaaggtccttgaagactacatataagagtgccattggcagatcagcagattggtgaaattctatcatgctgcagcgcgcatgtaacttagctggctggcaagcgtatccagcatttgaatgtagctctaaggatatcaatgttgttgtaacctaactgcaattgttctttgattagtaaagcaggaccccctacaatgtagaatatgggcattatttatggctttgcagaaaattgttatgctgtcctcgcaaccctttt

SEQ ID NO: 452895 - DNA, 913 bp, Sorghum bicolor
cgtccggagagctggaccgcgcgcctgtctgcactcgtcttcttcctagcagagaaaaagcagaagacatacaaagatgtccaagatggcggagcagaaggcggcggccgtagacggactcggaggagccggggcggcggacgctgcgccggcgggggaggccgcggcggcgcgtgtgcggcccgttgagacgctcctgcgcgcggcgccgctggggctgtgcgtggccgccatgaccgtcatgctccgtgaccagcagagcaacgagtacggcaccgtcgcctactccgaccttgggggctttaagtacctcgtctacgccaacggcctctgcgccgcctactcgctggtgtccgcgttctacacggccgtgccgaggcccgccaccgtatcgcgctcctgggtcgtcttcctcctcgaccaggtgttcacgtacctgatcctggcggccggtgccgcggcggcggagctgctgtacctcgcctacaacggcgacaaggaggtgacgtggagcgaggcgtgcggcgttttcggcagcttctgccgtcaggcgcgcacatccgtagccatcaccttcggcaccgtgctctgtttcatcctcctctccctcatctcctcgtaccgcctcttcagcgcctacgaggcgcccccgtcgtcggcgctcggcagcaagggcgtcgagattgccgcatacccacgctgaagccgcgcgccggccttccatcgggggctctggagggagacgtggttgcagatctctattatatgtgtaggcgatcaagtaataagggcttatatttatatatataatacttcgttcatatagtagttgtttgctgctacatatgattagtacagtgctgctgctgctgctgctgctaaattgtgcttgactcggtaattatatggtttg

SEQ ID NO: 452896 - DNA, 756 bp, Sorghum bicolor
cgtccgctcaaacatcggagaggttgcatcaatattcctgacatcggctttaggtattccagaaggtctcatcccagtgcaacttctatgggtcaatcttgttacagatggccctccagcgacagctttggggttcaacccacctgataaagacatcatgaagaaacctcctcgaagaagtgatgactctttgatcactccttggatcctgtttcgctatatggttattggcctttatgttggggttgcaacagtgggaatcttcatcatctggtacacgcatggcagtttcctgggaattgacctggctagtgatggtcatacacttgtgtcgtactcccagctctcaaactggggccagtgctcctcatgggagggcttcaaggtgtcgccattcactgcaggagcgaggacattcaaatttgatgcaaatccatgcgattacttccagggtggcaagattaaagcaacgacactctctttgtctgtcttggtgtccattgagatgttcaactcactgaatgccctgtcagaggatggcagccttctgagcatgccgccatgggttaatccgtggcttcttctggccatgtctgtttcttttgggctgcatttcttgatcctctatgtgcctttcctcgctcaagtgtttgggattgtgcccctcagtttgaacgaatggctcttggtgatagcagtggccttcccagtggtgctgatcgatgaggttctcaaatttgtggggcggtgcctgac

SEQ ID NO: 452897 - DNA, 499 bp, Sorghum bicolor
cgtccgcccacgcgtccgcggacgcgtggggaaaggcattccacagatcacaaatactgtgattcaagatttgattgaattgattagaacagagaagcaaagtgataactctgtagctgatccatctacagaggcattcttttctagcactttgcggtacattgaatttcagaagcagaaaggtggaagcataggcgaaaaatatgaacaaataaagacaagttcatgagtcagaacaggcatggcataatgactgggttcgattttgttaagagaattgggtcgtttgtttggcatggttcagtgaaatagaaaccatcagttttagctgcctccaactaaaagatgtttatatgagctgttattctcaaatctcacggtctgagcgggtctgctcgcccatcggcaatactttcagatttagtcaggtggcaataagctgtcctttggggagcacaggtctgtacaggattacttgtgttcgtgatcagttctactg

SEQ ID NO: 452898 - DNA, 801 bp, Sorghum bicolor
cgtccgagaagattgtggtgtccaccaagagtccaaaatcagataaacagtatgtgtgggaagctgtcgctgacagtagctcttatatcatcaaggaagagactgatcctgagaaaatgcttacacgtggaactcagattactctgtttctaaggtctgatgataagtacgagtttgcggacccttcaaggattcaaggcttagtaaaaaactactctcagtttgtgtctttccccatatacacatggcaggagaaatcaagaactgttgaggttgaagaggatgaagagccgaaagaaggtgaagaggcaacagagggtgagaaaaagaaaaagaagaagactgttactgagaaatattgggactgggaactagccaatgaaacaaaacccatatggatgagaaatccaaaggaaattgagaacaccgaatacaatgagttctataagaagacattcaatgagtttttggacccccttgcccacactcacttcacaacagagggtgaggtggaattcaggagtgttctttatgttccaggcatggcaccgcttagtaatgaggagataatgaatcccaagaccaaaaatatccggctatatgttaaaagagtcttcatctctgatgactttgatggtgaactgtttccaagatacttgagctttgttaaaggtgtggtggattcaaatgaccttcccctcaatgtttctcgggagattcttcaagaaagtcgaattgtaagaattatgcgcaagcgacttgtcaggaagacatttgatatgattgaagagattgccgaaa

SEQ ID NO: 452899 - DNA, 704 bp, Sorghum bicolor
cgtccggccgtgtagggaccgtagagttagcaactgcaaaggagggagaggggatggccgggatcgggccgatcaggcaggactgggagccggtggtggtgcggaagaaggcacccaccgcagccgccaagaaggatgagaaggccgtcaacgccgcgcgccgcgccggcgccgagatcgagaccatgaagaagtacaacgctggcacgaacaaggcggcgtccagcggcacatccctcaacaccaagcgcctcgacgacgacactgaaaacctcgcccatgagcgagttccaagtgacctgaagaaaaatctcatgcaagcaaggctcgataagaagatgacccaggcacagcttgctcagatgatcaatgagaagccacaggtgatccaggagtatgagtcgggcaaggcaatccccaaccagcagatcattggcaagctcgagagggccctgggaacgaagctgcgtggcaagaaatagctttcgtactagtcatgtgtcccggagcagcatagggaagacaaggcaaactgtctgcttattatcatctatgtttggtatctcaagtcatgcggactgtttctgtcggtacaagagtgaataactgtgttttcagacctgtaatgcttgctgcttgtcatatgagtatatgccctagctttaaaaaaatttgtgatgaagctgtcaactgatatgtgataa

SEQ ID NO: 452900 - DNA, 614 bp, Sorghum bicolor
cgtccggcccaatgctggagtcagtcctctacttctgcagacggatgaccaatgaggcccttattaccattgcaaagaaccggcccaactttacttgcttccgcctatgcatcattgagcctcacactccagactacactacacaccagcctcttgatgcaggttttagtgccattgtggaatcatgcaagggccttaggcggctttctgtttcaggccttctcacagatagtgtatttaaatccatcggggctcatgctgatcgtcttgagatgctctcgattgcctttgctgggaacagtgatttgggcctgcattacatcctatcgggctgcaagagcttgaagaagctagagatcagggactgcccatttggtgataagcccttgctggcaaatgctgccaagctggagacaatgcgatccctttggatgttcgacgtgctcactgaccctgggcgcatgccgacagcttgcacgcaagatgccccgccttaagtgtggaggtcatgaatgatcctcgacggggatgccccttggactctctcacagatgagagccctgtcgagacattgtatgtctaccggacaattgcaggtccaaggtctgacacac

SEQ ID NO: 452901 - DNA, 586 bp, Sorghum bicolor
cgtccgcccaaatccaacagctgcgcttccaaagccagcagccggcgggcccctctacaaaagcaggcggattgcgcgtgcgcgacgggcagcagcacctgcctctgcctgagccagtacgcctcggtgagcagacaagcgatggcggccacggtggagggggtgcggcaccggacggtggaggcgaacggagtgcgcctgcacgtggcggaggctgggcccgaggaggccggcgcccccgtggtgctgctcgttcacggcttcccggacctctggtacggctggcgccaccagatggccgccctggcggcgcgcggctaccgcgccgtggccccggacctccgcggctacggcgactccgactccccgcccgacgcgtccagctacaccaccttccatgtcgtcggggacctcgtcgcgctcatctccgacctcggccagccccgggtgttcgtggtggggcacgactggggcgccatcgtggcgtggcagctgtgtctgctccggccggacctggtgcgggcgctcgtgaacctcagcgtcgtgtaccacccgcggcggccggagatgagcccgctccagacca

SEQ ID NO: 452902 - DNA, 884 bp, Sorghum bicolor
ccgtggccacttttaggagtaccaatgatattgccaacgcatatggcattgctgaagttggcgtcatgatggttagcactgcactggtgactttggttatgcttcttatatggcaaaccaacttgttccttgtgttatgcttccctattatttttggtgcagtagagtttgtttacttaactgccgttctgtcaaagatacaagaaggagggtggttaccgttggctttctcatcactgtttctctgtataatgtacacatggaactatggaagtgtgctgaagtaccagagtgagatgcgtggcaagatatccctggacttcattcttgatctgggagccacacttggcactgtaagagtcccaggcattggacttgtgtacaatgagctggtccagggaatcccatcgatttttggccaactattagtcacacttccagcgatgcactctacgattgtctttgtttgcataaagtatgttcctgtcccgtatgtcgctctagaagaaaggttcttgttccgaagggttggccagaaggactaccacatgttccgctgtgttgcacgctatggttataaggatattaggaaagaagatcatggcttctttgagcaacctttggccgacagccttgaaaagtttcttaggagggaagcccaggaaattgcgctcgaggcaagcacaatggaggcagagcgtgatgacatatctgttgtatctgaggtgcctcagtctcctgcttgtgatggggatctgcaaactccactgctttctgatcagaatcaggtgataacaacagaatggtcaccacagatggtagcgatcctgtgcttccctcagttccatgtctgcagaaaaagaacctggtttagagtatgagct

SEQ ID NO: 452903 - DNA, 1094 bp, Sorghum bicolor
cgtccgagttcgtcgagctcttcgtcggtgtcggtgcctccagggtgcgcgacctcttcgagaaggccaaggccaaggcgccctgcattgtcttcattgatgagattgatgccgtcgggaggcagcgtggtgccggacttggtgggggtaatgacgagagggggcagaccattaatcagctcttgacggagatggatggcttcgctggcaacagcggtgtcattgtgcttgccgccaccaataggcctgatgtgctggactcggcactcctccggccagggaggttcgataggcaggtcaccgttgacaggccagatgttgcagggcgcgtcaagattcttgaggttcactcccgaggaaaggctttggcaaaagatgtcgactttgagaaaattgctagaaggactcctggtttcactggtgctgacctccaaaacctcatgaatgaggctgccatccttgctgctcgccgtgatcttaaggaaattagcaaggatgagatctctgatgctcttgagagaatcattgctggccccgagaagaaaaatgctgttgtttctgaggagaagaagaggcttgtcgcttaccatgaggctggtcatgcccttgttggcgccctcatgccagagtatgatccagtagccaagatttccatcattcctcgtggacaggctggtggactcacattctttgccccaagcgaagaaaggctagaatctggattgtacagcaggagctatcttgagaaccaaatggctgtagcccttggtggcagggttgctgaagaggtgatctttggccaagaaaatgtgacaacaggagcttccaacgattttatgcaagtgtcacgtgtcgcaagacaaatggtcgaaagatttggattcagtaagaagatcggccaagttgcgattgggggacctggtggaaaccctttcttggggcaacagatgtcgagccagaaggactactcgatggcaactgctgatgttgtggatgctgaggtgagggaactcgtggagaaggcctactctagaacaacgcgcttcgtgaccactctcattgacattcatcacggctcgcttaactcctgatcc

SEQ ID NO: 452904 - DNA, 400 bp, Sorghum bicolor
cgtccgcccacgcgtccgactggcagaggcagatggtatcattctgtcaagaggaaacctaggaattgaccttccacctgagaaggtcttgctgttgcagaagtctgcgcttcacaagtgcaacatggctggaaagcctgctgttgttactcgtgtcgtggacagcatgactgacaacctcaggcctactcgtgcggaggcaactgatgtggcaaatgcagctctcgatgggagtgatgccattctccttggtgctgagactctccgtggtttatatccagtggagactatttcaacagggggcagaatttgtgctgaggctgagaagggtttcaaccaagatttatactacaagcgaactgggaagtatgtgggagaacctatgacccacttggagtct

SEQ ID NO: 452905 - DNA, 508 bp, Sorghum bicolor
  unsure (1)..(508): unsure at all n locations
cgtgcggcgttcttggggagaggaagggactagggcgcgggcaagaatcagcatagcatggatccgagcgcgggcagtttcgactccggcggcgcgcggcggggcggcggcggcggcggcgcgcagatgctgctcttcggcggcggaggcagcgccaacagcaacggcttcttccgaggtgttccgatggcggtcctgggcatggacgacgcgacgcgcgtgggcaagcggcctttcttcaccacgcacgaggagctcctggaggaggagtactacgacgagcaggcgcccgagaagaagcgccgtctgacggcggagcaggtgcagctgctggagcggagcttcgaggaagagaacaagctggagccggagcgcaagacccagctggctcgccgcctcgggatggcgcctcgccaggtggccgtctggttccagaaccgccgcgcgcgctggaagactaagcagctcgagaccgactatgaccgcctcaaggctgnctacgacgcgc

SEQ ID NO: 452906 - DNA, 799 bp, Sorghum bicolor
cgtccgaaggttttgatcctgctaatgccaacatcgcaaacatgctgctttggccaggcccaaagggtgcagtcaatcaaagagatgctgatcttctcttcatgtggaagaggtatgagcagttaaatggggagtctgtagagaagctgagggctctcatagagattaaagaaactgttcaacataggaagcatcttgacagcagtatcgatttcattgggaggcttctcttcggatttgagaaagggccttcaatgcttgaggctgttagagcctcgggtctaccattagtcgatgattgggattgcttgaagaggatggtgcgcattttcgaatcccagtgtggttcactcactcagtatggcatgaagtacatgcgagcgtttgcaaacatttgcaacagcggtatatctgagatgaaaatgagggagtccagcatcagcgcttgcagcagctacaactccgcgaggtggagcccgatggctcagggacacagcgcttgatgctaagatcaatagcagaacccccgaggtctgctgccccctccccctgtgtgcgagctcgtatcatctggggaccgtgtgcacccatgattacttgtatatatcatcatgtacttatgttcgtagtacctatgtaaagtaatgccaagtctgatcttcatccaactaccgaaatgattaagatcagatgtgaatggtgttgcgatggatgatcgcaaggtaggccatttatcagtggaccaaaaatgatgacccaaatcaaggtagtgctcctctgatagcccatatctattgct

SEQ ID NO: 452907 - DNA, 529 bp, Sorghum bicolor
cgtccgcccacgcgtccgaagaaaaggaccttttcgatgcacttgctaagctttctgaagtatcatatgatgttgtttatttcggtgctgaccataaccatcggtcggtcaacctcaatgagcacgacaatggcaagggcgatgaggcagtgctgttaaagcttgtgagttcaagtgacgagatgtcatctgagattaacaaggtaaagatccagggcgttgcttccgtccccctcagctgtgaccctcaccggtggcactgccagcttatctccgctcctcctagcgccgccactgctcgtggctgcgtcttccgcctctggcccactgatggccgtggggttgaccttcgtgccctcggctctgtgcaagaagcggtccttaattgaccaagctcacggcggagaggagaggatgctggagttcgctcgacactttaggtggcgcatccacaaggccagtgcggaagctattgacgccttttgcgcccattattgtgtcctccgaactggatgagcaaaaacatgca

SEQ ID NO: 452908 - DNA, 399 bp, Sorghum bicolor
ccgcccgcggacgcctagtgtcaccaagaagctggcggcgctccacgcgaacatgcttaatgtggacgcgcagcccttctactctctgcgagtgccgccgcttgcagcgaagcctcataacacgctgcctcagcagcagccgcagcagaaaccacataacacgctgtctcagcagcagcagcagcagaagccagctcctgcccatgatcccttgggcaacctgaagaggacacggtccggcaattgcatggacaaggcacgagcagtggtggacaaggagcaagagcagagcatcgactagaacagcggcaggaggaagtcgctctctgctgaggacagatggccagagctgcccgaccacaacgcgttcgacgaggccatcggtgcggctgtcctggg

SEQ ID NO: 452909 - DNA, 780 bp, Sorghum bicolor
cggccggacctccagatcataccgaacacctgccacttcagtagaacacacttgatctcaggcacaggaagttgatatcagaaaatgcaggctgccgctactgccgttgggttctcggccgtgctgcctgtcaaggcccggccggcggcgaggagcacggcggtggcccgcgtccctgccacaaggaggagcgtccgtaccgccgctgccgccgtcgtcgtcgcggagcctgcggaggtcgactacagctcgagcttctcggtgttcccgatggaggcctgcgacctgctcggcggcgacgcgtgcatcgggaagatgttcccggaggccaagctcgccgcggcggcgccggaggcgagcaggagggtggacgcggtggagagggactacctgtcctacgacgggccaaaaacggtgttcccgggcgaggcgtgcgacgacctcggcggcgagttctgcgaggcgccgtacatggacggcgtctccagggacgcctgaagcctcaagacctgacctgatccatccatgtctgtctgtccagactccacaaacaaaattggcctcactgtcgagtagatggatgatctcatgatccgttcacaccatgtacggtattgtgtataaacttacgtagttacacgtagtagatcccgggggagctagcgtgcgtgtgcgtacgttggtactctacagaataacagcagccaggcaaggccaaagggtgtatatatggatggcatggatatatgtatgtatatgtatatatgtatgtcttggcct

SEQ ID NO: 452910 - DNA, 977 bp, Sorghum bicolor
  unsure (1)..(977): unsure at all n locations
cgtccgagctggtacaaaagagttcctgaaagattttcatcggcggaggcttcaggttcttgctgaagcaggccctgatttgattgcttttgaaacaatccccaataaactggaagctcaggcatatgttgaactccttgaggaatgtaacataaatatccctgcatggctttccttcaactcaaaagatggagtgcatattgtgagtggggactcagtaattgaatgcactactattgctgacaagtgtgcaaaggttggtgcagttgggataaattgtacacctncaagatttattcatggactgatactctccattcgaaaggtcacggacaagcctattctgatatatcccaacagtggtgaaagatatgatggtgaaaaaaaggagtgggtggaatccactggtgtatcagatggtgattttgtttcttatgtaaatgaatggtgcaaagatggggctgcgctcatcgggggctgctgcaggacaactccaaacactatcagggccatacaaagaactctaaaccaaggcttcaactagcagcacttacctgtagcatagagctgtgctctactcctgatgagctcctcctagcagtaccttgaactatatacctgagattccttaaccagtgaaccaatataatgttgcattttcgcttgcaaatgagatgtgctgcacctatgtttgtaagtaatggggtatttctgggttctaagatatccaacttggaggtacaaccggtgaagtgaggaagcagcaacaatgatagagttctactactgaggaaaaactacttgcggctgagttaatgaagcttagtaggtaccactattaagcgtttaaagagtttgtatgaccgttgctctggagatgttatcttcaataagtgcttatgttactgctagttccatatgtaagttatgtttgataaacctgcatctcctgaaacgaagatcttattacttatgtt

SEQ ID NO: 452911 - DNA, 390 bp, Sorghum bicolor
cgtccgggagcagattgaccacttcggccaacttcgtccagccaagattcacgttgcagtcttctctgctaccatgccccctgaggcccttgagatcacccgcaagttcatgaacaagcctgtcagaatccttgtgaagagagatgagctgactctcgcgggtatcaagcacttctatgtgaatgtggagaaggaagactggcagctggacacactgtgtgacctgtacgagaccctggccatcacccagagtagtcatcttcgtcaacacaccgccgcaaggtggactggctcactgacgagatgtggagcagggaccacactggctctgccactcacggtgacatggaccagaacactcgagacatcatcatgagggagttccgtctg

SEQ ID NO: 452912 - DNA, 468 bp, Sorghum bicolor
cgtccgccagatcctaacctcgcatacccttcagccagtcccggttgccattggaggccctggtcttcactccggagtgaaattccggaaggacattgaaacccctgggctcgccaacgtcgcggcgactgtgatgaacctccatggatttgtggcccctgctgactacgagcaaaccctgattgaagtggctgacaactaaagactggccagctatgcccaattttggttctatagtttgagaatggatatggccatgtcatttaataatttatgtttgcaagcacgttgctcaaactcagcaaaacattgagagatgccttttgacttgcatttagatgctctatttataccgatgacagttgtatgctgtgctggcttttggcagtttgatagctatctttatttagctatgtatactgtatctgaggccgcaaactttgtctcagtctaaaattgctcgaggtt

SEQ ID NO: 452913 - DNA, 747 bp, Sorghum bicolor
cgtccgcccacgcgtccggcacggatcgatccacgaggaggggcgagagctagcgagagagtatcggtgaaggcgaaggcgaaggcgatggggaaggggttcgcgtcgtacctggcgatgaagacggggcccgagggccggcggcccggcggcggcggcgcagcaggcgctgatcgacgccgacctgcgggagctcggcgtcgccgcgcggaagctcgccaaccatgccttcgttctcggcggcggcctgggtttcggcacttccttcctcaagtggctggccttctttgcggcagtgtatctcttgatattggaccgcacaaattggaagaccaacatgctgacagctctcctggttccttacattttcttcactctgcctaatgtgctgttttctctgatcagaggagaggtggggaaatggattgcgattattgctgttattctgcgtctattctttccacgccacttcccagattggttagagcttcctggttccatcatcctgctcacagtggtcgcccccagcctgttcgcagacaccttaaggggtgacatcgttggtgtcttgatatgccttgcgattggatgctacctgctccacgagcacatcaatgcatcatgtggattcaggaacgccttcacgaagggcaatggtgtatcaaactccagtggcatccttctactcttcatctaccctgtatgggcttttgtgctgcaagtcctgtatgcaccaccgcaccaatg

SEQ ID NO: 452914 - DNA, 677 bp, Sorghum bicolor
cgtccgccaagattgcccagttcgccgagaagaacccggacgtgctgctcctgcaagtgaactacgagacgcacaagtccatgtgctacagcctccacgtccatgtcctcccgttcttcaggttctacaggggagccgagggacgggtcagcagcttcagctgcaccaatgcaacgatcaagaagttcaaggacgccctcgccaagcacggggctgacaggtgcagcctcggccctgcacgggggctggacgtgtcggagctcatggccttggctgcgaacagagacctgcagttcacctaccacaagccgggcctcgtcccagcttgcggaagccattgccaaggaggctgctgcaccgggaggcccgtggcttcctctgcctgcgtccgcgactcaacaattgctgggtcatcatggatcggataactcattgctatcatctggaagatagaccgtagtactagttagtttcatcggaggtggttcgtccatctttgtatagatttgattctttcgtggtctgattctgaagtgacagacaaattgagatgcggatgcgcaggctgaagcttttggaaagtctgctgctctgctctgactattgcgtctgtatttgttgcatctagaccttttgctcacttgtttagatcgcaaaaattttcaagattccccgtc

SEQ ID NO: 452915 - DNA, 440 bp, Sorghum bicolor
gacctacgcgtccgaagcacaccagggctgctgcaacagcatagtacagcatgcgagcatgaatggagacaccggccaccactcctatcatcagcccactctgtactattgtacagcatccggtaaagacgtgtctctgcaccacagaaaggatatagtacatgcgcccaagcagatgtgatttttgcatccatcgatgccaaacaggattttgaatactagcacctaacggattgaaaatgatgagattgcagttctacgagaggaactgatgagttgtacaatagggataggcaattcagctattgtcggactgtgtacattattgtatcatcaccaaaaaatgctgtacacctgatcatgtaatatagggtatagttatttaactctgagtcagataagatatgatttgttcttcccaacaaaaacacccaacaaag

SEQ ID NO: 452916 - DNA, 778 bp, Sorghum bicolor
cgtccgccccaatcctccttccccgatccagtcccgcagcgacgccgaggcagagcgagaagagacagacacagatcgcgcgcggagatgtcgtcggactcctcgtcgtgggcgcgcgccctggttcagatctcgccctacaccttctccgccatcggcatcgccgtctccatcggcgtctccgtcctcggtgccgcatggggtatcttcattacggggagcagcctcatcggggccgccatcaaggcccccaggatcacatctaagaacctcatcagtgtcatcttctgtgaggctgttgcaatttatggtgtaatcgtggcaatcatcctccagacaaagcttgaaagtgtgccaacatctcaaatgtatgctccggagtctcttcgagctggctatgcaatctttgcatctggccttatcgtcggctttgctaatcttgtttgcggggtatgcgtggggataattggaagcagctgcgcactgtctgatgctcagaactcatcactctttgtaaagatcttggtgattgagatctttggcagtgctctgggactgttcggagtaattgtgggtatcattatgtcagctcaagcgacatggccagcaaaagcttgatttttcaacattagtagctctgtaaattactcggatggaatgtatcggaatgtgcatgtggtccaactgccttttcctgttctttttcttttgcatctttttggcagaacacgaaatctggcgcgcgtagcgttaccgattgtagagttgctattcctac

SEQ ID NO: 452917 - DNA, 534 bp, Sorghum bicolor
cgtccgcctcaagtcaatcgcccagatcttcggctgccctgtctttacagtccagagacctgattcggcttcgctgggggcggcgctgagagctgcccacgggtggctgtgcaacgcccaaggcagcttcgtccccatctcatgcctgtaccagggcaacctggagaaaacctctcttggctcgaagctggcggtgccggccggcgacaaggaggaggaccgggagctcctccagaagtacaccctcctgatgaggaagaggatggagatcgagagacgcctggtggagaagaatcgggcgatcataggaaaatcacgaatttagcactgctgaagctgccaggaccgaataatttgtgaataactggtgattatcatcctttatacgcaagctctcttaggtgagagtcagtattggttctgattttataagcctggctctgtggctcagctgagaaaaatttgtgctgggactctggacatcgttgtgagacacgcacaaaacctttgaaagagacagcacttcgcaagggt

SEQ ID NO: 452918 - DNA, 648 bp, Sorghum bicolor
cgtccgggcccttcacaagttgacatctggtccagaaaaagaaagcaagtttgttatattaggagaaaagggaaaagttcagctggttcgtgactcaaggaacagcattgaaatgactgtaactgaactacagaagaatcctatcaactatacacagattgctgtgctggccgatgacatattgaaaaatgtggaatatgatgctctgagggttattttcaacaagttccattctgttatatcatttaagcccacaatggtaacaatactgtcccctgaggttgcagaaaaagaatcagaagctggtgggaagatgggtgacctagattcttatgagattgaaggcggcgagacaaaatcagagatattgcagaatctagctgagttccagttttcttgtgttctgtacaatggtgccctagagaatgcatgcagtgagcttggagcccgtatgtctgccatggacagctccagcagaaatgctggcgatatgcttgatcgtctaactctcacttacaacaggacacgccaagcatccatcactacagagcttattgaaattatatctggtgcatcggcccttgaaagatagagactggacttttttcttttcccgtttgtgttccctttccatgaagctgctttttt

SEQ ID NO: 452919 - DNA, 678 bp, Sorghum bicolor
cgtccgcggacgcgtgggctagagacatcatcatgagggagttccggtctggttcctcgcgtgtgctcatcaccaccgacctgcttgctcgtggtattgatgttcagcaagtgtccctggtcatcaactatgatcttcccacccagccagagaactacctgcatcgcattggtcgtagtggtcgtttcggtaggaagggtgttgccatcaactttgtgacccgcgacgacgagcggatgctgtttgacatccagaagttctacaatgtggtgattgaggagctgcctgccaatgttgctgaccttctgtgatcattttgaagaaaaactgaacaaaaaaaagggaggcgaggggaactgataaggcttggttttgttgaaatatcgcgggggaggaagtgatatggtcggtggggtttctatgttaaagtcgtggtcatggacaatttgtggtttttctttatgccatgttttgggaatttttgtagctgcctaggccttgtggtatgtgctgctgtgggggttcattagtatcaagaggaagacgctgctggccctggagtgtttttctctttattagtactttgtttaaaactatgtatgaaccgaatgatggtattttattgtgtcatccttgactcttattctgctgcaaccagatgtatcggtccatgtgttt

SEQ ID NO: 452920 - DNA, 743 bp, Sorghum bicolor
cgtccggaacatcatgaggacgcacatgaccatgaggagtttgagttcagtgaagtttttgttcaccaactgattcacacgatcgaatttgttcttggtgcagtctccaacacagcttcataccttcgtctttgggctcttagtcttgcacactccgagttgtccactgtattctatgataaagtactactaacggcattggggcttaacaatatttttgcccttattatcggtggcattgtctttgtctttgccacggttggtgtcttgcttgttatggagaccctgagtgcattccttcacgcgctgaggcttcactgggtggagttccagaacaagttctatgaaggtgatggttacaagttcgccccattctccttcgcactgattcgtgaggaggaagattgagctcgccccaacatttgtatttattgtagccgatgtaaaatctatctttggtggcctttgttcccagaacagatcattttttcatctgttgtctccgatggatcataaacctcagtccctttgtttaagcatgggacgaacagcatcatttttccttccttagctatgcagaggatttttttggttagctggcaacaaataatggggtgatatcacccttgtatgatgctaataagtagttgccgattgggtagtatgttggatataaataagcactgtattgaaggctaaacattcccactacgttcattgtcaataaagagtgctatttacgc

SEQ ID NO: 452921 - DNA, 251 bp, Sorghum bicolor
gtcgttgcccattacctggggcttgctgtctcaggtgtcctgatgctgttgtggtgagaatcgacgtgctcctgaccatgtcaaagcacagggttcagcttaggaagcttcccccgtgtttaatttatatatgggtttttttctggattcattcttttggacatatggtaggcatttgtgttaggattgagctgttgagtgtttgcatcatatgcttctatgattactcgttgttgataaaaaaacaaaaa

SEQ ID NO: 452922 - DNA, 978 bp, Sorghum bicolor
cgtccgcccacgcgtccgaacacaatgagcttgtcgcttctccagggctactcctccgctgaggaggacgacgaccccgccgccggcaccgagctaagcgagtccggtgattcgtcagccgaggaagccggatcggacggagacgaggggtccgctcctcaaaagccggcccccaagccccgccgccgaccaaaccctaaggggggagatgccggaggcggcgacggggactcctcgctgccctccgcgctggaggccttcgccgatgtctcgggaccaccggactttctgaggcatagggttgccgagcccgaggaagggacggaggccctcggtgtactcgatcgccgtgggaaagaggggagcaagcacccgcctccaggtgctgttgtggtggcgaaaccgcagttagttgccatccgcgagcgagttaccacaactggagccaacccctcaggttcagtgacatctggttctgttgatggaaaaagaataataggtgctgcaaatcctgggccagaagatgcagctgatcttctgaggatgtgtctccaatgtggtgtaccaaagacctattcacatggtaagggtatggtttgccctcagtgtggtgatagacctgtgcagacaaaagagcccgaaaagaaaaagggttcccctgtcaaggacaaggagaagatcaagaggatgagggggcaatcgtcgcatgcatcctggaagagtgaaacggagatggctcttcggcagcaatttgactgataactagttagcatggccaatatttagactgagtgcttggtaaactgtacgctgggtaaacctttttaagcctgtgtagtgtaccatatgatgccccttgtgcctcacacgaagttccagagagcgagagtgtgtgttgtatgtgctgcatttttctgctaggaacgattttgtttgttaagctgtcagaattgaatctgagcatgttcgcttgagctt

SEQ ID NO: 452923 - DNA, 420 bp, Sorghum bicolor
cgtccgccacgcgtccgcccacgcgtccgggggtcgtggcccctcttcccaatccccttgcatttgcaaagcctcctcctttacatttgcaaagccagccggcctcctcgtcctggctcgcaagcaaagcaaagcaaagcaaacgaagcagaagcagggaagaagaagaaggcgagagccgagaggtgaggagctaggccagtggcgcctgcagcagcaatggcgacgacggacctggggttcgaggagacggagctccgtctgggcctgcccggcggcgggggagaggtggtcggcgaagggaggagctctgtcgtctcctccgggaagaggggcttcgcagagaccatcgacctcaagctgaagctggagccggcgactcccgcggccgtaattgaaggcggcggaggcggacgagca

SEQ ID NO: 452924 - DNA, 622 bp, Sorghum bicolor
cgtccggggttggcttctcctccccctcacggttcggttcggttcgggtagcctattagcgaaggtggtggggagccacctcatgggaaactgggctgggccattgatgaggattttggttcgtttgaagcacttgtaaagaagatgaatgcagaaggcgctgctttacagggatctggatgggtgtggttagctttggataaagaggcaaaaaagctttcagttgaaactacagctaatcaggatcctctggtgactaaagatgcaagcttggttccgctgttggggattgatgtctgggagcatgcatactacctgcagtacaagaatgttaggccggattacctgaacaacatctggaaggtgatgaactggaaatatgctggagaggtgtacgaaaatgttcttgcttgaattgtcttaatggacaatactcatctgtgctggttttcggctggttgatcatgtgaaataaagatggacctgtcgagctgctggacctgtgtacatttcgtgaggagactaagcacaatggccgtgatttgctgtctgctgcggcacttgtcttgtcaggctgacaccttcagcaggtgcagaagattcatatagtgtacccagtgtg

SEQ ID NO: 452925 - DNA, 528 bp, Sorghum bicolor
  unsure (1)..(528): unsure at all n locations
cgtccgcagcagcggaggaggtcgaggagatgctgtccggcgacatccccccgaaccagaccatctacctcaacaacctcaacgagaaggtcaagaaagaagagttgaagagatcgttgtatgccctgtgctcacagtatggaaggatactggatgtggtggccctgaaaactcaaaaactgagggggcaagcatgggtggtgtttagcgaaattacagctgctaccaatgctttccgtggactgcaagactttgatttctacggcaaaaaaatgcgagtacaatatgcaaaaacaaaatcagattgtattgcaaaagaagatggtacttatgctcctaaggagaaaaggaagaagcaagaggagaaagctgctgagaaaaaacgaccagcagaagaggcacaacaggctggcccccatgctttttgttgacaaaaaaatggaactggtattatnnngtnttnntttgggagggtttccaaaaaccacttttctttcnattaaannnnnnnnnnnnnnnnnnnnnnnn

SEQ ID NO: 452926 - DNA, 529 bp, Sorghum bicolor
cgtccgcggacgcgtgggtgaaactgcaaagtttagggttttgtttgcctcacccacgccgtcggctcctccccctccccacctccacctctccccgcgaaggatcggcggcggcggcgagcgccttcccttgtcgaagtccacccggcggcagagcagagcctcgttgctgaggagggggagagggcgggcatgggagatatgccgatgaggccggcgcgtccgggcccgccgatgcagcaccgcgggccgccgccgatggcgcgcctccgccccgaaccaatcgaccgtgagaagacctgtcctctgctgctcagggttttcacaagggttgctggtcaccatcaaaatgaagagtttgctgtgagagggaaggaaccaaaggatgaagttcagatttacacatggaaggatgccactctccgcgagctcactgatcttgtgaaagaggttgctcttccagcaaggaaaaggaatgcgaggctttcttttgcatttgtatacccagacaaagaatggtccgtttgtg

SEQ ID NO: 452927 - DNA, 477 bp, Sorghum bicolor
ttttgatacaaaaattgcctgcgaatgagaagctgggcaacaatggcagatagcaggacagcatacattatatagcctgatgctggagcaggagggctggaaactaccataccaccagaagaagtgatacaaaatgattatgagctccggtgtgaatagctgcactacaaagttggtccctgcttgttccgccgcctagtttatttttcctctgaatttcaatatatgcgcattctttgccggtgttggcaagtcaaagtctatagtgtggagaatggcttgtgctttgtgtggccactggccatcggtgagctgatgagtttgtgagaatagaggtttccagtgatagtgtgataacagacgtgattacgctgtacgagtttttgagttttaatgtttagtcagtgcttgggttcatggtgaaaagacatgctaagaggcttgtttcaactgttgaacctgcattgcgaatttgcg

SEQ ID NO: 452928 - DNA, 484 bp, Sorghum bicolor
cgtccggaatcatgggacatataatgattgtcaggcaggtgattttggtactatgatagttcatactgaagatggcgacgaagtggcagaatcacccattttcccaagaacagagttcatacctggccttggtagcatcaattctttcacacatgatccaaagagagcggaacttatttcaagtttttgggcggagaacacaggtgatagtgatgccaataaagatcgggatttagatgatcgtcctgacatacgggaatcaaaagcaatcccacctttaactggaacagtgaagaagcatattggtgcagaagggactataagacgccatgataatcaagttaatttgtcaccaggacttgcgaacacaactaaattgaacagcagcccgagccgcaaagcgttttcggttcaggataagctctggtcaatttatgctggcggcaacactgtaccaataccatttcttaaggcaatcgacatt

SEQ ID NO: 452929 - DNA, 470 bp, Sorghum bicolor
  unsure (1)..(470): unsure at all n locations
cgtccgcatcagagagatctgcccacccccctcgccacttcccgtgaaccacaaacctaacgcggagcggcgcgggccggccgccgggcgaggtgcgcgtagctgctgccatcgatcgtcgccgggtccatccaccatgggcggcggcaacggccagaagtccaagatggcccgcgagcgcaacttggagaagaacaaggggtccaaggggagccagcttgagaccaacaagaaggccatgagcatccagtgcaaagtatgcatgcaaacattcatgtgtaccacgactgaagtgaagtgccgggagcatgccgaggctaagcatccaaagacagatgtgtaccagtgctgcccccatctgaagaagtgaaaagcctctgaactagcaaccagtgccgtggtcatggagttaggggaatgtgtctgttagctatgcggtttggtcacagtcagtacaggtcangagcttt

SEQ ID NO: 452930 - DNA, 463 bp, Sorghum bicolor
cgtccgtgcctggaaaaacttcgcaacagtctgatgtggctgacagagaacccagtcctgctaatcctgtgaccaattccgatctggatgttgtatcacagaccacagatgaagtaaaggctgaaacacctgccacagaaaaggcgggtcaagttgagaaaatcgtttcaggtaaaggaaaggaaaacaaagggaaagacatcgtgagaaattcatacaagacagaacttgcaaggcaaattttgctcagtttcattgtgaagtcagtgcatgacagtttaggttccgcccaagctgaaccagacaggaagtcaagtggatcagatgaagctagtaatgaacagagcagcaacctaggcaagaatgcttctggtcgcaaagattcagataagcaagagaaagccaatggggttcctaagggtctgaaggatacagagggatttacagtcgtttcaaaacgtcg

SEQ ID NO: 452931 - DNA, 608 bp, Sorghum bicolor
caactcctgatgttgctgaggccccagcagctgacgatgacgacgacgatgatgttgacctttttggtgaggagactgaagaggagaagaaggctgctgaagagcgtgctgctgctgccaaggcttctggcaagaagaaagaatctgggaagtcttcagttttacttgatgtgaagccatgggacgatgaaactgacatggccaagctcgaggaagctgttaggagtgtccagatggaaggactgctctggggtgcttccaagcttgtcccagttggatatggcatcaagaagctgcaaatcatgatgaccattgtcgatgaccttgtctctgtcgacacactcattgaggaccatctgtgcgcagagccagtgagcgagtacgtccagagctgcgacatcgttgccttcaacaagatctaaatttgctagaggtgctggcgaaggtggttggcgggcaatgcaacaacctaatttatccatatttctgtgtctgctttgtgtggctagtgatattgccgtgaggtttttggatcctagtcgtgtcaaatgtaccagtaccagagttaatttgctttaattcgaaacacagtctggtggatttctgtt

SEQ ID NO: 452932 - DNA, 714 bp, Sorghum bicolor
cgtccgcagactcatggtgtgcccacaagaacccaatgctcacccctgacatagtaaaatttgtcgcactggacgaggagctggtgaccattcaccgggcagcgtggaacagaatgtactttgctggcatatacgacccgctggaccgcacctggagaggcacggaaaacgaaatcgctctctgctgctccagcccgacagttgtcgtggatggaacactgtacatgctggagcaatctatgggcacgaagctgatgaggtggcagaaggacaccaaggaatgggccatgcttggtaggctctccgacaaggtcacaagacccccttgcgcactcgtggccataggcaggaagattcatgtgattggaagagggctgagtatagtcacagtcgacgtggacacagcagcaagagtagatgggttcctggttaccacttctataggcccattggtggaggaagacttgacgccggagaggtgcatggtgatcaccatctgaaggtggcatcggagcttgatgctgatgccgagtgtatgttgtaactgacaatccacattggccgaacatttggctagtggggatgactcatgcacatatatactgtgatgtgaattcaataagggttcatacagccaataattagttaggccatgttttggttcctcatttgtgctctttctcgactgctggctgtaagaaaaatatttacctt

SEQ ID NO: 452933 - DNA, 520 bp, Sorghum bicolor
cgtccggcaaacctatgtggtgaacagcagtgaggttgatagggaagttatagaagaggcactgtcattaagtgaccccccacttctgacccctcaaacagaaacagatggagagtctactgatgatgactgtgcatcgtttcctactactggacagactgagttcttttttaaccgaccaaaaggtctatcactatctatggtgctgtctacgcccctttttataactgtaccaaatgtcaaggaggaaggccccaagctatattcagatgtggacccaaagtatgtgcagcgtatggttaaggaatacttagatgcacgtccttgtatgaacctccgtgcaacttcttataacattctggctgttgaggatccaactgatgcccgtgctgctgaaatgggtacagaatcacggctacccaatgttattactgaacagacttctgttgcagctgctcaccctcgtatggtaccaactgaatcaaggcatgaagtttcagcagaagaaattattcccact

SEQ ID NO: 452934 - DNA, 541 bp, Sorghum bicolor
ggcacgaggaaattgcggaagggggtgaaagaggctaatgaggaagatcttgaaactgtcctggacaaggtgatgatgctgtttagatatttgcaagaaaaagatctatttgagaaatattacaagcaacacttggcaaagcgtcttctttctgggaagaatgcttctgatgattctgagagaagcatgcttgtgaagctgaagacagaatgtggctaccagtttacttcgaagttggagggcatgttcaatgatttgaagacttctgaggatactacacaagggttttatgcatctacttcctcggagcttctggcagatgcccccacaatatctgtccagatactcaccactgggccatggccaacacaaacctgcaatacctgcaaccttccccctgaaattgtccctatctcagagaagtttcgggcttattaccttggcacacataatggcaggaggctaacatggcaaacaaacatggggcatgctgacataaaagcaacatttggaaatggcagcaagcatgaactgaacgtct

SEQ ID NO: 452935 - DNA, 494 bp, Sorghum bicolor
cgtgcgcttggctgccctcctccttccttgagatctccaagggtacgagcgcattcgcatcgcttcgcctccgccgctcgcgatttccgccgcctgcgccgccgcccggggagatggcggctctgggaaaggcgatgtacgcggtggggttctggatccgggagaccggccaggccctcgaccgcctcggctgccgcctgcagggcaagtacttcttccacgagcagatttcaaggcatcgcaccatcatgaatatctttgacaaaacccctcatgttcataaagacgcatttgttgctccaagtgcatcccttattggtgatgttcaagttgggccaggagcttgcatttggtatgggtgtgtctcaagaggggatgcaaacaacatacagactggatctgggaccaatatacaagacaatgctcttgtgcatgtggctaaatctaatctaagtgggaaagtctttccaacaatcattggcaataatgtcaca

SEQ ID NO: 452936 - DNA, 410 bp, Sorghum bicolor
cgtccgcccacgcgtccggttcgtgcttatgttggtagtaaattgtgcatcttttctgaagaatactttctcggtaactaccattaccgtgttcaacattgtgatgaatgaagctgtgactcaggatgtaagagctgcagccaatggcatagctgtaacactaatgtccatctcaaaagctgttgctccagctgttgcaggaattatattttcatgggcccagaggcgtcaaacagcttcgtttcttccaggcgaccacttggtgttcttcatactgaacatcttcacgctcaccggtctcatcttcaccttcagaccgttttttgttcgaggcagcgcgaagcactgaaacatgaatgaagcagacccatggtaataggtatcctatccaggggaatagaatataaatt

SEQ ID NO: 452937 - DNA, 441 bp, Sorghum bicolor
cgtccgcgtcagccttatctccataccatttcaaaatctcctctcctgaacctctcctttctctgttgatccggtggcatctcctcctttctctcattctctcagatccagattggctgctcatcgaggcggagggcttcagtcggcggcgatccctgccaccgcggcctcctcatccccaacagcggcggcacctccttcgccccctcaagcatccacgactgctactccccgaccggcaaccgcgacgctcctggtggccgcacggctaggcccactcggggaaggctacggcggcacgatgcaccatcagcacgtttgctggggcccttccgttccaacgatggcggcgcccttcgtgtacggacacgccgcgtgcagggcaatgctgtccacgccggattgcatggcctgcctccgctccatcgtgagccatatgga

SEQ ID NO: 452938 - DNA, 439 bp, Sorghum bicolor
cgtccgcgcaaaacttcccttcttccaccagatactagaaaggctgcatatcttgctgtgatgcgaactgttagcacctcaaacagatccggttatgatgctctccttaaaatctacagagaagcatctgaaccacaggaaaaatcacgtgtcttaggttccctgtcttcatcaccggataaggatattgttttggaggcattgaactttatgtttactgatgaggtgcggaatcaagattcattttacatccttggtggtattagcttagaaggacgagaagtagcatggacctggctgaaggaatactgggattacgtgttgaagacatggaaatcgagggcactcatatcagacttcatcgagtccattgtcccaccgttcacctccgaggagaaagctaccgaggttaccgagttctttgctggccgcatcaagc

SEQ ID NO: 452939 - DNA, 742 bp, Sorghum bicolor
cgtccgccgtcgcctgcctcccgtgccttgccttctagggtttcccccgtcgtcgactccttcctctccccagatttggatctgagccgccgccgccgccgacccaggttgtcttgatggcgcccgctgtggaagccgtgaaggagacaggctcgttccaaaaggttcctgccttgaacgaaaggatactgtcaaccatgtccaggagatctgttgctgcccacccttggcatgatctggagataggccctggcgctccaaccatattcaactgtgtcattgagattcccaggggcagcaaggttaagtatgaacttgacaagaaaactggattgatcaaggtggaccgtgtgctgtattcatcagttgtttaccctcacaactatggattcattccacgcacactttgtgaagacagtgatcctttggatgtactggttataatgcaggagccagttatcccaggctgtttcctacgtgcaaaggccatcggcgttatgcccatggttgatcaaggagaggcagacgacaagatcattgcagtgtgtgctgatgatcctgagtacaagcactacaatgatatcaaggaccttccacctcaccgcttggctgaaatcaggcgcttctttgaagactacaagaagaatgagaacaaggaggttgctgtgaacgactttctgcctgcaactgaagcttatgaagtcatacagcactctatggatctgtatgctacctacatcgt

SEQ ID NO: 452940 - DNA, 485 bp, Sorghum bicolor
  unsure (1)..(485): unsure at all n locations
cgtccggtccatttccgcgtcgtctccgccccgcagcagccccacccaccacatggccgcgccgccgggtggggcccacgccggcgccggcgccgcggacccgatgcaggtggaccagccgctccctggcgccgccgccgccgccgccgcagccgcagcacacggccccgccgacgccaagcatgctggttctatgattgaagggagtgatccagtcacgggtcatataatctcgacaaccattggagggaagaatggagagcctaaaaggactatcagctacatggctgagagagttgtgggaactggatcatttggaatcgtcttccaggcaaaatgtctggagactggtgagactggtgccatcaagaaggttttgcagtgacaagcgctacaagattagggagctgcaaatcatgcgatccatggatcactgcaatgttgttccttgaagcattgcttcttctctaccacangcagagatg

SEQ ID NO: 452941 - DNA, 694 bp, Sorghum bicolor
ggcacgaggcttattggaccagtctcataccttttgctctcaaagcctgccaagggtgtggagaagggattccctcttctttcccttcttagcagcatcctccctgtttacaaggaggtcattgctgagttgaaggcagctggggcttcatggattcagtttgatgagcccactcttgtcctcgaccttgattctaacaaattggctgcgttctctgctgcatacgcagaactggaatctgcactttctggattgaatgtgcttgttgagacttactttgctgatgttcccgctgaatcatacaagaccctaacatctctgagcggtgtgactgcttatggttttgatcttgtccgtggaacccaaactcttggacttgtcacgagtgctggtttccctgctggaaagtacctctttgctggtgttgtggatggacgcaacatctgggctgatgatcttgctacatctctcagcactctccagtctcttgaggctgttgttgggaaggacaagcttgttgtatcaacttcctgctcactcatgcacaccgctgtggatcttgtgaacgagactaagcttgacagtgagattaagtcgtggcttgcatttgctgcccaaaaggtggttgaggttgatgctcttgcgaaggcattggctggtcaaaaagatgaggcttacttgcagcaaatgctgt

SEQ ID NO: 452942 - DNA, 492 bp, Sorghum bicolor
  unsure (1)..(492): unsure at all n locations
acgcgtccggagagttgtttaattggatataaacaaccttctcctccaccagttctggcagaggtgcaaagaccaatttctccatctagagttgctgatccaacacccggacttccgacctcaggaactgcccgttttcagaacttgcatgttccgatcaagttgatggagtgttttctaagggttgctgagtcaaacaccaaaagaagcttagaaacctgtggggttcttgctggtaccttgaaaaagagaactttttgcgtgacaaccttaattattccaaagcagaaatcgacatctaatacgtgtgaagctataaatgaagaagagctatttgaagttcaggacacaggctcactgttcactcttggttggattcatacacatccaacacagtcctgcttnctttcttncattgacctccacaatcattattcttatcaggtcatgctaccttgaagcaatgcgatagttatggcacctactgacaca

SEQ ID NO: 452943 - DNA, 766 bp, Sorghum bicolor
cgtccgcccacgcgtccgagacgagcggcgacgggccgcccctcgccgggcgacgagcacagcgacctgttaccatggcagcaatgaagaccgatatgggaggcttaggtggcaggccgacaaatcaacaagcaaatccttttggaactgccttgcatggtgctgggccaggactgatccgtactgggctagaagcatatgggggaggtttttagattcaagttctgagtttatgcagagcaatataacacaatatttgtccgaccctcagtactactttcaagtcaacagccagtatgtgaggaacaaactgaaggtcatcttgttccctttcttgcacagggtaaagggctgatgaccttttgtttatctctgcaggattttgcatattgtgcttttgtgaagtctcataatatatgcctgacctttactgtctttcttaaaggtcactggacaagaataactgaaccagtaggaggaaggctgtcctacaaacctccagtccaggatatcaatgcaccggacttgtacatccctttgatggcatttggcacctacattgtagttgctgggtacgccttgggtgttcttggaaggtttacctctgaggcactgaccctacagttctctaaagggatacttggctggtttctgcaagtcatcctcatcaaaagtctgctctacttcctgggcaagagtgaagctccattgctggacattgtggcatatgctggatatggtttcactggcacttccctttcaatgc

SEQ ID NO: 452944 - DNA, 429 bp, Sorghum bicolor
cgtccgggaggaccatccggctctctctcgtgcggcaactcggcgaccgccgacgccgacgccgacgccctacgccgaggttcccggattgttgtcggtcccttcgccggccttcgtcgcgtccttgccggcgacgagcacccaccaccaccagtgtttctacacccatgtgctctactaggtccgcccctggagaagactgggatattttgcatacacaaaggatcatctaatcttgcctcctggaggtgtagaggacattcagtttccttcagttcttggatagcaatggcacgtgaatttcctgatgaagttcttaagtctgttttcccattattggatgggaaagatctagtattctgcatgcttgtatgtcggcaaatggcgtgaagttgcaaaaggatgattacttctggaaatgcatttgct

SEQ ID NO: 452945 - DNA, 789 bp, Sorghum bicolor
cgtccgcggacgcgtgggaaacaagattcccaggcaaattcctgagcaagcatggtacctgcagccagcttttgcaatactagctggcggcatattgccatttggggctgtctttattgagctcttcttcatcctgacatctatctggctgaaccagttctactacatctttggcttcctcttcatagtctttgtcatcctcattgtgacatgtgctgagatcacaattgtgctatgctacttccagctgtgcagtgaggattaccactggtggtggagggcatacctgactgcaggctcgtcagcactctatttgtttgcttatgctatcttctacttcttcaataagttggagatcacaaagctcgtctcaggcatcctgtactttggttacatgctgatcatctcttatgccttctttgtgctgactggtaccattggcttctatgcctgcttctggttcgtgaggaagatatatgcttctgtgaagatcgactgattaaacaaccagtgtctagagaaaccttttttctgctcatagagtaccttctaccaaggttttgctgcaatgtcgtgcatggtgctgctggatttacatataaaggaaactggggttctggatgggattccatgggttttggtagaatatgtgtagcctgttaggagcaagaactggtggaagttcaagtgcgatctagatacgcgatgttgtagtgcaacatggattttgtacgcctaaagatgttcagtgctgcattgtaatataccttgatttgccctgcttgttcc

SEQ ID NO: 452946 - DNA, 893 bp, Sorghum bicolor
cgtccgcccacgcgtccgggcagaaaaggctaaagtcacaaaaaagcagaaagtagttacaaaggagaagaaattctcaaccccagaggctaaaaaggatgcaaaacaagattctgatagacgtactgaagaaaagggtggcaactcagcagaagaggataattcccattcatccgctgaggaagataacaagagaaaacggccacagactccagcttatgggaaacaagtagagcatctgaaatcgataatcaagtcctgtggaatgacaattccacctaatgtgtatcggagagtcaagcacgctcctgagaacaaacgtgaggcctgtttgataaaggagttacaggatatacttgaaaaggaaggattatcaaaaaatccttctgaaaaagaaattaaatcagtgaagaagagaaaagaaagagcaaaggaacttgagggcatagacatgagtaatattattactagttctcgtcggagaagtacatcaagtttcatacccctgccgccaccacctaaaatagaagtggatagtgatgatgaagaagaagatgatgatgcagaagatgatgatgaagtagatgaggagaatgtaaaaggtggagatgaagacaccgatgaagttgatgaggagaatgtaaaaggtggagatcaagacaatgatgaagttgatgaggagaatgtaaaaggtggagatgaagacaataatgacactgccgaagctggtgatggttctgctgatgctgctgaaaaggagagcgactgattctggccccagataaggcagaatcagttctgaccatatataggttcagcttcatgttgacttcctcgttcgtggatggtctggatgtagccagttgctccatctgatgtttattcatgtgtgc

SEQ ID NO: 452947 - DNA, 675 bp, Sorghum bicolor
cgtccgcccacgcgtccgggttctatccgccttattgatctacgtcaatcagcactgtgtgacaaccattccaaaatattcgaggaacatgaagcacctggatcaagatccttctttacagaaattattgcatcaatttctgatataaagttttcaaggaatggtagatatattcttagccgtgattatatgactctcaagctatgggatctaaacatgaattcaggccctgtttcaaccttccaagtccatgaacatttgagacctaggctctgcgatctgtatgacacgcgcccgattttcgacaagtttgagtgttgtcttagtggggatggaacttcgtgttgcaactggttcttatggtaatatatttcgcgtttttggttgtacttctggaagcatggaggcaacaactttggaagcaagtaggaatccaatgaggcgtcagattgcgaatccagtaaggcccacacggacactaacttcttttacccgtggtgttcggagaggtggagaaaatcaaggcgttgatgctaatgggaattcatttgacttctcaacgaagctgctccacctcgcatggcacccgaccgagaattccattgcatgtgctgctgcaaatagcttgtatatgtattatgcgtagagaatgttctacaaaaaaatttgtgtttt

SEQ ID NO: 452948 - DNA, 660 bp, Sorghum bicolor
cgtccgggagaaagaagatacagagagtgctgatgtgatcgagaaagctccagatggtactccagctggtggtggcttgctttatgttattgttcatgaagcccaagatcttgagggaaagcaccatacaaatccatatgcaaaaataattttcaaaggcgaggagaagaaaacaaaggtcatcaagaagaatagggatccaagatgggaggatgaatttgagttcgtgtgtgaggagcctcctgtaaatgataaactgcatgttgaagtcctaagtaaagcagggaagaaagggctgatacatggcaaggaaactttgggctacattgatattagccctgcagacgtcatcagcaacaagcggattaatgaaaagtaccatctcatagactcaaaaaatggtcagatccaaatcgagttgcagtggagaacttcctagacaggaaattgacagaatgcttgaatgtagtacatatgaatgttcgtaagaccttatattcagtttgcggatatctgtgattgagattgagctcatgtagatatttcctttgtttatagacatctgctgttcagatctcttaattgctcaaatttccgagaactatgtactcatgttatagaccctggaaatggaactgaactttttctttgactgatgac

SEQ ID NO: 452949 - DNA, 491 bp, Sorghum bicolor
cgtccgcggacgcgtgggctcttcccgatacttctcgtcgcctccgtcgccttctctccccaatctgtcctcggcgtgacggatgggggcggccatggctgcggcgcactctctcccctcccggcccatcagcgcgagggcatcacgtcgtggtgacggtggcgcagcacgtgggcggcgtggcgcgagcgcccctgacgcggcgggacggtgccgatgcgtcctcttccatcctgaggtagcgacaagcgcgcgaggcggcagcgcttcctgcgggcggcgtgccagcgtgaacggccaccgtcccttcccccaccgcccatggggccaggccatgcggcatgggtgcgacctcaggcggtggtcgtacctctgctctccctcggtccatccgctcgcaagtttgtccccccccccccccccctctccttactctatgcgggcaacctgctaggtgcacgatttctccaatggatgggtgatttggaggg

SEQ ID NO: 452950 - DNA, 619 bp, Sorghum bicolor
cgtccgaggaattccagaacaaggaaatcaagttccttattggtgaccttgaatccagccagggtgccttacagtactttggtctgaaagaggaccaggcaccccttatcctcatccaggatggtgattccaagaagttcttgaaggatcaaattgaggctgaccagattgtctcttggttgaaggagtactttgatggcaaattgacgccgttcaagaagtctgagcctattcctgtcgtcaacaatgagcctgttaaggtggttgtggctgacaacatccatgatttcgtcttcaagtctggcaaaaatgttcttattgaattctatgccccctggtgtggacactgcaagaagctggcgcccatcttggaagaggcagccaccactctccagagtgatgaggaagttgtgattgctaagatggacgcgactgccaatgatgtgcccagtgagttcgaggtccaaggctacccaaccatgtacttcgtgacccccagtgggaagggcaccgcctacgacagcggcaggacagcagacgacatcggcggcttcatcaagaagagcaaggagaccgccggcgccacccaggcgacgacgacgacatctgagaaggcagc

SEQ ID NO: 452951 - DNA, 725 bp, Sorghum bicolor
gtccgatatggtccatgctttcaagccaaacccaaagaccaatttgcaggagaactggagaatagtagatttcttctctcaccacccagagagcctgcacatgttcaccttcctctttgatgatgttggcatcccactcaactacaggcacatggagggctttggtgtcaatacctacaccttgatcaacagggatggaaagcctcaccttgtgaaattccattggaagcctacttgtggcgtgaaatgcttgcttgatgatgaagctgtgactgtgggaggtacctgccatagccatgcgacaaaggatctatatgattccattgcagctgggaattaccctgaatggaagctctacattcagactatcgatcttgaccatgagggtaagtttgacttcgacccgcttgatgtcaccaagacctggcctgaggatatcatcccactgcaacctgttggacggatggtcctgaacaagaacattgataaccttctttgcggagaatgaacaaaattgctttctgcccagcgattattgtccctggaatccactattctgatgataagctgctccagacgagaatcttctcctatgctgatacccagaggcaccgccttggtccaaactatctgatgcttcctgtgaatgcaccaaaatgtgcccaccacaacaaccaccatgaagggttcatgaacttcatgcacagggatgaagaggtgaacta

SEQ ID NO: 452952 - DNA, 407 bp, Sorghum bicolor
  unsure (1)..(407): unsure at all n locations
cgtccgcaatcccccaaaccccaacaaccatcgcaacaatggcggcgccgcctgtccagcccgtgccacccgcggctgcggcggccgtgaacggggacgcgttccgcctgggcttcgtcggcgcgggcaacctggccgagagcatcgcccgcggcgtggcggcgtcgggcgtcctcccggcctccgccatccgcaccgcgccccaccggcggcccgagcgcggcgaggccttcgcgttcttcggcgcgtgcttgctccaaaccaatgcccaggttgtcgacgacagcgatgtgatcgtcatctctgtgaagcctcagatcgtgaagcaggttctacttgagctgagaccactcctgtcggaagaaaagcttttggtgtccattgctgncggcattaagatgcaagat

SEQ ID NO: 452953 - DNA, 584 bp, Sorghum bicolor
cgtgcgcctccctccagtccttcgaaaaccttcaaacgcccttgcacttgcagtgaaggggacgaccgaatttgagcagagcctgccgtgcccagcgatcgattagagagaagcaatcatccaagcagctatctgtacgtagctagttgcgacttgcgagagagcttgtgtacgttaatttccttcgtaggggatcggatcggaagcaagcatccaacaacaaggctcaaatggcgagctccgacgatggtggttccagcgcccccagggacgtgccgggcagctacgggctgccgctggtgggcgccgtgcgcgaccgcctcgacttctactacttccaggggcaggacaagtacttcgagtcccgcgtggagcgctacggctccaccgtggtgcgcatcgacgtgccgccggggcccttcatggcgcgcgacccccgggtggtggcggtcctggacgccaagagcttcccggtcctcttcgacatgcccaagctccagaagaaggacctgttcacgggcacctacatgccctccacctccctcaccggcggctaccgagtctgctcctacctcgaccggacg

SEQ ID NO: 452954 - DNA, 622 bp, Sorghum bicolor
cgtccgacagaatttatgtccagtggaagtgtgtatgattacctccataaacataaaggtgttttcaaacttcctgctttagttggagttgcaatggatgtgtcaaaaggcatgaactacttacaccagaataatattattcaccgtgatttgaaaactgcaaaccttctgatggatgaaaatgggactgttaaaggggctgattttggtgttgcacgtgttaaagctcaatctggagttatgactgcagaaactggtacttaccgttggatggccccagaggtcatagagcacaaaccctatgatcacaaggctgatgtttttagttttggaattttgttgtgggaactactcacagggaagattccttatgagtacctgactccactacaagcagctgttggtgtggtgcagaagggattacggcctacaattccaaaacatactcatgcaaggctttctgagcttcttcagaaatgttggcagcaggaccctgcccaaagaccagacttctccgaaattttagaaacccttcagagaatagcagaggaagtcggagatgagcacgaggggaagcacaaggacagaacaacctggggtttcttttcagctttcagggggc

SEQ ID NO: 452955 - DNA, 535 bp, Sorghum bicolor
cgtccgcttcaacaggtcgagcaggtttgcgagactgcagggtgtgcagtgcgctatggccgggaggaacctgtacatgagattcagctgcagcacaggggacgccatgggcatgaacatggtctcaaagggcgtgcggaatgtgctggatttccttcaggacgacttccctgacatggatgtcattagcatatcaggtaacttctgttctgacaagaagccagctgctgtgaattggattgaagggcgcggaaagtctgtggtttgtgaggctgtaatcaaggaggacgtggtgaaaaaggttctaaaaacaaatgtgcagtcactggtcgagctgaacacaatcaagaatcttgctggctcggctatcgctggagcctctttggggtttcaatgctcatgcgagcaatattgtaacggccatcttcatcgccactggccaggatcctgcacagaacgtcgaaaggctcccactgcatcacaatgctggaacccataaatgacggaaaagatcttcacatatctgtcacgatgc

SEQ ID NO: 452956 - DNA, 806 bp, Sorghum bicolor
cgtccggcctgggtgtggcagctcgccaaggcctatgtcgccgtcaacgactccggctggcaccaactgatcagccactggctgaacacgcacgcggtgatggagccgttcgtgatcgcgacgaaccggcagctgagcgtgacgcacccggtgcacaagctcctgcacccgcacttccgcgacaccatgaccatcaacgcgctggcgcggcagacgctcatcaacggcggcggcatcttcgagctgaccgtgttcccgggcaagtacgcgctggccatgtcctccgtggtgtacaaggactggaacttcacggagcagggcctccccgccgacctcgtcaagcggggggtggcggtggaggacccgtcgagcccctacaaggtgcggctgctgatccaggactacccgtacgcgagcgacgggctggcgatctggcacgccatcgagcagtgggtgggcgagtacctggccatctactacccggacgacgccgcgctgcgtggcgacgaggagctgcaggcgtggtggaaggaggtgcgcgaggtcgggcacggcgacctcaaggacgcggcctgggggcccaagatgcaggccgtgtcggagctcgccagcgcctgcaccaccatcatctggatcgcgtcggcgcttcacgccgtcgtgaacttcggccagtacccgtacgcggtgtacctgcctgaccggtccactgggagcccgcgccgtatgccggagcccggaagcaaggagttctaggagcttgatcgctatccggagcgcggcttcattacacaccattatgagttagg

SEQ ID NO: 452957 - DNA, 724 bp, Sorghum bicolor
cgtgcgggcacccccggagagtcccgcaagctagctgagcttcttcggattccggtgccaggccctcgccctcacgcggcggtgctccctctcttcgtcccccagcgacgcgcgcagcagcgacgcaggcaggcggcatgaaggggggcggtgccatgaagccgtcgtccatgttctacgtccacgaggcggacgtcgtccagatccaccatttcctcgaggagtgctccctctgcgccaagtcgctctccggcgacatcttcatgtacagaggtgacacgccgttctgcagcgaggagtgcaggcagcagcagatcgaggtggacagggcgaagcaccggcggaagaagcgcgcggcggcgcacgcgctgaccgcacgcagcagggagcaccggcaccaccaccaccaccatcaccaccatcaccatcagcaaccgcagccgcggaaggccggcatggacgccaaccaccacccgtgggtcgacgccgggttcgcgagggcgcccgcgctgcgcgtctgaaacaaaaaggaacccgcgccgccgcacgcacactttccccgctccgtgcgcaggccgggggacatactcacatccatcctttctccgcgggtttctgacgcgtgctgcagcaggacgaatcctttggtgtttaggggatcggctgcatgcatgcatgcactattgcgtcctaagtacgcggtcgagcgattggctcgggtttt

SEQ ID NO: 452958 - DNA, 760 bp, Sorghum bicolor
cgtccgcctccccatcctttttttttacccgcccgcccgccagccgccgtttcggttgctcggctgggggagcaccagcgctcgagggctatggcggcgtcggcgagggcgtgcttggttgcgctggcgctggtggccgcgctcatcctcgacggaccagcggcagcggcggcggaggaggggaatgccggaggccgcgggtcgctgacgctgaggcagcgccgccggcagctgctacggcagcggcaggtgcgcagccacctcaagcgcctcaacaaggcgccgctcgctaccattcagagtccagatggagacatcatagactgcgtgcatatctccaagcagcctgccttggatcaccccttccttaagaaccacaccatccatatgcggcctgcataccacccggaaggtctgtatgatgagtccaaggttgcatcgcagcagaacgcccaaacaatcacccaaatgtggcatcagaatggcaggtgccccgagaacacgataccgatcaggaggaccaaggaggaggacgtcctgagggccagctccgtcaggaggtatggcaagaagaagggcaagactaccgcgaaccccatgtcggttgaccctgacatgctcaacgagagcggccaccagcatgccatagcatatgtggagggcgataagtactatggcgccaaggctaccatcaatgtgtggcaaccgaagatcgagcaggctaatgagttcagcctgtcccagctttggatctttgggg

SEQ ID NO: 452959 - DNA, 1056 bp, Sorghum bicolor
cgtacgcccacgcgtacgcccaggtcacggtggagtacgtcaacgagggcggcgccatggtgcccgtccgcgtacacaccgtcctgaggtgcagccagcacgacgagaccgtcaccaacgacgagatcgccgccgacctcaaggagcacgtcatcaagcccgtcatcccggagaagtacctcgacgagaagaccatcttccacctcaacccgtcgggccgcttcgtcatcggtgggccccacggcgacgccggcctcaccggccgcaagatcatcatcgacacctacggcggctggggtgcccacggcggtggcgccttctccggcaaggaccccaccaaggtggaccgcagcggcgcctacatcgccaggcaggccgccaagagcatcgtggccagcggcctcgcccgccgctgcctcgtgcaggtctcctacgccatcggcgtgccggagcccctgtccgtgttcgtcgactcgtacggcaccgggagcatcccggacaaggagatcctcaagatcgtcaaggagaacttcgacttcaggcccggcatgatcaccatcaacctcgacctgaagaaaggcggcaacaggttcatcaagaccgccgcctacggccactttggccgtgacgacgccgacttcacctgggaggtggtgaagcccctcaagttcgacaaggcatccgcttaagattgggaagccaaattggacatgaagaagactgtgtgtctccgtgctgtatcttcctctggctctgctgatacctgctgcaagcattgctgctgctgctgctgctcctgctcctggatgtgtgtttgatcagtgactggctgctccatagaagagaagaaaagaaggctttggcaagcaagccatgtcggcgccgccggcttagggattggtataatttggtgtggcagcaaccaggattatgcgctgatctttatcttttagtttggtcgtccaggtatttttttttcttccccttttcgagtctgtactgaaactgctgagagatttgcagtttttaatctatcaatattcgtatgttactgtt

SEQ ID NO: 452960 - DNA, 454 bp, Sorghum bicolor
cgtccgagaacctccttggacagatgctaacaagggtcgagtccatgtcggagaacattgtctcaaacatagatgaaatgggagccagagatcgacgtgcttgagcagagcatctacaatctcaaagctgagatgggcactgagatgccggccaagaagcctgatgagccaaagcctgctgactccgcgtaacttgggtgtcacccagagattgttgagtaaagatttggtgatggtcgtgacaaatttcagcattctgtgtatcttctgaggatcatctgttgcatgagtcctgtcaactatgtagacactagcccatcatgtgaatgatgaatccatagttcgggctctccagagttcagacatcaacgcatgttcctagttagtttttctgtcatctttcggcaagtatttttgactgttataagatttgtggcatctattccatttaaaa

SEQ ID NO: 452961 - DNA, 543 bp, Sorghum bicolor
ggcacgaggatagatccctctccccctgtttctccctttctctctcctcgaccctcccgacgcggcaaagcaaaacacacagggaggtgcacaggagggagaaggggaagaggtggaggccgatgtcccctccccctcccccaaatccttgcccaataatctctcaatcagggggggtcctagggctgatcaggtcggtggattcggcgggcgggcgcagccatgaacgagaaggcgtccgtttccaaggagctcaacgccaagctcaagatgatattggaaagtcttcttcggcttcctgagaatagagaatgtgcggactgcaagtcgaacggtcctcgatgggcaagtgtaaatctagggatctttatatgtatgacatgttctggaactcatagaagcctgggggtgcacatatctaaggtaagatctgcaaccctggatacatggctgccagagcaagttgcatttattcaatcaatgggaaacgaaaaagcaaatagctattgggaagcagagctgcctcctaactatgataggggt

SEQ ID NO: 452962 - DNA, 452 bp, Sorghum bicolor
ggcacgaggctctcgttctcatccgtccaggcgagccaacaggcaaaagtaaacgggcgagcgaggagctggagggagagaccccggcgacgcgaagcaaccgcccatcgatcggagccgcggctgaccaggaggaagccccgagatggtgggtctcgtcggcggcagcacggcgcgggcggagcacgtcgtggccaacgccggaggggagacggagtacgtgcgccgcctccaccgccacgcgcccgccgagcaccagtgcacctccaccctcgtcaagcacatcaaggcccccgtccacctcgtgtgggagctggtgcggagcttcgaccagccgcagcggtacaagccgttcgtcagaaactgcgtcgtgcgtggggaccagctcgaggtcggcagtgtgcgcgacgtcaacgtcaagaccggcctgccggcgacaacaagcaccgagc

SEQ ID NO: 452963 - DNA, 553 bp, Sorghum bicolor
cgtccggcaaggctagcaacccctttgtcaacttgaggaaggaatacaagggcatcttctggcaggaggacatcatcctcttcttccagagcgtgaccatccccaaggattgcgacactgtccagaagtgctacatctacctctctggacaggtgaaggagaagctgggcacgattgacccctactttgtcaagctcgccgacgccatggtcacctggattgaggcctgggatgagctgaacccagctacccctgccaccgagaatggcaaggccaagtagatgggagttccaggggtgccttcactgcccactgaagtgaaaagaaagtatgattgggtcctgcctaggccccatagatatagctctttttgagagggaagagagattaattcagcagcagcttttataaattctttgttgttatgaagcaggtggttcttttgtagttgatgaaagggatttgtcgtcactatcatttacataattcagacaataatttatattgtgtaattttgagaatcaaaacactgtttgtgttatagcatctctaa

SEQ ID NO: 452964 - DNA, 1032 bp, Sorghum bicolor
cgtccgccgcgctcgaagctccgcctcctcccgaacccgtaccgtcgccatggcatccggcttgcctgggagctccaaggaagtgctgccgtctcccctgacctccgcctccgagccccctcccctcttcgatggcactaccaagttgtacgttgcctattattgcccgttcgcgcagcgcgcttggattgccaggaactacaagggtttgcaggataagattaagattgtcgccatcgatcttgctgacaggccagcatggtacaaggagaaggtttatccagaaaacaaggtgccttctctggaacacaacaaccaggtgaaaggagagagcttggatttggttaagtacattgacagcaactttcgaaggtccatcgttgctcccctgaggatcctgcaaaggaagcagttcgctgaggagctgcttgcatatactgatgcatttaacaaagcattatactcatctttacctaacaaggaagatgtgtctgaggaaactgttgctgctttggataaaatagaagacgccctggggaaatttaatgacggcccgttcttccttggtcagttcagtttggtggacattgcatatgtaccattcatcgagaggtttcagatattctattccaacataaaaaactatgatatcacaaagggcagacccaaccttcagaagttcattgaggaagtgaacaagatcgatgcatatacgcagactaaactggacccagattttttacttgagcagacaaagaagcggcttgggattgcttaaagcttgtgaccaaggatgaatctctcgccagaagtacaagcatagtagattgagactagtttagtcgtttgtgtgcttgaataatgatgaatatcacagttatggttttcagtgaggcatggtcttctatattggttgtgcttctgaaataaattagttgtcactatataaaaggatcatttgtaatgttttgatgtcactggttgtgcttttgtaaatataactagtgtcgctgtttaatagatcatttggta

SEQ ID NO: 452965 - DNA, 645 bp, Sorghum bicolor
cgtccgcccacgcgtccgctaccgccgccgccgccgcccttctacgccaccttcgccggcgaagagcgcccgccagcaatggcagcaaagtgtgctctttccgcaccatccttatcggctcaccgacccctctgccgcaacaggcttgctccatgcctgccatcgccaagaccagcaagagccgttgctctgagagtgagtgctgcaaagcttcctccaggggttgaagtgcccagggtgcagccaaagctgagcgagcccttcttggggttcgcccagacggctgagatctggaactccagggcctgcatgattggcctcatcggcaccttcattgtggagctggtgctaaacaaggggattcttcagatgattggggtggaggtgggcaagggtctggaccttcctctttaattaatagccatggtattttcatgtgctggtacggtggtgtattgttggccaaagatgaggatttcacttgctgtcaactacttccgcaaagatatttgggagagtttcagcagctatatatgcttgttaataaccattttcatatggatatccggatgtacgttacaagatcaggttattaatgagctgctttttttatactctgagaaattaaagcaaagatcagataat

SEQ ID NO: 452966 - DNA, 1575 bp, Sorghum bicolor
ttccgcacaatggggttcgatgtggcggctcaaccgtcttcttagatcaccatcttggggagacggttgaagtcttcgcactctcagcctctttgctacttcctttccagtcaaggataagtaagtgctctttgtgtgcatagcatactacggcacgatggtggaacataaaggaaatgttctcatgcacaagtatgagatggggaaattgcttggtcaagggacctttgccaaggtttaccatgctcgcaacactaagacttctgaaagtgtcgcgatcaaggtgattgacaaggacaaggttatgaaagttgggctcattgatcaaatcaagagagatcaaatcaagagagaaatttctgttatgaagcttgtaagacatcccaatattgtgcaactctatgaggtcatggctaccaaaaccaaaatatactttgtgttggagcatgttaaaggtggagagctctttaataaagtgcagcgaggaaggctcaaggaagatgcagcgaggaagtactttcaacagctgatttgcgcagtggacttctgtcacagcaggggtgtttatcatcgagatttgaaaccagaaaatcttttgctcgatgagaatagcaacctaaaggtgtcggattttggtctaagtgcacttgctgaatgccaaagacaagatggcctgctccatacaacctgtggcacgcctgcttatgttgctccagaggtgattaacagaaaggggtatgatggtgcaaaggccgacatatggtcctgtggggtcatcctttttgtgctattggccggttatcttccattccatgacaagaacttaatggacatgtataagaagattgggaaagcagagttcaaatgcccgtgttggttttctaccgatgcccggaggcttttgctaaggattcttgatcctaaccccagcacaaggatctcaatggaaaaaatcatggaaaatccatggtttaggaagggcttagatgcaaagctgcttaggtataatttacagtctaagaatgcccctcaggtagacaagaatgcagattctgattcactaagcatcaacataacagcagagagcaagcaacaagaagaaaagaagcctaccaacatgaatgcatttgatataatatctctatcaactggtttggacctctcaggtttatttgaagaatctgacaacaagagagaatacaattcacatccaccaacacaagctcaacaatcgtatcaaagatcgaagatgttgcgaagaatttgcgattgaagttgacaaaaaaggatggtggtttgttaaagatggaagcttcaaagcctggaaggaaaggggtgatgggtatcgatgctgagatatttgaggttagcccaaactttcatcttgtggagataaagaagacgaatggcgacactctagagtatcaaaaggtcttgaaccgagaaatgaggcctgcactaaaggacatagtatgggcttggcaaggtgagcaatcaaagcagcaacaaactatgatctagtgcaacgttttattaggcaatttccaatctttcatgtatttgtgtagttctcac

SEQ ID NO: 452967 - DNA, 859 bp, Sorghum bicolor
  unsure (1)..(859): unsure at all n locations
cgtccgttgggctctcgctcctgtcgtacggattcgggtcgtatttcaacctgcttcctggttcggagtggtcagctttgctactcacctacggatttcctctcacaatcatcggcatggccttgaagtatgcagagctgaaaccggtaccctgcataacctatgctgatgcctttgctctaagagaaaagtgtgctacccctattctgaagcaggtcaggagtgatgttacacgttttagatatggtgatgagcaacacctggatgaagcactacagagaatctttcaatatggtttgggtggtggcatccctagacgtagtgcacctatattacaaaagattcgagaagaagtaactgaggatgggaaatacagtttagtacttgtatttgaagccaaagcattggagctatccgattttgagaagagacaggctaaattcacctccttttttggtcctgggattaaggcagaaattggaaaagatggcaatgatctatatgaagttcgtcttatctcagagactacttaaaaacaaactttgggaattttctctaatacaatactaaacgtattcctttttttccctttgatccactgaattttgcatatatgatggtaataggatcagattttacccttgtttttgttgtgcctctgagctttgatatatattggttgttgattcttgactgcgacctggcaccttcatacactccatggacatgtacaaagaaaaagctgttgtaatatagatgtaaatggatttgattcnnnnnnnnnnnnnnnnnnnnnnnnnnnnnnnnnnnnnnnnnnnnnnnnnnnnnnnnnnnnnnnnnnnnnnnnnnnnnnnnnnnn

SEQ ID NO: 452968 - DNA, 711 bp, Sorghum bicolor
cgtccgcgcgtccgcgaagaagacggctgctgtgaagtagtgtgaacctgaaccttgtctgaggtcactgagtgagctagctagctagctaagctccgatcgatcctagctagcatacaataccactagtcttcttcacaagtgtaagagacgacagcaacacgagatggtcgctgctagccttctcaagtcctccttccttcccaagaagtccgaatggggcgccacccggcaagccgccgcctccccccggccggccaccgtctccgtcgtcgtccgcgcctccgcctacgccgatgagctcgtcaagaccgccaaaacgatcgcgtcgccggggcgaggcatcctggcgatggacgagtcgaacgcgacgtgcgggaagaggctggcgtcgatcgggctggagaacacggaggcgaacaggcaggcgtaccggacgctgctggtgacggcgccggggctgggccagtacatctccggcgccatcctgttcgaggagacgctgtaccagtccgccgtcgacggccggaagatcgtcgacatcctggtggagcaagggatcgtgcccgggatcaaggtcgacaagggcctcgtcccgctcgccggcttcaacaacgaggtctggtgccagggctcttgcgattatttctatttgtgaggattttgtttctatttggtgttttgttatcgtaattttgttttgtttttttt

SEQ ID NO: 452969 - DNA, 1531 bp, Sorghum bicolor
gtcgattccgtcaccacgcgtcgacaggaaacacagcacacagatggcgtgtagctttaagtctcttcttcaagagtcaatgggcgcacccgcaagcgtcgctcctccgacggcaccgtgtacgtcgtcgtacgcgcctccgactacgccgatgagctcgtcaagaccgccaaaacgatcgcgtcgccgggcgaggcatcctggcgatggacgagtcgaacgcgacgtgcgggaagaggctggcgtcgatcgggctggagaacacggaggcgaacaggcaggcgtaccggacgctgctggtgacggcgccggggctgggccagtacatctccggcgccatcctgttcgaggagacgctgtaccagtccgccgtcgacggccggaagatcgtcgacatcctggtggagcaagggatcgtgcccgggatcaaggtcgacaagggcctcgtcccgctcgccggctccaacaacgagtcctggtgccagggccccgacggcctcgcctctcgcgaggccgcctactaccagcagggcgcccggttcgccaagtggcgcaccgtcgtcagcatccctaatggcccctctgagctcgccgtcaaggaggccgcctggggcctcgctcgctacgccgccatctcacaggacaatgggctggtgccgatcgtggagccggagatcctcctcgacggcgagcacgggatcgagcggacgttcgaggtggcgcagaaggtgtgggcggagacgttctacgcgatggcggagaacaacgtgatgttcgagggcatcctactgaagccatccatggtgacgccgggggcggaggccaaggacagggcgacgccggagcaggtggcggagtacacgctgaagctcctgcaccgccggatcccgccgtccgtgccggggatcatgttcctctcgggaggccagtcggaggtggaggcgacgcagaacctcaacgccatgaaccagggcaccaacccgtggcacgtgtccttctcctacgcccgcgcgctgcagaacacctgcctcaagacctggggcggccagccggagaaggtgacggcggcgcaggacgcgctgctgctccgcgccaaggctaactccctggcgcagctcggcaagtacacctccgacggcgaggccgccgaggccaaggagggcatgttcgtcaagaactacagctactaatcgcccggccggccgcggccatcaccggaataccgccgacgtacgaccctctccgagatacgtgtactgatgatcatggttaagcacgtactccgatccatctccccgtgaaagccatgatatgatccatggacgaccatgcatggtgctgatcgatgccgtacgtgtcctgttacataaatacatactagtagtattactgctagtcgtttactgcaaagatcaagctcgctactgcaaaagtctgggataatgtatgcgtggcgcggcgagatctgagggaaaataatatatatatgcatgtttcgagatggctccttataataataattaaatacata

SEQ ID NO: 452970 - DNA, 937 bp, Sorghum bicolor
cgtccgcccacgcgtccgagccgtcttgccccgatcctcacctgctgctgcagccatggcgaccaccgcggcgctctccacggccgccaaccccacccagctctgccggtcccgcgctacgctgggcaagccagtgaaggggcttggcctggggatgggcagggagcgcgcccagagcatcacgtgccaggcggcgagcagcatccccgccgaccgcgtccccgacatggagaagcggaagctgatgaacctcctcctcctcggcgccatctcgctgcccaccgtcggcatggtcgtcccctacggcgccttcttcgtccccgccggctccggcggcgccggcggcgggacctacgccaaggacaagctgggcaacgacatcacggtggatgagtggctcaagacgcacggtcccaacgaccgcacgctggcgcaggggctcaagggtgacccgacgtacctggtggtggagcaggacaagacgctggccacctacgggatcaacgccgtgtgcactcacctcggctgcgtcgtgccgtggaacggcgccgagaacaagttcatctgcccctgccatggatcccagtacaacaaccagggcaaggtggtccgtggaccggcgcctctgtcgctggcgctggttcacgccgacgtcgacgacggcaaggtcctcttcgtcccgtgggtggagaccgacttcaggaccggcgaggacccgtggtggaaggcatgaggaggatcccacaccagcggtgctcagtgctcacagatgacctatgtatggtgcctcctgtgtcgctgtgatgaggtcatagacttgccttgcgttcgttctccaagggcgtacaaactcacttgcttcttgcctccaaattatatatatgtacacaaactgtatgaaacaccaacagctggttttcatctcttcaaaaaaaaa

SEQ ID NO: 452971 - DNA, 373 bp, Sorghum bicolor
cgtccgtagtaatagccgcatatttttgtcacttaaagatgtaaagcctaatccatccttaggtgctttggaagcagtaatcggtgaggatttatcgcttggtgaagctcttgaacctgtgcaatcagattttgagtggcctggaggtagatgcccttatggaagagctgcggaaaatagagggtggtagagatgtctataaaggacgattcttccaaagcccagggttagctccgacgtttcaggtttacatggcacctgtggttggtccgaaatacaagctcctggcacggtatggaaacaatgttcaagaagtgatggtggagacaacacttgggaaagaagagttggaagaagccattttgatgtgcac

SEQ ID NO: 452972 - DNA, 1394 bp, Sorghum bicolor
cgtccgcccttctagaataatgcagagcgccgcggctttccggccgtgccccgccggcgccggcgccggcgccgggcagctggtgagccgtaatcctagccggggccccctcctcccggtcccggcccgcccgctccgcgtcgtcgtctccgccgctaccactcgcgctctgggtctcgggcggctgcgcctgtcagcctcgccggatgatcggtccggccagcgacaggtgtcgtgtggcgcggccggggacgctgtggcggccccgagtgcggaggaaggcggcggcttcatgaagacgctgtggctcggctcgctcttcggcctctggtacctcttcaacatctacttcaacatctataacaagcaggttctcaaggttttcccataccccataaacatcacagaagctcaatttgctgtcggatctgtagtatctttgttcttttggaccactggtattattaagaggccaaagatttctggagcacagcttgtagccatcctacctctggctattgttcacactatgggcaatctcttcaccaacatgagccttgggaaagttgcagtatcatttacgcacaccatcaaggctatggaacctttcttttccgttcttctttctgcaattttcctcggcgagtttcctactgtttgggtagtagcatctcttcttccaattgttggtggtgttgcattggcatctcttactgaggcatcctttaactggattggcttttggagtgcaatggcttcaaatgttacctttcaatcccggaatgtactgagcaagaagctcatggttaagaaagaggaatccttggacaaccttaatctcttctctatcattacagtgatgtcatttttcgttttggcccctgttaccttctttactgaaggtgtcaaaattactcctacatttttgcaatctgctggtctgaatgtaaaccaggtccttacaaggtctcttcttgctggactgtgtttccatgcataccaacaggtgtcttacatgattttggcgatggtgtctcctgtcactcattctgtgggcaactgtgttaagcgtgttgtggtcattgtaacatcagtgttgttcttcaggacacctgtttctcctatcaactctctcggtactgcgattgcacttgccggagttttcctgtactcacagctcaaaagactcaagcccaagccgaagactccttaaatagctagggattgtattttccatctctcttgtgttagtggagtcaagcagttccatatttcaagtgcctgaattttaagataattttaggcaacactcttgtacaaactagtacaagtaaattgttacttttatgatttgttatttgtctttgtaccataatatattaaaattttgttct

SEQ ID NO: 452973 - DNA, 490 bp, Sorghum bicolor
  unsure (1)..(490): unsure at all n locations
cgtccgccgttatggtcttgtcgtttgcacggatagcgcggtttatgcggaagggccagctcgtccaacaggaggtgctgctgctatagcagtgctcattggtcctaatgctccaatttccttcgagagcataaatagagcttctcacatggctcatgtctacgatttctacaagcctgatcttgcaagtgaataatccggttgctgatggtaaattatcccaaacatgctacctgatggctctagactcatgctacagacagttctgcaacaagtatgagaagatcgcgggtaaacaattctcaatttctgatgcagaatattttgtgttccattctccatacaacaagctcgtgcagaagagtttcgctcgactttactacaatgacttcatgcgcaactgcagctcttgtgatgatgacgctaaagagaagctncagtctttttcaaatttgactggtgaagagagctaccagagtcgcgacttgga

SEQ ID NO: 452974 - DNA, 714 bp, Sorghum bicolor
cgtgcgcgtccgagcaaaaccagctacatcgatccatccgtgtgccacagaccacagctactagctagccgccagcactcctcttctccgaacgacgacgaccggccggccggccacctatactagttcacccaccctacgtacgtgcacctccgatggcgaccacggtgatggccaccacgaccgcgagctccctcgccttcttcggccccggcgcgcgcgccagcgccggcagcttccccagtaccactaccacccatcttcccgcggcggccgggcgtgtcgtcgcgccgcgccgccgcgcgctgctcgtcagggccgcccagcagaccgaggacggtaagcccgcggctgctgctcctgctccgaaggcgccggggctctgggacgcgctggcgttcagcgggccggcgccggagcggatcaacgggcggctggcgatggtgggcttcgtgtcggcgctcgccgtcgaggcgacacgcggcgacggcctcctctcgcaggccgggaacggcgcggggctcgcctggttcgcgtacaccgccgtcgtcctgtccgccgcgtcgctggcgccggtgctccagggggagagcgccgagagctagagcggggggttcatgaccgccgacgccgagctctggaacggccgactcgccatgctcgggctcgtcgcgcctcgcgtaacgagtaccttaccggcgcgccctttgtaac

SEQ ID NO: 452975 - DNA, 1229 bp, Sorghum bicolor
cgtccgcccacgcgagcaacagcaaaacacagcaagcagctcactctcagctcgctccctcactactacctagtactacatagcagcagcaatggcgcccaccgtgatggcctcgtccgccaccgccgtcgctccgttccagggtctcaagtccaccgccaccctccccgtcgcccgccgctccaccaccagcctcgccaaagtcagcaacggcggcaggatccggtgcatgcaggtgtggccggcgtacgggaacaagaagttcgagacgctgtcgtacctgccgccgctgacggaggagcagctgctgaagcaggtggactacctgctgcgcaacaactgggtgccctgcctcgagttcagcaaggaaggcttcgtgtaccgcgagaactccacctcgccgtgctactacgacggccgctactggaccatgtggaagctgcccatgttcggctgcaccgacgcgtcgcaggtctacaaggagctgcaggaggccatcgcctcctacccggacgcctacgtccggatcctcggcttcgacaacatcaagcagacgcagtgcgtcagcttcatcgcctacaagcccgcgggcagcgagtgattaaactgctagctagctcctgcgtgagctaatggcatatggctgcctgctgctgcctctcaacctgttcgttcggttttgcatccttggggtcacacacacaccttggtttctttcttcttctttttttcaccttttgctgctgttggttcctttgcttctatatatgctgctgatgtatccattgttggcatcatccatctcgatcgatctctccccctacatatacctgctagaaaaaactactgcaactagcgttgggtgaggaacatatatgtgaatgcaagctccggctatcatgtatgtgtaatatatatggcattggagtttgctctggttattcacagagcaaagaagtacttatttacatccatataacatatactttccttccatacaacaatggctagaagccatcttgtaatttttgcttatttgtttactttctttccctttttttgtctcttgaacttttatgtaagctggttcgcattttcttaataaataaatacacagcagggggaaacccctcctgtttacagtatagaggatggccgctccctaactgactacgacatccaggaggagtctactctccaccttgtgctcaggctcaagggtggtgcgc

SEQ ID NO: 452976 - DNA, 781 bp, Sorghum bicolor
cgtccgaccagagtacattatgacagggcatctaacagcgatgagcgatgtctacagctatggtgttgtactactggagctcctcacgggccggaagtcactcgacaagtcccgacctgtcagggagcagatgttggcagactgggcattcccgctgttgacacagaagaagaaggtacttggcatagtagacccaaggcttgccgaggactacccagtaaaggcggtgcagaagacatcgatgttggcataccattgccttagccacaacccaaaggctaggccgctgatgcgtgacatcgtggcgactttggagcctcttcagcagctggaggagacccctagtgacagtgtggcgatgacacttcaagggacttgaagtgttcatcacttcagagttcacgcacagctcaggaaatacaaagtgccacgtacttaatacatgtgtgtgataatagtagctaactagtgttcttgatctgcagatgatttcttgattgtttaattaatccatggagacagtagttttgttgagcagaaagttagtatatatctctgtaggccggtttaggtgtgtatccagatctagtcctggcatagcgatttccccgacatttcggatgtgggcaagtctgtgcaatctgcaatgtttgttgcccacaaaggaagtttgcttaccagtgtttgtaacctagtattgagcagctcatgatctatgcatgctgagtaatgtagatatatctattcctgggattgaaacaaaaaccacacgctttatttc

SEQ ID NO: 452977 - DNA, 420 bp, Sorghum bicolor
  unsure (1)..(420): unsure at all n locations
cgtccggtctctagtcgtctcttcgtggcaacctgcggcagcggtctgagcgcgttcatcgatcctattttcgattccatggcgtgcagcttctccccttcctcctccgccacgaggctccaggccgtggacgccgcggcggcggcggcggtgggggtgaagaacggcagggtccccctcaacctcaaggcttccgtcgcccccgcccagaggtcactcggactcggttgctgcagggcgaccgcgcgacaggaaggggctacacaggaacccaatgttgcagtttcttcggcccgtgcacagctggacctcctggaacaactgacgtccnctacacctgatggcattgctggcttagagaatggcgtgcctacagaatcgcgtcagcgtgctactatccgtcagcaattgtcagcacta

SEQ ID NO: 452978 - DNA, 1637 bp, Sorghum bicolor
cgtccgcccacgcgtccgagcgcccgcgccagaagccaaaaccctcccccgccccctgcaggctgcaaccgcaatgtcggcggccgggacgctctccggcggcgccgccggtctatccggcctcctccgcctccgccgccgggccgcccccgcccccgcgatcgccgcgccgtcgctccaccccgctgggaccatcaagtgcaccgccgtgcccgatgccgccccgattgtctggggccgccagctccgaccggcgctcctcctccccgcggcactgctcccgtcgtcgcagcccgccaagaagcacaatctgcgcccggccgccgcagccgccgagtccgcaggggaggccaagggtttcctggagaaatacccggccctggtcaccggttttttcttcttcatgtggtacttcctcaacgtcatattcaacatcctcaacaagaagatctacaactacttcccctatccatactttgtgtccttgatccatctagtagtgggtgtcgcatactgcctcgtcggctggagtgtcggtctccccaagcgagcgcctatcaatgccaatctcctgaagctgctctttccagtggcattgtgccatggtattggtcacgtcactagcaatgtgtccttcgctgctgttgcagtctcatttgcccacactatcaaagctctggagcccttcttcagcgcagctgctactcagtttatccttgggcagcaagttcccctctctctgtggatgtctcttgcccctgttgtcattggtgtttcaatggcatcccttactgagctttcgttcaactggactggcttcatcaatgccatgatatcaaacatctcattcacttacaggagcatttattccaagaaagctatgactgacatggatagcaccaacgtgtatgcttacatctcaataattgctctcattgtttgcattccacctgcaataatttttgaagggccccagctaatgtcgcatggatttagtgatgccattgcaaaagtaggtttgacaaagtttgttagtgacctagtcttggttggactgttctaccatctgtataaccagattgctacaaacaccttggagcgagtggctcctctgacacatgctgtcggcaatgtgttgaaacgtgtttttgtcattggtttctcaatcgttgtttttggcaacaaaatttccacacaaactggaattggcacgtccattgccatagcgggtgttgctttgtactcttacattaaggctaagattgaagaggagaaaaggaaaaagagcgcatgatgaggtgactgctgtgaatattatcgggtggctgagttatacctcctcggacacaacatcgtcgacaatctcgacctacttctatgccttgttttgttttcatcttgagtcagttggtccattgtttgttcccaatctggtgattaactctgcaaattctgtttgtggaattggcagtgatacaaatttcggttcttaagtaaaactggttgctggtactggtagacagtggtattcgcctgtaacttaatggatgcttggaataccgggtgtaccgtaatacaaagggcacaggactctgcctgactaaataaaacggtgaactttcaccctgcttccccgt

SEQ ID NO: 452979 - DNA, 637 bp, Sorghum bicolor
  unsure (1)..(637): unsure at all n locations
gtccgantcccggtcgaccacgcgtccgcgcccgcgccagaagccaaaaccctcccccgccgagtccgcaggggaggccaagggtttcctggagaaatacccggccctggtgaccggttttttcttcttcatgtggtacttcctcaacgtcatattcaacatcctcaacaagaagatctacaactacttcccctatccatactttgtgtccttgatccatctagtagtgggtgtcgcatactgcctcgtcggctggagtgtcggtctccccaagcgagcgcctatcaatgccaatctcctgaagctgctctttccagtggcattgtgccatggtattggtcacgtcactagcaatgtgtccttcgctgctgttgcaggctcatttgcccacactatcaaagctctggagcccttcttcagcgcagctgctactcagtttatgggggggcaggtagtacccctgtctttgaggatgtctctcgcccctgctgtcattgatgtttcaatggcattccttactgagctttcgttcaactggactggctttatcaacgccatgatatcaaacatctcattcacttacaggagcatacataaagaatctaagtagaggctccaaagtatatctaccatgttt

SEQ ID NO: 452980 - DNA, 485 bp, Sorghum bicolor
cgtccggactccacagcgcccgcgccagaagccaaaaccctcccccgccccctgcaggctgcaaccgcagccgccgagtccgcaggggaggccaagggtttcctggagaaatacccggccctggtcaccggttttttcttcttcatgtggtacttcctcaacgtcatattcaacatcctcaacaagaagatctacaactacttgccctatccatactttgtgtccttgatccatctagtagtgggtgtcgcatactgcctcgtcggctggagtgtcggtctccccaagcgagcgcctatcaatgccaatctcctgaagctgctctttccagtggcattgtgccatggtattggtcacgtcactagcaatgtgtccttcgctgctgtcgcaaacaaattcaaccaaactatgcaagcatgcatgcatgcatgcacgtaggatgttggactgtcatcatcaataaaagatgagtggggggggggcgc

SEQ ID NO: 452981 - DNA, 638 bp, Sorghum bicolor
attccaggtcggccacccgcacccacacacactcacacacgtctcaaactgacggcgacgatggctgtggtgagcaggaagacgtcgacgatggtggcagcagtggccgtggtggtggcgctgctgctggcgtcggcgtcgtctgcgtcggcggcgatcacctgcggtcaggtggggacggcgctggcgccgtgcatcccgtacgcgacggggagggcgagcgcgctgccgtcgtcgtgctgcagcggcgtgcgcagcctgaacgggcaggcgcgcagcagctcggaccggcaggcggcgtgccggtgcctcaagagcctcgccaacagcgtcaagagcgtcaacatgggcaccgtcgccaccatccccggcaagtgcggcgtctccgtgcctttccccatcagcatgtccaccgactgcaacaaggtcagctaaatgatgaaatctaccacgtaagtacataccagtgcacgtgatgaagctagcaagccaggaaaaataaaataatgttcggtggtaacatacaggaggattaatagcatgctgtatctatatagtattatgtaaccgtgtgcatcatgcactgtgcacatatacatggatatatatatatgtatgtgtggcttgcagtgcgacct

SEQ ID NO: 452982 - DNA, 616 bp, Sorghum bicolor
ggcacgagggtccagcgatggcgttccggctgagcaacaacctgatcgggatcctaaacttcatcaccttcctgctctcgatcccgatcctgggcgcggggatctggctgggccagcgcgcggacggcaccgagtgcgagcggtacctctccgctccggtcatcgcggtcggggtgttcctcctcgtggtctcgctcgcggggctcgtcggcgcctgctgccgcgtcacctggctgctctgggtctacctcctcgccatgttcgtcctcatcctcgtcctcttctgcttcaccgtcttcgccttcgtcgtcaccaataagggcgccggggaggccgtctccgggagagggtacaaggagtacaggcttggggattactccaactggctgcagaaaagggtcgagaacaccaagaactgggacaagatcaggagctgccttgaggattctaaggtctgcaagaaactgcaggacaagaacgagaccttcacgcacttcatatattgcgacctcttccccatcgagtctggctggtgcaagccccccaccatctgcggctacacctacgtcagcggcaccaactggacgacgcccgccaacgcgacggaggaacccgg

SEQ ID NO: 452983 - DNA, 584 bp, Sorghum bicolor
cgtccgctcgtccgctctctctccatccatccatccccgtccccgcgatcgccgagctagctcgatctccactctccagcagagtctagaagcacacgtccgtccggcggcttccgtcgtcacggaagctagctagctagacagcgcgcgccggggcccggacggccggtttctctctcggcggcggccatgaacgacgacgcctcctcgtctccggcttcgtacatcagactggtgcagcatctgatcgagaagtgcatctgctacaaattgaacaaggaggagtgcatggagacgttggagaagcacgccaaaatcatgcccgtcatcacatccaccgtgtggaaggaactggagaaggagaacaacgagttcttcgagacgtacaagaaggatcggggagtaggcccgaacacgaaccaggaagcggctactactactggtcatcatccttcgcgcgtccaacagagctgctgctcacaagagtcgacgacgacgatgctgcagcagaagaatctatctggcgaacaggaacagcgcgtcgtggagaaggagaagagggagttgttcgagacgtacaagaa

SEQ ID NO: 452984 - DNA, 586 bp, Sorghum bicolor
gcgggagtggatcaacctttttctccaaaaacaaaaaaaaaaaggttagaactcgcacaagttttgcaactatctaccaaattctcagagaacagagaagctttgctagccccaaggtgagattctgaaattaaaatggtgggtatcttggtgcagactgcagcagacgcaccacagtttatgacctgctttgcaacaaccaaagagatttggtggaaaaaaaaaacattggctcaagtaaaagtgttaagccaagccgggtgatctcacatgacctatacatccttctgttataactagatgagatcaccactgcggaaacaagggtgctttcaagtttatttcagctaacaaaggaatctatggtgaacgaaaccaactgtacacttgaatgtacaatgaaccagtgaaatgggaggtgagcctaaaggggatcagtaactcttccaagaggccgcctcagccagcactagacctgggcttgacgatcctacgctgtgtagaacgctgagtcttatagctgttctgactgatgagcgtgacacgacatatcttgctgacacgtggttgtgttaacacacttggt

SEQ ID NO: 452985 - DNA, 569 bp, Sorghum bicolor
ggcacgagggggagggtagcacctgatctcatctttcaccttcagaaccagagcaatggcatctgctactctcctcaagtcatctttccttcccaagaaggctgaatggggtgccatgcgccaggctgccactcccaagccggtgactgtctccatggttgtccgtgctagcgcctatgctgatgagcttgtccaaaccgcgaaaaccatcgcgtcaccaggaaggggtatccttgccatggatgagtcgaacgctacctgcggcaagaggcttgactccattggccttgagaacactgaggccaaccgccaggcttacaggaccctccttgtcagtgccccaggcctaggacagtacatctctggtgctatcctcttcgaggagaccctctaccagtcaactgttgatggaaagaagattgttgacgtccttaatgagcagggaatcgtgcctggtatcaaggtcgacaagggtcttgtgccacttgctggctccaacaacgagtcgtggtgccaaggtcttgatggccttgcttcacgtgaagcagcctactaccaggctggtgccc

SEQ ID NO: 452986 - DNA, 818 bp, Sorghum bicolor
ggcactgctgggtcaaggacccctggcgctccatgagctacgtgctgcgtgacgtcgtcgtcgtcctgggactcgccgcggcggccgcgcgcctcgacagctggctcgtctggccgctctactgggccgcgcagggcaccatgttctgggcgctcttcgtccttggccacgactgtggacacgggagcttctcaaacaaccccaagctcaacagcgtggtcggccacatactccattcctccattcttgtcccataccacggatggaggattagccacaggacgcaccatcaaaaccacggccacgttgagaaggacgagtcctggcacccgctaccagagaggctgtacaaaagcctggactttatgactaagaaattgcggttcaccatgccattccccctgctcgcgttcccgttatacttgttcgcaaggagtccagggaagacaggatcacacttcaacccaagcagtgatttgttccaacctaatgaaaagaaggacatcataacatcaacggcctcctggctggccatggttggtgttctggctggtctcacctttatgatgggtcctattccgatgctaaagctctacggagtcccatacttgggtatttgttgcttggctggatatggtcacatacttgcaccatcatggccacgaagacaagcttccctggtaccgtggaaaggaatggagttatctgcgtggaggactgacgacactcgaccgggactatggattgatcaacaatatccatcatgacattggaacccatgtcatccatcacctttttcctcaaatcccacattacca

SEQ ID NO: 452987 - DNA, 2168 bp, Sorghum bicolor
cggaacgtgcagtccatggtgtttggcaacatgggcaacacttctggtactggcgtgctcttcactaggaaccctaacactggagagaagaagctgtatggcgagttcctgatcaatgctcagggtgaggatgtggttgctggaattagaaccccagaggatcttgatgccatgaaggacgtcatgccacaggcttatgaagagctagttgagaactgcaacatactggagagccactacaaagagatgcaggatatcgaattcactgttcaggagaacaggctgtggatgttgcagtgcagaacaggaaaacgtacaggcgcaggtgccgtaaagattgctgtggacatggttagcgagggccttgttgagcgccgtcaagcgattaagatggtagaaccaggccacctggaccagcttcttcatcctcagtttgagaacccagcgttatacaaggataaagttattgccacgggactgccagcctcacctggggctgctgtgggccagattgtgtttactgctgaggatgctgaagcatggcatgcccaggggaaagctgctattttggtgagggcggagaccagccctgaggatgttggtggcatgcacgcagctgctgggattcttacagaaaggggtggcatgacttcccatgctgctggggtccgcccgtgggtggggaaaatgctgtgtctcgggatgctcagccattcgtgtcaatgatgctgagaagactgtagcgattggagaccatgtgctgagcgaaggtgagtggctatcgctgaatggatcaactggtgaagtgatccttggaaagcagccgctttccccaccagccctcagtggtgatttgggaactttcatgtcctgggtggatgatgttagaaagctcaaggttctggctaatgcggatacccctgaggatgcattggctgcacggaacaatggggcacaaggaattggactatgccggacagagcacatgttctttgcttcagatgagaggattaaggctgtaaggcagatgattatggctcccacagttgaactgaggcagcaggcactagatcgtcttttgccttaccagaggtctgactttgagggcattttccgtgctatggatggactttcggtgactattagacttctggaccctcctctccacgagttccttccagaagggaatgttgaggaaattgtgcgtgaattatgtgctgaaacgggagccaatgaggaagaagcccttgaacgagttgaaaagcttgcagaagtaaatcccatgcttggtttccgtgggtgcaggcttggtatctcgtaccctgaattaacagaaatgcaagcccgtgccatctttgaagctgctatagcaatgtccaaccagggtgttgaagttttcccagagatcatggttcctcttgttggaacaccacaggaattgggacatcaagtgaatgttatcaaacaaactgctgagaaagttttcgccaatgcgggtaaaactattggctacaaaattggaactatgattgaaattcccagggcagctctagtggctgatcagatagcagagcaggctgagttcttctcttttggaacgaacgacctcacacagatgacttttggctacagcagggatgatgtgggaaagtttattcccatttacctggctcagggtatcctccaacatgacccctttgaggttctcgaccagagaggagtgggcgaactggttaagtttgctacagagaggggccgccaaactaggcctaacttgaaggtgggcatttgtggagaacatggtggagagccttcatcagttgctttcttcgccaaggttgggctggattacgtttcttgctcccctttcagggttcccattgctaggctagctgcagctcaggtgcttgtctgagggtgctgagggtgcctcctcattcgcaaccggatgatcgcctgctgttggcgcatctggtgattaataatattgttacagagccatgatctgtgaagataattagtagcagggctcataaaagctacaattccatccctttttgcagttatgtaaaactttcaaactgtttatgctcaaaaactctgttcttcaatggatcatcaattatcgattaaaaaaaaaaaaaaagggccgccgttcttaaggatcc

SEQ ID NO: 452988 - DNA, 1253 bp, Sorghum bicolor
cgtccgccaccatccagtacctcatcagcaagggcgccaaggtcatcctctcaagccacttgggtcgccctaagggttttacacccaagtttagcttacgtcccattgtgggacggttgtctgagcttcttggcattcaggtgcaaaaggccgaggatgttattggccctgaagttgagaagctggtggacgccttgcccattggtggggttttgctcctggagaacggatgattctacaaggaagaggagaagaatgacccagagtttgcacagaagcttgcctccctagcagatctttatgtcaatgatgcatttggaacagcccacagggcacatgcatcgactgagggagttaccaagtttctgaagccttctgttgcagggttccttttgcagaaggaacttgactaccttgtcggagctgtctcaagccctaaacgcccatttgctgccatcgtgggtggttcaaaggtgtcatccaagattggggttattgaatccctgttggaaaagtgtgatatccttctcttgggtggtggtatgatcttcacattttacaaggcacaaggtctctctgttggtgcttcattggttgaggaagacaaacttgatcttgcaacatctctccttgcaaaggctaaggaaaagggtgtctcccttttgttgccaaccgatgttgtcattgctgataagtttgcccctgatgctaacagccagattgttccagcatctgcaattcctgatggttggatggggctggatattggcccagatgctgttacttcattcaacgcagccctggatacatgccagacggtcatctggaacgggcccatgggtgttttcgaatttgacaagtttgctgtaggaactgaggctgtggcaaagaagttggcagaacttagcgccaagggtgtcacaactatcattggaggtggagactctgttgccgctgttgagaaggtgggagttgctgacgttatgagccacatttccacgggaggtggtgccagcttggaattgttggaaggaaaggagcttccaggagttgttgcattggatgaagccatccctgtggctgtatgaagcaagctttcattttgtttcatctccatcttcacgtgccattgtatacttgctacattcttgcttgctcctcgtcagccgctctaaatgtaagagatcaatgtgtttatagagctactggaaatcgtttgaacaacgaaacaaataatatgtgcttaccgagtc

SEQ ID NO: 452989 - DNA, 471 bp, Sorghum bicolor
gcaaaactggaggccttttgctcccgaccattgagaggcggtgcacgtctcctccatccgtcattgtcatcggtggtggcatctctggcgttgcagctgcccgtgccctctccaattcttcatttaaggtgactgttttggagtcgagagatcgtattggcgggcgtgttcatactgattactcatttggatgcccaattgatatgggagcctcatggctgcatggcgtgtgtaatgagaattcattggcgccattgattggctatcttgggctgaggttatatcgcacaagcgatgacaactcagttctgtatgatcatgatttagaaagctatgctctctttgataaggatggtaatcaggtcccaaaggagacagtcgataaagttggagaaacttttgagagaattcttgaagagacggtgaaagtgcgtgatgagcaggaacatgacatgccacttctacaggcga

SEQ ID NO: 452990 - DNA, 808 bp, Sorghum bicolor
  unsure (1)..(808): unsure at all n locations
cgtccgcacattccccagcgcaccttggtttaaaccttggtactggtggtcttggccggtcttgccattaggactttcctggcacaagcagcgctgggacgatcttgggtatgctgctgaaatgccagtggttctgatggaggttttaatgtacatagttatcataacagtcaccagattggcaaggccagggatgaccaaactgtgttataaccgacggcctgagaagcaaagtgccctggtgcagtggctgatcaagctggctgcaattgtggctatggtggctgcctattccattccattctttgtgatcccacgcacagttcacccgatcatgggctggtccatctacctatttggtgcccttgccttgtcagtgctcgttatcaatgtttttctgctcccaccacttgacgtgcttacaacgtggcttgcgattgtcggcatgctcttcgttatggcattcccatggtaccatgatggtgttgtgagggctctggcagtctttggatatgcattttgctcagcgccattcttgtgggcatccatggtgaggatgatggactcagtgcagacgatgctggagagggatccattcttcccccggattggtgaaccagctcaggagactgaattcagccaagctgttctgattcttttatgcacagatttgagatgcttcgtcaccatatgaacagctgatccagatcagtttattctcgattgattctggtggttnttgctcaggcattccattgtgtactcacagtaatgtataaacattgcctgccgcaaccatgattgatgc

SEQ ID NO: 452991 - DNA, 505 bp, Sorghum bicolor
cgtccgacgcagcaccagtaccagcgacagcaccagcaacagctgtgggttcagcacaagaggggcgaggaagacgcgccgctgcatttcttggacgacgagcgcggctactccggcggacatggcgaccaacagcggcagctccctgacgaagctggcgccgctggaagccatcctgttcgacatcgacggcacgctctgcgactccgaccccatccacttctgcgccttccgagagctcctgcagcagatcggtttcaacgacggtgttcccatcaccgaggagttctacagtgccaccattagtgggggacacaacgacgacctcgctagggcgctgttcccggacatggatcaccagaaggcgatgcagttcatggatgacaaagaagctctattcagaaagttggcaccaggacagctgaaggccctggatggactgcacgagctgtgccgatggatcgagggccgcaacctgaagcgcgcggcggtgaccaacgctccg

SEQ ID NO: 452992 - DNA, 812 bp, Sorghum bicolor
cgtccgaccttttataataactgaaaatggagtttctgacgagactgatctgattcggaaaccatatattctggagcacctgttagccatttatgctgcaatcattatgggtgtgcctgtgcttggttatctattctggacgatgtcagataattgggaatgggcagatggctatggtcctaagtttgggcttgtggctgttgatcgtgctaacaacctagcacggaaacctaggccttcatactatttattctccaaggttgttacaactgggaaaattacaagacaggacaggctgggtgcttggagggagctgcaacaagcagcatttcagaagaaaacacgcccatttttcagggcagtagataaacatggtcggatgtatgctgggggtttagatcggcctatccagagaccattcatattgcgggattggcgatttggtcattatgaaatggaaggcttgcaggatcctttcagtcgctttataagatccattttttcaccaattttgcgcaagaagaagattcattacattgagtatgaggatatttcttatgctatttccccctgatgcttgttactctagttggtgagtcaagagaatttcagaatctgttttttccctttctatatcatctatctaaatttgcttactcttgtttctgtaggtaagtagcatgatttgtcctctagataaagtaaacaaaaagtcctgtgaagcagaagtttctcttttttgttgataaattgcaatgtgcactatttatcctggcagtaagtatcttatatatatacctttcttttatttt

SEQ ID NO: 452993 - DNA, 400 bp, Sorghum bicolor
cgtccggccagagcaccagattccgttcccctgaacccgatcgagatggagtcggaagctgacagggcggcggcgccggcgccggcgccagcagtcgccgcggagaccagcgacgacgccatccaggaggagtctccagcgacggccccttcctcagacgggaagcccggatcaggggcggcgccggagctggaggtgcagctgttccggcgcgggcgtccggtggccgtcttccggtcgcagctgggcgggtatacgcaggaccagctggaggtgggcgacatcctggagcagcacggcctcaagtccgtcttcgccttcgaccccggcggccggaaaccgcgggggtcgcattcggttcaacccccggaacgggcggttccttcttaactaagcccct

SEQ ID NO: 452994 - DNA, 835 bp, Sorghum bicolor
cgtccgacgagccgtttaaataggtgtcaagtggaagtgcagtgatgtatgcagtctgaggttgaggcgacccagaacctgaacgccatgaaccagagccccaacccgtggcatgtgtcattctcctacgctagggcgctgcagaacacctgcctcaagacatggggaggcaggcctgagaacgtgaaggcagcacaggacgcgctgctgctgcgcgccaaggccaattccctggcacagctcggcaagtacaccggcgatggtgaggccgctgccgccaaggagggcatgttcgtcaagaactacagctactaagacgatgataccactgctgctagtacgttcctcgggggcactgtaggcagtctgccattacaggttcagctggaaaagtacactgcaatttcactactaccttgaggcctgattacatttcatttggaggaattggaatctacttagtggactaggctatttggcttggaatttgacattccacaactttcaaagttgacatataagcctatctcaaattcatagggtcgaagatataaattgattctatatagatcacagaaacttgtagcatgctcttcggctcgctcccctactatagaatgcagcacataggtatctgtatctcccccctatggccaacggtcgtatacaatagggaaatcactttcgtggcactttgtttctttcgctgtgtcttgtaaacattttgtcactattcagttttcgttattgagtagtgaaatcactttcatggcactttgtttctttcgctgtcatggagatcaattggtgccatgtgtggccaatttgctcttgt

SEQ ID NO: 452995 - DNA, 497 bp, Sorghum bicolor
cgtccgcccacgcgtccgcggacgcgtgggtggagcccgaaatccttcttgatggtgagcatggcatcgagaggaccttcgaggtcgcacagaaggtgtgggcagagaccttctactacatggctgagaacaatgtgatgtttgagggcatcttgctcaagcccagcatggttacccctggtgctgagtgcgaggagaaggccactcctgagcaagtagccgagtacaccctcaagctcctccacagaaggatccctcctgccgttcccggcatcatgttcctgtctggtgggcagtctgaggttgaggcgacccagaacctgaacgccatgaaccagagccccaacccgtggcatgtgtcattctcctacgctagggcgctgcagaacacctgcctcaagacatggggaggcaggcctgagaacgtgaaggcagcacaggacgcgctgctgctgcgcgccaaggccaattccctggcacagctcggcaagtacacc

SEQ ID NO: 452996 - DNA, 535 bp, Sorghum bicolor
cgtccgcccacgcgtccggttaatatggaaattctttcaaggttttcccttactttgtccggtcaacaaacaattcgaaatacctcgactttttcagaacaggtccgagtcaaatagcaatgattcgaagcacttctttttccattacactatttcggaaacctaaggactcgatcgtatggatatggaaaatacaggatttccggtcctagcgggaaaaggagggaaacggatactcaatttaaagtgagtaaacagaattccatactcgatctcatagatccctatagaattctgtggaaagccgtattcgatgaaagtcgtatgtacggcttgggagggagatctttcctatctttcgagatccaccctacaatatggggccaaaaagccaaaaaaataagggattcgtttgttgcctttataaaaagaaaacggattcttgaacctcttttacgctcatgtcacgttgaggtactgcagaaaaaagaaccgcaaaatccgatccaatttttcggaatcgtttaggtaacat

SEQ ID NO: 452997 - DNA, 414 bp, Sorghum bicolor
cgtccgcccacgcgtccgcaagaactaccagataggcaaacggaacggaagaatcacagagagctcacaaacacatcttgcgtcagagatgagcagcagcacaacactgctgttctccccgagctcctcctccctgttcctcaccaaaccgtctcccgtcgccaaggggagggcggcggcggcggcggctgtgaggtgcagcagtgagccctccgtgtcagtgggacatgaagaggagagggagggtgtaacaatgggggggaggaggccagcattggcttctgcagctgctgctgtctgtagcgctcccagtgctggggtttgcacgccttggtctggcagccactcagggcctgctggcagggaggatccctggcttgtctgaacctgatgaaaatggttggagaacatacc

SEQ ID NO: 452998 - DNA, 556 bp, Sorghum bicolor
cgtccgcctgagtctctcctctgctatagctaggtagctacggccctttggtccccggctagcttcttcttcattcgaccccacgcagcagcaggacgccagcagcagccagcagccatggctgccgtgaccgcggcggccgtctctctgtcctcctcgtcgtccccagctgctgctgctgccaaggccaaggcggcggcgtccccgtcgtcgccatgcagccacctccagttcctatccttgtacccgcagcggcgcacccgcgcggtgcggatgcgggtgcaggtgtccagcaccgagaccgcggaggcggaggcggtgaagaaggagaaggtgtccaagaagcaggacgagggcgtcgtcaccaacaagtacaggcccaaggagccctacgtcgggaggtgcctgtccaacactaggattaccggcgacgacgcgccaggggagacgtggcacatggtcttcagcaccgaaggcgaggtcccctacagagaggggcagtccatcggcatcatcgctcactgcgaggacaagaacggcaagccgcacaagctga

SEQ ID NO: 452999 - DNA, 617 bp, Sorghum bicolor
  unsure (1)..(617): unsure at all n locations
cgtccgatcctttttttaacttagcatggttgcacaaaagctttttctagattgatgttgcactgttgacaaagatgaaacggttacctatatttatatacgttaccactattacttgttacaaacgcatattatagaatcgtatgtgaacttcaatgctccagtatggtttatcgtcgacatatgacagattatatgtggccccctgcttacaactctggatgaataaacatctacggtcctattgtcttgtactggatttccttttgcgctataattgacattagtttatgctcttttctctttcagcatgcagtcatggatatcatgtgcaaagtcgcaggtacagatgttcagatatcataaagctgtaggagatcaagagttatatttttgaatcactacatggaaggcacgactcccctagaggactctgttctagacatcttgtgataagtgtgagttttagttatctntttggaacttgtgcagacaaagctaaatcttctgaatttcgtaatgtgattatgtgatatctatgtgctgtttgaagaatagatctgataaggtaaggatatccctngntcatgtatgggttgtggctctattttggcatt

SEQ ID NO: 453000 - DNA, 526 bp, Sorghum bicolor
cgtccggctgtggagacggacaccctgcgcgactgggaaacggtcccggcccgctgcgagaagtacgtcggcaactacatgctcggcgggcagtaccgcagcgactcccaagccgtcgtcgacgaggccgtcgcctacgccgagggcctgaagctctccggcgatggcaaggaggtctgggtgttcgacgtcgacgagacgacgctctccaacctcccctactatgctgagcacggcttcgggtctgagccgtacagctcgacggccttcggcgcgtacaccaagttggcaaacgcgccggcgttgccggagacgcagcggctgtacaagagactgcaggagctgggcatcaagccggtgatcctgacggggcgacgcgaggacaagcgggagtccacggccaagaacctcgccgatgtggggtacaccggctacgagaagctgctgctcaagcctcaagacgccagggtgactgcggtggagttcaagtccggcgagcggaagaagctggtggacgccgggttcg

SEQ ID NO: 453001 - DNA, 794 bp, Sorghum bicolor
cgtccggctctggtcagcatgcgtataggcggtggacgacagacgggaccgctagcgggacatgggaggggaagggaatggaagaggagccggggaggctgagctacatatggtcgccattattacacacgctatgactatgagaatgttgacgctggggctgctaacgagcttatggcaaacctagtaagcatgcagtcatcactttctgatgtcaacaagctgatcaaggagatccggtctgatgtttctgaagtagttgcagctgacgagtttgagtacaaggatcctgttgatggctctgtgtccaagcaccagggcatccggtacctcttcggagatggttcgcgactggtgttccgcctctctggaactggttctgttggtgccaccatccgtgtctatatcgagcagtacgagaaggattcctccaagatcggcagggattcacaggatgctcttgctccgctggttgatgttgcgctcaagctctccaagatgcaagagtacactggccgctctgcccccaccgttatcacataaatttttgaagagagattctttagaatgagctgaggcgcgtacacaaacttccattccggcctcttgttctatagtttttcttccttgttgcatctcaccgatgaataaaatgtatgtaccagactcgtctcgtttttttgcccatactgcagagtaagccgctggctcagcatgcggtaataatcttgtcagtgttgtaattgggagcgcgtttcttctaatcttgttggaagtgtttctggtttgtttga

SEQ ID NO: 453002 - DNA, 686 bp, Sorghum bicolor
cgtccgcccacgcgtccgattcttggtgacaccatcggactctgttgccattatcgcagccaatgctgttcaatcaattccttactttgcttctggcctgaagggagttgccaggagcatgccaacatctgctgcccttgacgttgttgcaaagaatttgaatctcaagttcttcgaggtgcctactgggtgggaggtttttgggaatttgatggatgctggaatgtcctcaatctgtggtgaagaaagctttggcactgggtctgaccatattcgtgagaaggatggcatctgggctgtgcttgcttggctttctattattgctttcaagaataaggacaaccttggaggagataagcttgtcagtgttgaagatattgtccgtcagcactgggctacatatggtcgccattattacacacgctatgactatgagaatgttgacgctggggctgctaaggagcttatggcaaacctagtaagcatgcagtcatcactttctgatgtcaacaagctgatcaaggagatccggtctgatgtttctgaagtagttgcagctgacgagtttgagtacaaggatcctgttgatggctctgtgtccaagcaccagggcatccggtacctcttcgagatggttcgcgactggtgttccgcctctctggaactggttctgttggtgccaccat

SEQ ID NO: 453003 - DNA, 809 bp, Sorghum bicolor
aatccagtataatcaataccacaatataacaagtttgcaaatcttgcttcgtttacagtatcgacaaccaaacctcataccgatacagctttcaataacgcttcaccagctagagtcatgcatcgcgactaaatgatatgcttacaggaccttattaccaaataccacggtgggagcttcatcatttcataatagagtttgcatctgaccgaaggttcacggccctccacaggtcccttcaaaggcgaaccagcttcagtgagcccgctcccggagaacctcattgtccacctctgtcgggtcggtcgcctggatctcgtagtggaacccgtcgcgctcgtgcttgatgcggtcctttgaggtggagtacagcatcttagcacggatgcgggatgtcgatggggaccaggcaatgaagaaaatcttgcttttctgcacgttctccccagtaacaaaatcaaaatcatagagagcatatcggcagtcattctctgggagagaggccaaaaagtcatcatagctttcagtagtagcccctgtcttctccacaaccacctgcttctgcttctcttcgattttgaagatgacatatcggtatgccttcttcatttggagctcgacaaatgtctccctaatgttaggagcaactcccatgccggaagatgcatttgagtgggagcgcatgaaggccatcggatcggggtggtgcgagcgcccgcgcccgcctctgcgtcgatcgcacgcacgcagacgggaggcgcaagcaaaggagaactggagaagagaccccccctcctcctctccgcacg

SEQ ID NO: 453004 - DNA, 700 bp, Sorghum bicolor
cgtgcgggaggaagaaccttggcccgacaccatgctcccaatggccgtgcaccccacgaccacgccggccttgtccccgcgcgcccgcgtctccccgcccaggccttccacctccctggccgccacctcgtccaccccctgctctcgcactgtcagtttgaagagcagcaggctgcgacttcgctcgctccgaagcgtcgtcgccgccgccgccgccgatgccgtcggggcagaggaagaagaggttcaactaagtggaggtgtggacgcggtcgacgaggaggaagcggagaataaggtggtggtgcctgagagacaggacccgatgctggtactcaaattcatctggatggagaagaacatcggcatagcacttgaccaattggttcctggctatggcagcatcccgctaagcccatactacttttggccgcggaaagacgcgtgggaggagcttagagcgaagttggaaagagaaagagtggatctcgcagaagcagatgatcatccttctcaaccaggccaccgatatcatcaacctctggcagcagggtggcgggagcctgtcgacatgagttgcaagcttgcattttgttggtttcattacatgccctctctgttgttgatgttaaagtcatggtacgtggccttgtaaatcggttcaatctgttctcacgttttttttcccatggaaacgaac

SEQ ID NO: 453005 - DNA, 787 bp, Sorghum bicolor
ccgggcgaccgcccacgcgtccgcgactttgtacaacgccctttgatagatatttgttcttgagcttcttcgtttttgcaccaaaagacaagcaggatgtcttgcagctgcggatcaagctgcaactgcggctcaagctgcaagtgcggcaagaagtaccccgacctggaggagaagagcaccgcggcgcaggccaccgtcgtcctgggtgtcgccccggagaagacagctgctgccgagttcgaggccgcggcggagtccggcgccgagacctcccacggctgcagctgcggtgacagctgcaagtgcaacccctgcaactgctgatcgaccgacgaccacacatggggaacgaagaccgacgatatgcatgctgctgcttatttgatggtgatatcgatcttgtgccggcgacgtacggtactactagctactacactacatgtagtgctctgcaattgtgttattgtgtgtgacgtatgtaactgatggttgaacaataaggacgagctagctatctgctatgtatttcgatctggctcgccagcatgcatatatatgcgatctatatatctgcccttgtgtgcctgatcgagagagagagtatacctcttttgcttattggccttggcgtcagtcttgtgctcttgcatttaattatgtgcatgtgtgtgtactgtgtatccatcttgtgctcatacatcgatctctatgtgtctctgtacgtaatgacgatatgatttcgtccagggtgatttatatataaaactggtatggtttatttgcc

SEQ ID NO: 453006 - DNA, 516 bp, Sorghum bicolor
cgtccgaacagaaggacaagatcgaggtggccgtcgccgcaaagttcgctgcccttccttggagatttggaaggggtagtgttctttccgcgctgaagaaatcactagaccgtcttggcctatcgtcagttgagctctaccaactccactggccagggatttgggggaacgaaggataccttgatggtctcgcagatgcttatgagcaaggcctagtaaaggctgttggagtctcaaactacaatgagaagcgccttcgggacgcgcatgctcgcctgaagaagaggggtgttccacttgctgcaaatcaggtgaattacagcctcatatacagaaccccggagctgaatggtgtgaaggcagcttgtgatgagctcggtatcaccttgattgcttattcaccgatagcccaaggtgttctgacaggtaagtacactccagaaaagccccctactggtcctcgagcaaatacatacacccctgagttcctcaccaagctccaaccacttatgaaca

SEQ ID NO: 453007 - DNA, 638 bp, Sorghum bicolor
tccgaattcccggtcgaccacgcgtccgggctgataggcttgctggagtctttccagaacacaagtatgagatcgtgaaacgcttgcaagcaagaaaacatatatgtggtatgactggggatggtgtaaatgatgccccagctttgaagaaggctgatatcggtattgcagtagcagactccaccgacgcagctcgtagtgcttctgacattgtcctaactgaaccaggccttagtgtgattattagtgctgtgctgacgagtcgggcaattttccaaaggatgaagaattacacaatctatgctgtatcaattaccatccgtattgtgcttggttttatgcttcttgctctgatatggaagtttgacttcccaccatttatggtcctgatcattgccatcctcaatgatggtaccattatgactatctcaaaggacagagtaaaaccatctccacaacctgatagttggaagttagctgagatttttgcaactggagttgtccttggtggttatttggccatgatgactgtcattttcttctgggcagcgtacaagactgacttcttcccgcgactgttccatgttgaaagccttgagaagactgcccaggatgattttcagaagcttgcgtccgct

SEQ ID NO: 453008 - DNA, 486 bp, Sorghum bicolor
tcccggtcgaccacgcgtccgctcaaggatgttggcactagcatgggaaagatatatgaacttgggggccctgaaatttacactgtccatgagctggctgagctgatgtatgagacaatccgtgaatggccaagatatgtcaatgttcctcttcctgttgcaagggctattgcttccccaagggaaatgttgctgaacaaagtgccgttccccctgccaaccccttccattttcaacctagaccagatcaatgcattcgctgtggacaaccttgtctcagaagatgctctcactttcgaagacctcggcatcatgcctcagaagttgaaggggtacccggtggagttcctcgtgtcgtacaggaagggtgggccatcgttcggctcaactgtgagcgagaagatgaggagctccgagatgtatgccccgcgtcctgtctccaaagacactgtagattcatgatcatttaactgcagatgccttggt

SEQ ID NO: 453009 - DNA, 616 bp, Sorghum bicolor
agcggtttgtctactgcactatacttgatagcattgcgaaggtgactggcatcataaaatttgatctgcatgctgaaccggagagtggtaagaaagaacttgaagtgggaggaaatatacaaggcatatatgacctgggacctggtagattcggttcagaggcgatttttgttcccaagcagccaggtgtatctggagaagaagatgatggctatttgatattctttgtgcacgacgaaaatacagggaaatctgaagtaaatgttatagatgcgaagacaatgtctgctgatccagttgcagtggttgagcttcctaatagggttccttatggattccatgccttctttgtaactgaggaccaactggctcagcaagcggaggggcagtgaagatacggatacatcacctgtcagactctgcacacgtgggtacacgttgaaaaatattgtaggatctaaactcagaaacggcaatgtatatgtatttgtctggtaaatacagtggagagccaagactactcattaaactctcaaaaatcaatgggttgatataaagaccccttcacatatgtatgtatatatatgtcagggttattatagtcctgatcgatcac

SEQ ID NO: 453010 - DNA, 674 bp, Sorghum bicolor
  unsure (1)..(674): unsure at all n locations
gcgtccgagaatctggactgaattggtggaactctctttgtgatgttctaacaaacttttatctcttcaataatgcagtgttatgcagagaagcaggctctgggtgaagtgagccaggagctgctggacactcaggtgaacccagccgtgtgggagataagtggccacatcgtgcctgaagcggaggagcgactatgaggaggcatctgaaacctctgcgtggaagctcctcgctgaggtctccctctctgaggagcgcttcgaggaagtgaaggcgtacatcttcagcgctgctggcctggttctgtctgacgaggaagaggaggaagccagtgagggcaagggcaccaccacctttgctcctgtcccagtttccccaatgcctgtcgctgaaggctgcctcgtccaccagtgagtccgtggactggctgttgtgtgttcccggtctcctatagctgtgccgtaataaaggtccgttggcacggtatatgcttgcgagcccttgtgctctgctgctactttgctctcgtttgtgtcctgctgctctcgtggtgaactcggtaattcagtgctctgccatattaagccgaggctattggattggttgggtcggttgttaattattactagaactaaatgaaatgtgataaacattactagatcaaaannaaaaa

SEQ ID NO: 453011 - DNA, 1133 bp, Sorghum bicolor
  unsure (1)..(1133): unsure at all n locations
cgtccgggcaaagcgctcgcaggagggtgctgcttcaaccaagctgcttgttgatatcctccttagcgagtgggaagacaggatggcccgaggcttattccgctatgatgtcactgcctgtgagaccaaggtcatccctggcaaccttgggtttgttgcacaactcaatgaagggcgccaccttaagaagcgccctactgagtttcgtgtggaccgtgtgctccagccatttgaccctgccaagttcaatttcaccaaagttggccaggaagaggttctcttccaatttgagaatggtgatggtgatgacagctatttcctgaatgacgctccaatcattgctgttgatcgtgctccaaatgttgttgctatcaatgtgagcccaattgaatatggacatgtgcttctcattcctcgtgttctggaccgcctgcctcagaagattgatccagagagcttcttgcttgcactgcaaatggcagctgaggcagctagcccttacttcaggcttggttacaatagcttgggtgcctttgccaccatcaatcacctccactttcaggcatactacttgtcagtgcctttccctgtcgagaaggcagctaccctcaagatccctctttctgaggacacaatgaagaatggagtgaccgtgtccaagctgataaattatcctgtgagaggcctggtatttgagggagggaacacactggaggacctggcaaatgtggtttccaatgcttgcatttggctgcaggacaacaatgtgccttacaacgtgctcatttctgactgtggaaagagggtcttcctgttcccccagtgttatgcagagaagcaggctctgggtgaagtgagccaggagctgctggacactcaggtgaacccagccgtgtgggagataagtggccacatcgtgctgaagcggaggagcgactatgaggaggcatctgaaacctctgcgtggaagctcctcgctgaggtctccctctctgaggagcgcttcgaggaagtgaaggcgtacatcttcagcgctgctggcctggttctgtctgacgaggaagaggaggaagccagtgagggcaagggcaccaccacctttgcttctgtcccagtttncccaatgcctgtcg

SEQ ID NO: 453012 - DNA, 601 bp, Sorghum bicolor
cgtccgtttcagtttcccactctgagggagccaccacaaacatttcttgcaactatggaggagtatgtgaaggaggctccacgcatggtcccagttcgggaacccctggaacttcctgagaggcttcttcttacatacaaacctgaagaatcagaggaaattcctgagcctgctcctgttgaagaggagaaggcaccagttgaagaacctgttccggtaccaccagttactgaagttgtttcatctcctcccaagactgaggtggccgatactggtgacttactgggcttagacgatccaaatcctgctgtatcagctatagaagaaagcaatgcacttgccttggctattgttccaacagatggtgcttcaacaactagtaacactgcatttcaagataaggggtttgatgctacaggatgggaacttgcccttgttaccgcaccgagcaacacaacttcatcttcttctgttggtcaattgggtggtggattcgacaagctcattttggacagcctttatgatgacggggcctacaggcagaggcaacagcaacagcttgatggttcaacagcacctaatccattcatgacaaatgatc

SEQ ID NO: 453013 - DNA, 533 bp, Sorghum bicolor
cgtccggcttacgtctttgacgttatcagagcaagcgttcccaagctccatttggacgatgctttcgagcagaaggacgagatcgcaaaggctgtggaggaagagcttgagaaggccatgtcggcttatggctttgagatcgtgcagactctcattgtggacatcgagccagatgaacatgtgaagcgcgcaatgaacgagatcaacgcagctgcgaggctgagggcggctgcaaacgagaaagcagaggcagagaagattgtgcagatcaagcgtgcggagggggaggcggaagccaagtacctgtctgggctgggtattgcacggcagcggcaggcgatcgttgatgggctgagggacagcgtgcttgggttctccgtgaacgtgccgggcaccaccgccaaggacgtcatggacatggtgctcatcacccagtacttcgacaccatgaaggagattggcgcatcatccaaggcttcatcagtgttcatcccacatggcccaggtgcagtgcgcgacatcgtcacgcagat

SEQ ID NO: 453014 - DNA, 970 bp, Sorghum bicolor
tcgcgtccgggaaggcttgggcttccactgtaccgcacgagtggagatgattctgtgctgtttgatcatgatctggagagttatgcactctatgacactaatggacgtcaagtaccacaagagttggtagaaaagattgggaaggtgtttgagaccatactggaagagactggcaaattgagggaaggaaccaatgaagatatgtctattgcaaaagccattgcaattgttatggatagaaatccacacttcaggcaagaagggattgctcatgaggtccttcagtggtatttgtgccgtatggaagggtggtttgccaccgatgctgattcaatttcactacagggttgggatcaggaggtgctgctgccaggtggtcatggcctcatggttcgtggatatcgtccggttataaatactctggcaaaaggcttagatattcggctcaaccataaggttgtggaaattgttcgccacaggaacagggtagaggttactggaagcagtggcaaaacatttgttgcggatgctgcagtggtcgctgttccgttgggtgtcctgaaagcacaaaccattaaatttgagccgaggctgccagactggaaagaagaagcaattagagaacttacagttggaattgaaaacaaaattgttcttcacttcggccaggttttctggcctaacgtggagttcctcggcgtcgtttcctctagcacgtatggttgcagctatttcctcaaccttcacaaggcaacaggccaccctgtccttgtttacatgcctgctggccgccttgctcgtgacatcgagaaaatgtcagatgaggctgctgcccagtttgccttttctcagttgaagaagatccttcccaatgcagctgagccggttagtttgttgacgatatcttcaactactacagtaatgaaagaatcctgctatagagcatttcttttcttacagcctatgctga

SEQ ID NO: 453015 - DNA, 574 bp, Sorghum bicolor
cgtccggagcagcgcgccttaaccattttgccagagcatttaaggagcgagctcagtcagacttgaagaaagctgcagacaaacattggagtgacggtgctttggaggcagatctgcgacgagctgacttggttgttaaacgacgtgccatggaagacgctttcatggcattgaagtttgttcaggatattcatgacatgatggtgaacagattatatgagcagcttccaaaggacggttcatcttctcgtacaaattcaacagggtttattacacttgagaagaatgggaagactcttgaactgtttcctggggaagtttctgctgatcagatttatgctatagaggaagcataccagagtatggcatctgccttttctgaagctgatggtattgactacacagatcctgaggagcttgaattggtagtagcaactctaattgacctggatgccatggatgggaaaagggagcgtttccttgattgctgaatgttcaagctctccagatgttaatactagcgaaagcctagctaatgcattggctacagctccatcgatgtggacctttggga

SEQ ID NO: 453016 - DNA, 342 bp, Sorghum bicolor
cgtccggtgcaagcaatgcaaatgccatgcgccttgccggggcgaggtcgagcctgccgccgctggactggccgaagcgtctgaagatcatcaagggcgtggcgcgcgggctggcgcacctgtacgaggagctgccgatgctgatggtgccgcacgggcacctcaagtcctccaacggcctgctggacgccacctgcgagccgctgctgagcgactacgcgctggcgcccctggtgacgccgcagcacgcggcgcaggtgatggtggcgtacaagtcccccgagtgcgcggcggcgcatggcgggcgtgccggccggaagagcgacgtgtggagcctgggca

SEQ ID NO: 453017 - DNA, 526 bp, Sorghum bicolor
cgtccggaacaatgtttctttcctttgtttcttcatgctaggaaagctggaagagtgtcttcagttgctaatagaaagcaaccgtattccggaagcagcattgatggcaagatcttatcttcctagcaaagtccctgagattgtagcattgtggaaaaaggatctccagaaggtaaacccaaaagcagcagagtcgctggctgatcctaatgagtacccaaacttatttgacgactggcagattgctctcaatgtagaagctgttgttgccccgaaaaggggtatctatccaccggccgaggagtacatgattcatgctgaaaggtcaaatgagagtttagtggaagcttttaaaaatatgcatgtacatgaagagatggtaccagatgataatgaagatactgttcatgaggttattgaggatggtggagtagaagagagtcaagaagatgctgttgagggtgatgcagaggatgacggagtagaagaagaaagtcaagacgaagcttgtgaggttgaggctgag

SEQ ID NO: 453018 - DNA, 774 bp, Sorghum bicolor
cgtccgagatacgccgacgcctccagccaaaaaaccgtcaccacacacgagaccaaatcttttcctcccacccaacaccagctcgtcgatcgagcgagcgagtcgtcgcctcgccggccgaccggcggtatatacacaaggaagccaaggaaaacactcctccctcgcttccttccttccttctctagctaccatatatcccaaagctatagcttgcgacttggcaaccacttgtacaagttgggcgggctacacgagattcaagccgggatggtggcgccggtggtgatcgcgtcggcggggctgggcatgctggccggcgtggcgatggccaaccggtcccttgggggggaccgggctcccagcggcgtccaggttggacgcgcgcccgcgctgcgccacgtgcggcggctccggccgcgtcgagtgcatgtgcaaccgctggtccgacggcgactccggctgccggacctgcgcggggtccgggaggatgccctgccgcagctgcggcggatccggcacgggcaggccgctccccgcgcgtctcatcgtccagcaccagaagccgccgccgccgccgccggcccgccacaactgatgatggaatatgattgtcgcaggcgaggtgaaagtgcaacccatccgagaaatcagttaaacgtactgcgatatttatcatcctctagctagctagtttaagtatatatgtatgtatacgtccgatccattcgtgtggatgatatgcatatgttgtatactaatgaagtacatgtc

SEQ ID NO: 453019 - DNA, 1144 bp, Sorghum bicolor
  unsure (1)..(1144): unsure at all n locations
cgtccgtggggttctgacaaacgctgctatcctccttttgtacttctggaaatacttgtcggtggagaaggatcaggagggtgggcaagccacaggaccagaggtggttgccgacgatgaggttacttctcatcggttcacaccggctagaatgtcacatgtttcttctctgaatccagatgatgaggattgcataagtgaaccaatcatcaggagcaacagtgtcagatctagtgtgaatgagaacctgagaagcagaagcgtcaattctgaggctgacattcagcttgccatcaagtctctgcgggcatcaagcatgtcgcatgaggtggtagaggtctcgacagtccctgatcggaaagatgaaggtgcatcctcaaggaagttcacaagaagtgctagccagcaaaggagtgtgataatagaggatttggcacccgccccagagatgaatggggaaaaggagaaagaaactgaagttgcagagaagagatggaaaatacttgtctggaagactgctgtttatcttatcactcttggtatgctcattgcacttctaatgggactgaacatgtcctggactgcaatcactgcggctcttgttcttctggcacttgattttacggatgcacaggcttgtcttgagaaggtgtcatactcactgctgatctttttctgcgggatgtttatcactgttgatggattcaataaaacgggcataccaaacacactatgggagttagtggaaccatattcacgaatcgatagtgctagaggtgttgctcttcttgctgtggtgaggctcatcctttcaaatgtggcctctaatgttcctacagtcctgttgctcggtacaagagttgctgcatcagctgctgcgatttctcatggttcagagaggaaagcctggctcatccttgcatgggtcagcaccggggctggcaacctcacccttctcggttctgccgcgaatctgattgtctgcgagcaggccaggcgtgcccagttcttcggctacaacctcaccttctggagccacctccnattcggggtcccgtcgaccatcatcgnnacggggagtgggctactcatcnnncatcagtactgaagcanctgaagggggaaaaacattttgccgagaagc

SEQ ID NO: 453020 - DNA, 633 bp, Sorghum bicolor
cgtccgagaaagagctgattaagaatctctacaataaacttcaactagaaaaacaggccagcaaggagaagatatcatttggtcgatttgaagtccatgagcttgccgtcttcttccgaaacccggctgggcactatgaggcgatcaatcggaactgctcaaactactacctgtctgaggaatctgtcgccttgttcactgagcaccacccggtgcacccagcatacataatcgggcagatcgttcacattgagcggcgcatagtgcacccaggtcagatgggaggagctccacgccgtgatagcagtggtggccgtcggtcgcccgcatccatgctcaacccctacaaccttcctgggggctgtgagtacttcgtggtgactgttgccatgctgcctgatgctgcccgttgaaacaaaacaccttcctgatcctgcctgacaattggctgctgaaatgaagggagaaaattgtcaactgtatatatactgaaatttattgctatagactctcgattctcagttgcttcctcaagttatgtttgtatatatgatcatcttcacggtgtaaatagactcggctactgatgctagacatctcttcgttcaagcagactgaacattctttcagcta

SEQ ID NO: 453021 - DNA, 604 bp, Sorghum bicolor
cgtccggcgcgttttcagtcggcagcccgtgactacagcaccttcagaccacttggtccataagctcctcagcgccctaataaaggaccagaggtggatccgtgctgtgcttcatatcgccgggcctgcatgcaccatctcgactgtgacgaaactggcatacaagtatcaattcaaacagtatgcgtggacgcacatgatacttttaacggtttttgcacagtccgctttcactgtggcaaacatatttgaagggatattctggtttcttttgcctgcttcacttattgtgatcaacgatgtctttgcttatttattcgggttctttcttgggagaacaccactaatcaagttgtccccaaagaaaacctgggaaggttttattggtgcatcagtgacaactatcatctctgcttttctgttagcaaatgtgatgggtcgttcccaatggttgacatgcccaagaaaggatctgtcaactgggtggctttattgtgaccctggtccaatgtttaagtcagagcattacttgttggaagaatgggtgccaacatggttcccatggaaagaactagccattaatgcctgtgcagtggcatgcttt

SEQ ID NO: 453022 - DNA, 511 bp, Sorghum bicolor
catcacgttcgatgctcattctccatcattcagctgccgatcaccacatttgcttggcaacatgcagattcaagtcaatggcggatacactataaacgacaagtacagctaaatactggctgacaacaccattcattcgaagtggatagctatagctgctatctgctccaatttagtctcagtctatacattacttatcttgggaaatattggatagactccagtacacctctgcagttgccgatctaaatactacctgatcaccttagtactggcctggaaattcttttctgcaagcgataaccattagtagtttgtgctgctaccactaaacttctgtaaagctgagcacccaaatcaatatttctctgtgaaacaagtaggcaacactagaatatcagtccaaggtattatttttctagaagtagccttttcctcccattccccatgccttaaccttgtgcatattcgcgtaaagttctgcatcttacaaaacccaactactatacct

SEQ ID NO: 453023 - DNA, 813 bp, Sorghum bicolor
  unsure (1)..(813): unsure at all n locations
cgtccgcagagcctgtgagcaagccgtcgccattttctacgtcggtaatctggtcatggactgctatattcgtcgcatcatttggtgttgcatatttcaatcccacggcacttggtaccaccgcaaaaacatgccttcctttcctgcttgctgctaacgtgctgggatacatggttggttctgggttaccagctggtgtcaagaaagtgttgcatccagtcatctcctgcgcactttctgcagatttggcggcagcagcgtatgggtacctctccgggtctggatttgatgctgtgctaggtgattacctcacaaaggcggcctctaatcctggagccggtgacatactgatgggtttccttgggtctgtgatcatatcatttgcattctccatattcaaacagagaaagcttgtaaagaggcacgcagcagagattttcacatcagttgccattggagctacattctctctgtactcaactgctatcatagggcgcctggttgggctagagccatcgttgaccatatccatgctgccaaggtgtattactctggcgctggctttgagcatagtatctttctttgaaggagtaaactcttcagtaactgctgtcgtgttgtccttaccgggctcctcggtgccaattttgtgctagcagcaatggagaaacttcgtctgaacgaccccatctccagaggaatagcgacaggctgcagtgctcaaggactgngaacagcagcactgtcagccaaggaacccgaagcactccctttctgcgccatctcttatagtttcacgggaatctttggctc

SEQ ID NO: 453024 - DNA, 1334 bp, Sorghum bicolor
ccggtttaccacgcgtgcgggggcaccagaggggaaaaaaaaaggcaacagcaacaccgccgcgacgacgacgacgacgacgacgatggcagcctcgctccaagccgcggccaccttgatgcagccggccaagatcggcggccgggcgcactccgcctcgctgccgtcccggccgtcgtcgcacctcgccagggcgttcggcgtcgacgccggcgccgccaggatcacttgctccctccagtctgacatcagggacgtcgccagcaagtgcgtcgacgccgccaagctcgccggcttcgctctcgccacctctgcgctcctcgtctcgggcgcgagcgcggagggcacgcccaggaggctgacctacgaccagatccagagcttgacgtacatggaggtgaagggcacgggcacggcgaaccagtgcccgaccatcgacggcggcgtggaggcgttcccgttcaaggccggcaagtaccagatgaagaagctgtgcctggagccgacgtccttcacggtcaaggcggagggcatcgccaagaacgcgccgcccgagttccagaagaccaagctcatgacccgcctcacctacacgctggacgagatcgagggcccgctcgaggtcggctccgacggcaccctcaagttcgaggagaaggacggcatcgactacgccgccgtcaccgtgcagctcccgggaggcgagcgcgtgccgttcctcttcaccgtcaagcagctcgtcgccaccggcaagcccgagagcttcggcgggccattcctcgtgcccagctaccgtggctcctctttcctcgaccccaagggccgtggtggctccactgggtacgacaacgccgtcgcgctccccgccggaggcagaggcgacgaggaggagctcctgaaggagaacatcaagaacgccgccgcgtccacgggcaacatcacgttgagcgtcaccaagagcaacccggagaccggcgaggtcatcggcgtcttcgagagcgtgcagccgtcggacaccgacctcggcgccaaggcgcccaaggatgtcaagatccaggggatctggtacgcgcagctcgagtgattcgttcgttctaactgctactaggcgtcggaaccgtcatggatcggatcttgggaaagtgtaccatggagaactttggagagcagaggaggaggagtcgtgtatgtacctattaatgcaaattcgggctgttggttttaaatttcagtttgagtttcttctttcttgtgttctcatgaactactcccctgtgcaaacgcaaagagctaagaggctgtttgataccaaaaaaaaaaaaaaaaccgaattc

SEQ ID NO: 453025 - DNA, 296 bp, Sorghum bicolor
  unsure (1)..(296): unsure at all n locations
cgtccggactcctggtcgacccgcgtncggcacagcaacaccgccgcgcgacgacgatggcagcctcgctccaagccgcggccaccttgatgcagccggccaagatcggcggccgggcgcactccgcctcgctgccgtcccggccggcgtcgcacctcgccagggcgttcggcgtcgacgccggcgccgccaggatcacttgctccctccagtctgacatcagggacgtcgccagcaagtgcgtcgacccgcaagctcgcggctcgtctcgcacttggctctgctggcgcggccgg

SEQ ID NO: 453026 - DNA, 880 bp, Sorghum bicolor
gcccgaattcccggtcgaccacgcgtccgggtgtatgagtgccagcatcttgagaaggggaaattgcagacaagcttataactaagaattacattttgatctgttattgacataatgaagcttcatttccctcttttttttaatccttcactgcttgtagggtttcatggtttgggcggagtttgatcagaaacaaacgaagctgtcgtaggcgtcttactcatcataatgcacgaaggaggaagccacaggcagatgcaatttcattcaattcatcacggctctcgtcaatgttttatgatacaagccaccggacaaatcttttctttagtcaacctctctatggccaagtgagaagcaacgcagtatctccgtgggataactcgggaggctccagatttatggaaacaaaacatctgtgcagtgcagccaacaaaaacagtacgcctggatgagctgcatttctcaaccccccagatatcaactagcgttgtggcgcacactggacatcatcataacttcaataggttcatgccattcaagggaactaacacaaaggttcttaaccaaggtactttgctaatctacggatctgttactgaacttgagaaggttaaacagtgaaccctgacagcactaaaaagttaaccatgttgatgaagtatctgagtgcgatcagctcttacaattcctaagaaactgtgcagatgatctctcgcattatttgaattattattctccagtaagcactgctttttaggtgacatcacaatatgttctgtacactaccattctaattcctagcagtttcaactttcacgacactgaccagcatcttgttctttgtggttccaattcgcataatactattaacgttaca

SEQ ID NO: 453027 - DNA, 493 bp, Sorghum bicolor
gcgacccacgcgtcacgctcgaggatctcctcctcctcctaaaccctcctcctctccgtctcctccaatggcggcggcggctgccacctccttcgccaccctcgccgtcgcgcgctcggcggggcagcggtccctcctcgcctccaaggccgccccctcgccgctcctctccctccgcagcgccggcctcccctcgcaggccgtctccttctccgggggcctcgcggcgtcgacctcccacagccgagcgcgcttcgcaacatccgccagcgccgagcccaaggaagcagaccttcagtctaaaatcacaaacaaggtgtactttgacataagcattgggaaccctgtggggaagaatgttgggaggattgtcatcggcctatatggggatgatgttccacaaacagcggagaacttccgcgctctttgcactggagagaaagggtctggatacaagggatccagtttccaccgcgttatcagcgacttcatg

SEQ ID NO: 453028 - DNA, 726 bp, Sorghum bicolor
  unsure (1)..(726): unsure at all n locations
ggcacgaggtaatcccttaaaccatattgaacatgtcttgaactgcttgttgacttatagatctctagttgaggagcgtcttgttaagatttgctccggtccttaagcgcggatgttgacttgtagtgttctctagtaagcattggcccaagtatatgctggggttttcaccttaggtcctctatgtatgcgtttctgtgatttccgttaagcgtactggtatttttctggtggtgcgctgtgtctggaagtttgacaccttcaacatcatatattagtgcttacgtttaaaattttaacagataatataattcgaggtactctgttaatttgattttaggttgatttgctttagattcttgggtcggttgcttacattttatctcaactcactgtcctgtagctaaaaattggaactaactgatatatgatggtttgaaagtagcaataggactctgaatgtgctggtgatcctgcattctgcaaagagttccttaaatttacacagagagtgcgggttgtgcagttgtcaaacttcaaggatgattccagcccaattggtctgtatttcttcaatttaagttagcctgctgttttatttgactctttaatttgtgttagcccaattaatttgtgttgtaacttggaaaaattactctttaagctttgattggtacaataataactttattgtgtcacgaacattctnttgactctttactatgc

SEQ ID NO: 453029 - DNA, 1173 bp, Sorghum bicolor
cgtccggataccacacagagtcagagagagggagggcgggagcgcgactcgggggggatggctttgctgcagagccagagccgcctgcccggcattggctgcagcagcagcatcgtcttggcaagagcgagggtgcagcagtgtctggcagcggcgtcgcactcacgcgcgcccctcctgcgagctaatggcggcaggaggagcacgacgggcctccccacctcctcctcctcctcctttaaggctggcaatgcgatcagcctcagccggcggagaataagggacctgcgcgtcgtcgcggaggcggccaccgcgggggcggccaaggtggtcacgccggcgtcgtctggcggcgtcagcgtcagcgacgtgctctggccttccgccggagcgttcttggccatggcggtactgggaaaaatggaccagatggtggcgttcaagggagtatccttgacgattgcgccccttggagcagtctgctgcgtgctttttagcgctccaggctcccctgcagccaagaaatataatatgttcgtcgcccagattggttgtgcggcttttggcgtattagccctctcgttgtttgggcctggctggttagcaagaggcgcagctctttcagccagcatagcattcatgaccatcacgggtgcctcacatccaccagctgcaagcttgcccctcttgtttatcgatggcccgaagtttcacaatctgcaactttggtacgcgcttttccctggagctgcaggctgcatcgtcctttgcttgattcaagaggtggtgctttacctgaagaagaacttcaagttttgactcaagcagcttgactctatggattcttgtggcagcaattagattaattattcaatcatgcaccataaattacattgcctgcatttacgagaaaggtgcgaaaatgaagggttactgtctcctgtcttggttaaagaagaaagaagactttcctagtttccttgataccttgtgcttatcaaaatgcagaggatacagatgtgtacataccattgtctcatcaaatggtgtctgacaaattgtacacagcggattcttgcaattgttttttcaactggtaggatcaaccctgtaatgtaattgtgcaaactgaaaaagccaggaatactttaggataaaaaaaaaaaaaaaaaa

SEQ ID NO: 453030 - DNA, 547 bp, Sorghum bicolor
  unsure (1)..(547): unsure at all n locations
cgtccggttttcaccatcactgcattgtgtgcgcatcagcgttgagcaggtgcagctagcaaggcggcgaggatgctggagagccaggcggtgatcggggacacggacatgcggcaggcgatgcagcagtacgcgctccggctcgccgggaaggcgctggacgacttcgaggccgccgactccacggagatcgcacggttcatcaagaaggagttcgatcggtcgtacggccccggatggcagtgcatcgtgggcaccgacttcgggtcgttcgtgacgcaccactccggctgcttcatctacttcggcatcggcaacctggccatcctgctgttcaagggcggcgcggctcctcgcggtgagaccgtcgtcgagaaggcgcggctcacggcgctgaaaactgccgtcgaggcgtgagtggatgagtaatcaccgatgtgtgcaggcctgcaggcagggtaaataagttctcctagcatgtaagggtcgtgctttggtggaatggagtgcctgactngaaaagtgcaggtcttcatcacatagtaaa

SEQ ID NO: 453031 - DNA, 533 bp, Sorghum bicolor
ggcatataggaacacaattctctatttttcttatatttctctattacctcctagaaggtaatacgtgataattgccataaagatcgagagtccaccgtcgctacggagtagcgtagcaaagcccaaatccagattatatactgtacaacaagagatgcagctatgaaattagcagctgctgagaataatctcaaatttgtgctcatcggcataggtccgggtgcttctccccatttgcaacgctggtttctgggaggcagagggatcatcatactgttttctgatacccgacggggggatcatactattctctatttttctccccctgaaacccggcagagagatcatactacatggcagaagcaagcaggacgtagcagtgctgtgttccccaatgctgcagagctgaggggccggactataagatcgagaccaactatagctataggtggctggcctattacaacaatattcgcagaccagcactggattacaagaagaagagcagcataattacaggagaaagagtggta

SEQ ID NO: 453032 - DNA, 1483 bp, Sorghum bicolor
cgtccgcccacgcgtccgcggacgcgtgggttttttttttttttctcgagaagtgctctctttttcactggtcaccacaccataattatctactgggacttgttgactccctgatatcacatcctcatcatcatcaccgtcatcgtcgatcgcgccgctcaggatggaatcaccggcggggcagctactctcgcaaatcctccacacgcacccgcacctactgtctgccgccgccgagcagcagctcgagcagctccagaccgaccgcgaggccgagaaggagaaggagaaggagagcgaggctggcgacaagtcgaccccgacaggtggcgacctcgtgctgtacaggcgtattgcagaggtaaaggagaaggaacggagaaggactttggaggagatactctatgctctggttgttcagaagtttgttgaagctgatgtttctttggttccagcactctcacactccatcgattcttctggaagagttgatcagtggacagaaactgtggaagagaagcttcaacgtttacactcgcccgaggcctatgaaatgatcgagaatcatctctctctcattctggggcagcgtcaaggtgatgccactattgcagccataagtaagctccgagttggccaggtctatgctgcatctgtgatgtatggttatttcctgaagagagttgatcagaggtttcagcttgagaagacaatgaagagcctcccttggggatcggaagaggaagatagtgctttgaatcaagttatgacgaccgactcgatgccttcagctcgggtttctagctctcatccagagatgggctcatggactgcacccgacttcaacgcaggagggcctagccaatctatcaagccttcccgccttaggtcgtatgtcatgtcatttgattcagatacgcttcagaggtatgcaacagtcaggtcaaaggaggcctttggcatcattgagaagcacacagaagcactatttgggaaaccagagattgtaatcacacctgaaggcgcagttgattcctccaaggatgagcatattaggataagcttttctgggctgagaaggctgatcctagaggctgttactttcgggtcgttcctctgggacgttgagagctttgtggattccaggtaccatttcgtgaccaactaagatggtcatcctaactgaagaacgattcatggtttacgcatctggtctgaatgtctatgggcttcggaaagactgttgtacaatgatgttagactgttaccacaccccttactgtacacgatggtatcaatgatttgcccagttttatggcatcacagtattgtaaagaccaaatgtcattagccgttaggttctattaacatctgtgctgcccggggtgcgtagcaatgtattttttcactatccccgctgcaaattgtaagaagaattctaggctgctaggcaacccttcagcaaacctattattctcgttgc

SEQ ID NO: 453033 - DNA, 525 bp, Sorghum bicolor
  unsure (1)..(525): unsure at all n locations
ccggaattccagccacgacccacgcgtccggtctccaaccaaccaccgcatacaatccccaatcccgcgtccccgaaccctcgagttctcacgggctccggccagattcgtgcagtctaagcttcgaatcgacgcatggaggcagcagtagccgcggcgctcaggtcgcccaccgccgccggcccctcgcggcggtccgcggccccgggccccagctcgctcccctttgaccggaggcgcagcttcgcctttggctccatcaagggtctcgggcggcagcagctcacgtctaggactaggaggcgaagcagtgtggtcagggcctcctggtccccctcggagtctctgccaccgtcatcgtcgatcgcgccgctcaggatggaatcaccggcggggcagctactctcgcaaatnctncacacgcacccgcacctactgtctgccgccgccgagcagcagctcgagcagctccagaccgaccgcgaggccgagaaggagaaggagaatgagagcgaggctggcgac

SEQ ID NO: 453034 - DNA, 446 bp, Sorghum bicolor
cgtccgtggatcttatcactacccacgagggtgaaaaggatctaactaaatataacttgacagttcaccgccgcatcgttcagtacaagacagcttattattcattttaccttcctcgcgcccgtgcattgctgctggctggtgagaacttggacaactttggtgatgtaaagaacattctcgttgaaatgggaacatactttcaagttcaggatgattatctggattgttttggtgatcctgaattcattggcaagatcggaactgacattgaagactacaaatgttcctggctagttgtgcaagctcttgaacgtgctgatgagaaccaaaagagcattctgtgtgaaaattattgaaagtctgatccagcgtgtgtggcaaaggtgaaagacttgtacaaagagcttaaactggaggggttttcatgaatacgagagggagag

SEQ ID NO: 453035 - DNA, 1411 bp, Sorghum bicolor
  unsure (1)..(1411): unsure at all n locations
cgtccgctagaacctactatctcccgcgcgcgggcgccaccgccaccgccaccctcctcctcctcctcctcccggctctcgccctccgtctcgcccggcggaccccgccgagcgcatccgccgccatggcctccgacgcgaggctctccttaccgtgccgcctgccctcgctcctccctccgccggtgctgctgcgccggcggcgcctgcccgcgcccgcggccggttccggcctcgcgcctccgaggttgaagggcagggcccggtgcagcagcagcagcaggtggaagatgaggtggtggacagcaacgtgctccagtactgcagcatcgaccgcaagaagaagaagaccatcggggagatggagcaggagtttctccaggcgctgcaggccttctattacgaccagaaggcgatcatgtccaacgaggagttcgataacctcaaggaggagctcatgtgggaaggaagcagcgttgtgatgttaagcgcagatgagcaaaagcttttggaagcctccatggcatatgtctctggcaaccccatcatgacggatcaagaattcgatgaactaaagctgagacttaagaaagaaggaagtgacattgtaacggaaggtccaagatgcagtctacggagtcgaaaggtctacagtgacttgactgttgactacttcaagatgttgctgctatatgttccagcagctgtggtagctctgacactattcttcttcttggatgatttgacgggatttgaaatcacacttcttcttgagttgccagagcctttcagtttcatcttcacatggtttgctgcactgcctttaatattttgggtagcacaggcattcaccaatgtcatagtgaagactttctgattttgaagggcccatgtccaaactgtggactgaaaatctttccttcttcggaccattttatcagtgctatgcggtggttcaacaaacagtgtgaaatgtgcaagttgtggcactgtcttggagtatgactctgcatcccgattgattacactcccagaaccggatgaggcataagtaattaatggtggtttagatttcgctagcaggaaagacggcccacagattcctgatcgacagtacaaagcaagaccgtccttgaatcgggtgacaatcatgtcgtgatgtatgtttgctatgcgagtctatgtatatctttaaacaagtttagacatctatattatatagatttaacgaaatcgatatatgtatatatatgtgcatagagtgtacaaagaaaagtctttagctatgttccattttgtatgaactatcttggcatatgtaatactgtctgaagaacctgacgttctgtgcgatgttcagtaaagtaaaccaggttccatcgtaaaaatataaaaaaaaaaanaaaagggc

SEQ ID NO: 453036 - DNA, 657 bp, Sorghum bicolor
cgagtggcgcgcgcggcgtcatcgccgccacggcatgtacgacaccaacaccggcggaggaggggacgacgggcggtacctgccgctgtccatcttctggcaggtgccgcagtacgtggtggtgggcgcgtcggaggtgttcacgttcatcgggcagatggagttcttctacgaccaggcgcccgacgcgatgcggagcctctgctcgggcctctccatgacgtccttcgcgctcggcaactacgtcagctccgcgctcgtcaccgtcgtggcgcgcgccaccgcgcggggcggacgggacgggtggatccccgacgacatcaaccgggcgcacctcgactacttcttctggctgctcgccatgctctgcgtcggcaacttcggcgtctacctgctcatcgcgcgctggtacacgtacaagaagagtgttgggtgatgcgaatcgacgggcccgggggaaacagaaaagcgctgttgaacaatgactgggcttggcccggtccaataaagcttactagtttagggtttggcccggtccatggatagacgaactatcacagtagtgatgatgatgatgatgatgatgatgcgatacgagtgaggctgaggcgtgcagctgcagccttgctgatgtgcctgcagctgttcaaacatctt

SEQ ID NO: 453037 - DNA, 757 bp, Sorghum bicolor
  unsure (1)..(757): unsure at all n locations
cgtccgctacatcgagcccccgcatatcatcctccgcaagggcctcatcgccggcgtcgagtacccgctgctcgccgaccacatgtccgattacatggccaagacgctcttctttacctccctcctctataacaacaccacggatcataagaacggagttgctaagtactctgcgaacgtggagatgtgtaggctcacggagcaagttgtgttctccgacccataccgcgtctccaaatttaatcggtggacctcgccttatcttgacaaagatgctgaggcagttcgacaggatgacgagctcaagttggaagcggctggactgaaatcgctgtttatcgagagagctcaggctctgattcatggagatctccacactggttctatcatggtgaccacaggttcaactcaagtcattgatccagagtttgggttctatgggccaatgggttttgacattggagccttccttggaaacctgattttggcatactacgcacagaatggacatgctgatcaagcaaacgatcgtaaggcttacaagaaatggatcttgaagacaattgaagagtcgtggaatttgttccagaaaaagtttgttgaactatggaataaacacaaagaagggaatggggaggcatacctgcctgatatatacaacaactcanagcttgtgagcgttgctcagaagaagtacatgacaaacctattccatgatagtctttgggttggtcagccaaaatgatcaggcgaatag

SEQ ID NO: 453038 - DNA, 968 bp, Sorghum bicolor
cgtgcgggtatccgttgatgttgttggtctggtagatgagtgggctgctagattttttgaagaactgggttatgggagtgaaggtgaaaatggcacctactttgctgaagtgatgaaagaagatcttccacaggttgttgttccaaagacttaccataaatacacatctagaaaagttcttaccacacaatggatagagggagagaagttgtcacaaagtacagaggacgatgttggatcattggtcagtgtaggagtcatttgctatctgaaacagttgcttgatactgggttcttccatgctgatccacatccaggcaatatgattagaacacctgatggaaagctggctattcttgattttgggcttgttacaaaactgacagatgatcaaaagtatggaatgattgaagcaatagctcaccttattcatcgtgattatgacgcgattgttaaggactttgtgaaacttggttttatccctgaaggggttaacttggatccaatcttgcctgtactggccaaggtttttgatcaggcactagaaggaggcggtgccaagaatattaactttcaagaattggcagcagatctagcacagataacttttgattatccatttaggatacctccatattttgctctgattattagagccattggagtattagaaggcatagctttggtgggagatcctgaatttgctattgtggacgaagcatacccatatattgcacagaggctactaacagacgaatcacctcgactaaggagtgccttgcgttacacaatatatggcaaaactggtgtttttgatgcagaaaggttcattgatgttatgcaagcttttgagaattttattcgcgcagcaaagagcggtggtggggagaacttgaagggaaacatggctgagctggctgatttaggaggtcaacctagcaccagtttggttcctgtatttccaatgg

SEQ ID NO: 453039 - DNA, 517 bp, Sorghum bicolor
  unsure (1)..(517): unsure at all n locations
cgtccgctgcctctgctgcagcaagttcgggtggtgcggctccacctccgattactgcggcagcggctgccagagccagtgcaccggcagctgcggcagcaccccaagcactccgactcccaccccgagctccggcggcggcggcagcgtggcgtccatcatctccgagtccctcttcaaccagatgctcctccaccgcaacgacgccgcgtgccccgccaatggcttctacacctactccgccttcatcgcggcggccaacgcgttcccgggcttcggcaccacgggcggcgccgacacccagaaacgcgagctggcggcgttcctcgcccaaacctcgcacgagacgacgggcgggtgggcgacggcgcccgacggcgcctacgcctggggctactgcttcaaggaggagcagggcgccgcgtcggggccggactactgcgagcccagcacacagtggccgtgcgccgcccgggagaagtactacggccgtggacccatncagatctcctacaac

SEQ ID NO: 453040 - DNA, 737 bp, Sorghum bicolor
cgtccggtctacgcatttctacacaattatacattgttggagcacacacgtatgcattgttagaacactttgacataaattgttggaacaattatttgtaaacttctacacaattctatacaactttctatgcattgtttgggttagggccaccacgattccggtacaataattccacatttttgtattttgttggagcagttatctatgcatttctacacaattatacattgttggagcacacatgtatgcattgttagaacactttgacataaattgttggaatagtttttgtaaacttctacacaattctatatattattggtgcataattctatacaactttttatgcattgtttggttagggccaccatgatttcggtacaataatcccccagaaggaaggggtattttgtgttctatgcactatccctctatcaattgtacgtctctgagaataatgttttaggatggggttgccacggctttggataaaataatctcccactaaggagggttgtatcaggttctatgcattgtttctctattaattaccaagctagatgcaaggtttggttacgaccataataggtttctatgctcgcagaaacatgtttatgtgcctttttttgtcgctgtaaggttttcccgcgcactacatgtttctatgcctttcttttgctgctgtcaagtttctgcacctgctaaaacatgtttcttttcctttattgtgatat

SEQ ID NO: 453041 - DNA, 843 bp, Sorghum bicolor
ggcacgaggcaggagttcatcaacgtgaagctctctgattacattgggaagaagtacgtcattctgttcttctaccccttggatttcaccttcgtctgcccgaccgagattactgccttcagtgatagatacgaggaattcgagaagttgaacactgaggctcttggcgtctccattgacagtgtgttctcccaccttgcatgggtgcagacagacaggaagtctggtgggcttggcgatcttaaatacccacttatttctgatgtcaccacatcaatttcaaaggcctttggtgttctgatccctagccagggcattgctctgagaggactgttcatcattgacaaggagggagtgattcagcactctaccattaacaaccttgccattggtcgtagtgtggatgagaccatgaggacccttcaggcattgcagtacgtccaggagaacccagacgaggtgtgcccggccggctggaagccaggggagaagtcgatgaagcccgaccccaagggaagcaaagagtacttcgcggccatctagactccccgtcattgagaagctttgctactctatcatggtgcctgttaagtgccccagcggtaggtccttgtggagttttgcggagctcgcgttttgacatgcctttgtgccttgaaccgagtgtgctagcccttgtgctgttgtgcatcccgattgagtgctgttctttgccacttcgtttaatttttcacctgacgaataaggttcatttggcacgtgattgagagttcacgcttctggtgtagtttgctgggcttctgtttgtagcattgtctggtaagcttcgcgtcgatgctgata

SEQ ID NO: 453042 - DNA, 538 bp, Sorghum bicolor
  unsure (1)..(538): unsure at all n locations
cgtccgtgcattttctgatgagaagagcgtcccagagactccagagcaagaattcaggtctaaccgaccgtcgaaatggagtagttcctgacgccaagaacatttcagagaccaaagaagatgaggaacaagacagtgcaaatgatgatttggacaatgcagctcgacaggcctacatttcagtcacggggaaggcaaaggtatatgacgaagatggggaggatccggaagcgaagtggaaggatttgacagacgaggaggaagacgagctggagtcactgtgggagcaccaagacctgatagagcagctgaagcttgagctgaaaaaggtccggtcgatcgggctgccgacgatccttgaggagtcggagacaccgaaggctccaatggaggacctcaagcctttggaggatcgatgctaagttcctccgtgaagacccgatggacgagctgaacaagttctacaagagttacaggngagnagatgtnnnagagttgcattttgtgctaccaagaaatgtatgcaatagatttctac

SEQ ID NO: 453043 - DNA, 860 bp, Sorghum bicolor
cgtccgccgtgataatgtacgagaacatctgacttctacgtttgattctgaggaaactaaagacgacatcaaactattgcgcatccaaattgaagatgatttacgaaatgggatttctggggctgttccagttccacccgatgaggctggcaaagaagaggttatcaattcattggttgccaatgttgaatcgatgattaaagcagaccggaagatcacaccattgaaacaacttcagggtcatatttggaggactggatttgaaaagaaagaactacagggagttgtctttgaggatgtgcctgtggcgctaaagaactggcattctagtggcataaaggtctacatatactcaagtggaagtagagaagcacaaaggctgctatttggcaatacaacatatggtgacctgcgaaagttcctgtgtgggtattttgataccaccactggaaacaaaagagaaacaaggagttattttgaggtctctcaatcacttggggtggacagtccatctcaaatcttatttatcaccgatgttttccaagaagctgttgcagcaaaaaacactggttttgaggtgataatctccattcgcccaggaaatgctccacttcctgacaatcatggtttccgcactatcaaatcattcagtgagatctgaggaatatggtgatctgcacatgtctggatatatgtaataagcaggtgcttcctgggttataatattagcccgcggaccagttcatgcagtggtaacagtataaccccgcagcatggccttgtaatactaagttggaatggcgaaataaaaactttggtccgttgtataattgtagctaagctgcaaccggagagtttgc

SEQ ID NO: 453044 - DNA, 596 bp, Sorghum bicolor
cgtccggttcattataatctgatatacgagcagttgaattaagtggaattgtttatctaatcacaatgcatatgtcagcattttacattgactcagcttgctaagtaaccaggcaggcacgaaatattgtttcagactctttccttttgcaggattatctattaccattatgaagtccgatgaaagcgttttgaagagacttgatgctcccactaaagctccagcttggcctgttggttctgaaggaaaacgtccaccagcaaagtttcctgttcctctaccaccatcaccttcaatgaaggatgacgagattcttgctccatcgcaagagctgagcaagcaaaggtgtatcctggaggctgctattgaagcaagtgctactgcaattatcaatgtcaaggatagcctaaatgaatgggacagtgaagtgggcgatggtgactgtggaaccacagtgtatagaggtgcaacagctattcttgaagatatgaaaaagcgttaccctatggatgatgcacctggaacaatatatgaaattgtagcaacaatcccaagggtgatgggtggaacaagtggaatcttgtatgacatactct

SEQ ID NO: 453045 - DNA, 589 bp, Sorghum bicolor
cgtccgaaaagacatggactttgtgcaacttaatcaattaattggtagaaaaactggaggcatatcagtttacccattcacgtcatcggttaggggaaaagaagatcctcttactcgcatcatcgttcggggaaaggcaatggcaccacgagtagaagatttgtttaatctgatgtacaccattcttcaagatgttcaattcacagaacagcagaggttcaagcagtttgtttctcaaagtaaagcaagaatggagaatcgattgaggggcagtggccatggcatagcagctgctagaatggatgctaagttaaatgcagctggatggatttcggaacaaatgggtggtgttagttatcttgagtatctgcgggacctggaaactaagattgatcaagactgggacagcatatcatcttcactcgaggaaatgagaaaatcactcttttccaagaatggttgcttgatcaacctaacaagtgactggaaaaatcttgaaaaatcaagccaacatattgccaaatttcttgattcactcccaagtaacccatcccttggaagtgatccatggctttctcggctaccttct

SEQ ID NO: 453046 - DNA, 756 bp, Sorghum bicolor
cgtccgccacaccacaccacaccacaaagagagagcgggcaaaaggtgaggccgagaagcgctttagccgttaggcgataagagtgagctggtgcaccggcatggcggccacggcgtactccgtggcgctcctcggcggcgcacgcctcccggccgccccgcgctccgccctcctccctcgccgcagcgtctgccagcttcgcctccaagatgcaccgaggctctccctgctgcgtgcgaaggccgcgtccgaggacacgtcggcctccggcgacgagctcatcgaggacctcaaagcaaagtgggacgccattgaggacaagcccaccgtcctcttgtacggcggcggcgccatcgtcgccctctggctgacgtccgtggtcgtcggcgccatcaacgccgtgccgctgctccccaagatcctggagctcgttgggctcggctacaccggctggttcgtgtaccgctacctcctcttcaaggaaagcaggaaagagttggccgccgacattgagaccttgaagaaaaagattgctggaacagaataaactctcatggaaagttttagagggccctttcttctttggaaagatatctaatcggagaacaatgcaactacctgagtactacagcccatgtgtgtgtgtgatgtatatcttcagtatacaaaggaaacatcgtttgttgtgtagtagcattgtattagtttaaatgtatctctactacctatctgctaaattcttcttttgatttggc

SEQ ID NO: 453047 - DNA, 846 bp, Sorghum bicolor
cgtccgctcaatttcatcatctccaatgatggctccctccagaattcatgtaacatgtgcattagtttatgggccttcaccaacaggaaggatccaccaaggagtttgttcaacatggatgaagaatacaattcctctggaatatagtgaagaaagcagctgggctcccatctttgtgaggcagtcaaatttcaaattacctgctgacccatccactccgattatcatgattggtcctgggacaggactggccccttttagaggcttcttgcaggaaaggttagcactgaaacaatctggaacagaactgggcacttcaatccttttctttggatgcaggaaccgtaatatggactacatatatgaagatgagttgcaaactttccttgaggagggggctctttctgagctaattattgcattctctcgggaagggccaacgaaagaatatgtgcagcataagatggtagagaaggccacagaaatttggaacatcatctcacatggtggttacttatatgtatgcggtgatgccaagggaatggctagagacgtacacagaatgcttcatacaatagtccaagagcagggatctttggatagctccaaaaccgagagctatgtaaagagcctgcagatggaaggcaggtacctccgtgatgtatggtgacacatcacccccaatcagccatagcttctagcgtgtggaattaaagctggctttgcgtgtatatgccaatccagtcgtcagctttggaaatgaagcgtgccattgattatatactgaaatgaggtgatcagtgtaattctttgacatctaactatttattattatatgagatggga

SEQ ID NO: 453048 - DNA, 566 bp, Sorghum bicolor
gaacagagactgcaaaacttgaaggaaaggctaaatataccttatgacgaaaatcggcatgaacatcaagaatcgcttagggctctttggaaaatctcctttcctgatacagagctcactagctttgtttcagcgcagtggaaagaaatggggtggcagggcatgaacccagcgactgatttcaggggctgtggatacgtttcccttgagaaccttctattctttgcaagaacatatccgcaggcttctttcaagaggttgatgctgaagcagcaaggaacgcgagctacatgggagtacccctttgcggtcgcaggtgtaaacatctcatacatgctgattcaactgctggagctcaactcagtgcgtccgaaatctttgccagggattaacttcatcaaggtgttgacagaacatgaggatgcattcgacgtgctctactgcatagctttcgagatgatggatgcacagtggctagcaatgcgagcctcgtatatgcagttcatagaggtgctggaggccacaaagcaacagcttgagagggagctctcccttgaggatctcaa

SEQ ID NO: 453049 - DNA, 540 bp, Sorghum bicolor
cgtccgaggcattgttcagaatagtggagccttctgaggggagaatagtcatcgatggtgttgacatctgcactttaggactccatgaccttaggtcacggtttggtatcatccctcaggaacctgttctctttgaagggaccattaggagcaatattgatccacttgagcagtattctgatgatgaaatctggcaggctttggaccgttgtcagttgaaagaagccgtggcttcaaaacccgaaaagcttgatgcttcagttgtcgacaatggtgagaactggagtgttggacaacggcaactgctatgcctgggccgggtgatgctaaagcgcagcagaatactgttcatggatgaggccactgcttccgttgattcccagaccgatgctgtgattcagaagatcatccgggaagactttgcagcttgtaccattatcagcattgcgcacagaataccaaccgggatggactgcgaccgggtcctggttatagatgcaggactagcaaaggagttgaccgcctgcaaatctgatcgag

SEQ ID NO: 453050 - DNA, 1196 bp, Sorghum bicolor
cgtccgaatccatctacgccaccgtcgcccagaacgtacgcgaacgcgcccgcgcacgctcccctcctccaatcctctacctccttgcagatgctgaaggttttccagtccccagccagcgccagcgcgggcaaccagttctgtggtgcggccgtagccgccgctcccgctcccgctcccgttcccgtcagggtcgccgagccgcgcggcggcgtctcgccgtgcgctgcagatgcgtgcatggcctccgggatggggaaggaggtgctcagcggggtcgtgtttcagccgttcgaggagatcaagggggagctcgccctcgtgccgcagacgcctgacaagtcactcgcccgacacaaggtcgcggacgagtgcgaggccgccctcaacgaacagatcaatgtggagtacaacgcctcgtatgcgtaccactccctcttcgcttacttcgaccgtgacaacgttgctctcaaaggatttgccaagttctttaaggaatcgagcgacgaggagagggagcatgctgagaagctcatggagtaccagaacaaacgtggaggcagggtgaggctccaatccattgtgacgcccttgactgaatttgaccaccctgagaaaggcgatgctttgtacgctatggagcttgctctggctctggaaaagctggttaatgagaagctgcacaacctgcatggtgtagcaacaaggtgcaatgatccgcacctgacagacttcatcgagagcgagttccttgaggagcaggtggaggccataaataagatctcgaagtatgttgcccagctgaggagagtgggcaaggggcacggggtgtggcactttgatcagatgctgcttgaggaagaggcctaaaggaagtatgtactgtgggctgctcaaggactaagggtcctgaaggaaggaaagaagtgtgaaatgataaggttgaggaataattggcggcatggaccaactgaccaagcccttgggtgtaggtgggcttgtagagggttttgcagttgggtaggatttgtagttgtcgggtggtgttgccctcctacagggaacatggtgcactgaaatgcagtagaacatgtggtattattgctaccttcagtttgaagtctttcttgttagaaacaaaatcctttgggattttgcttattcaaaataaaacatggcgatgaacgtgtttgtct

SEQ ID NO: 453051 - DNA, 567 bp, Sorghum bicolor
cgtccggtggtttcttagagtatgactcaaacgacaatccactcgaagagacagtcaaacctatggtagatggtggaactgagggcttcaagggacatgctagagtcattatacctggaaaaacaccttgctttgaatgcaacatatggctttttcctccacaggttaagttccctttatgtaccctcgccgagacaccaagaactgcagctcactgcattgagtatgctcacttgatcaaatgggatgaggttcatcctggaaaaccttttgatgctgatgatgcagagcatatgcagtggatttattcagaggctttaaagagagcagagcttttcggtatttctggtgttacatattctttaacacagggtgttgtcaaaaatataatcccagccattgcatcaacaaatgcaattatatcagctgcttgtgcattggaagccttcaagcttatttctgggtgcagcaaaagtgtgtcaaactttctcacgtacaatgggctggaaggaactcacattaaagtaactgagttatcagagacaaagattgccttgatgtgggcct

SEQ ID NO: 453052 - DNA, 791 bp, Sorghum bicolor
cgtccgggggacgcgcggctgcaggcggcgctggactacgcatgcagccacggcgccgactgtagcgccatccagcccggcgcgcagtgctaccagccgaacaccaaggccgcgcacgcctcctacgcattcaacgattactaccagcgcaagaaccgggccagtgggacgtgtgacttctccggcgccgcttccgttgtctaccagcaaccagccggcacctgcgacgcgacggcgagctggtgcgtggcgaacgcggcggtcggggacgcgcggcttcagaatgccctggactacgcatgcggcaacggcgcggactgcagcgccatccagcccggcgggcagtgcttccaacccgacaccaagccctcgcacgcctcgtacgcgttcaacagctactaccagcacaagggacgggctagcggaacttgcgacttctctggtgccgcctccgttgtataccagcaacccaaagtcggaaactgtgtgctcccatcgagtggttgatgatcaacggaagaagcagcaacgatacaaaaagcgaggtcctgaagacgatgatcgatatgctactatacctaataggtatacagggatatgaggataattttattctgtattaagacgaagaagtatagataataaagcccggaaaccggcaaatcgaccgagcgcgggtcctccttactcttaaaaccctctgaaagagcagtgtaagacatcatgtcaacgttgaacgtcactgctaataataatgctgtacaaccgttcaatcatcaggtgctttctta

SEQ ID NO: 453053 - DNA, 616 bp, Sorghum bicolor
gtccggtcatcatcaacaacagctagctagctagcaacaccaccaaatgaacatccacctcgctaagcgatcgacaaaatgaagaccaccatggcatcagccgcgctgctcttagtgctagccctagcgctagtgtccgccccactcacagcagaggcaaagaagaagaaaccggcagagagcgtggccgccgccggcgaggcggcggaggcgaagaaggtccaagacagcttctgcgccacgctctgccaaggcaggaaggggatggacctcattgtctgcaaggagtcctgtgagctctcccagcgctccaacctggtgctggacgggccgatccagtgcaagggcaagtgcaccgagcagaaaggcatcactgcgccggcgatgaaggtctgcgaggagcagtgcgacaaggactacgtggtgaaagcggcggaggtcaccgctgcatgcaacaagacttgcgacaaagagaagaacaagatgctcagcgacaattgcaagaagtcctgcacccctcctgcagtttgaagcatgcactacaatctttggctgcgtggcattcaactcaagccgttaatcgttcttactggctagccgcgtgcaccaataattt

SEQ ID NO: 453054 - DNA, 521 bp, Sorghum bicolor
cgtccgagcaaacattgaggcagctaaggaatggagggagaagagggaggacttcatcaaaaaggtgcgccgcattgtgcggaaatcacaggggatggtcgggaagaaaatgaagaccaccatggcatctgccgcgctgctcttactgctagccctagcgctagtgtccgccccactcacagcagaggcaaagaagaagaaaccggcagagagcgtggccgccgccggcgaggcggcggacagcgaagaaggtccaagacagcttctgcgccacgctctgccaaggcaggaaggggatggacctcattgtctgcaaggagtcctgtgagctctcccagcgctccaacctggtgctgtaccgggcggatccagtgcaagggcaagtgcaccgagcaaaatggcatcactgcaccagccatcaacgtctgcgacgagcagtgcgacaaggactacattgtgaaagcggcgtaggtcacccctgcatgcaacaagacttgcgacaaacagaagaacaagatgct

SEQ ID NO: 453055 - DNA, 538 bp, Sorghum bicolor
cgtccgggctggtcgacgacagcaacgtcttcgagtggcaggtcaccatcatcggaccgccggacacactatatgatggagggtatttcaatgctatcatgagcttcccccaaaattacccaaatagcccgccatcagtcagattcacctctgaaatgtggcatccaaatgtttatccggatgggcgcgtgtgtatctctattcttcatccaccgggtgaagatccaaacggttacgagcttgcaagtgagcgttggacgcctgtgcacacagttgaaagcataggtctgagcattatatccatgctctctagtccaaatgacgagtctccagcaaacattgaggcagcttaggaatggagggagaagagggaggacttcaagaaaaaggtgcggcgcattgtgcggaaatcacaggaaatggtctggagaaaatgggggtactgggaagttaaccatgccatgtcaggctgcataaattttgctgccaatctcaaaatgctcatctgacaccagtgtcttgtgtattttccatttag

SEQ ID NO: 453056 - DNA, 1089 bp, Sorghum bicolor
ggcccgaccgtccgctagcttcctctccctcctctcatcggaagcaggcaggcaggcagccagcaatggccatggcgtcgtcgagcgggctgaggagctgcagcgccgtgggcgtgcccagcctcctggcgccgtcgtcccggtggtccagccgcctgccgttctgcgccaacgccaccacctccggccgcgtcaccatgtccgccgagtggatgcccggccagccccgccctgcccacctcgacggctcctcgcccggggacttcggcttcgaccctcttggtctggcgacggtgccggagaacttcgagcggttcaaggagtcggaggtgtaccactgccggtgggcgatgctggcggtgccggggatcctggtgccggaggctctagggctaggcaactgggtgaaggcgcaggagtgggcggccgtccccggcggccaggcgacgtacctggggaacccggtgccgtgggggtcgctgccgacgatcctggtgatcgagttcgtggccatcgcgttcgcggagcaccagcgcaccatggagaaagaccccgagaagaagaagtaccccggcggcgccttcgacccgctgggattctccaaggaccccgccaagttcgaggagtacaagctcaaggagatcaagaacggccgcctcgccatgctcgcgttcgtcggcttctgcgtgcagcagtcggcgtaccccggcaccggcccgctggagaacctcgcgacccacctcgccgacccgtggcacaacaacatcggcgacatcatcatccccagatcaatctccccttgagctcagatcagatgcatgttttgtacgtgtgtcattgccttgccattactaggcattgcctgctgcctgcctgcgtgcaggagctgtacaacgacgacggcgacttcctgcgccggaaaaccccttgtaatgtaaagcttatattattaagtagcggctactcttgtagtcttgtatcaaatctaaactggtttagctgagtcccatggttatttcgagactaattaaccaggggaagtttagcttaaaacgaagaaaattcatacgagaactttgacaaaaaaaa

SEQ ID NO: 453057 - DNA, 1422 bp, Sorghum bicolor
cgtccgcgatctctctctatatttcttttcgaaagatccgttgctggcgttcattgttaagagtagcgatctctccatacatactatgctagtccctctagagaaatttcagaagttaccaattgagacctaaagaccgacctgaatcatgcatccattggagctcttcctggtggtcttggttaccaccggtgccgcctctgcggtgtacagccatcctgccgccgctggcactccagcggcacggttttgggaggaggccctccctggcacacccatgccggaggccatcgccgacctcatccaacaaggcattgaccattcccctctcgtggagcatttcacttctagcggccacacccctgtcatgaacataaactacggctacggagcctacgccggcagctctctaatgaacgcagcagtgcccccaggctccttcttcctccagtcgcagctgcgcgtgggaaccgccatgaccgtctcctccgagtcggcagctaccgtgcctcccatcctcccgcgcaacgtcgccgagaaggtcccattcagcaacctagcggacgtgctcgccgcgttccacatctcgccaagctccgccgaggcgacgacggtgggcgacaccctgagcctgtgcggagccccgccgtcactcgccggtgagcagaaggcctgcgccacgtcgctggaggacaccgtggagagcgccacgcacatgctcgtcgtcggcagcagcgttcgtcatggggtggtgtatttgtgggcggcctcgtcggcggcggcggtgccgccggcggcacaccaccaccagcagcagtacgttgtccaggcggtcacctcgctcgacggcgatcgccacgtcggctgccacgccatgccgttcccgtacgccgtctactactgtcacatgacggggcggccgtccaaggcgtacgcggtcttgctccgcagcgtcaccggcggcagcagtgcgccggtcaccaaggcggcgatctgccacctcgacacctccaactgggacccggcgcacccggccttcgagatgctgcacacacggccgggcggcgagccggtttgccacttcatgtcctatgccagtttgctctttggtgagaaggcagccaattaacggttaataacaaaatacattgaagaacgctgctcatccaagcttcatcataagtataattagctgtgtggtgtcttttttttattgcgagtaattagctgtggtgtctggtatatataagtatgtccggtctccgttcttgtatagtatatatagcatgggtctgttgcactggtggtgtatgtcgtccttagttcatctcagatacgtatcttgtgtattgctgtggtgtggcgtcctatattgtactgtggttatgtggaaaaatatggttttttagggcactataaaaa

SEQ ID NO: 453058 - DNA, 759 bp, Sorghum bicolor
cgtccggaaagaagctcgatcgcctagttccacaagaaagaagctcgcatagtattagcatcaatggccgcctcatcgtcctcgatcctcctgctcctcctcgccgccaccttgatggccggcggcactcacgcggcgacgtgcaccatcaccaacaactgcgggttcacggtgtggccggcggcgaccccagtcggcgggggcacgcagctgaactcaggcgggacgtggacgatcaacgtgcccgccggcaccagctccggccgcgtctggggccgcacgggctgctccttcaacggcggcagcgggagctgccagacgggcgactgcggcggcgcgctcgcctgcaccctctccggccagcctcccctgacgctggccgagttcaccatcggcggcagccaggacttctacgacatctcggtcatcgacggctacaacctcgccatgcgattctcctgcagcaccggcgtgacgctcaactgcggcgggtctagctgccccgacgcatacctgtttcccagcgacaacaccaagacgcatgcctgcaacggcaacagcaactaccaggtcaccttctgcccttgatcgaggaggcagcagtggtccaacgatgcaaacatgcataagagagatgccgcatccgtattatgaattaaagtagatgaataagacagtttcaaaaaacaatgttgaataagaagatggcgtgaagagtcgttcacgcatatatatttctaaattttgattgttactttc

SEQ ID NO: 453059 - DNA, 991 bp, Sorghum bicolor
cgtccggcttgatcaagtggaaccctgtggccaacgtcgacggcaaggacatctggacgttcctaaggaccatggacgtccctgtcaacaccctgcatgctcagggctacgtgtccatcgggtgcgagccgtgcaccaggcctgtcctgccggggcagcacgagcgggaaggccggtggtggtgggaggacgccaaggccaaggagtgcggcctccacaagggaaacatcgagaaggacggccaggcggcggcccccaggtccgccaacggcaacggctcggcgggcgccccggacatcttcgagagccccgccgtggtgtccctcacccgcgccgggatcgagaacctgctgcgcctggagaaccgcgccgagccgtggctcgtggtgctgtacgcgccctggtgccccttctgccaggccatggaggcctcctacgtggagctggccgagaagctggcgggctccggcgtcaaggtggccaagttccgcgccgacggcgagcagaagccgttcgcgcaggccgagctgcagctgcagagcttccccaccgtgctcctgttcccgagccgcacccccaggcccatcaagtacccgtcggagaagagggacgtcgactcgctcctcgccttcgtcaacagcctccggtgaggccgccagtgagcgagaaccatcgttctctgtcagtatgtacttgtaccgtgttatgttggcgtccatcttaggtgctgtatgtagagactagagagggagatgggagggaattgggatgatagaaacacatggaggggattcaggaaaaaaaaacagatgcaggttatccagacaattaaaattccagatgcaggcgttgcatgtttagtttatgtaactgcagaaggagtctgaggtcctgtgttatttgggagctgagaggaagaggttatttgtgtgtgcttatagctagtggcgagtggccatagagtattggaaggaaaatcaaataagataat

SEQ ID NO: 453060 - DNA, 820 bp, Sorghum bicolor
cgtccggagataccatcagatcaatatgcactggaattcggagcttggaaggtgaaggaggaatcaaaaataggacagtgcaaacgaccggaaaagcctatcgagatatatgaatttgaaggttgtccattttgtcgaaaggtcagagagatggtatcagttttggacctagacgtattgttttacccctgtcctcaaaaaggcccaacattccgacctaaagtcctcgagatgggtggaaagaaacagtttccttacatggtggatccaaacacaggggtcgccatgtatgaatcagatgacatcataaaatacctagctgacacatacggcgatggaactgttccaattatgctatcacttggtctgttaacaacaatcacagcagggcttgctactcttggtcgttttggaaagggaaattcctatactgcttcaaaagttccaccacagccaatagagatatgggcatatgagggatctcccttctgtagattagtacgagagacgcttgttgagttggaattgccacatctgctgcacagctgcgcacgtggcagccccaaacgacaagaattcttgaagaaaaagggagttttccaggcgccttacattgaagatccgaacaccggagtccagatgttcgaaagcgctgaaatcatagactacctgaaggcaacatatgccctgtacccaagctcatagtggcatatctcaaatatgaaatgcccatttgtaatgtcgtgtagagcgtgtaaattcacaggcgattttatctacgctggtctgaactttgatggacgtgagattccgttcttct

SEQ ID NO: 453061 - DNA, 489 bp, Sorghum bicolor
cgtccggttaaatgttgactttcttctatctacacgtacctctgtagagtatgcaggaggtggtcgccatgcagcaacttccgatgatgtttatggttttgggataatactgcttgaaatgatgactggaaggagaccaacagatcctatgttcaaggacggagtcagcattatcaactttgtggagggccacttcccacatgaaatatttcaggtccttgatgctcatctaacagaagaatacaagaactttgctgaagcaaagaaaatatcagaaaatgcggttcatcagtgcttggtatcggtcatacaagtagcattttcctgtacgaaaccaataccaagcgaccgcatgaacatgaaagaaatagccaccagaatgcatacaatccaatcgtcatatgtgtcaatgggaaagcaaagcaatatcgtacggcccctaggagtggagttacccgaaatgttgtacaacggcactgatcatacatg

SEQ ID NO: 453062 - DNA, 563 bp, Sorghum bicolor
cggtcgaccacgcccgaggcaccccatcagtgtaggggctagctagcagcattggtgccgtgtcagtgtgacactggactgaaattctctagctataggtagtagcaagctaagagaaaaagcatgtcgaaggatgacgtgacggcggaggcggaggccgcggcgaaggcgccgtactgggatccgccgccggcgccgctgctggacacgagcgagctgaagaagtggtccctgtaccgcgcgctcatcgccgagttcatggccaccctcatcttcctctacgtgagcatcgccaccgtcatcgggtacaagaaccagtccaaggccgaatcgtgcaccggcgtcggcgccctcggcatcgcctggtccttcggcgccaccatcttcatcctcgtctactgcaccggcggcatctcaggcgggcacatcaacccggcggtgacgttcggtctgttcgtggggcggaagctgtcgctggtgcgcacgctgctgtacatcgtggcgcagtgcctgggcgccatctgcggcgtgggcatcgtcaaggggatcatgaaaggtgccta

SEQ ID NO: 453063 - DNA, 203 bp, Sorghum bicolor
  unsure (1)..(203): unsure at all n locations
cgtccgcggcagcgagctgagctgagctgagcacgacgaagcccggaccccctcactcaccacgcccggccatggaggactggcgctgtctactccctcaccacgctcctctgcctcctctgttcactcctgctgcgtgcgcgcaccccaggcagcaaggaccgccatgccgactcctnctncggctcctccctgccccggcc

SEQ ID NO: 453064 - DNA, 595 bp, Sorghum bicolor
cgtccgcacaaagttacagatgatgacttgtttgttgtgctcggtagtgatggcttatttgatttcttcagtaatgatgaagttgtttggttggtttatcaatttatgcgtgataatccaatgggggatcctgcaaaatatctcattgagcaacttatactcaaagcagccaaggaagcagctttaacagccgaagaattgatgaggatacctgttgggagtaggaggaagtaccatgatgatgtgaccgtcattgttatcatccttggaaatgcacagaggacgatgactgcatcaacttccttgtgaaagaatggagagatagagagacgggctatcagctggtaaatttttgtgggtgtttgcatatgtgcctgtttcaaattacaaggttttttttttgttgagaatggtgtggtagtcaacaaaccaaataaaaatgtacatattgttttgaaacaaaaccttgtgttcaatcacaaggtgcacatggatttgtttgacctacttttgtacatggatcaaacatggaggctcgtacttgagctaatgagtccatgagcagagtggtagatcgtttcagtttctgattgcc

SEQ ID NO: 453065 - DNA, 805 bp, Sorghum bicolor
cgtccgcaagaaacgtggccgcgaacagagacgaccgcggcgacagccacgagctcttcctcgtcccccctgctcccaccccacaacccctcgccgcggcctcttcctccctccgcccctgagaccgctccaggccgctgccccgcttgcatcgcgcattcgcgggaggtggtttcagttgccctttctcagggcgattatggaatgcttaacaacaagttttgcaagaaatgtgggaaaagagcacagcttcgtatgttcaagtaagttggtgtctgaaaaccaatgggttccaagaaggatttgctgctatgtctctagttcaacaaactccagtcaatggtgcaagttcactaatatggcataccccatgagcccaattatccggaaaaggtcacactggagatcctttgctgcaagtttgaacttagaagatggccctgcaccctctgactcaacgtcatcttcatcagagcagactaccgccgatgctgatggaactaccaacggtgatgcatctgaagatctgctttctcaaaagctgagctctgatgagttaaaggctcttttggctgattcggaacgaagtaagcttttgagaagactcaacgaagcaaatcaatataaccgattcctcaagagacagttgcaaataaaggatgatgcagttgtaaagttcaaaggtgaacttgctgttttggaactagaactgcaagctctggttggcctagcctgaaagattgcttaatttgatgttccggtaggggctaggaggataaatggaaaatatattcaatctcatctt

SEQ ID NO: 453066 - DNA, 1328 bp, Sorghum bicolor
cgtccggcactaagaacaggcaagcctttttgggttgtatccgaagacatggaaagggatgtttttatgtcagcagacgaagccaaagcttatggacttgtcgatattgtaggggatgaaatgattgacgagcactgcgatactgatccagtgtggtttccagaaatgtttaaggattggtagtgggtggattccttgtaaatttatttcaaacctaaattcgggttttatgctatagaaaatagaaatacttcatgatgatgaatcatcaggttaagatcgatctaaaccaatccattttatatatacaatacatacgacatgccaacggttaaacaacttattagaaatgcaagacagccaatacgaaatgctagaaaatcggccgcgcttaagggatgtcctcagcgtcgaggaacatgtgcctagggtgtatactatcaaccccaaaaaacccaactctgccttacgtaaagttgccagagtacgattaacctctggatttgaaatcactgcttatatacctggtattggccataatttacaagaacattctgtagtattagtaagaggaggaagggttaaggatttacccggtgtgagatatcgcattattcgaggaaccttagatgctgtcgcagtaaagaatcgtcaacaagggcgttctaaatatggggccaaaaagccaaaaaaataagtgattcgtttgtagcccttataaaaagaaaacggattcttgaacctctttcacgctcatgtcacgtcgaggtactgcagaaaaaagaaccgcaaaatccgatccaatttttcgtaatcgattagttaacatggtggttaaccgtattatgaaagacggaaaaaaatcattggcttatcaaattctctatcgagccgtgaaaaagattcaacaaaagacagaaacaaatccactattggttttacgtcaagcaatacgtagagtaactcccaatataggagtaaaaacaagacgtaataaaaaaggatcgacgcggaaagttccgattgaaataggatctaaacaaggaagagcacttgccattcgttggttattagaagcatcccaaaagcgtccgggtcgaaatatggctttcaaattaagttccgaattagtagatgctgccaaagggagtgggggtgccatacgcaaaaaggaagcgactcatagaatggcagaggcaaatagagctcttgcacattttcgttaatccatgaacagaatctaggtatgtagacacatggatccatacatctcgatcggaaaagaatcaatagaaggagaatcggacgatatctttttcgaaacaaat

SEQ ID NO: 453067 - DNA, 1093 bp, Sorghum bicolor
ggcacgagggaactaatatatagataatcgaaattgaaaagaactgtcttttctgtatactttccccgttctattgctaccgcgggtcttatgcaatcgatcggatcatatagatatcccttcaacacaacataggtcatcgaaaggatctcggacgactcaccaaagcacgaaagccagttagaaaatggattcctatttgaagagtgcctaaccgcatggataagctcacattaacccgtcaattttggatccaattcgggatttttcttgggaagtttcgggaagaaattggaatggaataatatcgattcatacagaggaaaaagttctctattgatgcaaacgctgtacctagaggatagggatagaggaagagggaaaaatcgaaatgaaataaataaagaatgaagccaaaaaaataagtcgaagatagaagagcccagattcaaaatgaagaaatggaaactcgaaaaggatccttctgattctcaaagaatgaggggcaaggggattgataccgagaaagatttcttcttattataagacgtgatttgatccgcatatgtttgggtaaagaacaatcttctcctttaatcataaatggaaagtgttcaattagaacatgaaaacgtgactcaattggtcttagttagtcttcgggacggagtgggggaggggcggagactcccgaacgaggaaaaggatcccttcgaaagaattgaacgaggagccgtatgaggtgaaaatctcatgtacggttctgtagagggacagtaaggatgacttatctgtcgacttttccactatcaaccccaaaaaacccaactctgccttacgtaaagttgccagagtacgattaacctctggatttgaaatcactgcttatatacctggtattggccataatttacaagaacattctgtagtattagtaagaggaggaagggttaaggagtttacccggtgtgacgtatcgcattattcgaggaaccttatatgctgtcgcagtaaagaatcgtcaacatgggcgttctaaatatggggccaaaaagccaaataaataagtgattcgtttttagcccttataaaa

SEQ ID NO: 453068 - DNA, 602 bp, Sorghum bicolor
cgtccggtaaaaacaacacagatgaggtattcaagcaagctaaaaggaagggggctaagcaaggtccgtttgaggctcgccggcgatctagttcgaggaactttactgggactggcagacttctgacaggtgaaactgtagagcgtgatgcaccacagccaccagaagaaattgtccataacatctacttctggaggaatggcttcacagtaaacgatggcccacttagaagtttcgatgatccagcaaatgcgtcctttttgaagagcatcaaggattctgtctgcccaactgagcttgagccggctgatgggaaatctaaggtgaatgtgaatcttgtccggaaggaagaagaatttactgagccagtcaagcatgctgctccttttgaaggggaacgcaggaccctcatggaaccttctgacaataatacttccaatgctgctgcttccagtagtgtacctgctcctcggacaatcacagtggatgattctttgccatcaacctccctccaaatcaggtttgcagatggcagccgcttggttgcccgtttcaacacaagccacacaattagcgacgtgcgggcatttatcgacgcgaca

SEQ ID NO: 453069 - DNA, 1207 bp, Sorghum bicolor
cgtccggtcgtcgtcaattgctctggtgtcttcagagaccttttcatcaaccagatgaacctgctggaccgggcggtgaagatggtcgccgaactggacgagccagcagagatgaattacgtgcgcaagcatgcccaggagcaggcagaggagctcggcgtctcgctgagagaggcggcgacgagggtgttctcgaacgcatcaggctcctactcgtcgaacgtgaacctggcggtggagaacgcgtcgtggacagacgagaagcagctccaggacatgtacctgagccggaaatccttcgcgttcgacagcgacgctccaggggcaggcatgaaggagaagcgcaaggcgttcgagctcgctctggcgacggcggacgccacgttccagaacctcgactcgtcggagatctcgctgacggacgtgagccactacttcgactcggacccgacgaagctcgtgcaggggctgcgcaaggacggccgggcgccgtcgtcgtacattgctgacactaccacggcgaacgcccaggtgaggacgctgtcggagacggtgcgcctcgacgcgaggaccaagctgctgaaccccaagtggtacgaggggatgatgaagagcggatacgagggcgtcagggagatcgagaagcggctcaccaacaccggtgggtggagcgcgacgtctgggcaggtcgtcaactgggtgtacgaggaggcgaactccacgttcatcgaagacgaggcgatgaggaagaggctcatggagaccaaccccaattcgttcaggaagctggtgcagaccttcctggaagccagtggcagaggctactgggagacatcggaggagaacctggacaggctcagggagctctactcggaggttgaagacaagattgaggggattgacaggtaaattgatttgccagatttcggtcggtcggttccagcgttcaaacaataacgagcttggaactcttctgtctcatcgagacacttgtacaatgttgtacaaatatgtgtgtgatttatataaacttgtaacatgcaatactggaggatacaatctttaacagagagggtgattggaaagaagcatgagttgaagaagcgaaagcaatgatgtttcgtgtagagagggtttttttctctcacttgtaacttgtttcattcacaaagatgagtatatatatcagcgtcgtgacctgcctttg

SEQ ID NO: 453070 - DNA, 595 bp, Sorghum bicolor
accgggcccccccgcgtcgtaggcgtagcaaaatcagcaaggcaaaaacgaagcagaggccagggacgcgccagcgcgagcgataaggcacactgccatggccgccaccacggcgtactccaccgcgcttctcggcggggcgcgcctcccctctgcaagaggagccgccgcaccgccctcctccctcggcctcctcccgctgcggtctccgctccctctccggctccaagtccaagattctgcgccgccgaggctgtcgctgctccgggtgaaggcctcctccgatgactcctcggccgccagtggggacgagctcatcgccgacttgaaagccaagtgggacgccgtcgagaacaagagcactgtcctcacctacgccggcggcgccgtcgtcgctctctggctgacgtccgtcatcgtcggcgccatcaactccgtgcctctgctccccaagatcatggagctagtcgggctcggctacaccggatggttcgtctaccgctaccttctcttcaaggaaagcaggaaagagctcgccgacgacatcgagtcactcaagataaagattggctggtcagagtaaaatggttgtctc

SEQ ID NO: 453071 - DNA, 586 bp, Sorghum bicolor
cgtccgtgagaatccatatggtccacccccggaggtcgctgcaacgttaggtagcctcaagtttccctatgtgtaccctgatcctgaaagccgccacttgcgtgctgctcttgctgaagattctggacttgaatctgagtacatacttgctggatgtggtgcagatgagctaattgatttaattatgagatgtgtgctcgaaccaggtgacaaaattgttgattgccctccaacattcacaatgtatgagtttgatgcttcagtcaatggtgcacttgttatcaaggttccaagactgcctggtttttccctagacgttgatcgtattgtcgaagttgttgaacaggaaaagccaaaatgcatattcctgacatccccaaataatccagacggcagtgtaataaacgatgaggatcttttaaagatactggatcttccgatacttgtagtgctggatgaagcttatattgagttttcaatcctaaagtcaaagatggcatgggttaagaagcattgataattgattattctccgaacatttagcaaacgagcaggtttggctggtcttcgtgtgggttatggtgca

SEQ ID NO: 453072 - DNA, 838 bp, Sorghum bicolor
  unsure (1)..(838): unsure at all n locations
cgtccgagcagatggtgaggccgcgcgccgtcgccgtcgccaccgctgggtcgcgccacggccacggcggccacgccttctcctgcagcttcctcaaggcctgcttcctctgcaagcgggagctcagccctgacaaggacgtgtatatgtatagaggcgaccaggggttctgcagcgaggagtgccggtggcagcagatcctggtggacgagcgggaggcggcgacggcgacgagcaagcaggagctgcagcggcgagggcaggcggcggggcaggcccgccactacagcccccaccccacgcccatccggggcaggccgccgccgaggaagacacttgccgtagcctagctagaggtccttccagtcgcctaataaaccgatagcgctgagaaggacgaaacaagtctgatggtggatgacaagaacagcactactactgctgctactagcgagtacggtctactactggagtgaagggtggttaaaaatccactcttctaatcaccgagaggatgagcactactagaggcgtcaccatcaaccaataaccaattactgtatcataaatatatagtgatgtgtgatgcatgctgtagttgtggttatatatacttattatatcatatatagtgatgcatgagctgagaggtggggttggaaataaaaagggacttagctaccagcagagagagaagttgattgggtgttttttctaaagctttttttgcatgttgcaatcttgaagctaaagctgtactgtagcatgctcttgttacaaaattacatncagttgattntttagtanagcatgggaaagaaaggtgaggcattgcaaa

SEQ ID NO: 453073 - DNA, 573 bp, Sorghum bicolor
cgtccgtatagaccttatttgggtgttggtctaggacctttatcgtttttgaccaagttgcggataccacaccctggaagagttggtggcagattcttcatcaaatatggaatgcctgcgatgctgagctgggtgcttggtggcaacagctcaaagctagagggaaggcctttaagctgccgactttctgacaaggcaaatgaccagctttatcgatggtttgaggatgatgacgctctggaacaagctatgggtggagaatggtacctcttcccaacaagtgaaggaaacagcaatagcttccagcccattcgtttaattagggacgagcagaggtcactctctgttggaagccagtcagatcctaatgacacagattcttccctatcattgccgtttccacagatatcagataggcatgctacaatcacatgcaagaataaggctttctatctgactgatcatgggagtgaacatggtacctggattaccgacaatgaaggtagacgttaccgtgtgccaccaaactttccagttcgtttccatccctccgacgtcattgagtttggtctg

SEQ ID NO: 453074 - DNA, 588 bp, Sorghum bicolor
cgtccgagacactagcgagccttcacttgcgttcccctggcccccgtcctctgttccagcgtttccgccgctctccagaagccctgcctacccgatgtccgtcgcgtccgtggccgccctccggacggccgcctccggctccggccggtgccacggcgcgggttccccacaggtcggcctgaacgggggcaggttcttgatgatgcagaggagggagctggtgaccaaggccgggatcgcgctcgccgtctcctgctccatggcaacttctccagccccggccaacggctctgctcaagggctggaggttttgccgttcaaagcggacgggtacaacttctggacgtggcggggtcgccggatacactacgtcgagcaaggcgccgggcagcccattgtgctcatccacggcttcggcgcttccgccttccactggaggtacaacatccctgagctggccaagaagtacaaggtgtacgccatagacctgctggggttcgggtggagcgagaaggcgctggtggactacgaggccaccatctggatggagcaggtcttcgacttcctccgggagatcgtcaaggagcc

SEQ ID NO: 453075 - DNA, 489 bp, Sorghum bicolor
cgtccgcatcactgtctaccattatctctgagaatccaaaagtggtcactgttgcaccatcagacacagttttgacagcatcaaagaagatgctggaattaaaagtgagttcagcagttgtagcaattgaaaacaaacctgggggaattctaacatctagagatatattgatgcgtgttatcgcccaaaatcttcctcctgagtccactacagtcgaaaaggtcatgactcagagtcctgaatgtgccacagtggacatgccaatccttgatgctcttcacacaatgcatgatggaaaatttttacatttgcctgttctggacagggatggaaatgttgtgactgttgttgatgttcttcacatcactcatgctgcaattgctacggttggaaacagcggggcagctggatccgaggcaacatctgccatgatgcagaggttctgggattcagcaatgtccattggacctcttgatgatgatgatgact

SEQ ID NO: 453076 - DNA, 562 bp, Sorghum bicolor
cgtccgatgatttcagatgtttctcaggctggatggaccgttgataggttggcaatccacattcacccctcttatgtgccacgttgaaaattcttgtgaatgtgtgatactgtattggtttgccaaataaaattccctagctacattatcagcccgtcacatgagagagtggtcatattaggaggacagttgtgccatggagctagttgatctgctgcatagggtccatatgcattagatgctatttcgcggtgtctgttcatatagtagtatatcactcattctgcagatgttttgactgttcgctggccagctcctggtttaataggatggtgagcgtgcaactagtgactcgctatgtcctgtgacctgtgtgtcgcattttatccaggccatagaatacttgttctagttgatcgactaagactctagccttgggttagtagtatttctatttgttcgctgtagaagctacatcatctgctagtgggaatatgatactatgctgtgtgtcacactgcagtctctttactgtacagatcttctagctgtggctgtgatg

SEQ ID NO: 453077 - DNA, 1059 bp, Sorghum bicolor
  unsure (1)..(1059): unsure at all n locations
cgtccgcggacgcgtgggcgctcgccaaccaaggatgccagctgctgcttacggcgtcgcttctctccccgtcgcgagcgcggtgccgggcgctgaaagacctccgatcgacacccagccccttctccatggcgcgctgcacgtagaactgggtcgtcatcgacacgctgcgtcgtcaccatgcattctgccgacaagcggngcgccatggctcgaatccggcggcctccctcagtcttccctcagatctcacaggtacggcgagctccctccctctccctcggcagctaatcaacgatggggtggttggccttcttctcccttggtggatccatgccacagtggccagatcgacaacatggtggtggccacggcatcgagcgggcgggctgcacgggtatgttcgtgtgtggtactcagcagattggctgctgactccaggtgaccaagcctncctcaatccctctcctccaacccctgagccccgatgcctggcctcagatctggcagcagcgatatggggaaggtctctgctggatctgaataaggtatgttgtttccctctgccatgtgcaattggattggtgcatgatttgtggtacattaagtttggtgccactatactgtgtgatctgtcatgtttggtttctccaacgatgcagatttccctcaaattacagagtataagattctcaaactgctggagcatggtgatgtcgcttcccctcatctaacatagaaatctgaatcaggaggcattataaggcccatatctaaaatttgattccattccgtgcttgatatgtgttgctgccaattcacttactaaactaagtagatatgtgttgctgccaattactgctaactaccaaacctactactgaactaagttgccagttgccttgctaccaaacctgccttggtcagtcttggaaatgttgatatgtgtaccaacactctgtttntattgtagataactngatgcctngttccttgcctacggttttaattacctacatactctcatggagaaaactacatgntgtattttcagggaga

SEQ ID NO: 453078 - DNA, 789 bp, Sorghum bicolor
cgtccgcggtgtggtcgtgcggtggcggtgctgcgctcctctctctgttcggcaggactcctcatcgccgcctcactactccaatccccatcgccattgccggcgcaagcaaagcaagagggggcggagcagcatggcggggcgctacgacagcaaccccttcgaggaggaggacgtgaaccctttctcggaacaagcacgcggcaaggctggtgggcagtccaacttcggtggtggcgcgttttacatgcctaacccaagaaacgtgcctcctgcatccaattcacgcctttcaccacttcctcctgaaccggcagacttcagtgctacagtggatataccccttgactcgtcaaaagacctgaagagaagagagaaggagctgcaagctagggaagctgaattgaacaagagggagaaggagctaaaacggagagaggaggctgcagcaagagctggcatcggcattgaggagaaaaactggcctccttttctgccactcatccatcatgatatcaccaatgagataccgagtcaccttcaaagaatgcaatatgttgcattagcgtcctttcttggattgattagctgcctattctggaatgtcatagcagttactacagcttggatcaagggggaaggtgccaagatctggttattggcaataatatacttcatatctggtgctactggtgcatatgtaccgtggtatcgtgctctgcataatgcaatgaggactgatagtgcatcgaagtttggattggccttcttgctttactagatggacat

SEQ ID NO: 453079 - DNA, 754 bp, Sorghum bicolor
cgtccgcatacctgaaggctggcacaccgacaccaacgggttttgtcatgaatctccaaccatctgaagcacaggtaggtcttgacatccggatgcctcctgatgttcatactgaagcactggagaggcgccttattgaagaatgggcaccttcctcacgcaacatgaccttcgagtttaaacagaggggttctgtcctggacaactttgggaagccagccttcacacctgctgacagctcgaacccatggtggccagtgcttggagaagctgttaagaaagctggcggtaaactcggtaaaccggaggtatttcctgcctctacagatgctcgctacttccggaagattggtttaccagcattcggtttctctcctatggcaaacacaccagtattgctccacgatcacaacgagttcctaagcaaagacgagtatatcaaaggaattggggtatacgagtcgatcatcagggagctggccactcacaacgatgaagccagagacgaagaatcgagggcagagctatgagatgaccttaccctcgatgcaattcttgaagctcaaatggagcactgaaatcatgtttgggcaaagctgctgattacgtgtctgctccaacggcaaaactgaaacagtgaacacgattacatgaaccttgtacattttcagtaaaattaaacactctgaataatccatactgcagctgcggtttcgcggtgcataacctagcactatgcactgactttttctgt

SEQ ID NO: 453080 - DNA, 368 bp, Sorghum bicolor
  unsure (1)..(368): unsure at all n locations
cgtccggctgctgtcgcgacaggcattgaggttgtgagcttcagcaggtcaggaagaccagcttactctgatccctgngttgatcaagtcaattggctagcaggagatgttttctatgcaagatgggatgaagtattggttgggtctaccgctgttgtgtctacccttggaggatttggcaatgaagaacaaatgaaaaggataaatggtgaggcaaatgtcatagcagtaaacgctgcanaagaatatggagtgccgaaattcaatttaatctctgttcatgattacaatcttncatcctttcttcttacatcgggttacttcactggtaagagaaaggcggaatctgaagtcctttccaaataccc

SEQ ID NO: 453081 - DNA, 478 bp, Sorghum bicolor
cgactcacgcgtccgatagaacatacatttttctgattttgatgttttaagaaatgagataggtgcatattccagcatgtccttgtcttatgaccacataccttcatgtgtgataccatctcttcattgtatcacaggtacattcaaggtgctcctcttctggggaactccgcagctgcttctgatgagatccttgcagttgacactccttcagaaggaggtgaggctgttattacgggtagcaatgacaaatctactcggtcaagtgtcacgtggagagcccggttcgtcgggcaagggtacaaacaggtttgtggccaagcggatgtgtggggcgacggcgtcgtacctgaaatggcagcgcatctggaaggagcactgaacataagctttgacggcgtgtaccactctcctgtaggctctgatgatgaacaaaggccctggtatggctcttcagcaatccttaagcagtgggtgc

SEQ ID NO: 453082 - DNA, 1005 bp, Sorghum bicolor
cgtccgtctagatcctcttggccaattttcggatcaacaaatatgggaggttcttgacaaatgtcagcttcttgaagctgtccaggagaaggaacagggattggactcacttgttgtggaggatggttcgaactggagcatgggtcaaaggcagctcttctgtttgggacgtgcacttctaagaagatgtcgtatcttagttctcgatgaggccacggcatctatagacaatgctactgatgctatccttcagaaaacaatcagggcagaattcagagattgcactgttatcactgttgcacaccgtatacccactgttatggactgcaatatggtacttgcaatgagtgaccggaaactagtggagtatgacaaacctacaaagctcatggaaacggaaggatctctcttccgtgacctcgtcaaagagtactggtcatacacatcgaatggaaatatttagaactcaccgcgtcagagagtactggtcatactcatcaattggaaatacatgttcagtctcttaaaaggagatacaaaaatcttggctcgcacaactgaagaagtcttctatctgaaatcttaagaaaaggaatcaggcattgtcaggaaatgctcgttatcaagttttcaccacccattctgagcaactttttgatcacttctgttttgggtcattgattcccttcaggcactgaatagaaggaaacctgtccctcaaaaaaaaaaaaaacagaggaaatcttcagcatttctttgctccaatagtgaggtaaataaaagaataaatgggaggtattaacatcaagtctgcaacggtgatacttcatgttcatagaaatgcttaggctattccattgaaattttgcggtgtatacttacattcctacaaaactaagtcgagtatatgatgtctgggggggaaataatggcttttcagcaccctcttgttcatgcttaatgtatattcatcgagagaaccgatttggtggtaaaaaaaaacac

SEQ ID NO: 453083 - DNA, 433 bp, Sorghum bicolor
cgacccacgcgtccggttgcttttgatgatattcctgaagatggtttaaatagccctctgcgtcttgagaagcttgcaaatgaggtcacttatcggaggatgaaggatgcactaattgaacttagcaaggctgtccaaacaggaccttgtgcaaaccttgttcctgttttatttggagagaaggcacccatgcgctccaaggatactatgaaattcagtccattcaataagaacttggatgattcacagaaagaggctatttcaaaggctcttggatcaagggatgttttcttgcttcatggacctcctggaactgggaaaacaacaactattattgagataatattgcaggaggtcaagcgtggatcaaagattcttgcctgtgctgcttctaatattgctgtggataatatttgtgaacgacttgcacgat

SEQ ID NO: 453084 - DNA, 609 bp, Sorghum bicolor
aaatctcaaaagcgtcatctatatccacaggtcaagatttcaacgattgcccaaagttactcagagacatcaatcaaataacagaacgagtgatctaacattgtgagacaaacatgtccaagttcgttcataaacatggcgcttctacaattcatggttcatggatacatgcgccttcactcagggtttttctcaacaacaggtttaagcagaagcagtaggcgcatcagtcatttcctgttcaaccggagttttctgaaccgggtagtagtggtagtgcagctccccaacatcatccccagaaagctttgtccaaccatcagggccaacatgataaacactaacacaaccaccacttgctgcatcacggaaggttgccccataaatagcccgtcgcgctaattcggcagcttcctcaactgacatgttgaagcggtaaccgtcgtccaaaacaccataagcatagagggaaccagagccaacagagaacttgtttcccacaagccttgcaccctcactgtcaacatagtacaagccagggcccttctcatcccatccagcaatcattgtaccaatcgacagtcccatcccacgatatgaataaaggat

SEQ ID NO: 453085 - DNA, 443 bp, Sorghum bicolor
cgtccggctcgcgcgacatggcgcccaccgtccgatggtccccgctgctcttcctcctcctgcgcgcggcggccaccgcgaccgcgacggcgacgaacacgacggcagagcatccgtccggctccgacccgcccccgtcgccgacgcccacgccgacgccgtggccggagcgtttccacgcggcgctgttcacgaacctgaccaactactcggacgcgtcgacgggcccgccgctgcgcatcacggacctctactacgactggccgcggcggcggaacctgaacctggtgcgccaccagctgtcgcccgacccgctctacgacgtggagtggaacaacggcaccaccttctacttcgacttcagggcctgccgcgtcgagcggttccccgtcggcgtgctcccgccatggtggctctccggcggcggcgcccagtacctgggc

SEQ ID NO: 453086 - DNA, 492 bp, Sorghum bicolor
cgtccgatttgatccacgccatatgcgcatttccatccaaggaagtggaatttatttgaatcgagaaagagggcacagcattgacccgattcacatagatgatccactttgccctgctaacaatgtgggcaggaattgtttccgcattcaccaatgcattaaggcatttgctgatgcttttgctgttcttgagaatgagctactgcagttcagttcagaatgtagcatgcctgcatcagcattcaatatactaaagaaaataatcccgagtatcgattctgatgagctgtagctataaaaagaggcaggattccaacacaatacatttgatgtcagggtggaatgacctgtgctgcgttctagacactctgatggctatgcagctgctcagaagcctcagtctggcaagtttgatacctctggaatagaccaaaaagtagaccttgcagatggcaatattcaaatgccagcgcatgtgtgttcatgtaatgg

SEQ ID NO: 453087 - DNA, 1167 bp, Sorghum bicolor
ggcacgaggacaccgccaggcgccagccatcttccggccgctgcccccccaccgggaggttgaattgccttctggagtcctctcctgttttcagaggaatgtgcatatagcttggagtctgatgagtaatcagtcatgctgatgctacatgaaactgttccttttgtgaggcctagttcttgccgggacctaaaactctctgaaaagagtgcctctgcttttcattgtaaattaggatgcagtgcagtttgcagttcagcagaaggccatcatgtacagaagccacacattgttcacagccacaaagttaacttcactagaaccagccatcttctgtgtaaaagcttaaataaaagaactacaaggcactggctgcatcgattccatgttaatgcttcgcccgatgatgaattccgctcatcacgtaacatagcgatcagtttattcaagcgatataagaaaattattgatcgaggaggaggtggagaaaacctaaaagagtttgtcagtgctggagtgaccgcatatgcactagggtgtacagatgaggggcttagaaaggaacttatggatcttgaagattctggtctagagattgaaggcttagggtccttaggggggaccagctcgaagttcaaagtccactcctttgagattcgtgagtgcattatgtggctcagtatagtgttcatcacaatattgtgcacaccacaactaacagttaccaggtggtctactaacccaccggtgtcagctgacgtcttgcatcagtggaaaggattttgtgctataatcgcaaacgcttactatgtcaaaggaatggcatggttaccagtgaaaaccttgcagctggaacagatggctgtcacaggaaattcagaggaaccatcagtagttgctagccgcatgcagttagttttcagcacattagaggtagtcagcccacagtggccaagagtgtgattatatgaaagcaatacgatcaaacaaaggtctgcagttttattctgaccagaaagatatgcatgttcaagttcaaacctctgtcatggtgcaacaaatgatactcccctatgtaaattttaactcaaatgtcaaataaaaatgttagtgtactttattgtgaagtatttgatttgatatacatatacaacaacttctatgtgg

SEQ ID NO: 453088 - DNA, 1320 bp, Sorghum bicolor
cgtgcgccaaaaagaaaatgatggcagaagatgattgtacagacatacctagtgaaataaatactgaaactgctgatttgattagctcaataggcagaaacacagaaggccaacaagcagtacgagctgttgatgcacctgatggcccttccaagatgcccgatggaaatgataagaatcatgattctcatatcgtggtgacaccccatgagttgggtttgaagagattgagaacagatggagctgcagatgaaatccatgatgagcgaaatattctcaaaagatcagatcagtcagccttcaccaggtaccatacatctgtggcttccaatcaaggtggagcaagatgtggggaaagctcttcaccacaagataacagttctgaggctgtgaaaacagactctacatgcaagatgaagtcaaattcagatgctgctccaataaagcagggctccaatggcagtagcaacaacgatgtgggctccagtacaaagaatgttattgcaaagccttcagctaacagggagagagtaacgtcaccatcagccatcaaatctacccagcatgcctcagcatttcatactatacagaatcaaacatcacctgctaatctggttggtaaagacaaagctgatgaaggaatttccaatgcagtgaaaatgagccacccaacagaggttccacaaatgctgcgtccagcatcatcaccacgtgcattattacctccatgttatgacacagaaacagtcatcaatcgaccgtggatcatcagatgttcagtgtggttcgtcaaatgtgtttgatcctcctgttgaaggacatgctgcaaactatagtgtgaatgggggtgtctcagttggtcataatgggtgcaatggccagaatggaacgagcactgtccccaatattgcaagaccaaacatagagagtgttaatggtaccgtgagccaaaatatcgctggaggtggcattgtaagtgggagtgggagtggcaatgatgtgtatcagaatcgattcccccaacgagaagctgcattgaacaaattcagactgaagcggaaagatcggaactttggtaaaaaggtagcctgttttcagttacatgcctgtcgtagtagctatgacttgaaatcagtaataggtatttgagtgttgaagggccttccactgagtatgtcaagaaagagtagggatccaaatggtttgcacaattattaccagaaaagatagaagtgattattaataataatctctacctttggaggatataaaatcgattatgcttcttccaactaccccttttgtctttttttagaaaaa

SEQ ID NO: 453089 - DNA, 380 bp, Sorghum bicolor
  unsure (1)..(380): unsure at all n locations
cgtccggaagagcaaacatggccatcaccagcagctcctccggccagtgcagctcctgtccatggcgcttgcgccacggtaactctcctactagcactagccgccggcagcctcctcccggtaccggcgttggcgcgagggtcctccgaggagcaggaccaccagcagcgtgaggacgacctgatccggggcctgccggggctgccgcccaacgacgacgtgccgttcgacatgtacggtggctacatcaccgtcgacgagcaggctggccgcgcgctctactactggttccaagaggccgaccgcaccgaggtcgaggaccccgacgccgcgccgttcctcctntggctcaacggcggccctgggtgctcctccatcgg

SEQ ID NO: 453090 - DNA, 368 bp, Sorghum bicolor
cgtccgccacaccccatcccactccaagaccctccatcctgccatccatcagcagcagcagcagcagcgcaggcaaagcaagcaagagcatggcgcgccgtggcagcctgctcgccgtcgccgcggcgctgctggtcgccgtcgttgccgcggcggtgccgccgacgtgcgagcgcatcgagtgcccggcgtacgaggtggtggacagcgcgaacgggttcgtgatccggcggtacacggacgccatgtggatcaccacggcgcccatcgaggacatctccttcgtcgccgccacgcgcactcggctttctacagctggccatctacatccagggcaagaacttgtacaacgagacgatcgagatgac

SEQ ID NO: 453091 - DNA, 560 bp, Sorghum bicolor
cgtccgctccatggcggtgccggcctccgcctccgcgtgcgtgcgcgccggcccgccgccgtcacgccgcgcgtgtaccagtaccactggcggcacggggaccgcggcgttctcgctgatctgccgcaagagactaccgccgccgacacggcagccgatccacctccagctccagggccgtgccagctccgacctccgctgccgccggcgtctcctcacggcgcgaggcgagcgcccggccccggatgaggacgaggaggaggcggcgggtgcaggcggtggttcgttcgacgcggcggtggcgctgttcaaccgcggggagtaccacgcgtgccacgacgtggtggaggagctgtggtacggcgccgaggaccccgcgcggacgctcctccacggcgtcctccagtgcgccgtcggcttccaccacctcttcaaccagaaccaccggggcgcgattattgaacttcgcaagggcttctgcaagctccgcaagctgcagctagacagcgacggcgacagcggcggcggcggccctttctcccggttccgggacgaggtcc

SEQ ID NO: 453092 - DNA, 500 bp, Sorghum bicolor
cgtccgatttaatcctttgttttcttctccgatgagcttactaaggctttgtttagttcaccccgaaaagcaaaaagttttcaagattccccgtcacatcgaatctttcggcacatgcatgaagcattaaatatagacgaaaataaaaattaattgcacagtttacctgtaaatcgcgatacgaatcttttgatcctagttagtccataattggacaatatttggcacaaacaaacgaaagtgctacagtagcgaaatccaaaatcttttcgcatctaaacaaggcctaaggtttctaaatagattgctgaccaggctgcattgcttgaacataggtcgtcattgcttctcatccatccatccatccatcttgacctttttagattcaaattgattaacttgccctcgtaaaaatggtttcattagctatttgtaaaatctgaatgtgaggctgtatggtgatattggaattaatgtttatcaggttggtcgattcaaag

SEQ ID NO: 453093 - DNA, 758 bp, Sorghum bicolor
ggcacgaggcggcagcccttggcgaccaggagccttgtgtgtttctaggcttttagctttcagatttatgggttgtggcacacagtttgttttaatctgtgcgctgaacaaacaagtctcatatttgtgacttgtaggattgttacaatccaacacttgccttcattctgcaggttttagcaagcaggttgaaacaagcgtggccttcaagctggtaagaagcagattattatgttgcagtctgttctagttcagagttgcgccgcgaagatgttctcgtttgctttagcttgagattgtgaaagctttttctctactacaacccaagctttcctgctacattctgtttccacccacaaaacccactttcctagctcgacgaagagccctcacctccagtcatgacggcgccccaagcagccatggccggtcagccagtgaatgccgccgcggtggatgagcgtctcctggtcgatcaggaggccaaccaccacccccaaccggagaacaatggtgataacagctgcttcccctggccgaccgttttgggtttcctcatcctcagcttcaacgcggcaatggccatcatccgatcccaaggcgatgtgatggccatcgccttcgtcggtttcgcctatgccatcctcgtcgcgctttttgtctgcctgaggatgtacgagcgtgcccgtgctgggtcgtccaagagggagtggctcaagatcgctgtatggatactgactactctggtgacgtcagct

SEQ ID NO: 453094 - DNA, 514 bp, Sorghum bicolor
cgtccggtttttagaatctcagaacactggatggagcataacatccctttctgttactgcaagcaaaatatttgatatacctagtggaacaagctcaatcttgagatacattaaaggtcctaattctgctgcacctccggctatacctgattcttcgtctgtacctgaggatccatctcttgacaacgatgtatttgtgaagccaattcatgaagaacaatgccagccatctacgtctgagaaagaagacaataatacgcattctgtgtctgcgatttcagctaaacaatgccaagcaaataaagaaaaaagaatatcaaagaagttgcctgaagttaagggaacttcctcaatattgaagtttctttcacggggtcaatctaccttccatgagaaaagaaaatctgatggactaatttgcagccatcaaggtttggtggactgtaagatgctgatgcagatattgatttaaccactgccacaattgacaattattcatttgctgaatattcat

SEQ ID NO: 453095 - DNA, 388 bp, Sorghum bicolor
cgtccgcccgaattactttggggagatgttcctttggtggggaatattgcgcgcatcaaccccagttctctcagatgctgaatggcttgtgatgcttggacctatattcctgactcttctgcttctttttgttagtggaatcccactccttgagtcatctgctgataagcgctatggacgaatggaggaataccgtgtatacaagaacactacaagccctcttatcccattgccaccagccgtgtacggttccctgcctgcatggttcaaggttgccttcctccttgagctccccctctacaatcctgggccaggagctgatccaatcagttgagtgacgcttgcaaaattgttctgctgcccctcagtgataaacatgtatagaata

SEQ ID NO: 453096 - DNA, 526 bp, Sorghum bicolor
cgtccgcaacgatgccccagctcttaagaaggccgacatcggtattgctgtcgcggatgctactgatgctgcaaggagtgcttctgatattgtccttactgagccaggtcttagtgtcattatcagcgctgtccttactagcagatgcatcttccagaggatgaagaattacaccatttatgctgtttccatcaccatccgtatagtgcttggatttatgctcattgctttgatctggaaatatgatttctctcccttcatggtccttatcattgccattctcaatgacggtactatcatgaccatctctaaggacagagttaagccatctcccttgcccgacagctggaagctgaaggaaatcttcgctaccggtatcgtgcttggaagctaccttgctataatgactgtcattttcttctgggctatgcacaagaccgacttcttctcggacaaattcggtgggaggtcaatcagggacagtgagcatgagatgatgtctgcgctgtaccttcaagtcagtatt

SEQ ID NO: 453097 - DNA, 761 bp, Sorghum bicolor
cgtccgcgacgtgccgctgcgcgcaggggacggcgtgttccactttgtcgtcgagatccccagagagagcaacgccaggatggaggtcttcaccgaggagggcttcacgcccatcaagcaggacaccgagaagggcaaccttcgatactacccgtacaacattaactggaattatggatgactatctgaaacatgggaggacccgacttctgcaaattccgatgttgaaggagcattcggggataatgatcctgttgatgttgttgagataggtgaaagacgtgccaatatcggggatgttcttaaggttaagccattggcagctttagcaatgattgatgaaggggagcttgactggaaaattgtggccatttctttggatgacccgaaagcatctcttgtgaacgacgtggatgatgttgagaagcattttccggggacactgactgccatcagagactggttcagagactacaagatacctgatggaaagcctgccaacagatttggtctcggcaacaagcccgcaagcaaggaatatgccctgaaggtcattgaagagaccaacgaatcatgggagaaattggtaaagaggaatattcctgctggagagctctcgttagcctaaccttggcccatgggaagccaccacattctttgaactgctttcataagcatgtcgttttgtatgatgtcaccatgattcttcgtttgcattccaaacctttttacgaactgtttagcaaaaataatcttatcgg

SEQ ID NO: 453098 - DNA, 490 bp, Sorghum bicolor
ggcgtccggccaaacctactactgctacaagccaacaaaccaaggtccgcccctaacaagcagttcccgaagcgacaacttgagcacacacataagcaaagccatggcaaaggcacaggcaatggccgcgctgatgctgaccgtcttggtggtcctggcggcgtcggccgagatggcgcacggcgtctgcaacctgtcgagcgccggcatccgggcgtgccagccggcggcagccatccgcaacccgacggagcagccgtcggccgagtgctgcgccgcgctggcgggggccgacctggcgtgcctgtgccggtacaagaacgccgccggcgtgtgggtgaggttctaccggatcgacatcaaccgcgccatggggctgtcgggcaatgtgcggtctcgccatgccagccaactgctgaggcatggtcaccgtgcgttactggctcatccacaataatgcaatgcaactgcttgtgccgcgcgcgcgtgc

SEQ ID NO: 453099 - DNA, 584 bp, Sorghum bicolor
cgtccggtgaggttaacctccaattggtcattcacaattcagaagctcataagattttggtgagagtggttggttttgatgtaatgccagagaaaagccaaactgtccatcctcatgactcaaacagtgctcagggtggatggtatgatgtatcactggaaaatgacgtaaaggccatctctagttccaagagtacacatcaagagaagcaatcttcgaagagcatttcaccatatgtttggtgttcattgagttgtgctcaaactgagctccaacctgacagttgtgctagagttcctctaaaagtgtgcatattcgcaccaggtacatacaatttttccaattatgagctgcaatggaaagtgcatccatctgagggaccacatgtggatgaaaatgagaaattgttatctggtggtggtctagggcatcctttctatgttactgtccttcaaagtgtctaagtaattatcaggatttgagaagtaccttcttggacgttcaataagtttaaaacctaggaattacaaccaattgcaatggggcgatgataataggcgccaaccaatgcagtcctggtggct

SEQ ID NO: 453100 - DNA, 575 bp, Sorghum bicolor
tcgacccacgcgtgcggttgccgtgctgatttttttaggtggttactggcctgcctgtctcgagcgggaagctccggattacgtgaggcctgtgagctgggttgggtggggactcagggtgtgccgcctgaggccgaggagtaggagaggggcgggggcggcatgaggatccagtgcgacgcgtgcgaggccgcggcagccacggtggtgtgctgcgccgacgaggcggcgctgtgcgcgcgctgcgacgtcgagatccacgccgccaacaagctcgccagcaagcaccagcggctcccgctcgcgctcggcgacgccaccgccgccagcgccagcagcctcccgcgctgcgacgtctgccaggagaagccggccttcatcttctgcgtcgaggacagggcgctcttctgccgcgactgcgacgagcccatccacgttcccggcacgctctccggcaaccaccagcgctacctcgccaccggcatccgcgtcggcttcagctccgtctgcggcgccggcgccggcactgagggccttccggcgccggcgcccgccaagggcagcttcaagcccgc

SEQ ID NO: 453101 - DNA, 1057 bp, Sorghum bicolor
cgtccgcgtcgctgcaggctggcaggccggcgccatacccgcggctaccgctgccgtcgtcgtcgtcgggctacaggcactccaagtccgtctccgtgaagaccctcgccctgttcggcaaatccaaggtcaagaccgcgccgtcgaagaaggctgctgcgcccaagcccaagcccaaggttgaggatggtatcttcggcacgtccggcgggatcggtttcaccaaggagaacgagctgttcgtcggccgtgttgccatgcttggttttgccgcatcgctgcttggagaggccatcaccgggaagggcatccttgcccagctgaacctggagacgggcatccccatctacgaggcggagcccctcctcctgttcttcatcctcttcaccctccttggcgccattggcgctctcggtgaccgtggtcgcttcgtcgacgaggaggtcaccggcctcgacaaggccgtcatccaacccggcaagggcttccgcggcgccctcggcctcagcgagggagggccgctgtttgggttcaccaagtcgaacgagctgttcgtggggcggctggcgcagctgggcgtggccttctccatcatcggcgagatcatcacggggaagggcgcgctggcgcagctcaacatcgagacaggggtgcccatcaacgagatcgagccgctcgtcatcttcaacgtcctcttcttcttcgtcgccgccatcaaccctggcaacggcaggttcatcatcggcgaggacgaagagtaggctgatgctgctgtcctcgaacctgatgagtgatgagtagtactgtgcgcttgggttacctgtgctgtgttgatcgatcagtgcgtctcgcagtgcgtgtgcgtacgtgctttgttgtgtattagtaagcgtgatgagacctcgaaaggtagggtgtcgtgttgagttgtcttgtagaaacaagagcttactcgtattgtagcttcaaaatgcatgaccgtacacctgtcaaacatggacgaatcccgtcaaaaaaaaaaaacatggacgaatcccgtaaaaaaaacatggccggt

SEQ ID NO: 453102 - DNA, 572 bp, Sorghum bicolor
  unsure (1)..(572): unsure at all n locations
acgcgtccgctcccgctaagtggaacaccgagtacaaggacttcaacaggaacgacgtcgatggcgcttccgcacctgtcgctgagaccacctccacgtccgaggtcctcgccgctcctgctgtccccgcaactggtctcgcacctgccgaagaggctgcggcggaagccgagggcgtccgcggagacgatggcgacggagaagctgggcatcaaggtggagcgcaacccgcccgagtcccgcctctccgagctcggcgtccgccagtggcccaagtgggggtgcgacaagagcaagttcccgtggacctactccgccaaggagacgtgctacctgctgcaggggaaggtgaaggtgtaccccgagggtcacggcgaggagttcggggagatcgccgcgggggaccttgtcgtcttccccaagggcatgagctgcacctggggcgtcgccgaggccgtcgacaagcactaccaacttcgagtagccgccgacgacnacnacnacnatgtgtggtaagcggnggcagtaatttgtgatggcctagtccaaacgtttggattgctcccgttagc

SEQ ID NO: 453103 - DNA, 451 bp, Sorghum bicolor
gattccggtcgaccacgcgtccgcccacgcgtccggcgtgaggtaggggagaacttttatacttttgagacatggggagaacagctgaatacattttgtgcggaagtggttcagagtgaagctttcttcatatgcaattcaattggaggggttgttggtctgcaggcagccgttatggaacctaaaaggtgtaagggaattgttttattggatatttcactaaggatgcttcacatcacaaagcagccatggtttggaaagcctttcatcaaatcttttcaaagtctcctaaggaacactattgttgggaagctattttttaatgctgttgctacaccagaatctgtgaaaaatattctttgccagtgttatcatgacacatctgcagtgacagatgagctagttcagattattctacaacctggtcttgatcctgggacaatggatgtat

SEQ ID NO: 453104 - DNA, 535 bp, Sorghum bicolor
ggtcgaccacgcgtccgctttcccctttacaccggagagcagagcagagcagcgcgcaccagaacgcagaggcaacaagcaagaagagccagagccggtctcccagtctccgatggcggctcgcgtcctcgctgccctgctcgccgccgccctcgccctcgccctcgccgcccccgcgcgggcgtccaacgacgagggcgacgcgctctacgcgctgcggcagcggctgtccgaccccaacggcgtgctgcagagctgggatcccacgctcgtcaacccctgcacctggttccacgtcacctgcgaccaggccagccgcgtcgtccgcctggatttaggcaactccaacgtctctggctccatcggccctgagctcggccgccttggcaacctcaaatacctggagctatacaggaacaatcttgacggtgagatcccaaaggaactgggcaacctcaagaacctgatcagcttggatttgtatgccaacaagctcactggaggaatccccaagtcactttccaaagctcgactc

SEQ ID NO: 453105 - DNA, 416 bp, Sorghum bicolor
acgcgtccgggaggacgtgcgatgtggccagagaagacggagaagaagccgacgagttggcggtccgaggcccacgacgtgctgttgcgggctcaagctcaagcggtgctccttcccaggcgatggaaattggtggtttgcggcaaatgaagacctagcatggtcatggttctatgcatatagtcaaaactttatgcgacggctccctcttccctcccctccagtaaatcgaaagacaaccagcctagtggagaatgaacatgactagtgccatggtgttgatgagattctagacaaggacacatccagcgtggcaagccaaaagtgacgctagcacatttcatgctggtagcaggcgggcctcttaccgagccttcttctatatcgtttggcttattgatgtgcaagagaataac

SEQ ID NO: 453106 - DNA, 628 bp, Sorghum bicolor
ggaatatgaagaagagaactttcaaatacttgggtttctttcaaagttattgtatttgaaatctctaattccacaatttaatttgcaggatgcgaggggaaatgatgtggagttgagtagatacaaggggaaggttctgcttatcgtgaatgtggcttcccaatggttaaaattctgataatcatttcctggttcttgaatgagtttctcccttctttttatgtgtgttttcctacctgacttggtatccttgcagtggtctgacaaattccaactatactgagttgggatcactccacaagaaatatggcgaaaaaggatttgagatactggcgttcccatgcaaccagtttgttggacaagagccaggtaccaatgaacagattgctgagtttgcttgcacccgtttcaaagcagattttcctgtttttggcaaggttgatgtgaatggcgggaaggctgctccgctgtataagttcctgaagtcagagagaggcggtctgtttggagaacgcatcaaatggaacttcaccaagtttttggttgacaaagatgggcacgttgtgagcagatatgcaccaaccaagctccccgtgagtattgagaatgacattcagaagcttttgga

SEQ ID NO: 453107 - DNA, 512 bp, Sorghum bicolor
  unsure (1)..(512): unsure at all n locations
cgtccgggagtggttgattggcgaagagaagtacaaacaacagacgcaggaaaagcacatccttttggcagttgctgacaagtttttggttgatagacaggcaaataaaactggagcaagcattctatgctttgatgagatacagactatcgatgtttttgcagttgtagcactttctggcattctaagcaggttgttaagcacagggacagtacttgtagcaaccagtaataaagcaccagaagatctgaatcaggatggaatgcaaagggacatcttccttgagttattatcaaaattggatgaaaactgcaataagattcttgtgggtactgaaaaggattatcgtcgcctaattccgacagaaggctcaactgaggttcactatttttggcctgctacttctgacgctcgcagcatgtatgaggctatgtggtatgacataactaacaaatcangaggaaatattaattctgtcaccattcctgtaatgtttgggaggatgtctgata

SEQ ID NO: 453108 - DNA, 1038 bp, Sorghum bicolor
cgtccgcagatattctcccttagcttccatggccttccctgtgcccttcctcctcctcctccttctcgttgctctgctcgtggtcgccgccacgcggctgtgggatcacgtcttcgtgcgcctcgtatggaggccgtatgccatcaccaaggggttcagagagcaagggatccatggaccttcctacagcttcttcaaaggctgcaacgaggacatcaggagcatgaaggagaagaccgacggtctcgtgctggacgtcggcgaccacaagtacctcccgcggatcgcgccacactatctcaaatggagggctcagtacggagaaccatttctgtactggtacgggccacaggcccgaatttgcatatttgactatgaattggcaaggcaaattctttcaagcaagtctgggcatttcgtgaagaacgatgcacaccctaccttgttggccttggttggtaagggactcgggttcatggaaggcgctgattgggtgcgccatcgcagggtaatcaaccctgttttcaccattgataagcttaagattatgacaaaaacaatgctggatttcgcccaaaacatggccagtgagttggaagctgaagcatcccaaagcgagaacggagaaacaggagtggatataaacgaacaattcagcgatctaacagttgacaacatagcctatgccatctttggaaacagttataagttaggtaaacaagtcttccaggcacagactgagatgttggggatcaccatggctactttccttgacgtgccgataccaggaatccagtatcttccaaccaaagcgaatcgacgaaaacagatacttgaaaggaagctcaagagcttactcacacagatcatacaaccacggttagcgagcggtgaatacggaaatgatctgctgggtgtgatgcttgaatcctgcactgaagccaagcaaggagggaagcaagtggatggtctcagcttgagcatggaggagatcatacatgagtgcaagttgttcttcttcgccggccatgaaaacac

SEQ ID NO: 453109 - DNA, 700 bp, Sorghum bicolor
cgtccggtcttctctatgttgcctgggtttagcgctgaactaatgccaaaaggacatgagaaggaaagccaggctaagattaagcgctacatgacgatgatggattccatgactgaagcagagcttgacagcacaaatcctaagctgatgaccgaatcacggatcattcggattgcacggggttctggccggcctgtcagggatgtcatggacatgctggaagagtacaagcggcttgctaaaatctggggcaagatgaagggtctcaagatcccaaagaaaggggagatgagtgcactgtcccgcaacatgaatgttcagcacatgagcaaggtccttcctccgcagatgcttaaacaagattggtggccatgggtggcctgcagtctctgatgaaacagatgggatcgaaggagatgagcggaatgtttggaggcatgggtggcgagcggtaattttacatcgagtcctgtttttggtggatcgttgttgtgatgctaaattgagaggctttagtgctgcggtctggtcatcatcagagctttcccattacttcagcctgcgccatgttatggaacaggtttagtgtagctcccagtgcctgaaaatttaattttatatagacagtatgtttgtccttggaaaaatggatgaggtatatatttgacaaagcgaatatgcttatatagattgttactcc

SEQ ID NO: 453110 - DNA, 481 bp, Sorghum bicolor
cgtccgatcaagaggaaacacatacacccacagccgccgcgccttccagtactcgaggaagaggaacaccagcagcgccatggccacatcgaccgctgccgtgctgtccccgccgtccgtggccgggctccgcctggcgccgtccccccgccgggcggcgcgcgtggcgttccgcgcggcgccggcgcggcggtccgtggcggcgcgcgcggagctgagcgcgtcgctggtgatcagcctgagcacgggcgtgtcgctgttcctgggccgcttcgtcttcttcaacttccagcgggagaacgtggcgaagcaggtgcccgcgcagaacggcaagacgcacttcgacgccggcgactagcgcgccaaggagttcgcggccctgctcaagtccaacgaccccgtgggcttcaacctcgtcgacgtcctcgcctggggctcgctcggccacattgtcggctactacattctcgccaccttcagc

SEQ ID NO: 453111 - DNA, 1078 bp, Sorghum bicolor
  unsure (1)..(1078): unsure at all n locations
cgtccggacaaccacatttccatcgatggagatacagagattgcatccacagaggacgtgagcacccgctttgaggctcttgggtggcacacgatctgggttaagaatgggaacaacggctatgacgacatccgtgcagccattaaggaggcgaaggcagttactgacaagcccaccttaatcaaggtgactaccacaatcggttttggatcgcccaacaaggccaactcatacagtgtgcatggaagtgcattgggtgccaaagaggttgaagcaaccaggcagaaccttggatggccctatgagccgttctttgttccagaggacgtcaagagccactggagccgccacacacctgaaggtgctgcacttgaggctgattggaatgctaagtttgcagagtacagaagaagtatgcagacgatgcagcaaccttgaaaagtatcatcacggagagttccctactggctgggctgatgcgcttcctaaatacactccagagagcccaggagatgccaccaggaacctctcccagcagtgcttgaatgcacttgctaatgttgtgcctggtcttattggaggtagtgctgatcttgcgtcctccaacatgactctgcttaagatctttggtgacttccagaaggatacggctgaagagcgcaatgtccggtttggagtcagagaacacggaatgggcgccatttgcaatggcattgctctgcacagtccagggttttttccatactgtgcatcattctttgtcttcactacttacatgagaggtgccatacatgaggtctcagctctgtctgaggctggagttactatgtnatgacccacgactctattggtcttggagaagatggtcgacccatcagcccattgagacacttggtgagtttccgtgcaatgccgaacatattgatgctccgccctgctgatggcaatgagaccgccggagcatacaaagttgcagttctcaacaggaagaggccatctattctcgctctttccaggcaaaagcttcctcacctgcctggtacctcaattgagggagtgagaagggtggatataccat

SEQ ID NO: 453112 - DNA, 854 bp, Sorghum bicolor
cgtccgctgtcggcagccaggaggatcgtcgaggccgaccagttcatgagggctggtctctacgacggatggctcccacacctgttcgttggcaacctgctcaaggggcagactgttggagtcattggagctggtcgcattggctctgcctatgcacgcatgatgattgagggcttcaagatgaatctcatctactacgacctgtatcaggccacacggcttgagaagtttgtcacagcatatgggcagttcctgaaagcaaatggtgaggagcctgtgcacctggaagagggccgccaccatggaggatgtcctcagggaggctgatgtgataagtctgcatccggttctggacaagaccacgtaccatctgataaaccctgaaaggctggccatcatgaagaaggaggctgttcttgtgaatgcaagccgagggcccgtgatcgatgaagtcgccctggtggagcacctcaaggctaaccccatgtttcgtgttggcctcgacgtctttgaggatgagccttacatgaaacctggtctcgctgacatgaagaatgccgtcgttgtgccgcacattgcatcagcctccaagtggacccgtgagggaatggcaacactgactgctctcaacgttcttggtaagatcaagggttaccctgtgtggggaaaccccaatcaggtggagcccttcttggacgagaattcgacgccaccgcgtgcctgcccaagcattcgttaatgccaaacagcttggcctgccatcggcaaagctttaggagccaacgctgacgctgccttggctagtatctacttacacgtgtcgtcgtcttcaggagcacatacactccatgcgt

SEQ ID NO: 453113 - DNA, 454 bp, Sorghum bicolor
cgtccgcgcaacaacagctttgattcccataactggggcccacttccagtgaggaatattgttggtagatctattctccggtattggccgccatcgaagattagtgatacaatttatgatcctgatgcaacccggttcgcggtgccgtcctgatagtagtcgcgctcaagtgatggtggatagcaagcgtgtacaataaccttatatttcgcggagcttctttgatgagctgagctccggtttcagttctctcagaatatttatttcctgagttttgcctgtaaattccttttggctgaccgatttgttttccctgccggctggcagatgcttgctcaaagcacggaatagtgcagcaccttgcattttgcaagctaattaataccggttcctttgtaaagtctataactctatataagagcagttgctgaatgaacattcgaaatttcgaatc

SEQ ID NO: 453114 - DNA, 485 bp, Sorghum bicolor
cgtccgctcctttgtttcacaggcacagaagctctttttgctgatctaggatacttcagcatcaaatcaatccagctaagctttggtttcggtttagtcccgtcagtattacttgcttacattgggcaagcagcatacttgagagtacacccggaggatgtggctaacactttctacagatcaactccaatctcgttgttctggccaacgttcattcttgcactagcagcatcgatcattggaagtcaagccatgatctcctgtgcctttgcaacaatttcacattcccaaacacttggttgctttccaagggtaaagatactgcacacctcaaggcaatactcaggccaattatatattcctgaagtaaactacttgctgtgcttgggtgcttgccttgtcacaattggcttcaggacaaccgtcatcattggggaagctcatggtatatgtgttgttcttgtgatgatcgtcacaaccctatt

SEQ ID NO: 453115 - DNA, 722 bp, Sorghum bicolor
cgtccgaccatcctacactctcccctgctgccagccaaccaagctccaagctccaagcacgcacagccactcagccacaccacaccaagatcatggccggcgtgaactccagcgtcgtcggactcaagcccgccgcggcagtgccccaggccgccgccgccgccgcctcgtcgcaggcgaagcgggtgcagctggtcgcgcccgagggccgccgcgccgcgctgctcggcctggcggccgtcttcgccgtcaccgccaccaccggatcggccaaggccgggatcatcgacgagtaccttgagaagagcaaggccaacaaggagctgaatgacaagaagaggctggccaccagcggcgccaactttgcgcgcgcctacaccgtcgagttcggcagctgcacgttcccctacaacttcactgggtgccaggacctcgccaagcagaagaaagtgcccttcatcaccgacgacctcgagatcgagtgcgaggggaaggagaagttcaagtgcggctccaacgttttctggaagtggggtgaagcaaaatgaggaggcgacctggtggtgtacatgtacgtgtgtgtgtacctagatgtgcgcccaaactgcaggaagaatttggatgtgtaattgtggtcagtgtatttgtgtcatctcatcatctgattgatcatcatgaacctcttgcattaattggggagagtgaattatagtattttgtcc

SEQ ID NO: 453116 - DNA, 730 bp, Sorghum bicolor
cgtccgggaatcttcaggactccattattggatgaccacagacaagtccgttaccatattcaccaaaagcaagtacaggttaccggatgtcatcgtggaaatgcaaatgtccgttatgcatggcttccttgctccaaaagcactgtgcatgaaatgatgctgaatggtgttttacaagttcataagccgcccattaattttgcagcctatggagagggcatcctccttacaccagcaaatcgttctgatgcctgtgtgaaatactctgatgttgatgaaaatggcattgtccatatgatgttgtgccgtgttataatggggaacgtagaaatagttcaccctggatctaatcagcaccgaacctagtagtgaccatgttgatagtggagtagatgaccttaaaaacccacaacattacattgtgtgggatatgaatatgaataggcacatctattctgagtttgtagtcatcgtcaaattgccttctaaaaccaaagattccttcgtgtctcaagaagagtgtcagaattcatctgatctgtcactggtgttgaattctagttcacctgactgtatttcagaggtaagatgctttacatggggtattaacaagatagtactgtaacactagagtcaactcctgttgctaacttgatatacagacgagttccactgttggagcagcaagagtgcagtaattcagattgtgtgatttgactcaataattgac

SEQ ID NO: 453117 - DNA, 808 bp, Sorghum bicolor
ctccctcctctccgcgggatccaccagcggcggcgcgtcccccgccgacgggcccgacctcgccgacggcggcgccgggggatacgcctccgacgacttcgtccagggctcctcctccgccagccgcgagcgcaagaaaggtgttccttggactgaagaagaacaccggaggtttttgctgggattacaaaagcttgggaaaggtgattggcgaggaatttctcgtaatttcgtggtctcaagaacacctactcaagtagcaagtcatgctcaaaaatattttatacgtcaatcaaatatgagcagaaggaagagaaggtctagcctttttgacatggtgcctgatgagtccatggaccttccaccccttcctggaagtcaagaaccagagacctcagtgttaaatcaagcaccactgccgcctcctgtggaggaggaggtggaatcaatggagtcagatacttctgctgttgcagagagttctacggcttctgctctcatgcccgagagtttacaacctaattatccgatgattgttccagcttatttctcaccgttcttgcaattctcagttcctttctggccaaatcaggaagatggaaggcgatctgccccaagaaacacacgagattgtcaaggcctgtgcagttcattccaagaatccaattaatgttgatgaacttgtgggcatgtcaaagctaagcataggggagcctggtcaggagacagtttctacttctctgtcgctaaatctgcttaggggtcaaaataagcagtcggctttccatgcaaatcctcaaacgagagc

SEQ ID NO: 453118 - DNA, 691 bp, Sorghum bicolor
  unsure (1)..(691): unsure at all n locations
cgtccgaaactaagaaaagatattatcagcgaatgcagcaggaatatgaagaggaacaagagagagttcaaagaataaggcatatgcaaagtgttttcaacagagagaggaataaatttagacgaggttatgaaagctggagggagaatggccctcctggtggctacaattacatccctcgggatgattggtattggcagactgatacttctcactcggaacataaaaatagacggacatacacaccggcgggacctagggtttatcctatgtcgcatcactatgcagttcttggtcttgacagatcacgtgcgacgccatatacagatgcagaagtgaagactgcttttagaacaaaagcgatggaagtccatcctgatcaaaatcaagatgatagagagggtgcagaagagaagttcaaggaggttgtcaagtcttacgaagcaattaaattggagagaaaaaatggtgtaagttgatgcagacttccaatgtgatcggtcatgcgggaaagactgggatcagttgtaaactgccttgtatatgtaatcagctgttgccggcagctttgatgaaattgtatcggctgctgctgttgagggcctgtgccctgtagcaacgagttccatttatgagcttgtgcgatgtanactaggataggttcaaaagatgtggtttgttctcatttagc

SEQ ID NO: 453119 - DNA, 922 bp, Sorghum bicolor
cgcgtccgcacacatttcccatggcagcgtccacggcctcgcccaccttcacgcccttcctccaccggcaccagcagcggcgcaccaacgcagtcgtcgtcgttgccgctgcgagcaaccccggcgccgaaccgactccagcgacggcggcggacggcgcgggaccagcagggaagaagaagacggtggacacgaggatacactggtccaaccctgacgaagggtgggtaggaggcaatgccaagaaggaaggcggcggcagtggcggcggcggcggcggcagcaagaacgagccgctgggagggaggttcgccgacctcatcaacaacgcgtccgagtctcactaccagttcctggggatagcgccggaggcggacatcgaggagatcaaggcagcgtaccggcggctgtccaaggagtaccacccggacacgacgacgctgccgctcaaggtggcgtcgcagaagttcatccgcctgcgggaggtgtacaacgtgctgagcaaggaggagacgcggcgcttctacgactggacgctggcacaggaggccgagagccgccgcctgcagcagctcaggtccaggctcgaagacccctacgagcaggacatcatcaactacaagtccgtgccggacatggttgaccgcctcggtggcaagaacatggagctcagcgaccaggccatgactgcgctcacctttgatatcgtcatcatcatcatctcaatctgcagcatcatctatgctgtgtacttcaaggagcagtactgatcgcagttgcaggagtgtaccatagacaacagtataggttaatgtcctaagattgtcttttcggatgttatgcagtgcgtcatgtgatgtcaaatacaataaggtatggtgccaacaatcctatatttgctatcaaatcatagttccagtat

SEQ ID NO: 453120 - DNA, 636 bp, Sorghum bicolor
cgtccgcgtttgagttgtttgacttgaccggacgacactggttggtggctgggccgcgatgccggactccgacaacgagtccggcgggccgagcaacgcggacttctcgtcgccgagggagcaggaccggttcctgccgatcgcgaacgtgagccggatcatgaagaaggcgctcccggccaacgccaagatctccaaggacgccaaggagacggtgcaggagtgcgtgtccgagttcatctccttcatcaccggcgaggcctccgacaagtgccagcgcgagaagcgcaagactatcaacggcgacgatctgctctgggccatgaccacgctcggctttgaggactacatcgagccgctcaagctctacctccacaagttccgcgagctcgagggcgagaaggccgccacgggcgtgcgggctcctcctccggcgtctcgcagccgcacagggagtcgacgccgtcgtcagcgcacaatggcgcgggcgggcccgtcggcggctatggcatgtacggcggcgccggcggaggcgggagcggcatgatcatgatgatgggacagcccatgtacggcggctccccaccggctgcgtcagggtacccgcagccaccgcaccaccagatggtcatgggt

SEQ ID NO: 453121 - DNA, 709 bp, Sorghum bicolor
cgtccgctgcgagtcctccaaccatggcgctcgcactagcctctcttccaatggcgtctctctccttccactccgggaggatctctgcggcggctatcggaggcgtcgcccgcactcgcagggcggccccggtgggggtatccgcctccccgttcctccggagctccttcgtctcgtcctcttccacgtcgtccgcctccgcctcccccgcctcgctcgcggcggcggtctcggcgtcgctggccttcacctcctcttcctcgttcgcgggttcatctttaggaattgagttcagctacaatagaatgacaacacgaagatcccgtggtatgcagattagggctggaaaggctgccctctgcatgaccaagaggtcaagatctaggaagtcacttgcccgtacacatggtttccgcaggcggatgcggactacttctggacgaaaggtactgaagcgcaggcgtgccaaaggcaggaaggttctttgcacaaggacaaactcacccactgggaagaaaagattattctaattacactgcaatttgatgtgcttgcaactgtaagtgtactttctacttccaatcttctaagccgtcgtctatctgtaacaatcatgtagcatcctattcctgtttgtttggttaaaatatctggatatattatcttctccacataacttcaagttactgttttgggatgtcgtgtcctt

SEQ ID NO: 453122 - DNA, 382 bp, Sorghum bicolor
cgacccacgcgtccgcaggtctcgaatcacagagggtgtaaacctcccattccgtgttctaccaacaatcaaggaattgggccgaacacgcatggagatcaatgtgaaagtcaagagtgttttcggtgctaagatgtttgcacttggtgtcgtcgttaaagttccggttccaaagcagacggctaagactagtttccaaacaacgtcaggcaaagcaaaatacaatgcttcgattgattcactggtgtggaagatcaggaaattccctggacagactgaggcaactatgagcgcagaggtggagttgatctctaccatgggtgaaaagaagtcttggaacagaccacctatccagatggaattccaggttccaatgttcact

SEQ ID NO: 453123 - DNA, 432 bp, Sorghum bicolor
cgtccgtacaatccgcaaggccggccaacgccaacccccaatcagcgaggcaacaacaaaccacccgaccggaccaaggagcagtagcaatgagcggcgccgcggaggaggcgttgctgcgggagtacgtgatcggcgaggagatcgggcgcgggcggttcgggacggtccgccgctgctacgccgcgtccacgggggagccgttcgcgctcaagacgacgcccaaggcggcgctgcggagctggaggcggaccccgctggacctgcgctggcggagccagagccaagggtgcactcttgggtgggccgcaggcggcaagttggttgggcttcaaagccggcttttaagtccccggcccagaagatacatatgaccgctatcagcaatttgcgggagcaggaagaaatgtgaatggagataacaacgataac

SEQ ID NO: 453124 - DNA, 751 bp, Sorghum bicolor
cgtccgcttcactctcaaccaaaatcaactgttggcacacctgcatatattgctcccgaggtcctctctagaaaagagtatgatggaaaggttgctgatgtttggtcttgcggagtcacactatatgtgatgcttgtcggcgcatatccttttgaagaccctgatgacccaaagaacttccgcaagacgatcactagaatactcagcgtacagtactcaattccagactatgttcgtgtttcaacggagtgcagacatctgctgtctcggatatttgttggaaatcctgagcagagaataaccattcctgagatcaagaaccacccgtggttcctcaagaacctgcccgtggagatgaccgacgagtaccagcagagcatgcagcagctggcagacatgaacaccccggggcagagcctggaggaggtcatggcgatcatccaggaggcgcagaagccaggggacgccgtgagcctcgccgggcagctgccctcctgcctggggagcatggaccttgatgacattgatttggacgatatcgatgacattgacatcgagaacagcggcgacttcgtttgtgcggtgtgatgctctcatgcgtgcgtgattcaggtagcagagtagcagagagctccctttggtggttggtgtatgtctgaagatccttgttgtgttatgttaccttccattcgttctggaacacgcatggtgggtaaccgagaaattggcgttcctgtggacaacatacatg

SEQ ID NO: 453125 - DNA, 439 bp, Sorghum bicolor
cgtccgcccacgcgtccggcttcttaccttgctggtcatcacaccactgttcaagtacaccccaaatgcgatcctgggttccatcataatttctgctgtgatcggccttgtggactatgaagcagcaattctcatttggaaagttgacaaaatggattccatcgcgtgcatgggagcattcttcggtgtggttttcaaatctgtcgagataggtctcctgattgctgtgtcaatctcgtttgccaaaatacttcttcaagtaacaagaccaaggactgtgctgctcggaaaccttgcaggcaccacaatttacaggaacaccgagcagtatccacatgcaaggcatgttcctggggtggtagtaagtgaggggtgattctgctatttatctctccaactccaactatgtccgagagagaattcttaagtggttgacaga

SEQ ID NO: 453126 - DNA, 938 bp, Sorghum bicolor
gccgcctcctcctcctccgacccaacaacaactccagcacacacacacacacacacgtatacagcctctcttagcttagcagctccagcaccggccggccggcaccacaacaatggccaccgtcctgagcagcctccgcgcgccggcctcgaccttcccctcctctctccgcgtcgcggcagcaccggcggcgccggccaccgtggcgctgctgcctgcggcgggcaacaaggtaccgggcatggccgcccgtggcgccaggctgcgcgcgcaggccacctacaacgtgaagctcgtgacgccggagggggaggtggagctgcagtgtcccgacgacgtgtacatcctggaccaggcccaggaggaaggcatcgacctgccctactcctgccgcgcggggtcctgctcctcctgcgccggcaaggtcgtcgccggcagcgtcgaccagtcagaccagagcttcctcgacgacgaccagatcgccgccggatgggtgctcacctgccacgcctaccccacctccgacgtcgtcatcgccacgcacttggaggacgagctcaccggctaatcatcatgtgttacatatgcatgcatgattgattaagcgcgcgcgtagtactgctgttgtttgttggttttgcatgcaactcatgtaagcgtggagttttcaaccgatcgatccgtggagagagagaggccctattacataccttgtgcgtgtatgcttattatatttgccgtacgtgttgagttgttgttaattaatatatggcctaattgtaatcttgttttataatttgctattttgtttcttttcgatctgtttatatataagcaaaatgactggttatatattgaatgtcttgaagtcaccaatatatcaagttgtttcattcgtttcttaattagtcatacagctcccaaatttcagactggtt

SEQ ID NO: 453127 - DNA, 697 bp, Sorghum bicolor
cgtccgggcgcgtggacctccgctcccgcgcttccatacgcgaggcctccgacgatgatatactcgtcgccgtctcttcctctcctgccgtccaaccagccgccgctcctgccgctcccacccaccgccaccaagtacgctactttcccctgcctaccaccagcagctccatctccaccaccgccaggctgcgcgcgcaggccacgtacaacgtgaagctgatcacgccggacggggaggtggagctgcaggtgcccgacgacgtgtacatcctggaccaggccgaggaggaagggatcgacctccccttctcctgccgcgcggggtcctgctcctcctgcgccggcaaggtcgtctccggcaccgtcgaccagtccgaccagagcttcctcgacgacgcccaggtcgaaggcggctgggtgctcacctgcgccgcctaccccacctccgacgtcgtcatcgagacgcacaaggaggaggacctcgtcggctaataagcagccgcatgccatgcacaccacacaccacacgatctgtatgggccaagcaagctagctagctaccatgccatgcatccatccatgacagcagctacaagctccatgcatcatcatctgttatactactctcttatgtataatccaattttacttcggatgcatgatttgatatatgagttgtactttgctcaagcaaa

SEQ ID NO: 453128 - DNA, 368 bp, Sorghum bicolor
cgtccgccaatcccatggcctccctcgccatcaccaagctcgccagcaccatcacacccacgaatccctggaagcccgcttgccaatgcgcttgcgtttccggtggccatggcagggagtcgtcggctctggccgcggaggctgagactgagcaggcggcggtgagcgaggccaggccaaggtttaggtgggacgcattcgggtccgaaatgagcgagtcgcagcagcgggcggtccggggcctgtctccgaagctgcccaaccgctgcaaggccctggtggcgcgcgtggtgtgcctgtgccccggcgacgagagccttggcgcgttgctcgcgtactgggtgaaagcgatgaagcccaagaaggcg

SEQ ID NO: 453129 - DNA, 672 bp, Sorghum bicolor
cgtccggaaacacccaccacacacaccactctgcacacacagaccgacgacgacgacggcacaggcgccatacgaaatggcctcccagctctccgccgccgtgccgcagttccacggcctccggggctacgcctcgcccaggtccgtggtggcgatgccgtccgtgagggtgggcaggaagaggtcccagggcatccgctgcgactacatcggctccgccaccaacctgatcatggtgacgacgacgacgctgatgctgttcgcggggcggttcgggctggcgccgtcggcgaaccggaaggcgacggcggggctgaagctggaggcgcgcgactccgggctgcagacgggcgaccccgccgggttcaccctcgccgacacgctggcatgcggcgccgtcggccacatcctcggcgtcggcatcgtgctcgggctcaagaacaccggcgccctcgaccagatcatcggctagacgatccctacggttgttcttaagctctgatgaagctcacaatcctcgatcgcgccgccgccgccggtgcatatgcctatgtaacgtgcgtgcgtgtgtgtttgtgcgcgcatgccatgcgtacgtctcgttccaatggacatagctcttgttgctccaaaaaaaaaaaaaaaaaaagagcgcccgggaagtccgggacc

SEQ ID NO: 453130 - DNA, 857 bp, Sorghum bicolor
cgcgtacgcgtgggctaaccctggtccctctcgcgcagccacagcctcctccttttccaccacctccacatcttccccggcggcggcgcggccagcttcaaccatggcggactccaaggccacctcggcggtcaccctccgcacccgcaagttcatgaccaaccgcctcctcgcccgcaagcaattcgtgcttgaggtgatccaccccggccgtgccaacgtctccaaggcggagttgaaggagaggcttgccaaggtgtacgaggtgaaggaccccaacaccatcttcgtcttcaagttccgcacccacttcggaggaggcaagtccactggcttcggcctcatctatgacaacctcgaggctgccaagaagttcgagcccaaataccgcctcatcaggaatggtcttgctactaaggttgagaagtcccgcaagcaaatgaaagagcggaagaacagggccaagaagatccgtggtgtcaagaagaccaaggctggtgatgccaagaagaagtaaacattcatttacatctgtaatactgttctggactctgggtggtctagttgcaatgtcataattgtggtcgtgttagattttgttccaccctcagcactgaagtgaagttttgtaattcctggttgtgaacctaccgagattggctgtagcatgttatgagatgagaaggttattaacttgcaagccaaaaaaaaaaaaaaaaaaaaaaaaaaaaaaaaaaaaaaaaaaaaaaaaaaaaaaaaaaaaaggaatgtatatggtgggggacaatggtattgacatcctttgaggactacagcgttctatactatttcacccttattaccctgtaattcaccac

SEQ ID NO: 453131 - DNA, 721 bp, Sorghum bicolor
cgtccgcaggtagagggtaagacgaaggagcatattcagaattcaaagtgctgtgctgggcccaattcccttttctgaaaaccaccaaaggttagtagctcctgggcccacatgcagagataacaggagccaggagcgtgagagtgtatgtaagccggagcgggtggccagaatcgcgccacctcggagcccaggatttaatctaatccaaaacccctcctccggtctcactgccctgctccattccatttgctgctagtttcctctgcttctcctccgttcgttcattcttccgtgcacttccagttccagcaaccccatcatctgctggctgctctaaccagctgcagagctgctccaatggccaccttgtccgccatctccgccaaggccggctactgcaaggcaccaacgctgagctggaagggaagcagagtttcagcccggaatgtggtctccatggcgaccacccggagaggaggcctcgtctccctaagatcccctcggtttcgcgtctacgcggcaaaggcggagacggtgagcaaggtgatggacatcgtgaagcagcagctggcgctggcggcggacgtggggctgacggcggagtccaagttcgcggacctgggcgccgactcgctggacacggtggagatcgtcatgtcgctggaggaggagttcaagatcaccgtcgaggaggacaacgcccagagcatcaccacca

SEQ ID NO: 453132 - DNA, 564 bp, Sorghum bicolor
cgtccggggatgtcaagtacaggaaattcatccctggcataagcaaaagccaggagtttgacactaaggaaaggcataataagcaaagcaggttaagcaaaagtaacagccattcaccaagcagtggcaaccgtaaagaggtgctatcaatcaggaggctgcttcctgtgatcgactttgagatcgaccggacaaaagcccttgatatgatcgatagagttgacaatctgagagtacaatgatgaatctagattaatcaatgccaaagtctgaaaatgcaccctcaatctatgatcctgaaaatcaagattgcttgaaggatacaagtaatcggccgagctgagttggcatgctgtcagcacttctgcagcaatgtgcctgcttgagatgaaccggcatcacggtgcccgtttgaaggcaccatgcggctagagatggggcatgcccatgtctggcacttgatgatatatgcaggtatagaaggaattatgtaagggttgtggtctagtagcaagatgagttggaggagggggataaaaaaaattttattttttttatttttta

SEQ ID NO: 453133 - DNA, 527 bp, Sorghum bicolor
cgtgcgcacatactcgttcaccacattactgcaacaacagtgaagaaaaagcatcaacatgtgagttaaaatctgcccaggagcgatttgagcgatataatggagttatcacgaagaccaattggatgtgtgccatgagagaaaaaggagactgaagaaagatgagaagattttgactgattgatgtatgaatatgcagcaactcaaaagctgcagccttgaaaagacggtagcttgatgctatggatgcatctgggagcagaaccagaatccagtcacatgctatacatattcggttcttgtgatgtatggatagctccatctttcaaaaaaaaaaaaaatgcatggatagctctggatcagcccgacctgaaactttggtgtgaccaattttccaatgggccaatgggttttttcgacaggattgggcatgctttttcgactgctccatggatagacccatcagtgcttggtatcactcatcacttgcccttgcactacacccctcctgggacatctcattcatc

SEQ ID NO: 453134 - DNA, 800 bp, Sorghum bicolor
acgcctgcggtgccggtccggactggccggaccgacgcgtgcggatccatatgccgatcgtggaacccgttcaaaacgcatctgaatcgatgaaagaatatcgagagtcgtatcgtcagagacaacataggatggagattcaacacatccatgattttatttcctctccgggaccattttctatgagtttctcgacgctatttcttcatgtctgttctacctcgatgactcgatctaatctaagaacacgatgcatatgctttttgcacaggcaccttgagagcgcgtcgtccatgccagcgttcgcgccgacggcgtacctgttctgatcatggcgtcggcatcgtcggcagctaccagtcgtcgtcgacgacgacgatgacgatgaagacaagaatcaaccaaaactactgtgggaagcatatatacagattactatcaacgtattgtagaaccaaggatctatatgcatccttcggaccggaataaagctacctctcttcttcttcgtgagagatagcgcgcgcgcgtgtattactactatatgcatgcgtgtgtgtgtgtgacgtgtctatactctatatagatatgtgataaatgtgatgatttgaatgaggtagagtgatgcacatatgtgtggcatatgcatcatcagtcatcaccatgcatgcacgatgacctagcacttcgcatgcatgcatggtacggtgtaaatgtcatgtatataattactagtatatatgtaatagtactataactaatagaatattgcagaagtctatttggacgtgtgcgtaaaa

SEQ ID NO: 453135 - DNA, 542 bp, Sorghum bicolor
cgtccgcggacgcgtgggcggagcgtgcgcaggaagctgatgaggctcctgtcgttcgtgccctttggctgccgtgctggacccgtcgacgacgcgccgcccgcggaccacgccgccgctgccggagacgccgccgccgccgcgaggaggcgccggaggaggattgctgccgccaacaggtccgccgtcggtgccgccgccgccgcgcagtggcgcccctcgctcggggacatctacgaggagtacagcaccgacgcggccaagtccgtcgcgcgcgccgccgccgggccggcgagggtcaggaaggcggcgtcctgggacgtcgctcgggtgctgccccgcgcgcgcagcgatgaatacaggtacaggacactgtaccatgcattttctatgagttttatttttcctgttcagtacatcatcaaattacacattaaaaaaaatctaaaaccaaatataaggtacaatattctatctagattcttctattctcttcttctctggtggttttctcggagcagtcgatgctctagatgaacaga

SEQ ID NO: 453136 - DNA, 394 bp, Sorghum bicolor
  unsure (1)..(394): unsure at all n locations
cgtccggcaaaagcgaaagctttccccttccatccttccttcccctgagagaggaacgggtaccagccaccagccaccagcgatgggcgtcccgctacgaggtggaggtgaccgtgggctctgcccgggacctcaagaacgtcaactggcgcaacggcgactctgaagccgtacgccgtggtgtggatcgactcggtcccaaacctcacccgtgtgacctcgcatcgcgagacccgcgtggacagagctctggtctgtctcgctccttcgctcacacnnnnnnnnnnnnnnnnnnnnnnnnnnnnnnnnnnnnnnnnnnnnnnnnnnnnnnnnnnnnnnnnnnnnnnnnnnnnnnnnnnnnnnnnnnnnnnnnnnnnnnnnnnnnnnnnnnnnn

SEQ ID NO: 453137 - DNA, 646 bp, Sorghum bicolor
cgtccggaagacaaaagtgttgatgcagtgtctgagcaagcacctttgttgacagaatcaggaatgactgatgccaatgacttgtctagcgatactgcaagtgttcagaaccctgtgtctgcaaaagaagacaaacccactgaatctgccaacattgaggccacatgttctactgatattcaactggagaacgaagaagtagataagaacgaagaggagcagcatgcaaacacagccacagatgaagtttctgagagagaatgtagagagttcacatgtaaatctgcagaaaatcacaagctccgaagtaacatctaatgaactagcaactcaaattactgaaccagtttgtgacactcagacaattttggctcatgaaaaggaaatatctgaagaaaactttccaacagcagtcgagattcaggctgatggtccaaacttgcagatcaaccaagataagcaagatgaagtggctgacaacgaatctgcaatggagcttgaaaagggtggggaatctaattttcaggaacaccaggaaattggtactgagcaaaagtctcctgaagagattgatgaaggaggccagcaacttttggctaagaaagagattctgacccatgaactagatgtgcatgagacagtcgaa

SEQ ID NO: 453138 - DNA, 537 bp, Sorghum bicolor
cgtccggcctgttgttgatgggtcagcaacatttaatcgagcaattgtgaattctccctttcttcggacaccattgacgaattttgcgggtacaattcaagtcatatccaacagactatgcatcagttcaatggaaagcagggttgggaggaaagggagattgtcaatgaaagggaccctacctcttaaaaatagcgagccatctgccaacgataagattgatttgaaatgtgaaggtctggacatacgagcaaaaaatattttgagtggccaagtagacagccagctgcaagttacaggctcaattttgcgaccagatctttctgggatgatccggttgagtcatggtgaagcatatttgcctcatgataaaggcaatggtgctgctgtcactaggttgacttcaaacaagtcgggttatcttctttctggttttgaccaatcaaccacttcacaggatgtctcacgaattctggggtactgtcaacatctgcagacagtatgtattcagttaaatttgagcttcactcatatatt

SEQ ID NO: 453139 - DNA, 598 bp, Sorghum bicolor
cgtccgcaaaaacctaaaaaagaattagatacggaagaagaacagcaggcgaagaagcatcgccagattgatcgattgatcggtggcggaggaaggggaggagggcggcagatgggggcgtgccggggcttcttcgagtgcctgctcaggctgctcaacttcatcctcaccgtcgccggcctcgccatggtcggctacgggatctacctgctcgtcgagtggacgaagatatccgaggacggcagcggcgggggattgacggcggaggtgctcgtctccgcccggccgttgttgggggctgtcgctctcggtgacagcttcctcgacgacctacccaaagcatggtttatttatttgttcattggtgttggtgctatcgtcttcctcgtgtctctgtttggctgcattggagcagggacaagaaacacatgctgtttgtgtttctatgctttcttggtcatattgttgatccttgctgaagctggagctgctgcattcattttctttgaccaaagctggaaagatgtaattccagtggacaagacacataactttgatgttatgtatgactttctgaaggaaaactgggagattgcaa

SEQ ID NO: 453140 - DNA, 823 bp, Sorghum bicolor
cgtccgacttgcagcgtcatggttctgagggcactgtttttgctggattccactacgatcttaattgtttgacaatacatggccggagtagattcccaggcctaaacatctggttaaggaatggtaaaaagatggaggtgaaagtccctgttggttgccttctaattcagtctggaaaacagctggaatggcttactggtggcgattgtttggctggaatgcatgaggtagtggtgtctaagagaacgctagatgccatagcactagcgaaagagcaaaatagaagcttgtggagggtttcatcaacattgttcgcgcacattgcttcggatgcaattcttaagccgctcggccactttgctgaagcacctgatgctcattcctatccacctatatgcgctggggattatgtcgagcaggagctttcagtcattaacctgaaaggaaaggatggagtatagactctatgcagcagatggatctggttatcttatgaattgacagataccaggatgcaaaactaaattacccaaactggcaattgggtcttcgtttccaagtgctgttgtactgagggtggttaagttgttctgaagatatgtttgttcattgctctcgttaagataatggatacccttctttatgtaccacattatcacttgtgaaaataaaatgtatagcttacacataaagctgctattctcctagtgcaatcctgaaactgttattcacctagttcagttatctgtaatgtctaaaacagagaacattttcatcgaccaaaattatactgtacttctcacacgacaagtgaagttacact

SEQ ID NO: 453141 - DNA, 588 bp, Sorghum bicolor
cgtccgcccacgcgtccggtctggggagacagcagataccctcatggctcttgattatgcactagaaaatggagctctttgtgttggcataacaaatactgttggaagcacactgtctagaaaaacacactgcggagttcatatcaatgctggttgtgagattggtgtcgccagtacaaaggcatatacaagtcaaatagtagccatggcgatgatggcgttggctattggatccgatcaaatatctactcaagctagaagggaaactatcatcagtggacttaccaacctttcaagcaatgttagcgaagttctcaaactagatgttgaaatgaaggaacttgcctcgtcgctgatcgattcagagtcgctcctcgtgttcggaagaggctacaactatgccaccgcgctggagggtgctctgaaagtcaaggaggttgcgctgatgcacagcgaaggcatgcttgctggcgagatgaagcatgggccgctggccctggtggacgagaaccttaccatcattgtcattgcgactcgcgacgcatgcttcaggaagcaggagtcggtgattcagtaactcctttcgtg

SEQ ID NO: 453142 - DNA, 834 bp, Sorghum bicolor
cgtccgcggacgcgtgggctacacctccttccaagagcgggcgaccttcatctcacacgggaacaccgctcgtcacgccaaggactttggcgacttaaagcttgcacagatctgtggcatcatcgcgtcagatgagaagcgacatgaaactgcgtacaccaagatcgtggagaaactgtttgagatcgaccctgatggtactgtggttgctctggctgacatgatgaagaagaagatcgcaatgcctgctcacctgatgtttgatgggcaggacgacaagctgtttgagcacttctccatggtcgcgcagaggctgggtgtttacactgccagggactacgccgacatccttgagttccttgtcgacaggtggaaggtggcggacctgactggtctggctggtgaagggaacaaggctcaggactacctttgcacccttgcttcaaggatcaggaagctggacgagagggcccagagcagagccaagaaagcaggcacgctgcctttcagctgggtatatggtagggaagtccaactgtgaaatcggaaacccattgcgactgttgagttgcagcggaagtctatcatgcatcctgagacgcatcacgaagacaagacctggtgtgtcgcgttacatagttgttcaggttttgaccaaatggtctgggagcattctgtttgcctgtgtcgtctcatagagtgataggagaatgttcggctgttttttttctgctttgttgtacaacctgtggccgcatgaactgggcgtgaacatgctgtacgttgtctgtggcgttgtgtttcgctatggttatccagttcttcagatctgtt

SEQ ID NO: 453143 - DNA, 605 bp, Sorghum bicolor
  unsure (1)..(605): unsure at all n locations
cgtccgtcgacccacgcgtccggtgagcgaagcctgtgcagccactcgccggcctccaagaaaccgtcacgatctgttcatctgattgccgccgactttggtttcattatgttctgttttcgcggggaaccaattcgatttagtttccggagaaggaagagtaggatgcagtgggcgggtctaaggtcgcaggcgccggttcccacggcggcgtggacggggccgaggccaagaatcgcgaggtggccgcagggtagattcactgcagcgcgccgggcgctggtggcgtcagcagcggcctcggacgctaattcgagctcgaattcgccggggagggacgaggagagggaggaggtggtgcanagggagaagaaggagaaggcggtcgcgtcgctgctgatgaggagccagaagtacgccatgctaaagcagcagctcgccgtggccgcccaatttgaggattacaaggaagcagcgaggctgagggactcgctgaggtcgttcgaggaggaggagcccgtgctgcgcttccgcaggttgatgaagaaggccattgacgaggagaggtttgaggatgctgctaaatacagagatgaattaatgat

SEQ ID NO: 453144 - DNA, 463 bp, Sorghum bicolor
cggctgttactcgggcagaggagtgcgcatcctacgcggcctcctcgacggcggcctccacccggagcagcacgaacccgacggcgacgccgacgagcacgaggccgttcatggtggcggcgatcctgaagatctccccggcgacgttcatctgggcgccgaacgcgctgccgcgccggttcttgcccgcggggctgagcgacgccacgatcttggcgaaggagtagtcggcggtcttgcgcaccccgagcatgttcaccttgttgagccccttgaggccgctgtaggcgttcatgccctccacgtacgtgacgccgccgctggaccgcttcttggccgccgccggggccgccagcgacgggatcgttgccacggcgaacgacgccatcccctgcgctgcggctcgtgagaaagacggagtgtggccggcggggtggtggtggtggtggtggtggatcggacg

SEQ ID NO: 453145 - DNA, 337 bp, Sorghum bicolor
ggcacgaggcgtgggccttgaggtggtgcccaacgcgcgggaggttctcatcgggctctacacgcgcacgctcaaggagatcgaggccgtccccaaagacgagggctaccgcaaggccgtcgagtccttcacgaatcaccgcctccagatctgccaggaggagggcgactggaagaccatcgaggaccgaatcggatgcgggcaggtcgaggagctcatcgaggaggccgaggacgagctcaagctcatcgccaaaatgattgaatgggatccatggggtgttcctgatgactatgaatgtgaggtgattgaagacgacaccccaatttctaagcat

SEQ ID NO: 453146 - DNA, 560 bp, Sorghum bicolor
cgtccgcaccacgcaaacgagctcgcacggaggcgtcgccggcgcggacggacagattccaatcgcccccatccatttctcaccagaagcgaagccggagcccggaggcggaggagcggaggaggaaggcgatctcgagcaagccggaggcggagaagatgaagacgttcgacccgtggcctgtcttcttccgccgggagtggaggcccaactggcccttcctcacggggttcgccatcaccggcttcctcatcaccaagatgacggccaacttcaccgaggaggacctcaagaactccaagttcgtccaggagcacaagaggcactgacgaaccaggtgaaggagttgtgccagaattcagaaatgcctgtttggccagccaattctgttatgcttttgaatgaaaagaaatagacccctctttttcgtttttcttaatcgaaatgcttgcactctatgttccactttttatgtaataagaggcaaatgatttgaaccaacagcaatcagcttctgattgaaaaatattgatgtgtggcctcggtgttgtgggattgca

SEQ ID NO: 453147 - DNA, 811 bp, Sorghum bicolor
cgtccgcccacgcgtccgttgatatactttcctgcactcctgtctttttcacctcaccttttcttttttgctgcaaccatcagtttaaccttaccttgtaagaaaagattatgcctttctagctcatcctagccaccacagaagcgaagtcttcaaggttttccacccacacccacttctctaatctcacacgcccctcctaatgtaacctgaagctttaacacaacaaagaaaattagtgataacaactcccggaagactccaatcttcagctctccttccccctccccattccaattccaagaacagggcagcgggggggagtcaaccaggtacgatgtgctcaataacgaggctcgcgtttgtgcttgcactggctatagcctcatcaactgaggttgcagagagcagagattttaatatcttggctcagggcagcttgcctgatgcagccaagggaccaggtctaactgcagccagtggaaagctgtgtcaattatgtgagcagtactcaactgaggcactcttctgtctcacacaaaacgaaacccagactgaaattcttagcattctacaccatgaatgtgcaagccttgcccctctgaagcagcagtgcatcacgctggtcgactactacataccccttttcttcttcgaggtttccatggctacccctgaaaagttctgtgaatcgatgcatctctgcaagaatgggatgaagattagcctacccactcgggagggtactcgcgggttatgccatcatgttgtcgttgaagttcttgcatgcttaaagacccacacacagctg

SEQ ID NO: 453148 - DNA, 683 bp, Sorghum bicolor
cgtccggcagcacaacaccgacgccctcgacacccagataatgttctgcgaaggccacataccctgcgttgtggtggacaaggataccagattcaggatcttagaaagcagaagcaagatggcgaagatttctccggcggcgaccatggtcggaccggaggtggcctcaccgagagtcgcgacgttctcgtcgaggggcccgagtgcagagttcccttttatcctcaagcccgacatagctgcaccaggagtgagcatattggcagccaagcgtgactcgtacgagctcatgtccgggacatccatggcatgccctcatgtctccgcgatcgtcgccttgctcaagtcggttcacccagattggtcgcctgccatgatcaaatctgccattgttaccacagcatcggtgaccgatcgatttggcctgccaatccaagccaactcacagcaaaggaaaccggccgaccccttcgacttcggcggtggccacatacagccggacagggccatggatcctggcctggtatacgacttgaaaccggacgactacaccaacgacgacatcgccattgaacagctcaacctgccatccatcgccgtgcctgacctcaaggattccaccacattcacccgcacggtgaccaacgtcgggccggcgaaggcgacgtacccggcggtggtgg

SEQ ID NO: 453149 - DNA, 496 bp, Sorghum bicolor
cgtccgcaactgcaagcaaagctctactatactcttcaatacacgactacgtgaacgatggctgacgagtacggccgcagcggctacggcaggtccggcgccggcgacgactacgacagcggctacaacagcaagtccaggactgatgactacggccgtggcgaaggtggctacaacgagtccggcggcgacgactacggccgccgcagtggcggcgatgggtacgacaggtgcggcggcgacgactacggccgtggcaccggcggcggtgggtacaacaagtccggcaaggacgactacgacggtgggtacaacaaatcgggcaccaacgacgacgagtacggccgccgtggcaccggcggcgggtacaacagcaagtcctctggcgatgacgcgtacaccggcggcgccgggtacaacagcaagtcctctggcgacgacgacgcatacaccggcgtcgggtacaacagcaagttctttggcgacgactcataca

SEQ ID NO: 453150 - DNA, 713 bp, Sorghum bicolor
cgtccggcgtgcacatgaacgcgacggccgcgaacaaggcgacgccggtgaacctggcgcagcacacgtactggaacctgggcggggagggcagcggcgacgtcctccacaacacggtgcagctgttcgcgtcgcggtacacgcccgtggacagcgcgctcatcccgacgggcgtcgtggcgcccgtggccggcacgccctacgacttcctggccccgacgcccgtgggcgcgcgcatccgccaggtctccggcggcaaggccggcatctacggctacgacaccaactacgccgtggacggggacgacgccggcgccggggcggcgctgcggaaggtggccgtcgtccgggacggcaagtcggggcgggcgatggagctgtgggcgaaccagccctggggtgcagttctacacgggcaacttcctccaggacgtcgaggggaagggcggcaaggtgtatggccagtacggcgcgctgtgcctcgagacgcagggcttcccggacgccgtgaaccaccccagctttccctcccagatcgtcagtccggggcaggtgtacaagcacgacatggtgttcaagttctccttttagctagcaagtcacaataatttccatcagtttcgcaaagctgaatcgtttgcgttgttcaaaactgctgtcgtttctttgccttgttcgtttggctgataagccataacaaaagatactattga

SEQ ID NO: 453151 - DNA, 467 bp, Sorghum bicolor
cgtccgctccgttccagccacagcaatgaagcccaggcctctagattacggttgcggcccggcagcggcggcggcggcggggtgcgctggatgggcgtggaggccgaggccgcgcgggggcgggaggtcaccaggggtgtcgcccaagtgctccaactctcccaactcggcggcggcggcgggagcggtgcactcggagcaccaccgccgcggcgacagcgtggtgctgctccgcccggtggagctgcccgggacggggtacgggtcggaggtggaggcgcggatcgagagggtcatcttcgcctgccgcttcatgaccttcctcggcatcggtggcttgctcctcggctccgtcccttgtttcctcaagggaagcgttcatgtgatgaatgccttcgtcgactactacctgcacggcggagggaagctcatactcatgctgctggaagccattgaaaatgtttcta

SEQ ID NO: 453152 - DNA, 354 bp, Sorghum bicolor
tcccgagtcgaccgacgcgtccgctctatcggacattcctcacggaccaccctgccacttactacgaagacatgcaacgtgctgtcttctgcctctgcccattgggctgggcaccatggagccctcggttggttgaggctgtggtctttggctgcattccagtcatcatagctgatgatattgtgcttccatttgcggatgcaatcccatgggaggaaattggtgtctttgtctaggagaaggatgtcccaatagctagacacaatccttacgttgatgcctatagatgacatcttaagaaagcaaaggttacttgcaaatccatcaatgaaagcatgccatgctgttttttgc

SEQ ID NO: 453153 - DNA, 469 bp, Sorghum bicolor
cgtccgatagttatctatgcgtcggtctctgaagcttcgttgcccttatccttcctttgctgcctttccagctactttgtttttggcctgttaaaattcatctgtttgtaagggggaaaagttgggggtttctaaggaatttgggtccaaattatgccttagtgcttttgtgcagtcgtatcatcagttcagtccttaattatactatgcaatatgtcatttgattgtgatctcgacggcttaggtggctctccatcaattttattagctcctgcatccaatttgagcgatttcgtcttttcgaccacttcatttgttgtagtctgtgattgggttctataacatagtggtaattaggcctccaaaaaattctttagttttttgagggcttggtgtgtttccaaaatcttgttctacattttgtttcttcataatataattacgctccttttccaatatgccacattat

SEQ ID NO: 453154 - DNA, 293 bp, Sorghum bicolor
  unsure (1)..(293): unsure at all n locations
cgtccgcccacgcgtccgctcggtgtagatattagatcagacatggaggtcattgaggtcaatgaaccaccaaaacggaaagcaggggtgatactttcatctgttgacgaactccttgacaagttaaaaaatgaagcaggtgtcttgtaacaatttgtatattattcctcactgaatgtggtctgacgttcatttgtataagttacaataaagatgtctctccaaaagttcagaccatttacaaataaaataagtgtttccatgaactaattgtnnnaaaaagagaactaccc

SEQ ID NO: 453155 - DNA, 1501 bp, Sorghum bicolor
ggcacgaggcaggagttcaagacggactacaaccagacccacttcgtgcgcaaccccgagttcaaggccgccgccgacaagatggagggcccgctccgccagatcttcgtcgagttcctcgagcgctcctgcaccgccgagttctccggattcctcctctacaaggagctcggccgcaggctcaagaaaaccaacccggtcgtggcggagatcttctcgctcatgtccagggacgaggcgcgccatgctgggttcttgaacaagggactgtctgacttcaatttggcgctggacctggggttcctgaccaaggctaggaagtacaccttcttcaagcccaagttcatcttctatgccacctacctgtctgagaagatcgggtactggaggtacatcaccatcttcaggcacctcaaagcgaacccagagtatcaggtgtaccctatcttcaagtacttcgaaaactggtgccaggacgagaacaggcacggtgacttcttctctgccctgctcaaggctcagccgcagttcctcaatgactggaaggccaagctctggtcacggttcttctgcctctcggtgtatgtgaccatgtacctgaatgactgccaacgcactgcattctatgagggaattggtctggacactaaagaatttgacatgcatgtgatcattgagaccaaccgcacaacagcgaggatcttccctgctgttctggatgtagagaaccctgaattcaagaggaagcttgacaggatggttgtgatcaaccagaagatcattgccatcggagaatctgacgacattcccctagtgaagaacctgaagaggattcctctcattgccgctctggtgtctgagatcattgccgcatacctcatgccccccatcgagtctggctcagttgattttgctgaatttgagccccagcttgtttactgattctgtagaaagatttctctccgaattattcccgaaagacaagttggtgctttcccctaaggggcctgaatggtgaaaacgctggacggttagaggatctgcatcttcttgtgttcgtctgtaaaatactgagactttggcaacataaagcttggcaagtttttgttgtgtggcatctccatgtaagtgacagtgaactgcatcagaagcaatagcatcagaagcgaccgttccagttttccaacagaagggaacgtccgaagttgttgtactgctaatgaagcaaaagcattcagacctttatatgatcaatcacatatggcctcagagcagttacttaaccatggaacgtcgaactagcatgatgaatgtatcaagcacatttggttgattgtgtaacactagaaaaccatttaacagcgtttggaggctgtaccatgtgaatttacatatctccttttattttagcaatgtcatgcatcataagtgacaattatctataagcatttgtaagaaaatcgtggtagaagattgtcgatactaaccggtccactctctt

SEQ ID NO: 453156 - DNA, 595 bp, Sorghum bicolor
cgtccgtacactgtccctggttttggcatggttgctggcttcctggaagagcagctatacaggtgggtacgtgctgcagagctgacttgtgacagggcagctcttcttgtggtgcaagacccaaaggttgtcatctctgttctgatgaaattggccggaggatgcccatctcttgccgaccagttaaacgtggatgccttcttggagcaagctcgttcctacgacaaagctgcatcaaacccagttgggtggtacatccggaatgcacaaaccagagagctttcacaccctttgcctgtgatgcgagcccgagagatcgatgagtggtcaagaagccaggagtacaagaccacaatgcaaaaaatgcttcagctggggctaaatagggtatagttagcggcgacacatacgaaaaggactgtagtgtgtgtagcttgtgtatggaagggaatgcatgtatttggagaaggctggtgcagctggaaaacagatacaagcatagacatatactgtatatatttttacagttgaatttagtttccttgtatatgctctctttttctttctttctttttggcactggtcaattttgaac

SEQ ID NO: 453157 - DNA, 752 bp, Sorghum bicolor
cgtccgcggactcgtggggcttgatcaacagaggggtgtgagttgaaaatctgatttcgaataccaaggttcttgagagcaagatagcagaggccaagcagaaaaaggataccctaaaagctcgtgctcaatcagcgaagactgccacaaaagtgagtgaaatgttgggcaacgtgaatacaagtagggccctttctgcgtttgagaaaatggaggaaaaagttatggcgatggaatcccaagcagaggcacttggccagttagcaactgatgatctagaaggaaagtttgcactgctcgagacttcatctgttgatgatgatctttcacaactgaaaaaggaattgtctggaagctctttgaaaggagagcttccaccaggaagagcagcagtcagcaactcaggtgctgggcgccctttccccgacctagagatcgagagcgagctaaacgagctgcggaggaaggccaaagaatattagattccatccttcttgtcgattcagcaggcctgacggaatctcgtttccccgaagatagtacagccgcagattgctcacattgcgcttttgaaacacaagcgcgcgttgactgtttgttaatgagtatggaatcggtaaatttctcggcattttcccttggagtgacatttgtacagctagccataaattgttgtaaatcaccactcgccctagagcctttttgcatactatatatatagtcaaagtttgaagtttccacctcgtggtttt

SEQ ID NO: 453158 - DNA, 718 bp, Sorghum bicolor
cgtccgattcttgtgaacttagagaaattactagatgagaaatcctcggagccttggagtcagcgccgtcttcccacaatgacagctacctatcccgctgtcattgacagtgatgtagaggaagatgaaagagaattccctaagccccgtaaatgtgggaaatctgcatcaaggccatctgcaatgtccagtcatgacaacttccttcagaaagactgcactgctgaacaagctgttactaagcagatcagagcacttcgcaggaagctgcaacaaattgagattcttgaggctaaacaacttgcaggtcatcagcttgacaatcagcagctagcgaagcttgagtctagggctgcccttgaaggtgaactttctgaacttgcgttccctcagaggcatactcaacttccttctgcttgtccagcaagaaggtagggcaaacaagagaccctgaggtttctaagaaacagaagagaaagaacaagcaggcaacacagactccgtctgtgaaaagtgagcctgggcaacaaatccccattaaggatcttcaagaagttctatcagtcaatgtctctgctgaaaaggaggcgtatgctgctgatccaatcaaacatatagaggctgccgctttcagcaacacaaaagacattgcttctccattggagaagaaagcttcgcaaccaacttcatcaaaaaaaaaaaaaaagggcggcggacg

SEQ ID NO: 453159 - DNA, 846 bp, Sorghum bicolor
cgtccgggacgctgtgaaggagccccttttggaaccaggccaagaagtgaaacatcaggcagtgggtttcttagaggcatggaggattcctggagttgcgccatttgctctttgcctcttcttctccaaattggttgcatataccttcctgtattggctaccgttctacatcagccatacacgtattggtggtcagtacctctctgatgctatggctggcagcttatcaacaatctttgatgttggtggtgtgttgggaggagtccttgccggtcacatctctgatcgcttaaatgcgcgagcaatcactgctgcaagcttcatgtactgtgcgatacctgccctcttcctgtaccgcacatatggaagcatgtcgataatgtggaacatctccctcatgttcatcactggaatgtttgtgaatgggccttatgccctgatcacaactgcagtgtcagctgatcttggcacccacagctctttgaatggcaactcccgagcactggccactgtgacagcaattattgatgggacggggtctgtcggagctgccatcggaccgttgctaacaggatacatctcatcgaagagctggagtgctgtgttcacaatgttgatggcagcagctctccttgctgggctcctcttgacaaagcttgtatgtgccgaactaaaaggaaaaacaccttccaacgcgagcaaggatgtcgccgatgcagaaggtacctactcagatgaagtgtaaatccaaagctgattgcgccatggaagcagttccagtgaatgcctacttaagagttgaccggtgctgctcccactgccttcatggggctagagctgaaactg

SEQ ID NO: 453160 - DNA, 424 bp, Sorghum bicolor
cgtccggaactgcaatctctctctagaaaaccactgcccaaaaggagtttatactttcaatggcatcgacgcagatggaactgtcacagaggggggttactccactcacattgtagtccatgaaaggtattgcttccaaatacccgatggctaccctttggcaaaggcagcacctcttctgtgtcctggaataactgtgtatactccaatgatgcgacacaacatgtaccaacctgggaagtcacttggggtcattggacttggtggtctgggtcacatggctgtgaaatttggtaaagcatttggtcttaaggtcacagttttgagtacaagtgaatcaaagagagatgaagccatcaccctccttggagcagataattttgttatatcatcagacacacaacagatggagtccctgaaaaac

SEQ ID NO: 453161 - DNA, 770 bp, Sorghum bicolor
ccgggcccccccttgagaacaacactgcacacttcactagccgaatcacaataatggatcccaccaagttccgtccgtcgagcagccacgacacgacggtgacgacgacgaacgccggagcgccggtgtggaacgacaacgaggcgctgacggtgggcccgcgcgggccgatcctgctggaggactaccacctgatcgagaaggtggcgcacttcgcccgggagcgcatcccggagcgcgtcgtccacgcgcgcggcgcctccgccaagggcttcttcgagtgcacccacgacgtggcgtcgctgacctgcgccgacttcctccgctccccgggcgtccggacccccgtcatcgtccgcttctccacggtgatccacgagcgcggctcgccggagacgatccgcgacccgcgcgggttcgccgtcaagttctacaccagggagggcaactgggacctcctgggcaacaacttccccgtcttcttcatccgcgacgggatcaagttccccgacgtgatccacgcgttcaagcccaacccgagatcgcatgtgcaggagtactggcgcgtgttcgattttttgtcgcatctccccgagagcctccacaccttctccttcctcttcgacgacgtcggcgtccccgccgactaccgccacatggacggctccggcgtccacacctacaccctcgtcaaccccgccggcaagtcccactacgtcaagttccactggaagccgacgtgcggcgtccggagcatcctcaccgacgag

SEQ ID NO: 453162 - DNA, 820 bp, Sorghum bicolor
cgtccggacaaaaaccccccaagagccactcgctgctgcgctgcagttcccgcgatatgtgggataatgtaaccggcggtgtgtggctgacctcgcgtacgtagcccgcacggcgcacgcgctgcacgccgccccggcccgccgtccgcccagctcgacatcgccgccgccgccgccatggatccgtacaagcaccggccgtcgagcaccttcaacgccccgtactggaccaccaactccggcgcgcccgtatggaacaacgacaactccctcaccgtcggcgcacgaggtcccatcctgcttgaggactaccacctggtggagaagcttgccaacttcgaccgtgagcggatcccggagcgcgtggtgcacgcccgtggcgccagcgccaagggcttcttcgaggtgacccacgacatcacccacctgtcgtgcgccgacttcctgcgcgcccccggcgtgcagacccccgtgatcgggcgcttctccacggtgatccacgagcgcgggagccccgagacgctgcgcgacccgcgcgggttcgccgtcaagttctacacccgggagggcaactgggacctggtgggcaacaacttcccctgtcttcttcatgcgcgacggcatgaagttcccggacatggtgcactcgctcaagccaaaccccaagacgcacatccaggagaactggcgcatactcgacttcttctcccaccacccggagagcctccacatgttcaccttcctcttcgacgacgtcggcatccccgccgactaccgccacatggacggatccggggtgcacacctacacgctcatcaac

SEQ ID NO: 453163 - DNA, 523 bp, Sorghum bicolor
cgcgtccgataagaaggcagccattgtttcactttcacttcccgaactcccgatcgctcgcaaagaagctagcttttagcatggcgtcagtggcgttcggcagcaccgtggcggcggccgtggcgccgacctcggggaggacgcggccagcgcggcggtccgtgctggccgtgccgccagccgccaccaggggcggcccggcgccggccaaggaggagaaggggctcggcgagatcatcttcggcttcatcttcaagaaggaccagctggtggagactgacccgctcctcaacaaggtcgccggcgcgtcagccgccgcatcctcccgcgccaagccgccgccgcggggcgccgctaccacctccggcaaggaaggctgccgctgccgacgacggcggcagcggcggcgggttcaacctccccggcctcggcgggttcttcgccaagaaaagcagctgaacgtgtccagtgtgcgtggtttacggattgtcgaactcaaagctggatttggctttgaggggga

SEQ ID NO: 453164 - DNA, 640 bp, Sorghum bicolor
cgtccgttgttttttttttttttttttttttatcccaaatccaggcatccaattttgattcaacatgtaactaacagttgctgatacaacattataccctacaacattaaaggacacaaaagagcaaagagaaagaaaaagtgccttgaatgacactcttattgtttcgatgatctccaacacgctgatctgcagatcaagcatgtaaccaggtgctgatcattgtcaatgacactcagctgcatgtcccacatccacttcatataactgttccactagggagtaaagcatccttgatcaccgtgacaattccacctttgatgaagtacccatctgtctcccttgcagcttcttgcacattgtcggcattgagtatcttcgcattgtctccaattcgagcattcttgtcaatgattgctcttctcatgtgtgaattcttcccaataccaatgggaatgccaccattttcggcaaggagtttcttatcagcttcagtctcatagtagtctgcacccattagtaaagtgtcctctatgatagcaccttcagatatgcaagatcggagtcccactacagaatggtgtgtcttgcagtttttaataacgcacccttcaccaatatctctgtctgtcaccggacg

SEQ ID NO: 453165 - DNA, 802 bp, Sorghum bicolor
cgtccgaccattcagaattcttgaaatatatgtcgaatgatcttaaaaccacagatgttctggatcgttgcttcgtggagctgctgaagaccataaacagcagtctgaatgatttgaagaaactgcagcaaaaaatagaacagcaaaagaagaaacagcaacagcagaagaagcagcaacagaagcaacagcagttgcaaaaacagccagaagattatattcaagcactgattgccttggaaacagaacttaaaaataaactgtctatacttggtctgatgccatcatcatctttggcagaggtactgaagcaactgaaggacaaagcattaaagcgagcagggctgactgaagaaaatttgcaagagcagattgagcagagaaatgtcgcaaggaagaataagcagtttgaggtatctgatggaatcaggaaaaaccttgctaccaagggcatcgccctaatggacgaaccttctggtacagtgtggagaccatgcgaaccagagcggtctgaataatcatgattatatgctcattaactcaacgagtgatggtgtaaaatgagatttttgcctcagggcagctatcacattttgaggactaacaaaaatcgccatctctggatgtggtattctgcagtgtagggggtccaggttgactcaccagttgaaatttgcatttctggttgtgtaagaagcgaaggaccccatatatatacttgactctttaggaggtttgagttttggttttggatgagacttgacatttccatttcaatgaacaaatgaaattttacttggta

SEQ ID NO: 453166 - DNA, 581 bp, Sorghum bicolor
cgtccggctgaaattgccttgggttttcttctgatcatatcgctgctctcgtggcgccggagcataattcagacattcatgtactggcaggtattgaagctgatgtaccatgctcctgtgacatccagctatcaccagagtgcctgggcgaaaatcggcagaattgtgaatccgtacatccaccgctacgccccattcctccagacgcccatttctgcaatccaaagatggtggttcaggtaaagagacaggcgggtaaaaaaacatgtatctgttgctgaatcactgaaccgcctgggtggtttaagaggggcggcacagaacatagcacacgcctccgcgttcgtatgtaatgctgcagcagtgcactgtataatataacatttgcgggatgactgatatcccagaattctggagggccttatcgtaacaagaaggtttgctgtatgtctgtaaactatgaggttgcagggatgaccattgaccaacaatgctgaattgcaatccgtgggctaacgtaactatgttccatgcttttcagtcacacaatccactggcagtatatgtacattagttgttgg

SEQ ID NO: 453167 - DNA, 368 bp, Sorghum bicolor
cgtgcggagcgcgcgaccattcgagcaagcaagcaagcagcgcgcggcagctagctcacgcaattaataagccttctcctagctttagccaatagccatggcgctggctagccaggtcgccgccaaccagccgccgctgctgtcctccccggcccggcgcctcccaagaaccagcagcagcaatgcgttgctgctcctccagccggcgtcgtccgcggtcctcggcggccggaagaacctgaggctggcgccgcctgctgccggcgcgcggagggcgctgctggacgccgtcgtcgtctgtgcgggcgtcgtccgaggcgaaggcggcggcggagaccaccaagtcggagggaagcggcggcggcggc

SEQ ID NO: 453168 - DNA, 451 bp, Sorghum bicolor
cgtccggttaacagggaacccctatatgcaaaattccgcctccgtgaaccttttaacaagccaatactaagttcagaaccatcaatatgtgtgcaaccactacaaccacacgaccagtttctcatatttgcatctgatggactttgggagcacttaaccaaccaagaggctgttgatattgttcacagtagcccccgcagtggctgtgctaggaggctgataagagccgcactgcaagaggcagccaagaaaagagagatgagatactcggacctcaagaagatcgatcgcggtgttcgccgtcacttccacgacgacataacagtcatagtagtgttccttgactccagcctcgtaagtagggcgagcacgcaccgaggtcccactctttccctgcgaggtggtggcgccagcgctggcctgcgcagcaacacgcttgcacctacgtgac

SEQ ID NO: 453169 - DNA, 485 bp, Sorghum bicolor
cgtccgcaacgctgcgccaccggcgacccgaatccaccctcctccgtcctctcctcccttgagatccgcggcgccgaattaaagagcgatggcgacggagctgacggcggcgcagctgcgggcgtacgacggcaccgacccgtccaagcccatctacgtctccatccgaggcaaggtctacgacgtcacctccggccgcggattctacggccccggcggctcctacgccgtcttcgcgggccgcgaggccagccgcgccctcggcaagatgtccaaggacgaggccgacgtctcaggggacctctccgggctcaccgacaaggagctcggcgtcctcgccgactgggagaccaagttccaggccaagtaccccgtcgtcgtccgcctcgccgacgcctgaactcggcagtctcaggctcaaccacccctaatcagccgcgaggagcagctctctgctgcggccaagtgtcagtgtaaactctgtc

SEQ ID NO: 453170 - DNA, 476 bp, Sorghum bicolor
gctcggtacagccccccactcaaaaaacgcctttcttctcccggtccgctcgtgcgctctttcgctcggcgacgattggacgaggacgaccgccaccgccgccgcccccaggtcctcgccgggcccttcgccggcgacgagcatccaccaggctcagaaacatcgctgacatccacctgcaccacagtagttcagtagagtagccgtcggaacccacacacccgcgatggcaactgctcctgcaacatcctccgtggctacgaactccccctgcctgcggctgcctagcatgcccctgaggcgtgcacctggcgccatctcgttcccttctcgcccatggccagccacactgacctcatgcactggattgtcgcggcgctcagacgtggtcgccgccgcagggcaccagaagttgatgggatctttgaccaacaacgaggggctcaggtttggggtggtgtggcacggttcaacga

SEQ ID NO: 453171 - DNA, 494 bp, Sorghum bicolor
ccggtcgacccacgcgtccgtattggaacagggcagcacgccgtcatggcgctccagctcctccgccatgcgctggtgtcgctgctggtggtggccgttcacgcggccggcgcgacgcgcgggggcggcgacatgcaccacctgcagatggtgacctccaccgccggcacggcgcgcgcggtggcgtcgtgcgcgagctggcggctcggtgtggagaccaacaacatccgggactggtacagcatccccgccgagtgccggagctacgtccgcgactacatgtacggcgacctgttcaggcaggactgcgcggtggtggcaggcgaggccgccgcctacgccgaggggctcgagctcgccggcgaccgggaagaggtggtgggtggtcgacgtcgacgacaccaccctcaccaacctcccctactacgccgacaccggcttcggggctgagccgtacaacgccacctacttcgacgagtacgtggcgaacgcga

SEQ ID NO: 453172 - DNA, 500 bp, Sorghum bicolor
cgtccgcggacgcgtgggaaaaacccctccgaatccgcctcgcgtgccccgtcctcctcgtcgccggcggagccgcccgccaccgcccacctatcgccggagaaggagcgccgcggggagcttttccaccgccgcctcccgtctgactgacccctccgagatcggcggcggccggccatggcggtcccgctcgtgctcgtcgtgctcccgctcggcctgctctttcttctgtccggcctcatcggcaacaccatccaagccatcctatttgtgacaataaggcccttttccaagagcttctaccgtcgggtcaacagattcttggctgagctgctgtggcttcagcttgtctgggtggtcgactggtgggcaggtgttaaggtacaacttcatgcagatgaggaaacttaccgatcaatgggtaaagagcatgcacttatcatatcaaatcatcggagtgatattgattggcttattggatggatattggcccagcgttc

SEQ ID NO: 453173 - DNA, 675 bp, Sorghum bicolor
cgtccgatctggagacagagaatcgtctcgcttctttgctaattgaagaggctcggagattgcagttggaggctgacagggaaggtgttcatgcatatcttcgaaaacgtaatgtggggcatcgtccaaactcacggttcctcacagccacggttcgtggagttcagcaagcaaaccgtgttgtggaggtcaatgaaatgtggcgtgccagggaaaaggaactggagttagagtcaaaggtgaaaagcagaagtaacgatcgtgatgattttagaggtgagaagcgcaaaagtgaattgagaaaccatagctccagctcaagggtcgaacaagaagggaccacttataataatccttactcagaccaggaggatggtctcagggatgatgagattgaaagatttcttcattcaagggcaaagcgaggacgtggggctgttggttctaggatggacgagcctggtccataccttgattctttgtctcgtcatcaggacaacggacctagtcctgacatacgtgtggaagaaaaatgggaacccccagtacaaggtccagagaagccgtcatttttgaggccaagtctactgattgtcatgggcataaggatactttggatggaagggccttaagctctgaaccactgtgtaaaagggaaaagaaaaagaagtcgag

SEQ ID NO: 453174 - DNA, 483 bp, Sorghum bicolor
cgtccggtgaaatggtagcagcaaatgggacggaccaaccacagctgatgctggacaaacaccagacgattcttgaagaggtccccggagaacaaaacggcccaccttctgccggtgattatgctggcaatggcgacgacgacgacgacgacgacactaccttgtatcagggaggtgacctgctgcagaacaggccgacaagtatatttgagaacgacttggcctgggccgggaaagccatgcagcagctgcttcggatcctcggtttccagatcggcacaacaagaacatgatattcagcttcagctaccgtcgtgtatatgttgcaaacctgctggtttggaggatcacctattgccttcaactcacttttcaacgctgaaagaagcctcagagctgaggattgtaactgaaactccagtgacagcagcaaacatcagccgtcttcccctgcactgtgttgatatagcaatactaggagat

SEQ ID NO: 453175 - DNA, 784 bp, Sorghum bicolor
cgtccggccaccactccccccatcgatctctcctcagtcccccgccgggaagctacgctacgaaggatggcgtccgtcaccgcccgcgccccggtcgcggccctgcgcccgtcggcggcgtcgtcgctcaacaagtcgtcgtcgtcctcggccttccttggccactctagccgcctcggccgcaccgcgtcgccgacgaccaggcgcagcctcaaggcggaggccaagggcgagtggctccccggccttccctcccccgcctacctcgacggcagcgtcttcaacccgctcaacttcgcgcccacgctcgaggccaaggagaaggagctcgccaacgggaggctggcgatgctggcgttcctgggcttcctgatccagcacaacgtcaccggcaaggggcccttcgacaacctgctgcagcacctgtctgacccatggcacaacaccatcatccagaccctctcttagtcgatgatatatatccaggtcatgtaaaatgtgatccatcgctagcgagctgatggggactggaaggcaaacattgaagcgcggtcgtcgatgttaattcctttctggatcagtttgtgtgatgtgtgttgttaatcgatctggagggtatagattcggaccgggtttgttgtaacttgtaatgcatggtatgaaaaaagagagggctgaggagtgacactgctggtatgtacattaatccaaggggagggctaagggtaagattgtttgatcagtatcctcatcgatctatcccgatggggttcctcttgtgctt

SEQ ID NO: 453176 - DNA, 992 bp, Sorghum bicolor
cgtccggtgctcgatcgacgatctccccctccgccaccactccccccatcgatctctcctcagtcccccgccgggaagctacgctacgaagcatggcgtccgtcaccgcccgcgccccggtcgcggccctgcgcccgtcggcggcgtcgtcgctcaacaagtcgtcgtcgtcctcggccttccttggccactctagccgcctcggccgcaccgcgtcgccgacgaccaggcgcagcctcaaggcggaggccaagggcgagtggctccccggccttccctcccccgcctacctcgacggcagcctgccgggtgacaatggcttcgacccgttgggcctggcggaggaccccgagaacctgcggtggttcgtgcaggcggagctggtgaacgggcggtgggcgatgctcggcgtggccgggatgctgatcccggaggtgctgaccaaggccgggctcatcaacgcgccgcagtggtacgacgccggcaagtcggagtacttcgcgtcgtcgtcgacgctgttcgtgatcgagttcatcctgttccactacgtggagatccggcggtggcaggacatcaagaaccccggcagcgtcaaccaggaccccatcttcaagagctacagcctgccgccgcacgagtgcggctaccccggcagcgtcttcaacccgctcaacttcgcgcccacgctcgaggccaaggagaaggagctcgccaacgggaggctggcgatgctggcgttcctgggcttcctgatccagcacaacgtcaccggcaaggggcccttcgacaacctgctgcagcacctgtctgacccatggcacaacaccatcatccagaccctctcttagtcgatgatatatatccaggtcatgtaaaatgtgatccatcgctagcgagctgatggggactggaaggcaaacattgaagcgcggtcgtcgatgttaattcctttctggatcagtttgggtgatgtgtgttggtaatcgatctgg

SEQ ID NO: 453177 - DNA, 714 bp, Sorghum bicolor
cgtccgcaagaatagatcggatctatccggctgcactttagaatatttttagtatttttgtttgataaataagaaaaggtgcacgatctcgacgaattacttctgaataacttcagaaatcatatggaagaaccatagcatttcgagattcattggtaaatttactttgattctctatagaccaataatgtgagaccattaacacggttaaagctaaactgcttgaagtccgggcaaaaaggggtactctttctacaactacattagtattagtattagtctcgaaatgctttaaacgggaaatagctagtgtagaatttatctgatatagaacactcatatcgataaaatagtttgaactatttactagaagggcacgcagtcctttttccaatgccaaatcgacgacctatgtataaaaaaaaagagaaattttttggatttgaagaaaaaataaaaggaattctatcaatttttattttccatttatttagtttgtttttcttaatgaaattgaaattattaactaacagagcaaacacaaataaagaaacaactttgctgaccatgatagatttttatctagttggaagagtcctcttaatattcatctagtcttatataagtttgggtatatagaaatacaaacagaaaagagaggatagaggataggctcattacataaaaaaaagatatggaaatagccataataca

SEQ ID NO: 453178 - DNA, 841 bp, Sorghum bicolor
ttttgatgatgatcgatcggtgttattatgcaaagaagcaacgttatcacgagcaaatgaacatcatgtacatataatcccacgctgcgcctccacggtcaccaagaagacttgataataaaattacacatggatcatctatcaaaccatgcatgcatgcatggcgccaccagcagctaacttatagtaataattcatataagaagaacacgcaagtcctttaagcatgcgacggaggattagatgtcgaaggattccttgccggtgaacttgacctcgatggggctgacgttcttgccgatgctgcggaagttctgcccaacgccctgcctgccggcgttgaccttctccgggtagacgccgtccttggggtggaggtactgcacctcgccgttggggaagacgcggtagaactggtagttgatcttgtacttggagcgcagcctggtgccgagcgccaggcactgctccttgcgcgccagcttcaggaggtttggaccctcccgcatgatggcggcgccgcccgtgggcatctcgaacacctgctccttcggggacgtccacgtgatcacgtagaactcctccacctgcgccttccggagcagcccgcccgtgctgccgccgaagatgggcgacggcgtgttggggtccagctgcgggggcacgaaacccttgggggcctcctcagtcaccgccgccgccgccggtccgtcgtcggacgcgcggagcggggccggaccgcgggacgacggcatcgcgagctgcgagctcagctgccgtggcttcgcccaggcggccgccagcaggtggcgcgtggcggcggaggcttgcgcctcgtgcc

SEQ ID NO: 453179 - DNA, 385 bp, Sorghum bicolor
cgtccgccatgacatcggcacggtgcagaactccaccatgatgccccccacgtactacgaccgatcgctggcggacatcttccctccccacctcctcaagaaggtggtctcggaggtggtgtccacgttcttgctggtgttcgtgacgtgcggcgcggcggggatctacggcagcgacaaggaccgcatatcgcagctgggacagtcggtcgccggcgggctcatcgtcacggtgatgatctacgccgtcggccacatctccggcgcgcacatgaaccccgccgtcacgctcgcgttcgccgtgttccgccatttcccctggattcaggtcccgttctactgggccgggcagttcacgggcgccatctgcgcgtcgttcgtgctc

SEQ ID NO: 453180 - DNA, 1000 bp, Sorghum bicolor
ggcacgaggccagctccagctccacgccggacgcagcagcagcagcagaagcagaagcagaagcagaagcagagatcgatggccgccctcgccgcctcctccacggccgccttcgccgcgaagccgcgcctccctcgcgcgcgcctctccgtggcctgctccgccaccggcgacggcaacgccaacagcgtgtcgctcgcgtcctccgtgaagacgttctcggcggcgctggcgctgtcgtcggtgcttctctcctcggccgccacctccccaccgcccgcggccgccgacatcgcggggctgaccccgtgcaaggagtccaaggcgttcgcgaagcgggagaagaactcgatcaagaagctcacggcgtcgctgaagaagtacgcgcccgacagcgcccccgcgctcgccatcaacgccaccatcgagaagacgaagaagcggttcgagaactacggcaagttcgggctgctctgcggcgccgacggcctgccgcacctcatcgtcagcggcgaccagcggcactggggcgagttcatcacccccggcctgctcttcctctacatcgccgggtggatcgggtgggtcggcaggagctacctcatcgccatcagcggcgagaagaagcccgccatgagggagatcatcatcgacgtcgagctcgccacccgcctcctccccagggggttcatctggcccgtcgcggcgtaccgcgagctcatcaacggagacctcgtcgtcgacgacaaggacatcggctactactaactgcgtgctgcacctgcttgcacatcgctgctggcgagggcgcagtgcgtatgtggggaaagatcgatggcttttggtgtaggagctggtagggggaaggaatccaagtgatctgttgtacttaaaagaaactggatgaaagccttgtataattggacttctatctcttgtgtgtattcaccttcatgaaaattcttgagaatatgcttcaaaaagataaaaaaaacggacg

SEQ ID NO: 453181 - DNA, 808 bp, Sorghum bicolor
gcgcgtccggactggatgaggaggaagacggatttgattgcgaaattgggacattggagaactttgagaagggtgagggcactgtaaatatctcagcaacttacaacaccaggcacaatgacttcgagagttcagtagttgcacgaggagacctttggaggttagagtcatcgcgtggcaatttaaattctggaaatgatagttcacctcttttccttgttcaactggggcctttactgttcgttcgagactccacgcttcttttgcccgttcatctatcaaagcaacaccttctttggtatggttatgatcgcaagaatggaatgcactccctatgcccagctatctggtcaaagcatagaaaatggatgctgatgtcaatgatgtgcctcaaccctgtagcttgttccttcatggatgtacaatttccaaatggacaattgacgtatgttgctggtgaggggataacagcaagtggtttaatccctttatttggcgggttactccaagcacatggaaagtgtcctggtgatacaagagtgagcttctctttcaagaacaaacaaggtactaggttcactccaacgtttcagtggcctgacaattccgtttcacttggagttgcacaagctgtagcattggaagaggtctggcccttatggtgaggcccagcattcaaatcaggtagataaatataagcacttgctcagtgttatacttagcttttgcttttcaagataaatgaggttattctgagtagcttaataaaaatgtggcctgctgttagtcacaatacaatgacatcttt

SEQ ID NO: 453182 - DNA, 528 bp, Sorghum bicolor
cgtgcgggtcttgatgtggctcaaatttggttggatggagatgaaactcttgtcaacactattgatcgtgatgggaatgtgctacgcgataaatatgatccaagggcgttcgttaacgcatgaccctcttgttgtgcttgtcaatgaaggaagtgcaagtgcaagtgaaatcttagcaggggcattacatgacaatggacgagctattctggttggccatagaacctttggtaaaggaaaaattcagagtgtgactgagctggatgatggctctgctctgtttatcacagttgcaaagtatctatctccagcgctgcatgaaattgatcaagtaggaatccaacctgacatacaatgcagccctgatgtcctatctttgccaagagcgccttcgctaaaagaaaacagcgaggccacaaatttggagatggattcatgtatcatggtcgcagaacaagcgttggaaattgagcaaacaaaagggtctgcttcttagatgtgctacttctgggctctgtatatgttgca

SEQ ID NO: 453183 - DNA, 559 bp, Sorghum bicolor
cgtccgcgtcgtcccgtcttccccttcgtcctcagccgcctcgctccctcgcaagcagcaaaacctcgtcacgaatcgccgatactccagcccggaagagccaacgaggtgactgcgcgctgcggccatgggtgacagccagtactccttctccctcaccaccttcagcccgtcgggaaagcttgtgcagatcgagcacgcgctcacggctgtcggatccgggcagacctcgctagggatcaaagctgccaatggtgtagtcatcgccactgagaagaaactgccttctattttagtggatgaaacatctgtgcaaaagattcaggcactaacaccaaatattggagttgtctatagtgggatgggtccagatttccgtgttctggtgagaaaaagtcgaaagcaggcacaacagtattatcggttgtacaaggagcacatacctgtaactcagcttgtacgagagactgctgctgtcatgcaggagttcacacagtcaggtggtgtaagaccatttggagtatcattgctgattgctgggtatgatgacaatggccca

SEQ ID NO: 453184 - DNA, 641 bp, Sorghum bicolor
cgtccggagacaaccggcgatggcggcgtccgcgaggccaggggagagagcgaccagcttcaccgtcgcgtgcagcctcctcagccgcttcgtccgccagagcggcgccgcggctgccgagctaggcctcgggatcaaaggcgaggtcgagcagcagaggacgccggcgacaattagcttgctccccggagcggagggcgaggaggccgagaggacgaaggagaccatggagctgttcccgcagagcgccgggttcggcgtcaaggatgctgctgcccctagcgagcaagaaaataaagagaagcctaagcagctcaccatcttctatggcgggaaggtgctggtgtttgacgatttccctgccgacaaggcaaaggacctgatgcagctggccagcaagggcagccttgtggtacagaacgttgttttgcctcaaccttctgcacctgctgctgtcaccgacaaggccgtgccggccccggtcatcagcttgtctgctgctcaggctgatgctaagaagcctgctcgcacaaatgcttctgatatgcctattatgaagaaggcgtctcttcaccgcttccttgagaagagaaaggatcgtctcaatgcaaagacaccatattagacttcttcttcagatg

SEQ ID NO: 453185 - DNA, 208 bp, Sorghum bicolor
cgtccggctccgcctgcttcccgtgtgggcgagcggcatcatcttcgcggcggcgtacacgcagatgaccaccaccttcatcctgcagggggacacgctggacccgtacgtgggcggcttccgcgtccccgccgccgtgctctccgtcttcgacaccctcagcgtcatgctggggtgccgctctagaccgcgcggggcccctgcgcgc

SEQ ID NO: 453186 - DNA, 558 bp, Sorghum bicolor
cgtccgcccacgcgtccgctcaatcatacacccgcctctacctcggcctctggaaattcccggacacctccgctctccgacagtgtcaaagtgacgctggcgtggtgttcccgcacctccgcgagctcgtcctctgctgggtgatggtggagagccgcgacatggacttcctcctagctgggagccccgtcctagagacctttggcataatgggaatcagggagaaggcgatgcgcctccgccacgctggccagcatctccggtgcacgcagatcctcatgtcaactgtggacagcgtcactgtggtggacgccctgagccttgagcggctcatcttgtgggaagccatgccgtgcaacagctcttgcatcagggtaaagattggcaaagtccccaagctgcaagtacttggatacctgagtccctgaagtcacatgccggagatccggaataccgtcatcaacgctgtgataaaggcgacaccaagcaccatggttccaggcattaggatccttgggttatacatgcgcttcggagacacgaatgattccaagatgc

SEQ ID NO: 453187 - DNA, 526 bp, Sorghum bicolor
cgtccgcggacgcgtgggttttgagtgaaaatcacgataataatcatgccgaagagtctttagttacagcttttgtaaaacgagcgtggtagtcgagggcttgaggccactggatggtaagaaatccgtttctagatgtgtctcttcttctaatgtgagctttgggtcaaggccctccgtgggatgatatagaacccaccaagttgtccatggaagcctccgtggaaagcaatcaagctacggagtatggaatggagctagcttgcaagtacaattgtacaaacaggccacgccgccgccgccgcggcgctaggcggcggccgtctgcagctctaccaacagtcgactgaggcaaacaaacacaaaagccggcgacacgccggtcggccggcctacggctacgacgacgaggaggcgacgggcacggcttcgaagagcttggcgaagtagaactgcgtggagatgaagccgcggttggcgacgcgccatccggcctgtcggagcgcgtcctcaatgtcggcctcgg

SEQ ID NO: 453188 - DNA, 472 bp, Sorghum bicolor
cgtccgacagagtatgaggctaaaggtgactgacagccagctgagtccgaatcatatctctaagcaattgtcgttgaactgaataaagaggtgaagaccgacaacgggcaggcagctgaatctgtggtgccttccctggcatcttcacgagggggagaagagcgagaagggtcgtgcaaccgaacccgcacccccgcttgtggctgagacaaagacagatgctcctccagctgacgcagaaaaggcggccgagaattcaggccaggtgaacactgccccccaagaaccgacggcagcgaactgcgacaacaagggccagatccaacctggtgcctctgctatgaggtgcacataagggagcttggagactctgtgcattgtgtgtttaggacaataccctgcatttggcttgataattgtaatcgtggttaacctgacagtgctgcgtagcactaggctgcccagcacttag

SEQ ID NO: 453189 - DNA, 441 bp, Sorghum bicolor
cgtccgcaagaacaacggcaccaacaacccgctggacgccatgggcgccttcttctcgaagcaggtggaccggcggaagctggtgaccaccgagaagcgtgcgctggcgacgcgtctgtcctcctccggcgagacgttcccggggtcggagcaccgccccgcggaccggaagcggtggatggcggagctgggcgccgacaagctgcgcgtgcaccaggtggtgtggcccggcacgcacgactcggccaccaacaagatcggcgtgccgttcgtgacccgccccttcgcgcagtgccagtccatgtccgtgtacgagcagctggccacgggcacgcgcgtcgtcgacgtgcgcgtccaggaggagcgccgcgtgtgccacggcatcctggcgacgtaccccggggacgggtgctggacgacgtgaaccggttcctgggcgag

SEQ ID NO: 453190 - DNA, 1305 bp, Sorghum bicolor
  unsure (1)..(1305): unsure at all n locations
cgtccgtagccatgcgccgggcgcgggaggccgggcgggagtacgagctcatccccaccgctcgcggcgagacgctcttcacgcagtgctggtggccgcacccgccttcctccaccgtgcgacccagggcgctgctcgttgtcatgcaccgcctagacgggcacagtgggaggtatgatcatttagcgaggcgattgaatgacatcggcatcaaggtgtacggaatggactggactggtcatggtggaagtgatggtctccatggatatgtgcaatctcttgatcatgctgtcaatgatttgaaaatgtacctcaagaaagtattagccgagaaccctggtcttccatgcttctgcttcggccattcgactggtggaggtatcattctgaaggctgcacttgatccagaggtaaaaactctcattagcggtattgtcctgacatcaccagctgtccgtgttcagcctgcccacccagtcatagcggtcatggcaccgattttcgccctcatcgcaccgaggtatcagttcacggcgtcgcacaggaacggcccaccggtgtcgcgcgacccggaggccctgcgtgccaaatacacggaccagctggtgttcacgggcgccatccgcgtgaggacgggctacgaggtccttcggctgacgtcgtacctgcagcagcacctgcaccgcatcgacgtcccgctgctggtgatgcacggcgccgacgacctggtgaccgaccccaagggctcgcgcgcgctgtacgagcaggcacgtcctccgcggacaagtccctcaagctctacgacgggctgctgcacgacctcctgatcgagcccgagaaggacaaggtgatggacgacatcgtggcgtggctgagccccaaggtctagcgccggcatgcagatgcccgtaggacgcgcgcgcgggcttccatgcgtctgctagaccgcggaggacctgcaggcggaagacgtacgccttcgcctccggacggtgatgacgcgggtctggtcggccgcggagcaagggagagcgggtgtgcctcctcgcccccttgccgtggtgattatccgagagcaggactacaggagtacggcatactactactacctacgctacggcgatggctttactcgtgcctcccattgtatcccgataattgtggtcaggggtacttacgaattatgtaaaacatgctcgtttcgccctgtacgtgtggctgcacgagcggtgtccgatactgtagaagacgcccgncctnttgtgaattgtgaatgcattaacgcaattccatatcagagttggc

SEQ ID NO: 453191 - DNA, 530 bp, Sorghum bicolor
cgtccgatcgccatgctttcccctgctcatctcgccttcgccgccgctttcctcctcgtcttccggtcatcggcgcctgccgctgccgcccgaccgatcttcgacggcaagccctccccctccgaggccaccgccaccgcgaggtggctcgccgcccagagcacgtggggtgtcctcagcacaatatcaagtgactgaagcggagctccatttggcaatggaggttcggatagtgggtggtgttccaggggagggccgtggagtccctatgcttttatctggcaactctggatcctactgcatgagatgcactggtggatgaaaggacctccttttcccttagtgagttccctctggggacatgtgggaaaatagatccggaggtgccccacttgtgcaaaacttactcttaatggaaaagtgaagatggttgaccttcaatcatttgaagcagatttggccaaattagcacttttcaccaaacatgcttgaatgaaggattggccaaagaatcatcatttcaaaatctc

SEQ ID NO: 453192 - DNA, 998 bp, Sorghum bicolor
tgcgtccgtacatccagaccatggaccctgagcacgaggaccgcttcgacttcgacccgctggacgtgaccaagacgtggcccgaggacgtgttcccgctgcagcccgtggggcggatggtgctcaaccgcaacatcgacaacttcttcgccgagaacgagcagctggcattctgcccgggactcatcgtccctgggatctactactccgacgacaagctgctgcagaccaggatcttctcctactccgacacgcagcgccaccgcctgggaccaaactacctgctactcccggccaacgcgcccaagtgcgcacaccacaacaaccattacgacggcttcatgaacttcatgcaccgcgacgaggaggtggactacttcccctccaggtacgaccctgccaagaacgcgccgaggtacccaatcccggccgtccacatcaccggccgccgagacaagactgtgattgccaaggagaacaacttcaagcagcctggggagaggtaccgcgcaatggacccagccaggcaagagcgattcatcaagagatgggtcgatgcactctctgacccccgactcacccatgagatcaggagcatctggctctccaactggtctcaggccgacagatctctgggccagaagcttgcgagccgcctcagcgccaagccgagcatgtaagatcagaaaacagcgcaggggactgaactctgcttcgctcatggaaggaaggaagacagcctgaaaaagaatccctcttattgatcggcaacacccaacctgatgctccagtcattcttgcatgcatactgagtctcttctttgtataagaggacataacatatggttctgtctcatttctgtaccaatcaatcatcatcatgtaataatctgtacttgcagacgtgtctccacctgatactacactggattattgtaagtgcacctgcttgttgaattcaggacacatcatacaataaattatgacatgtctttgtt

SEQ ID NO: 453193 - DNA, 897 bp, Sorghum bicolor
cgtccggctccgtgatcggccaccccaccgatggatcctccgtcagcggcggcggcctcagccagaatggtaaatttagctatggctatgcaagctcccctggtaaaagggcatccatggaagacttctatgagacgaaaattgactgtgttgacggtcagataattggtctttttggagtttttgacggtcatggtggtgctaaagtagcagagtatgttaaagaaaacttgttcaacaatcttgttagtcatccaaagttcatgagtgatactaaggttgctatagatgatgcttataaaagcaccgacagtgaattcttagaatctgacagtagtcaaaatcaatgtgggtcgactgcatcaactgctgtacttgttggtatcgtctctttgtcgcaaatgttggtgactctagggctatcatatgcagggaaggaaatgctatccctgtttcaaaggatcacaagcctgatcaaactgatgagcggcagcgtattgaagaggctggaggtttcgtgatgtgggcaggaacatggcgtgttggtggtgtacttgctgtttcgcgagcttttggtgacaaactcttaaagcaatatgtagttgtggatccggagatccgagaggaagctgtcgatgacacacttgagtttctcatccttgcaagcgatgggctgtgggatgttgtctctaacgaggaagctgtcgcgatgaccagatccattcaggacccagaagaggctgcaaagaagctcttgcaagaggcctacaagagggagagcagtgacaacataacttgtgtcgtgtgcgcttcttgcgcgggcaaggtagtagcggatacgcttaaagcatagcaataaaattactgtacgcaatgggtggctatgatatacatgcc

SEQ ID NO: 453194 - DNA, 598 bp, Sorghum bicolor
  unsure (1)..(598): unsure at all n locations
cgtccgacgataagctntgccactagttagcttcggtcttgtattcttgttgctgttagttctctgtgtgccagcagcatccggccggtaggaaaaatgacgactgggaaggtaacattggaggcggtgagaaaggcgcagcgcgccgagggacctgctacggtgttggccattgggacggcgacaccggcaaactgcgtgtatcaggctgactacccggactactacttccgggtcaccaagagcgaacaccttaccgacctcaaggaaaaattcaagaggatatgccacaagtcgatgattaggaagcgttacatgcatttgactgaggacatcctagaggagaaccccaacatgagctcgtactgggcaccatccctagacgcacgccaggatatcctgatacaggagatacccaagctgggcgcggaagctgcagagaaggcgctcaaagagtggggccagccacgttcccggatcacgcaccttgtcttttgcaccacctacggcgtggacatgcctggcgccgactaccagcttatcaagctactcggtctctggccctctgtgaaccgagcgatgatgtaccaacagggtt

SEQ ID NO: 453195 - DNA, 547 bp, Sorghum bicolor
ggcacgagggctttgtccgttctgctgcaagtggatcgaagaagaagaagcgcaggtgttgatcgaggagcctgctgccgatcgacgacggacgacgccagcatgggggagatcaccaatgtcatggagtaccaggcgatcgcgaagcagaagcttccgaagatggcctacgactactacgcgtctggagctgaggacgagtggacgctaaaggagaacagggaggccttctccaggatcctgttccgtccacgcatactgatcgacgtgtccaagatcgacatgaccaccaccgtgctgggattcaagatctccatgcctatcatggttgcccccactgctatgcagaagatggctcacccagatggagagtacgccacagcacgcgccgcagctgcagcaggcactataatgacactgtcatcctgggcaacttcaagcgttgaggaggttgcctcaactggaccagggatccgattctttcagctctatgtctacaaggacaggaaagtggtggagcagcttgtgaggagagctgaaagggctg

SEQ ID NO: 453196 - DNA, 1072 bp, Sorghum bicolor
cgtccgtcgacccacgcgtccgtcgacccacgcgtccgtcgacccacgcgtccggcctcaactggaccagggatccgattctttcagctgtatgggtacaaggacaggaaagtggtggagcagcttgtgaggagagctgaaagggctgggttcaaggccatcgcgctcaccgtcgacaccccgcgcctcggccgcagggaggctgacatcaagaacagatttgttctgccaccacacctgacactgaagaacttcgaaggtctggacctcggcaaaatggaccaggcagctgattcagggctggcttcctacgtcgccggccaagtcgaccgcaccctgagctggaaagacgtcaagtggctgcagaccatcaccacgatgccgatcctcgtcaagggagtgatcaccgctgaagacacgaggcttgcggtggcgaacggcgcggcggggatcatcgtgtcgaaccacggcgcgcggcagctggactacgtgccggccaccatcagcgcgctggaggaggtcgtgaaggcggcccggggccagatccccgtcttcctcgacggaggcgtccgccgcggcaccgacgtcttcaaggcgctcgccctcggcgccgccggcgtattcgtcgggaggccggtggttttctccctggcggcggcgggcgaggcccgggtgtccaacgtcctgcggatgctgcgggacgagttcgagctcaccatggcgctcagcggctgcacctccctcgccgacatcacccgcaaccacatcatcaccgagtccgacaggctccgcgtcatgccgtcgcgcttgtggatgatcaataatcaatcacctgctacgctacgccgccggctgcccacctcgcgaggctcgctcgccgccggccggccgcgaacgaagacttatcaccccgatcggggatattcagtttcgtgcatgtatgcatggatgctcgatgacgatgatactattaattctggactgcatatatgttttgtttcataaaaagatccgatcactgtactgtaaaatcttactacagattacatgcatggtgtggtgcatcttcatt

SEQ ID NO: 453197 - DNA, 506 bp, Sorghum bicolor
  unsure (1)..(506): unsure at all n locations
cgtccgacaagagggagatcatacagctcggtgtcccgttatttcaacctaccacagaggaagctaattgtcacacagaaccaatcccccttgttctgcaggctgtcattgaccaccttgttctttggcgtttaataccagaaagcaggaagccaaacagtgtcatcatcaacttcttcgatgaggatgaacattcgcagccctacttcaagcctccccatctggacaaccccatttgcactcttctgctgtctgaaactacgatggcatttggcaggtcactcgtcactgacagcaacggcaactacaagggacctctcacactctcactaaagcaagggtccctattagtgatgcgtgggaacagtgccgacatggcgcgccatgtggtgtgtgccgtcgtccaaccggcgcgtcagcatcacgttcgcaaggtgaggccatcacgccggggacctgacccactccgtcccaccaaggtatgacccctgcagncgcagcggcac

SEQ ID NO: 453198 - DNA, 1100 bp, Sorghum bicolor
cgtccgcccacgcgtccgcccacgcgtccgcccacgcgtccggagccacacagttccaatatacgaaggatacacacttcctcatgctattcgccgtttggatcttgcggggcgtgacctcaccgaccacctaatgaagatcctcacagagagagggtactccctcactacgagcgctgagcgagaaattgtcagggacataaaggagaagctcgcctatgttgcccttgattatgaacaggagctggaaacagccaggagcagctcctctgttgagaagagctacgagatgcctgatggtcaggtcatcaccattgggtcagaaaggttcaggtgccccgaggtgctgttccagccatctcttgttggtatggaatcgcctggcgtacatgaagccacatacaactccatcatgaagtgtgatgttgatatcaggaaggatttgtatggtaatgttgtcctcagtggaggatctaccatgttccctgggattgctgatcgaatgagcaaggagatcacgtccctggctcctagcagcatgaagattaaagtgattgcaccacctgaaaggaaatacagtgtctggattggtggctctattttggcttctctcagcacttttcagcagatgtggatctcgaaggcagagtatgatgaaaccggtccaggcattgtccacatgaagtgcttctaagtttttctcagacagttttctaaaaaaagggcgtttctggggaagttcgagatggttcgtaaggtgttactggctcctgtgaaccaatacatgatactgccatgataagggttataattagtcaagcagagtaagaagaaataccagtagcagtgactccgattcctgaagatgagtcatatttgtcttgtgctcctgctgtatgaaatggatcgcatgtgtatattcgtcgccgcgccgcactggtgtaacctgttgcctcagagtttgcttttagctggttctgttttaaaaataagtactgttttttggttggctgcaagccattctgaacttcagtttaccaattgtttttatgttgtggttgaatattttaattttttatttaatgtttggttcttttttt

SEQ ID NO: 453199 - DNA, 1529 bp, Sorghum bicolor
cgtccgtgttgactcagacacactgcccctgaatgtgtcacgagaaatgcttcagcaacatagcagtctcaagaccatcaagaagaagctgatccgtaaagctcttgatatgattaggaaacttgctgaagaagaccctgatgagtacagcaacaaggataagacagatgaagagaaaagtgaggtggaagagaagaagggccagtacgccaagttctggaacgagtttggcaaatcaatcaagctgggtatcattgaagacgcaactaacaggaaccgccttgcaaagcttcttagatttgagagttccaagtcagatggcaaacttgcctcccttgatgagtacatttcaaggatgaagccagggcagaaagacatcttctacatcacgggaagcagcaaagaacagctggagaagtctccattccttgagaggctaaccaagaagaattacgaggttatcttcttcactgaccgctgtggacgagtacctgatgcaatacctgatggactacgaggacaagaagttccagaacgtgtcaaaggagggcctcaagctgggcaaggactcgaagctcaaggagctcaaggaatcgttcaaggagctatccgactggtggaagaaggctctggagagcgagaacgtggactcggttaagattagcaaccggctgcacaacaccccctgcgtcgtcgtcacctccaagtatgggtggagcgccaacatggagaagatcatgcaggcgcagaccctgtcggactcgagcaagcaggcgtacatgcgtggcaagagggtgctcgagatcaaccccaggcaccccatcatcaaggagcttcgtgacaaggtcgcccaggacaacgagagcgaagagctgaagcacacggcgaggctggtgtaccagacggccctgatggagagcgggttcaacctccccgaccccaaggagttcgcgtccagcatctacaagtcggtgcagaagagcctggacctgagccccgacgctaccgtggaggaggaagacgaggccgaggagcagcccgagatcgaagagaaggagtccaccaaggaggagtcggagccgtcctacgacaaggacgagctgtaggcgttgtttcgtctgccggatttgtgtttgaagtctagctagctcccgcttaggatgatgtgatattggggagttccactcactgccagtgtttaggaatgtgatgttctgagggacgacgcccatttttcccatgcaacgtgatacgggatttttgtctgtctttgtacctatacaaactttagttcagcctaattagtggtttgcatttaccttaccttgccatcccactccgtctggtgtggtcaggtgaactatctctgtctggttactgagctgaccgatagagtggcgcaccaaatttatttatactccctccgttctaatttaagttcttaacttttattcaggtactaaaaacatgaagccatattagttaaatcgtcatgactcatagatctatatgttacttgttgcaagttt

SEQ ID NO: 453200 - DNA, 551 bp, Sorghum bicolor
cgtccgcccacgcgtccgcgatctccccgcgccaaaactccagctagctagcgcgatcgagactaccgtacgtgtcgccatggccgcaacagcgtctctgtccgccgtcgcggcgccgctgtccgtggccgggctcaggaagccgctcggcgcgtcgtcgttccggcccctgcagccgagggcggcggcgaggatgacggccgtgcgcgcgtcgtcgtccgtgaaggagaaggcggcggccgggctgaccgcggcggccctggcggcggcgctggtggtgccggacgtcgccgaggccgcgcagtcgctcacgccgtcgctcaagaacttcctgctcagcatcgtgtccggcggggtcgtgctcgtcgccattgtcggcgccgtcgtcgccgtctccaacttcgaccccgtcaagagggcctgatccgatccatcgttaggaggcacgtctcccctgtgccctgtcctgtctgtatccactgctggtgctgtatcttcctttgttgtgttaattaattttggagaatgtccaaacatatatatctctatga

SEQ ID NO: 453201 - DNA, 1134 bp, Sorghum bicolor
cgtccgcgttcctaaccataagtttacagtttctatattaaggaataacactcagaggacccattggcgtattaagacctatcttgctattagccacatggatgccggaaaaattgggactatagttgctgacatgaggaaagtgttggcaaaaaatccacatatagaacaacaaaagctgcacaggagagtattctttgagaaaattgatccaaaaaatcaagcacttatgattttagtatcctgctttgtaaagacatcacattttgaggagtttctcaatgtccaggaaactgttatgttggatcttcttagaatagttgggcatcacaaagcaaggcttgctacccaaattcgaacagttcagaaatcatatggcaatgcagactttgataacattccttttggagaagacatgtaatagtcgcgtccgtggccgtccacttctgattgatacatctgcaagggtcagtgatgacaaacccaagcctcgacctgtatcatcacgtgaggagcataaagtcaagacaaatggctcggtagagatcaagtctgcttcacctgagaatgctagtttaagcaactctgagaagcaggaacagaaaaaaatggtacctgaagatgctcgggcgaagaagattaagagtgataatgtgacaccagtaacaccgtctttagatcctgctacgtcaacttctaagactggtaaagggaagacacgtgaagcagagcccactgagcggcaaggtgatgggtcagtctcggtggctaatccaaagaaagaatctagaccagcttttgaagataacattggtctgggcgtagcccttgagggctccaagaggacactgcctattgaagaaggaaatccttatctatcactatctgagactgagctggacaacgaagaggcggcttcatcaccgaaggataagataggtcaaagcccaaaactttgaggtcaagagaaaagccgttcagaggaatctcaaataggtcatccgagttcaaactgtatatccttgtgaagatttgtcaccaagcctaccttttttgtgcgcttgtgcaaatgcaatctaatacgaaacattaagtgtttatggttaaggtgtaaattggcacttatgattattt

SEQ ID NO: 453202 - DNA, 930 bp, Sorghum bicolor
cggtcgacccacgcgtccgatcccttcctacgccggctcacctggaatagtcaccacattccttctcgccgcggacgcgcgtgaggtgagtgtgagagacgaccaccacacccgcgacaacaacaatggccctggagacgtgcttcagagcgtgggcgctgcacgccgcccctgccgctggtggcaaggacagcaggctcctcgtcgtcggcagcagcagcggcagcggcagtaacctggttctgccgtcgaagcgggccgccgccgccgcggtcgtcgcgccgctgtccgtcggccgcgtcgccacgcgccggccgcggcatgtctgccagtccaagaacgccgtcgacgaagtgctggtggcggacgagaagaattgggacgggatggtgatggcgtgcgagacgccggtgctggtggagttctgggcgccgtggtgcgggccgtgcaggatgatcgcgccggtgatcgacgagctggccaaggactacgccggcaagatcacgtgctgcaaggtgaacacggacgagagccccaacgtggcgtccacctacggcatccgcagcatccccaccgtgctcatcttcaaggccggcgagaagaaggagagcgtcatcggcgccgtcccaaagtccacgctcaccacactcatcgacaagtacatcggcacctcatgagcatataatagctcactgttgtatcgtaatattgggatcgatcgatgcgtgcatgaacaacttaattaaatacataagtgtccatatgctcgcgcatatacaccacccatgtatctcctctagtcttgcatacggatgtcatgatcgacgcgttaattaattcaggcagggcagccatctgctactgctcagttattatatgtatgtatacttctctatatgtcaaatccaaaggtacattaattagtttatt

SEQ ID NO: 453203 - DNA, 732 bp, Sorghum bicolor
cgtccggctgacagactcaaccgaccgacagacagacatggccgcctccaccgtctccggcctcgccggcgcctcctccctggccagccgcccggctttctccaccagcttcacgaggggcagccgggtgtcggcgaggaacccgctgatgacgaggaacctggagaggaacggcaggatcacctgcatgacgtttccccgggactggctgcggagggacctgagcatcatcgggtatgggctgatcggctggatgggcccgtccagcatcccggccatcaacggcaacagcctcacggggctcttcttctccagcatcggcgaggagctggcgcacttccccacgccgccgcccgtcacctcccagttctggctgtggctagtcacgtggcacctgggtctcttcatcgtgctcaccttcggccagatcggcttcaagggcaggacagaggactacttcgagaagtgatcagcgcgcggccacgatcgatcaagctccgatccatgcatcgtctctgatatgatgctgcgttgcgttccgctgcgtgcgtgccgcagcaaccagcaatcgatcgaacctttgctgtataatagtatatgatggttctgatttggttcaaaaatgtgtgatatgctacttttgagctcaaaaaatgtaaatctatgccgcgcgccccctgcacgctctggttcaatttgatgaatctatagcaagctagtcttctctcaaaa

SEQ ID NO: 453204 - DNA, 1221 bp, Sorghum bicolor
cgtccgattcgtggtagatcgcgagtcgcgctcgtctcgtgagagctagcgagggccggggtgcattccatttccatatggcttcctccaggatcccactcctgtgcctccttggcttgctgctagtagcttctcccgcaattgctgatgactcctccggtatctactaccagcttgctcttctgtggccaggagcatactgcgagcagaccaacgctggatgctgcaagccgacgaccggcgtctcgccggcgcgcgacttctacataacgggcctcaccgtctacaacgcgaccaccaacgctgcactgacggagtgcagcaatcaagctccttacaaccctaacctgattaccggcatcggcctggagcagtactggatcaacatcaagtgccccgccaacaacggccagagaagctggaagaacgcctggaagaaggccggcgcctgctccggcctcgacgagaaagcctacttcgagaaggccctctccttccgtagcaagatcaaccccctcgtcgtgcgcctaaaacaaaatggtatcgaggatgacttcgagctgtacgggttgaaggcgatcaagaaggtgttcaagagcgggatcaacgcggagccggtgattccagtgcagcaaggggcccttcgacaagtacatgctgtaccagctctacttctgcgcgaacggcaacgggacgttcatcgactgccccgcgccggccaagtacacctgctccaattccgtcctcttccacccctacaagaagtggatgctcaagcagcagctcaacgacgagtccgccgacttctacgattcagccgagccctttcgtgctgcctggcctcgccatggacaactgatctctgatgcgatcgtcgatccctctgcattttcgtgagtttgcgtttcgtcgtcgccggagccaccgcccgccgacgatccatcatccatgatctacctcgtctttaatttcgtcagtttttgcgtgcgttcagtgacgtgcgtatggaataataatgttttctgccttgatcctcactcgctcgatctgggcaatgcacggtgatgcccagcgataagtgtggcggctttgtttattcgaccttttttccacctgtatattaaggaaataaaccttgagagctaaaaaaaaaaaaaaaaaatcggctattctatttctatttcctataatattaaagagcgaaatgtttctttgttcaat

SEQ ID NO: 453205 - DNA, 1034 bp, Sorghum bicolor
cgtccgccacgccgcggcgtccccgctcccggcctccacgccgcgggcctcttccaggtccagctcgctgagcctggtgggcccgggggccgcgggtctcggcccgcgccggctcgtcgcggcggcacccccgcgggcgttcttctcctcgtccccgtactaccagccgccgccccagcagcagccggaggggttctcgccgcaccgggagtacggcctggtccccatggtcatcgagaccacctcccgcggggagcgcgcctacgacatcttctcgcgcctgctcaaggagcgcatcgtctgcatccacgggcccatcgccgacgacacggcctcgctcgtcgtcgcgcagctgctcttcctcgagtccgagaacccgctcaagcccgtccacctctacatcaacagccccgggggcgtcgtcaccgcggggctcgccatctacgacaccatgcagtacatccgctgccccgtcaccacgctctgcatcggccaggccgcctccatgggctcgctcctcctcgcggccggggcgcccggtgagaggcgcgcgctgcccaacgccagggtcatgatccaccagccctcgggcggcgcgcagggccaggccaccgacatcgccatccaggccaaggagatcctcaagatgcgcgaccgcctcaacaagatctaccagaagcacacgcgccagcccatcgataagatcgagcagtgcatggagagggacctcttcatggaccccgaggaggcgcgcgactggggcctcatcgacgaggtcatcgagaaccggcctgcctcgctcatgcccgacggaatcggtggaggcctcgatgtgcccagcctcggtgtcggtcccggcggacggggaagggacgccgtggagccctcggcggtgtgaggattggcctcaaaggtgaaatccctttcgcatccggtggctctgttgtttgttgttagatctaaaaaagcttcaattcttactgtacaaggttaaccttgttattatggttatggaggtgtccggctccccattc

SEQ ID NO: 453206 - DNA, 603 bp, Sorghum bicolor
  unsure (1)..(603): unsure at all n locations
cgtccgggttcgtacgcatcctatttccgccgtctagaggaagaagaatcaacggttgctgtccgcgtcagctggtcggctccgccaagaaaggacccaaacgcaaccacgcaatcgccgtccgccgccgcggcgactaatcaatcaacttaactcttagtattcagcgcttttcgatctctccgtccttcgtttggtttcctccctacctccaccacaacccacctgctcgcgccttttcccaggaaaatcctcttcgcgattcacctgattattgcttctaggtccttgaatcttgatatggagcagcaccccactttgcgccccgcccccggcgcccgtgcccgttgctggggccgtcgtcccggtggacttcaaggtcgtgaagaagggacccgagatggcgatgcacgacgcgatcggccgcctcgccttccgcgccgcgggcagggacagctgggccacggcgctccacgatgaccgctggagtgtcctggtcaccgtcaggagcagcggccagggtgagtggcaagcatttagtggaaatagtttggagcagagacacatcattttcactgcanaagttatatctgcttcttcaag

SEQ ID NO: 453207 - DNA, 623 bp, Sorghum bicolor
cgtgcgggctagcgcatttttctgaacctcggcgcttcgcagccgagtggaggcgaggacgatggcagtcgccgggcagtgctcctcctgctactagacgtcacccaccctgcagctgcagctccagctccaccgacggcacggccacctgccgcagcagccccaagccgcacgaagagcgcggtggccgaggttgcaggtggccgcagctgccggcggcgggtccatcaaggcggccacggacgccgagttcttccagccttccgacaccaggcccatcatgctcttcgacggcgtctgcaacctctgcaacgggggcgtccggttcgtgcgggagcacgaccccaacaggagcatcaggtacataccgctgcagagcgagtccgggaggaagctcctgcagaggtcagggaggtcccctgacgacatctccagtgttgttctcgtcgagaaagacaggtcattcatcaagtctgaagcagtgctgaggataatggagtacctcaacctgcccttcccgcagctcgccatcttcctcaactttatccctctgttcttgagggacttcgcctacgataatgtcgcaaacaacaggtacgccatgtttggccgctccgaaacag

SEQ ID NO: 453208 - DNA, 590 bp, Sorghum bicolor
cgtccgcccacgcgtccggccgagagcgggagggagtagcgcgcgcgtcaagcatggctccggcagcggtggccgctcccgtggcttcagtctcccctggcggcggcgccgtccgctccgccaggaggatagcctccctgcatccttgccattcttccaccaaaatcgtgctgctgccacccccgaacggcctgctcagatcggtcaggcagaggaggcgcttcgcggcacggagcagcatctcggaaagcagcaccgatgactcccaatccccgaaacaagagaaggcgccgttcgggtacacgaggaaagacgtgctgctgatcggccttggcgtcaccgccttcggcgtcggcctcaagtacgggctcgagctcctgggagtggacccattgcaggccgggaacgtggtgcagctgctggtggtgctcgggatgaccgggggggtgatctccacctacatgttccgggtggccaacaaggacatgacctacgcgcaccagctcagggactacgagaagcatgtcatggagaaacggctggtgagcttgacggaggctgagctgcaagctctgctcgagcaagtggag

SEQ ID NO: 453209 - DNA, 788 bp, Sorghum bicolor
gtccgatcgcctcgtgcctctacattccgtctccttctgcagcgattctcgcaggtgcgcagccatgatgatggcgtgtggcctcgccgtcgcccagcctgcggcgtctctcgcgccatccggcaagaggagcctctccggcggccgtcccccatggctgccatctcccagacttttttcagacgggctgataaggagccgcagtgtcgttgccaaggctgcgcaggacagttcagaatcatcccgggagcatagtgaaatacgtcaccagttctttcagcactgcggaagacatttttggtctagctggtataggctttgccgcaatagctgcattatgggcttcagtcaacctcattgagatcatcgataagctcccggttcttcctcttctatttgaactggttgggatattagttgcatggcttttcatctacaacaatctcctcttcaagccaaagagggaagaatttctgaagaacatcaaaaactcagtatctcaaatcctggggcagtaacccttgcaggcgacagtagacagcaagcattctgtcatgggttctctgcaaacataccgaatgcaattatgcaatataactgtctgcaagctatgagtgttaccatttttgactctatataagcactaccaattttctgtacaggttagtgtgattaaagccgttttcccagtaccaaaacttggactgcgacctcttgctgtacgagtctaatgaaaacagacacccggattcttcctgtatggaatgcttcggctattcaatttcacg

SEQ ID NO: 453210 - DNA, 573 bp, Sorghum bicolor
  unsure (1)..(573): unsure at all n locations
cgtccggcttatggaaaaacggggatatggcgaggactatataaatcgctataaaatgatgacaaggttccatcatcaaagggttccactagtcattttagtgtgtggaactgcatgtactggaaaatcaacaatcgctacacaacttgctcagaggctcaatttgcctaatgttttacagacagacatggtgtatgagctgctgcggacatcaacagatgcgccacttacttctgttcccgtgtgggctcgggattttaattcacctgaggagcttatcactgaattctgcagagaatgcagagttgtacgcaagggtttggctggcgatttgaagaaggccatgaaagatgggaagccaattattatagagggaatacatttggatccaagcatttatcttatggatgaggaaaagagagatggtaattccaggacggagaagacagtaatggattctgaaaatccaggcatctctgtagaaaggaagaccgaacaccaatccaaaaatggactagcagagaacagaatgaatcctacggaggacaacanaaaacttgtcaaaatcaaaga

SEQ ID NO: 453211 - DNA, 670 bp, Sorghum bicolor
cgtccggtccttcatgccaagattcgcccactgacagtttcccccagcaaatcttttattggattcttccagcccgaaggcaatgatgatatgagtggttttgactttcttaatggtgccatgtcatttgacaacatctgggatgagattgcccaggcggcagagttctcatctagtgagaaccctaacttatacatagtacctggggaaaagaaaccttctagccctgactcaagtgatccattgaaggattcttcaggatctgagagctcttcaactgaccaggacagtgagaatgatactgaagaggacgtgcttgtgtcgaagggcaaggaatcatgtaaagaattcatcaagagtttcttggcagccataccaatccgggaactacaggtggacatcaagaaaggactgatggcatcaaccccattgcaccaccgcctccaaattgagttccagtacactcagtcatccccaaaagagactgcatcagccaatcagcttcttaccatggatgccccgtttgagttctcatggcctgagccaccaccaacaatggaagttgcactaacacctgccgtctctgttgtatagcttgtcaaccatggtggccaagaacccaagacatgacgacggtctgtcctgatgttcaacatccaaaacccctttt

SEQ ID NO: 453212 - DNA, 800 bp, Sorghum bicolor
  unsure (1)..(800): unsure at all n locations
ccggtcgcccacggaaaacctcaaagggaggggcggtcagtggtcgcctcgccgtcacgaaatccaccctcctcccccggcgctctccactccgcgccatgcttccgcggccgagccagagaagcatcttccacatcggggaggagggtggcgacgagtccgacgaccaccgcagcgccgacgagcctgtcaagaacaccgatactacacgtatcctcgcagggcgccgagaccacgggcgtcaactgcgaaagcaagactccgccgtcgatgcggtcggcgtcgggctgcagatcctggtccagacgaacctccaccacacgcgggcgtcgccgcactcgcatatcgtcctgaagcaggtggtggtcctgccgccgacgacgacggtggcacgccgccaccgccgtggaccgtgcagcagcttcttgagcgcctgctcccgctgcaggaaggagctcagcagcaaggacgtgtacatgtacagaggcgaccaggggttctgcagcgaggagtgccggtgtcagcagatcttggcagacgaggcgacagagcgtgaagccatgatcaagaaggagcggatgcggcgagggttgcctcgccatctccaccacgggccacggtcggcaatgggggcggcggcgatcggtggtgcgtcnaggagactagttgcaatagcgtactaggatctccagcatctgtacgtccatgtccatcccaggtcgatgcataaaaatgggcacttgctantactgtttgggtaaggggggatgttctacgaagcctttgttttcccccagtcc

SEQ ID NO: 453213 - DNA, 1137 bp, Sorghum bicolor
ggcacgaggcacgtacgccgcggcctaacacacccgcgcgctagctagtgtcatccacactctagcttctagcagtccggaggccggcggcaaaagcaaagcaaagcaagcagcttggtagcgatggcgtccacctcctgcttcctccaccagtccaccgcccgcctcggcgcgtcgccgcgcgtcgcggccgcgccacgcagcgcccagctgttcgtctgcaaggcccagcagaagcagcagcaggacgccgccgccgtggatcagagcgacgtctctcgccgcgccgcgctcgcgctcttcgccggcgtcgccgccgtcggcgccaaggtcagccccgccgccgccgcctacggagaagcagccaacgtgttcggcaagcccaagacgaacacggagtacatcgcgtacaacggcgacgggttcaagctgctgatcccgtccaagtggaaccccagcaaggagcgggagttcccggggcaggtgctccgctacgaggataacttcgacgccaacagcaacgtctccgtcatcatccagcccacctccaagaagaccatcaccgagtacggctcccccgaggagttcctctcccaggtcgacttcctcctcggcaagcaggccttcggcggcagcaccgactccgagggtggattcgagaccggcgcggtggccacggccaacgtgctggagagctccacgcccgtggtggacggcaagcagtactacagcgtctccgtgctgacaaggacggcggacggcgacgagggcggcaagcaccagctcatcacggccaccgtctccgacggcaagctctacatctgcaaggcgcaggccggcgacaagaggtggttcaagggcgccaggaagggcgtcgagaaggccgccgcctccttcagcgtcgcataataatgaaattgtgctgcatcggccgggattattatttctttgatggtttggcttcatcaggggatgcacaacgtagagagcatgcttgtgtatgtgttcctttgattgtacatgagaacaacaaagactaaggagagctccatttccatgcatgcaaggatccatcgattttcttcagtcatgcaagctgtttaagaaatcttaattagcactaataatatttttcta

SEQ ID NO: 453214 - DNA, 437 bp, Sorghum bicolor
cgtccgcttatctctctctcgcctgccacgagacgaggaaaacgttggcatgtgagcgccacgcacgtacacctccgccgtacccatgcagccgcccgggcacgccgccggcagccaccggagcagcagcagcagcagcaccttctccgccaccagccatcgtctcctcccagtcgtcaccatcgccattatcaatcccatcggcaaagacagggaggcggcagctgctgctggtgtcatcgggcctgctcctcgccgccggcgcgcgtgctgcggttgctggtgcaggagaggagggaggagctttggcagtgtacaataatggcccgccgccgccgccgccggtggtgacggaggcggagcgcgcggcgagcgcggcagtgtcgcggcgcgtgggcgaggccgtagggcttgttggagctggggcgggagctgca

SEQ ID NO: 453215 - DNA, 471 bp, Sorghum bicolor
acgcgtccgggagagaagtgaagctagcattcaacaaaggaagaagcgagcgagctgacaaaatcgactgaccatccatccatggctctggcgccggcgcctctccagtgcttcctcacgggcagcagcagaccggtgtgcacggcgacgccgcccaagcacgcgaggaggccgtcgaggatctcgtgcaaggcgtccggcgacgacaaggacaaggtcccgtcgggagggaatgatcttggggtcaagctcgggaagctggccatggtcgcgctggccgccggcgtgctggcgctcggccccgtcgacggcgccttggcggccaagtccggcggcagggtcggcgggcaggccttccggtccgcgccacgatcgtccggccctcggataaacaactccaggacgaacatctacatcaaccccgcggtggcgccgcctctgggcggatacggctacgggagcccgttcttc

SEQ ID NO: 453216 - DNA, 734 bp, Sorghum bicolor
cgtccgcaatccctcagagcactgagaacaagccgccgccagcaccgccacagtcacaagccttccagccggccttcaaccaacccaatcagtcactgaacaatctggatttcagcctgcccatggacgggcagaggtccatcgctgagctgatgaacatgtacgacaacaacttcatgacaaacaagaacatgagcagtgacagcgtcaccatcatggagaggcctaatgcgatgccccagaggatccagatggatgagggtttctttggacagggcaatggagtcttcgacgatgtcaatagcatgatgcagcaacaacagcaggcaccagtgcagcagcagcagcagcagcagcagcagcagttcttcatccgtgatgacacgccatttgtgagccagatgggcgacatcaccagcacatcggagttcaggttcggttctggtttcaacatgtctagcaccgttgattacccaggcgcggcgcagaagaacgatgggaccaattggttctactgaagaataagcttgtaggtctgaaaaacctcgttataagctttggatttctccatggtgctccatggttctcctaagttgtcaagtctataggtctttgtcatataggttttgcagtagctgcaagacggctggaacttggaactggtttatacttgtatgtccgtccagccataaacctcttatggaaacttaatgttattcctagttttaattgtt

SEQ ID NO: 453217 - DNA, 568 bp, Sorghum bicolor
cgtccggatggcgttctccagcagcaaaaccactcgtctcctcgtgctcctgcagatcgctctgttcgtcatgtccgcgctgatcatgccgcgctccgtctgccatggagcccgaagcgttgggctaggttccattggttacgagccttttgatccaaaccatcctgtgtgccttgctgggcggtgcccagttcctggcaaaccctacggccgtggtggtggtggcgatccctacgagaaccgccctggtcatggtggtggcgggcctcgtagctactatcctgacaaacccgctataccttcttacggagaaacctcaaatccttgattgcacgtaatactcgtatggcacggtaaagaaaatgttggcaactcaactactagtacatctgacgagacggatatatgatagtacaatcttggatccatgaacaactatatatgtcagctacaatataagcggaataacaccgtgtatcgtctcatgtacttggctttaatactggacacgaataaaactgagtccgatggtcggcagtggcatgaatacgaatggcatgcagcactt

SEQ ID NO: 453218 - DNA, 885 bp, Sorghum bicolor
cgtccggcaatttgttcctaaatgcaaattgtgacctcaagatcgcagactttgggcttgcaaggaccacctcagagacagatctcatgacagagtatgtggtcactcgttggtacagggcaccagagctgctgttgaactgttcacagtacactgctgccattgatgtctggtcagttggatgcatattaggtgaaatcgttactcgccaaccccttttcctggacgggattacatccagcagttaaaattgatcaccgagctcataggctcaccagatgatgcaagcctgggatttcttcgaagtgataatgcaaaaagatacatgaaacaactaccacagtttccaaggcaggacttccgcctgcgtttccgtaacatgtctcctggggcagtcgatttgttggagagaaattgcttgtgtttgatccaagcagacgcgattacagttgatgaggctctgcatcacccatacttggcttcacttcatgacatcaatgaagaacctacctgccctgcacctttcagctttgattttgagcaaccatcctttacagaagcgcatataaaagaacttatctggagggaatctttagcatttaacccggatcctccctactaatttcaaaaggataagttatctgctagaggcatatgaagatctctagctccagcggacgcaataacttgtgtcagtgtgcatcgattatttacgtggggtttgttgggcaaacgggcatgggttgttgctgcaatagcaactgtactagggcttgtgagaacaaacaacgtctgtattcctttcagatgcctgaacccaggcttgtattataccgcttgatttcataaactattcttatgtatctaagcttgtaattttgtaga

SEQ ID NO: 453219 - DNA, 722 bp, Sorghum bicolor
  unsure (1)..(722): unsure at all n locations
cgtccgctccctcggcggcggcgccaacgcggtggccacgggcccctccgacggggtgctcacgggctactccgtcggcagcgccctggccgccgagatcgtcggcaccttcatcctcgtgtacaccgtcttctccgccaccgaccccaagcgcacggcgcgcgactccttcatccccccgctcgtgccgctgccgattgggttcgcggggttcgtggttcacctggcgaccattcccatcaccggcaccggcatcaacccggccaggagcctcggcgccgccgtcgtgcacgcagcatggaaagaccattggatcttctgggttgggccgctgatcggggcgacggtggcggcgttgtaccacaagctcgtgctgcgcggggaggcccccaaggcgctcggctccttcaggagcaccagcgccacggtgtgagagtgagagcatctaattctgcttcctgcctgcagcgtataaacgtgcatatgaagcgcgaagctgtccattcgcctgaacaagattggcgccctccgtgtgtgtagctcctccaactgattcccaattcgttgtcgatcgtctccttcaatatatgcaatatgctacggggtgcttattacacgaacagtatgtatgcacgcttgtncgtgccatttctttttttggttgggaactacgaggtcgtncatgtatataaacctatgttctgcttggataagtatctata

SEQ ID NO: 453220 - DNA, 662 bp, Sorghum bicolor
cgtccggttcggaggtcatgaaaacttgcataactccgttgacgaagctctcctgttgaagaggaaatccgaagaagttctgttctacttgaacgggaggtgtatttacttagtaggaatgatgggttctggaaaaagtacagtggggaagattatgtctgaagtcttgggttattcgttctttgacagtgacaaattagtggagcaagctgttggaatgccttcagttgctcaaatattcaaggttcatagcgaagccttctttcgggataatgagagtagtgtcttgagagatttgtcctccatgcaacgattagttgttgccaccggcggtggtgctgttatccgaccagttaactggaaatatatgaagaagggcctatctgtttggttagatgtgcccttggatgctcttgctaggcgtattgctaaagtgggaactgcctctcgtcctctcctggaccaaccatctggtgatccatacacaatggccttctctaagctcagcatgcttgcagagcaaaggggtgacgcttatgcaaatgcagatgtaagggtttctctagaagagattgcatctaagcaaggtcaccatgatgtctcttagctgacacccactgatatcgcaattgagtcacttcataagatcgagagcttcgtca

SEQ ID NO: 453221 - DNA, 823 bp, Sorghum bicolor
cgtccgcttaatttgacaaactttccagtaagatactatgattggtcaacaaattacctgattaacttgtgcttgtgggccctattagcaacattcctactagttaacctttggatttttcagggtactctaagaagtcctctgaatgcacccaaaatgactcagcagcagcttgccaatccaagtaaaatggtgcactaagtttgtaatacaaacttgtttatctgaacaccttttcttgtaacagagtttatctgtacactgcacttctgatttacttgtgcagggagatactgatgtcaaaaactcaattgttcttcctgtggagtataatcaagccacagtcaaaactgactcgatgtaagcatgctctttactgtatgtgaaatcattgtctggaactggaagctgtgtgatgtagtatggtcggctgtgcaaatcagcaaatctgaacttcaagttctcttgagataagttcagactgggagggacaaactctcatgacacggtttagctggaattttctacatctgctttatcatcgcatatagctgcctagggagcttttattttttaagaggtctctccaaaaatttcttcgtatataatgaaatacccgatcactgaaccttaatttattggtcaggatgccaaaacaggagcagaaactggacacacgcccgcccaccgaagaagatatcaaggcagtttcatgacaaatgctcaaacgtgtatataaattgagacataggtttctgtcagaaattcccaagtttaggatgacttataaggcagagaaactaacaaaggctgcaccattgcg

SEQ ID NO: 453222 - DNA, 674 bp, Sorghum bicolor
  unsure (1)..(674): unsure at all n locations
cgtccgcacgcacttctgccaggacgagtcccggtcctccagcgccaacgacatcgtcaagcgcgtcgtcggcagctccgtccccgtgctggacgacgagaccacgctctcgctccgcgtgctcgtcgaccactccatcgtcgagagcttcgcgcagggcggaaggtcgacggcaacctcgcgcgtctaccccaccgaggccatctacgccaacgccggcgtgttcctcttcaacaacgccaccgccgcgcgcgtcaccgccaagaagctcgtcgtccacgagatggactcatcctacaaccacgactacatggtcacggacatctgatgctgctgctgatccgtcgatcgtccatccaacccaccgctgcatgcacctaattttttgaacagcaaagcatcttcttgtacctatcaattcatatcctcgcttccctctccaattttgttatttccctgccataatttttgggttttttttccttcttcttctttcttctgattgctactatatatgtatcgctcgaggcttagcttccggttgcaatagtagctatccagtggaagacgccacgtcgatgcaagacaagaggctacatatgtaatagtgtagcctgtagctgtacatgtnatgataggtgtgccaccacaccaattgagttataaatataaat

SEQ ID NO: 453223 - DNA, 396 bp, Sorghum bicolor
cgtccggcaacacactgtaccagtggagctcaagcaaaaccagacatcccaagccctccacctatctcgatgaggaataaattggattggttttgcgctcttgatttgcacaaaacgtcgccgtcatatctttgtcaaaggctgaggctatcgatccgtcatgagattgcagagattgggacggatcatgaaaaggggagcacggagcatgagggaaggaaggcgtccggtttcagacatttctagatgtagtaggtccgatcctaacggatcagatcacttcccgtctgtattgcccaacatcctgttggaagcttgtgccggccttgcaagcaagactttcttgcttctaagcattttgctttcaatcctgatcgtcaaaagccttcgtacagg

SEQ ID NO: 453224 - DNA, 1178 bp, Sorghum bicolor
cgtccgatttgcttttgcttgatgagcctacgaatcatgtcgatttggacactgttgagtggctggagagctatcttaagacacaggaggtgccgatggtcattatatctcatgacagggcgtttcttgaccagttgtgtacaaagatagtggaaactgaatttggtgtgtccaagacatacaagggtaactattcagagtacattctagcgaaggcagtagcagtgcaggcacagtatgctgcttgggagaagcagcagaaggagattgagcagacaaaggagctgataaacagacttggtgccggagttaatgcaaggcgtgcttccagtgagcaaaagaaattggagaagcttgagaagggagggttgattgagaaacctttcccaaggaagcagcttaagatcagattccctgagcgtggaagaagtgggagaactggggtggcaataaacaatcttcaatttggatttgaggataagactttgttcaacaatgcttatcttattgtagagagaggtgaaaagatagctattattgggcccaatggttgtggaaagagcacattgcttaaacttattttggggatggagaagccacaaggtggtgaggtgcttcttggggaccataatgtgttgccgaactatttcgagcagaatcaggcagaagctctggatttagagaagactgtgctagacactgtatcagaagctgcagaggattggacacttgatgatatcaaaggtctccttggccgttgtaactttagggatgacatgctggatagaaaagttcagtttttaagtggtggagagaaggcaaggcttgcattttgcaagttcatggtgactccatctactttactcatcttggatgaaccgacaaaccatcttgatatcccatcaaaagaaatgcttgaggaggcaatatcagaatatacaggtaccgtaataacagtttctcatgaccggtactttataaaacaaattgtgaacagagtcattgaagtgaaagatcagactatccaagactatcaaggagattacaattattaccttgaaaggaaccttgaagccagagaaagggaacttgcccgcgaggaagagctcgaggagaaggcccccaaagtaaaagctaagtccaaaatgtccaaggcagagaaagccgtcagaaagaag

SEQ ID NO: 453225 - DNA, 630 bp, Sorghum bicolor
cgtccggatggatgctgagaaggaaacactttttgaggctactctttccttgcaagatcagcttaaagaatctcaagttgctctcttggtggagcaggagaaggccgaagcagctgtaagagaagctgatgtggccaaagcagcatggtcatgccgtatctgcctgaatgctgaggtcaacatgaccatagtaccatgcggtcatgtcctatgtaaccgatgctcaagttcggtttcacgatgcccattttgccggacgcaggtggctagaatgatgaaaatattcaggccataaaaataggggaggacatttggtctgactaaccgtaggattcagcttgggaatgtgttacgatatcggggctcccttttggttgtgcattgcattcccttttggactgttctgacgcatctcattctccatgatgatttgctaacagtgggacagtcgagaggtcgccctttggtagtccggtaggagtgtaaatatagttactttgtacaggaacgatgcattgcagtgtacagattctaaaaccatatcactatacaaaatgatgcattgcagtgtacagattctaaaacccatatcattatacaaacttcaaagccctcccaatgttttctttg

SEQ ID NO: 453226 - DNA, 386 bp, Sorghum bicolor
cgtccgtatcatgccattgcttttgattggctcgggtttggattttctgataagcctcaaccaaaatatggttttgactatactcttgatgagtatgcctcatcctgggcatctctacccaatgctgtggctcctgataagctctctattgttgttcagggctacgttgctccggttgcagtcaaatatgctagtgaacatcaagacaaattgaatcatcttgtactagtgaatccaccgataactgataaacatgtaaaccttccatccaccttggcttcattcagcaacttcttgttgggcgagatattttctcaggatcctctcagagcaagtgataaggtattgactagttgtggtccatacttgatgaaaggaagaagatg

SEQ ID NO: 453227 - DNA, 496 bp, Sorghum bicolor
  unsure (1)..(496): unsure at all n locations
cgtccgcccacgcgtccgcccacgcgtccgggagcagctcctgagcagctacccagcgggccaccgagttaatttagcttactccatatacacactgctactaagattgctactagctagcatggcggcaagttcatggtcgtcgtcttcatcctgcacatcgtcgttcgggtccctcgacgacgatgtcgtctgcgtcatcaagtcggattccgtggctgccgcagccgttgcggagggaagcgtcaagttcctgtgcagctacggtggtaggatcctgccccgccacaccgatggcacgctgcgctacgtcggcggcgacaatcgagttctctccgtcgaccgacccctccggttttacggcgcgcagcggttgatgagggaattggcggctgggaagncgtacctgggtgccagctaccgacggaggacctggacgcgctcatctccgtgacgtgcgacgacgacctcgccaacctgctccaggagtacgacg

SEQ ID NO: 453228 - DNA, 821 bp, Sorghum bicolor
cgtccggtggatcgggatggatttgttatgggagaagggtctggtgtgcttgttttggaagaacttgagcatgcaaagcaaagaggtgcagaaatatatgctgaatttctaggaggaagtttcacatgtgatgcataccatatgacagagcctcatcctgaagggaaaggggttattctttgtattgaaaacgcattagcagattctggagtaacaaaggaggacattaactatataaatgctcatgcaacatctacacagatgggtgatttgaaggaatttgaagctctcaaccgttgttttggccagaatcctcagatacgagtgaactcaacgaagtcgatgacaggccatctgctaggagctgctggtggaatagaagctgttgctgctatacaagctataagaacaggttgggtgcatccaaatgtcaatttggataatccagagaaaaatggggatgtcagcatgctggtgggtccacagaaggagagatgcgatgtgaaggtggcactgtcaaactcatttggatttggtgggcacaactcatcgattctatttgcaccattcaagtgatagttggcaattttcttgtggtggttacacatggtcggccttatatataagagaagaataccaggctttgcaacatcttgtgttctgcaaaattaggaagaaatccaaaagcttagtaggattatatattgccacacaacctactaaagattgcaaatggcttcctttgtaatagcaaatcaaaaaattatgtcgagctgagaagagcatccaatcaaatgtcccatgtacccttttggcgcgtt

SEQ ID NO: 453229 - DNA, 852 bp, Sorghum bicolor
ccggagggaacaacattgctaaaatacaagattcctaccagaggcctcattggacttcggaatgcagttcttacagcttctcgtggcagagctatactgaacacaatctttgacagctatggcccatgggctggggatcttagctcacgtgatcagggatccttggttgcttttgaagatggaagcactacttcttacgcacttcttaatgcacaagaaagaggtgtgttgtttgtccaaccagggcaggatgtttacaaaggtcaaattgttggtatccatcagagacctggtgatttagcaattaatgtgtgcaagaaaaaggctgctacaaatgttcgttccaacaaggaaactacaggtaataatttattttctctcagcacttgacagtttggtggtttccatttttgttgctaccagacctgcaaccttttaattcttatatatgacgaatttgtgtactgtgaccgtgagttctcttctgaaaagcttttcaatttagctactgcaaaataaatgttaaaattttggaacaagaaagagtagagattttggaatatagtcatgtattgcaggcaatgtagcttgttcctcctgagaagcaggaagtgctgaaatgagcaatatatacatggaaatgctttaatgctttaccaatattggggtctattgggaggaaaaaatatcaatatttgtatctattgagaggaaaaaatatatttgtatctattgactcttaggtttttatccaagtgttgaattctgcgtgtttcatatttgcagtggttcttgatgaagctttaagctacagtttggatgactgcatagagtttatccaagaagatgagc

SEQ ID NO: 453230 - DNA, 341 bp, Sorghum bicolor
  unsure (1)..(341): unsure at all n locations
caatagggccaccatagctctcagagcagcggcagaggcctcacctgaagctccgtccgccatggcattcacgcccgctacggcctgctgcaagccttccctggcgctggcgccgcgggcggcgtcgtcccgcgcgcaggcggcggcgctcctctgcacgccctccacctccgcgttccgcggcctccgggccgcgccggccccgccgcgctggcgccgcctcggcggcgtccacgggcattcgctgcggcaaggngagcaagggcagcgngccaccaaactncactctcaaggaccagaacggcaagcccgngncgcngaacaagnncaagggcaagccc

SEQ ID NO: 453231 - DNA, 635 bp, Sorghum bicolor
  unsure (1)..(635): unsure at all n locations
cgtccggaacgtcttctgcaaccagatgctcaggaaaacggttggcttttggacgggtacccaagaagctattcacaggccatggcgctggagacccttgaaatccggcctgatactttcattctgttagatgttccagaggaactccttgttgaaagggtggttggaagacggcttgatcctgtaacagggaaaatatatcatttgaagtactctccaccagagaatgaagaaatcgcttcaaggcttacgcagagatttgatgatacagaagaaaaggttaagttgaggctgcagacttattaccaaaatatcgagtccttgctatcaacatatgaggaaattattgtcaaagtgaaaggagatcgcacagtgggcgatgtctttgctgagatcgagaagctgctggcttctagcctgaacaagaaaacagaaatggtgtccagctcatgagcaaggaaagaaaagattgggtgcaggtccgacaagttcatgtaatgtaagccatctcacatgataggaacttctccaagcggatgtagttgaagcataggccgacacatacatgtaatgtaagccgtctaacatgatggaaacttctccatgtggatgtggtcaatgcatnaggatttttt

SEQ ID NO: 453232 - DNA, 1054 bp, Sorghum bicolor
  unsure (1)..(1054): unsure at all n locations
tacgcgcacgcgtccgcccacgcgtccgcccacgcgtccgccactcgcttcgctcgcaacctgagaagcaagttaattatctacccgcgccgcgccgcgcgccatggccacgaccacgaacaaccgccgcattgtggccctcctgctggccacactgctcgcgcaggccgcggcgtgcccctactgcccgacgccgacgccgccaccgccgccgccgccgccgaaggtgaagccgccgccgtcgtccacgccgtgccctcccccgccctactcgccgtcgacgccgacgggaaagtgccccgtgaacacgctgaagctgctggcgtgcgtggacgcgctcaacggcctcgtgcacgccgtcatcgggaccaaggccagcgacacctgctgcccgctgctctccggcgtggccgacctcgacgccgcgctctgcctctgcaccaccatcaaggccaaggcgctcagcgtcagcgtcgtgctccccgtcgccatctcggtgctcgtcaacgagtgcggcaagcacgtgccctccagcttcacgtgcccgtaattaagcccatactgatcatcatctgcatatgtgtaccactatgatgtatcatcattataccataatatcatcggcatgcatgcatcaatgcatatatatatgttggccgggttatcaaggccggtcttatagacttatatatatagtatacatatacatatgataaatcaatcaagttatacatgcatatatgttacacaaatatacatatctagctcattaagcatatgtagcttttcatacctggagcagtgggttacaacgttgtgcatttgtaatcatgtatcataaaccagtgtgagagttgtggcctcttgcggtagggccgcttgtagtgttttaagaaaacttatatgaataaagtgtgtgtaatatatatgatgcttttggtggtgtcatgttgacaaagcttgtcaactttcctagtatatacttctgtcaaaattaagtaagttccatgtttcactaaaaagnnaaagggcgacgcgtggtcgaccggaattc

SEQ ID NO: 453233 - DNA, 642 bp, Sorghum bicolor
gtccgaatcccggtcgaccacgcgtccgcggacgcgtgggcggacgcgtgggcgggaaagtgccccgtgaacacgctgaagctgctggcgtgcgtggacgcgctcaacggcctcgtgcacgccgtcatcgggaccaaggccagcgacacctgctgcccgctgctctccggcgtggccgacctcgacgccgcgctctgcctctgcaccggcatcaaggccaaggcgctcagcgtcagcgtcgtgctccccgtcgccatctcggtgctcgtcaacgagtgcggcaagcacgtgccctccagcttcacgtgcccgtaattaagcccatactgatcatcatctgcatatgtgtaccactatgatgtatcatcattataccataatatcatcggcatgcatgcatcaatgcatatatatatgttggccgggttatcaaggcgcggtcttatagacttatatatatagtatacatatacatatgataaatcgactaagtgatgcatagcataactgatacacatatatacatgtctgacggatgcagtgtaagtatctatgattacgtagacgttctaatgcaaacgatgtgcaactctgctcttgtattagaacctacagatgaagaattttgtagctttagtgagg

SEQ ID NO: 453234 - DNA, 471 bp, Sorghum bicolor
ggcacgaggcggcatcctcccctcccttccgctgcagtgcccacgctctacccccagcagcaaccgctgcgggaggtggacgtggttgggtttggagggaactgccgcagcgggaggagatcaagagctctccaatcttccattccccttggactgccacttgtttcggttcgtgttgaacttgaaataggttagataaataaatgggagtccaagaagattctaggccttctggggccctgggtggcctgtacggggtacagtttgcgggccgggcactatacagtgacgacgtagcagtcaaaactagcattgtggattcttcaacttgtgaaccgcaagtggataatggccggagccggcgtttgctaatctggagattatggaaacagagacccccatgcttgaagcccgtccactgtagcctctcatgcgataaacatgttggcgaaactattgcaaatgttgtta

SEQ ID NO: 453235 - DNA, 506 bp, Sorghum bicolor
cgtccgcccctccgctcttatccccgctgcgcctcctgactttcctcttcgtcgtctcctactcttctcccacccgcaaccgccgcagagagagagagaaaggggaagaagcttgccccggcgcagcagcagccgccgccgccgccgccgccgccgcagcggatcgggacctctgctctgcggaatccatccatggcggagggatcaggccgccccttgccaaagtttggtgaatgggatgtcaatgatccagcttctgcagacggatttactggcatattcaacaaagccagggatgagaagaagggtgggaatggacaagacactgattcaccttccaagggcaccaggactgagagggtggaatcttatgctgcaaaaccaagcacgaagaaattgggtttggtgtgtgacagccagccctacgcaatcctgaggaagacaagtgcatgcgctttggaaatactggccctttaatgttctatacatactatccataacacaat

SEQ ID NO: 453236 - DNA, 675 bp, Sorghum bicolor
  unsure (1)..(675): unsure at all n locations
ctcctttccgacccacgcgtccgggctcaagcatccgtgcagcgctgcagtgcttgcgtggacttccccacaaaggaccgtccattctgccccccaaccatcaacagcccggagctccatgatttcttcgtgaatgtggccagcgagatggttgggtcgaggaacgtgagggacagacaaccgctaatgggtgctgaggacttctcgttctatgccgaggcgatcccctcaacctactactactttgtgggcatgtacaatgagactcgtggaccgcaggcgccccatcactccccctacttcaccatcaacgaagatgccctcccctatggtgcagctgcacaagctgctttggcagctcgctatctactcgagcatcagcaacctgctgctaccactgataaggcaaaaccccatgatgaactgtagatacataacgtttgcttcgctctgttaatgaaattagattgagcaacaatttctttgccaagctattccacggctgtacatatcctgatatctccatgctttggtaataatcggttgctgatcaattgtgggatcaggcgttatttgccgtgatgtcagtcagcanataatctgggaaacatatggtcttcgaatttgtagtattcttattgcaaaaaaaaaaaaaaaaagggcggcgttttaaga

SEQ ID NO: 453237 - DNA, 909 bp, Sorghum bicolor
cgtccgatcgcctagcatcactggcaaagtatcaaggtcacagattgcagccctggtagctgatgtcttctccaatgtggcagtcgctgagaacaaagtcgttgaagtttcaactagctcatcagcaacaacgaagtccataacggaggctttcatagctatccctgaagacagtagaagaacggagtaccaagatgctgctgcgaaagcacaagtcaaagaggaaaccttggcctcaaaacaagctaatgaagctgaagcggctgccagtaaatatgaagctgacacgaagaaggcacccttagaagatgcagctgctactgctagcccagtaaatgatgaacgagcctctctagagaacctgttgagtatacccaaagtgatcagtacggatttcttttgggagaagttcagcacacagcttgctgaagtgacgactcctcgaacctcgctacaaaaggaaccaaaggcacagatagccactgtgcgaggtcaggaaaaagcaaagaagctgacaccgcggattgccactgtgaagcccgccgcgcagaaagtgaagcaacaattgaagcagccagatcccaaaccagaagtgaggccagtgtttggtggcctcttcaagcaagaaacagtgtatgtggatgatgactaaaacaaggagagccaatttatcctctacgtgatttttcctgcaatataggaacgcttaaagctgtacaaaatttggctataagaacccatttgtctgtggatgaagaatgatcatgtgttacagaaccaaatgctggtacaaccgaactgatgtacacaggagcaaattgttttttttttgaaactagcaaatgggaaaccatcaaaattgggtttctcgagcccaatggcgaacatcatgcggaagtgctgggacgc

SEQ ID NO: 453238 - DNA, 470 bp, Sorghum bicolor
  unsure (1)..(470): unsure at all n locations
gtcgccacgcgtccgtgctgtccactggaccctcggcgtcgattctacctactgtacaggccgcgcttatataaccaggccggccggctccgtgtcgagcagcgctaacggcatgtggttcggcaacagcagcacatgaggtacccgagcgagtcggtagaggcgtgcgtgcgtgcgtgtgtgtgtgctagtgctacggcgtacggcgcagctactagcagctgcagccatgagcaccaagcgcgagagcaccaccagcagaaatgaacccgagcagtcgacacatgtggcgcatgctcaagacaattgtggacatttgcatgaagtatgaagagggcaagtatgtgtttgtaaaagatccagcaaagccacatgtgatgatctatgaggtgccatctgatgcatntgagaatgattatgttgaatataccttgtaaaatatatgtagcaccttatatcataaaaattaa

SEQ ID NO: 453239 - DNA, 345 bp, Sorghum bicolor
cgtccgctgctggccactgcaccgctggtcgtcgattctcacctactgcacaggccgaacttatgtgaccaggacgtccggctccgggtctagcagtgctaacggcatgtggtttggcaacagcagcacaagaggtacccgagcgagtcgttagaggcgtgcgtgcgtgcgtgtgtgtgtgctagtgctacggcggacggcgcagctgccagcagcggcagccatgagcaccgggcgcgagagcaccaccagcagcaggtggcccgagctggcgaccctgcgggcgctggcgcgcgacgccgtggagcacattcagatgccgcgcgtctgcatgtcctagtcagc

SEQ ID NO: 453240 - DNA, 852 bp, Sorghum bicolor
cgtccgattgactgtgcgacaggacggccagaagagcccatccggacggtagattgggaaggaaaagttgctctaatacagtgtgcaaaggctatgggaattcaaaagtatgtgttctattccatccacaactgtgacaagcatcctgaggttcccttgatggaaatcaagtattgcactgagaagttcattcaggacagtggtctggattatatcatcatccgtttgtgtggtttcatgcagggccttattgggcaatatgctgtgcctatactagaagagaagtctgtctggggaactgatgctccaactcggattgcttacatggatactcaggacgtagctcgactaacgtttatagctatgcggaacgagaaggccaacaggagactcatgacttttgctggcccacgagcttggacaactcaagaggtgattactttgtgtgagagattagctgggcaagatgccaatgtaaccactgtccctgttgcagtcttgagatttactcgtcagttgacacggttcttccaatggacaaatgatgtggctgacagactggcattttcagaggtgctctcaagtgacacagttttctctgctccaatgaatgagacctaccagcttctcggggtggatggaaatgacatcctcagcttagagaaatatttacaagattattttaccaacatattgaagaagttaaaggatctgaaggcacaatccaagcaaaccgacatattcttttgataagaagtatttctgtgacctggggacatattttacagatctgtgcctcaaatgacagatgagtgagcacaatttttttctggatatttgcatttttgcatg

SEQ ID NO: 453241 - DNA, 559 bp, Sorghum bicolor
cgtccggagacaccagttgaggttgttaaggaacaggataaagagtttaataagcaggcaaccgatgccataattccttccatgcctggacatgtggtccaagcttttacattgctgaaatcaagcccggaggctcagagtgttgtagcctcccttgcatcagatagaaatgtctgggaagcagtattgaagaatgagaaggttatggaattttacaagaatcaccagacaactctagttgcgacattccctgaagaagcagccacagtagagtcgctggggaattttgaagacgccacctctgaaaatgcatccaacactgaactccccactggctcacctttctctgattttgtggacaatgcgaagaagagagggatggatgtgatctataatataaccgactttttcaaggacttgttcgactcagcgggagcacaggacggagcaagcccttcagctgagaaagccccttctgcagcagagatggctctcagcggatcgtcatggctctggccataggggcatactagtcgactgctcaagaggcatgatagct

SEQ ID NO: 453242 - DNA, 450 bp, Sorghum bicolor
cgtccgcaggtcgcttatcccctgccttcgcccaccgctcccggaaacaagcagcagccggaggaggaggagaattcggctccgaacccagagcaagagcaaccaggcaaggtccaaggcaaccaaccagcgaatcagccatgtcgtactacggcgaccggcgcccggagtcgtcgatcgtggaggcgttcacgctgtcgccgctgccgtacccggtgatcctgatcctgctcatggtgacgctcctgctgggcgtctcctggttcttcacctacgaggacttcatcgaggaggcgtcgcagcagctgagctgggcgctgctggcggtgcccatcgcgctcgtcctcctcatccgctggatttcttccgtcgaatccttcgagggctacttcggcttctaccccagggagagccgctggaagggctacgagcggccacccgccgagggca

SEQ ID NO: 453243 - DNA, 712 bp, Sorghum bicolor
cgtccgatttcactgagcttgcactgcatgagtacaagtctgcgactaacatgacagagcagtttgctgcattagcagcattatcccaaaatccaggcccagttcgtgatgatgccctgtaggatttctataacaagtggcaagatgactacttggctgtaagcaagtggtttgctcttcaagctacttcagagattcctggaaatgttgcagatgttcagaagttgctgactgaccctgctttcgacatgaggaatcccaacaaggtttactcgctaatcggtggattctgtggctcacctgcgaacttccacgcgaaagatggatctgggtacaatgttcttgggtgaaattgttttgcagcttgacaagataaaccctcaggtggcctcccgcatggtttcagcattttctcggtggaggcgatatgacaagaccagacaagatcttgccaaggcccagctggagatgatcgtgtcggccaatggactctccgaaaacgtgtacgagattgcttcaaaaagcttggcgggttagttttgggcagttccagggtagtgccgagtgccgagtggttgtgcttaactgaaaatctcttttgttggcaaaatgacaagtagagtaataaacaggcgtgctgaagttgcatgaactgaacatatatagtgtgatgactgatgatgcccgctttgtgggggtttgagcatgcatg

SEQ ID NO: 453244 - DNA, 411 bp, Sorghum bicolor
ggcacgaggcttttatccttcgtcccgtactcccgttctctctctccacctccggcgaccgggcgaccactcgcggccgcccccgcgtcccgggcgggcgagcgtcgacggccttcgctaggttttcgtcggccccttcgccagcgactggcaacgccctttgccaggtcttcgtcggcccctccgctggcgaccggcaaccgccctttgccagctcctcttccccggcaccaggactgaagataagatggctgccttgccattggccaccgctgaagcatgtgatgctaatgctgctttaattatgaatggtgatcttcgtgctctccaacctatcttccaaatctatggaaggcggcagatttttgctggccctgttgtgacactgaagatcttcgaggataacgttct

SEQ ID NO: 453245 - DNA, 488 bp, Sorghum bicolor
gaggggtctagtggagaaggactttgagcagattggagagttcctccaccaggcggtgaccatctgcctgaacattcagaaggagtacggcaagctcctcaaggacttcaacaagggcctgttgaacaacaaggacattgagaacctcaagacccaggtggagaagttcgccgactctttcgacatgcctgggttcacgcttgagagcatgaagtacatggagtacacgtctcccgtgtataacaaggccctctcgtaccaatgtttttcttggccatggcggagggtgccatggcactgcactgccacacttaaggcgatgacggcttatggattttgtctacaacgtcagcagtataggctcacaagtgccccctgccctctgatttggtcgccttctggttatcacgtttttctttggtactagctcgcagggagtcatgataatgtcagtcaagtgtctgccaataataattccgaggtttcaa

SEQ ID NO: 453246 - DNA, 585 bp, Sorghum bicolor
cgtccgctcaaaatcacacaccactgcagtctgctgaagaaggaatagccggcagcaatggcagcagcttcttcatatttgccgccagtggtgacagcggttctgtttctatgggtcttctttagctgtgggcatgtggaggcaagtattcattttggcaacatgactgctcttcaaaagcacgttgaatttttcgaccggaataaggatggcattattacaccttcagagctcttccgaggatatgttgcacttggatgtgatgccgtatttgccagaaaaaaagccgcatctatgagtgctggtgttggtccaaaaacaagccctgttggtgcaccactgcctcatttatccatatacgtacaatatatccataaagcaatgcatgtgaagtgatacaggtgcatacgacgctgaaggaaggtttgttcctgcaaagtttgaagaaatattcacaaagcattgcaaaggtcaggccagatgcgttaacgtatgaggagattgaggagatgattctagcaaatcgagatccattagacccaccaatcgtggtctgcaccagaaaaagaatggggactgatatac

SEQ ID NO: 453247 - DNA, 558 bp, Sorghum bicolor
cgtccggttcatgctcccgccgcgctgtcacgcgggttgccgctccaagaaccatgccctgcctatggcttctagctccacctccaccgccaccgcctcgcccctgtctaatcgactcggtaagtcggccaccactccccaaatatcggttcttcctgccccggacccggaggcggccaagtccgtggcttggcgtgcgaatggcggagatgaccagggttgggagcggcggggaaccgcccgaggttggggtttccatggagagcgacccgcttgtgggaggggacgcgccgtcccgcccgacgcgggaagcgagccggtgggcgcccgtggaggctgcgctgaatcggatgctatatggaagcatgatgctgaaattatgtgggttttgctgggtgcggttggcaactctctgctttcattggttcttaaaaagatggctaaccatgaaagacctgcaccagctttgcgggctgatcctgggatgccatcggcccatgcacaatccatattctatgctacgaccatcctagctctttcattgtactactggcttgg

SEQ ID NO: 453248 - DNA, 505 bp, Sorghum bicolor
cgtccgactactcgtaccacaccaagctaaggcaggtgaagatgatcaggtgtgatagagcgtgacgaagcccttgctcactcatcagcataggttacttcaccaccacagctttggctcgcaaccgcaaggcagcaggccaggaagacgtacaacgcgccgtcagcccaggagatgtcctatttcgagctcgtgcagaggcgccacgcggagaagggctgcctctacgcctgcatcttcacggcgctgcgctgcttctgctgctacgagacctgcgagtgctgcctcgactgcctctgctgctgctgcaactagcctgacatccggctccagaggaggatcgacatgcagatcgatggagatcgcctccgtctctcttctacctacctagtgatgattcagtcgcctgcttcctctagtcgcccggttgtgcagacatattaataaagcgtgcatgtcgcagcgaaagagagatctactactctgtcaagttgagcattcgtaa

SEQ ID NO: 453249 - DNA, 359 bp, Sorghum bicolor
cgtccgaccgcatcctggccaccgagatcccacgtaactacccggactgccagagctcgccggctcgccgccactgaccaggcaggagtagcccagtgcccgccgcatggccgcgcgcgcaccgctcgtcatggcgcgcgccgccgctagcgccggcccgctcccggctgcggcaaccgtggccccgcgccagcccgcgcagtgtctccgcgcgaggggggctgtcagcggcctcttgttcgaccagcggacagcgcacccggtccgccgtctactccctgacgccaagttcggagcgattgggagcaccgcggatgccgcgccggcggaagggctcgagcagaagctgcagggagtcg

SEQ ID NO: 453250 - DNA, 760 bp, Sorghum bicolor
cgtccggcagctagcaatcgcctagctagctagacccacactgtgatcacagtacacacctgcacgcggccatggtcgtcatgggcaaggaggaggagaagcaccagcagctgaaggaggaggaggtccaagaagaagaagcacgagtcgtcgtcctccagcaggacatgacggcggacgaggcggcgctggtgcagaagatctccggcctggccgcggccatcgcgaagctgccgtcgctgagcccgtcgccggaggtgaacgcgctcttcaccgccctcgtgacggcctgcatcccgcgcagcacggtggacgtggagcgcctgggccctgagctgcaggccatgcgcgcggtgctcatccgcctctgcgccgacgccgaggcactgctggaggcgcactactccgacctgctggcgggcttcgacaacccgctggaccacctcacgctcttcccctacttcagcaactacctgctgctgagcgagctggagcacggcctgctggcgcgccacgtcccgggaccgccgccggcgcgcgtcgccttcgtcggctccggcccgctcccgctcagctccctcgtgctcgcggcgcgccacctcccggccgcggccttcgacaactacgacatctgcggggacgccaacgaccgcgcgcgccgtctcgtgcgcgccgacgcggtgctggccgtgcgcatggtgttcctgactttcttcgtggtcctcctttatatggatttggttggattcatacgtttttt

SEQ ID NO: 453251 - DNA, 928 bp, Sorghum bicolor
cgtccggtttatgaatacctgccatacaaaagctgggattccttcatcttcggtatagatttgcatttttttcatatattgtatatatcatttgttaaggcagcagattggcaaaagtttactcatggttttgcttctttcacagtcattgagatgtacaaaattctgattattttgcaggtgcgctctactaatatgtatttttatgtgcagatgaaaataaaagagcattactggattggcccaaacttctcgcaataattgagggaatagcacatgggcttaattacctacataagcactccaggctgcgtgtcatacatcgagatcttaaaccaagtaacattctcttggaccacgaaatgaacccaaaaatttcagattttgggctagcaaaaatattcagctcatataacgttgaaggaaacactacaagaagagtggttggtacatatggctacatggcaccctgagtatgcttcagagggcatcttctctatcaagtccgacgtattcagctttggtgtacttgttcttgagatcattagtggaaaacggaattctggtagccatcagtgtggcgatttcatcaatctcattggatatgcatggcaattatgggacgatggaaggtggattgatatagttgatgcatctttggctcccaagaatcactcggcagagatgacgaagtgcattaagattgcactgttatgtgtacaagaaaatgcgactgatccaactgaccatggcagaggttgttgcaatggctaagcctaagcagtgagacgggctatgatcgtggctgagcctaagcagccagcatatttcaatgtgagggtcggaaatgaagtgacgtccacagctactgagtcatgcagtatcaaagatgtgaccaaatcgggcacaacctccagataggtttttt

SEQ ID NO: 453252 - DNA, 743 bp, Sorghum bicolor
cgtccgctaaagtatgtagaggtcgatgaggaacaaggcaggcttgtcctcagtaatcgcaaggcaatggcagatagtcaggcccagcttggtattggctcacttgtcttgggaaccgttgagagcctataaccttatggtgccttcattgacatcggtggaatcaatggccttctccatgtcagccagattagtcatgaccgtgttgcagatatctcaacagttctgcaaccaggagataccctcaaggttatgatactgagccatgatcgtgaaagaggccgagtcagcctttctacaaagaagctcgagccaacacctggtgacatgatccgcaatcccaagcttgtctttgagaaggctgatgaaatggctcaggtattcaggcagcgaatagcccaagccgaggcaatggctcgtgctgacatgttgagattccagccagagagtggattgaccctcagttcagagggcatcttaggaccattgtcgtcggacgcaccttcagaggattctgaacccacagatgaatagaagcagttgacgaagtgcaccagatttgagatatgtgatggcagttcatcatacttatttttcttggagggaaggcatgacaaaagcatgttctgttcagatcgtttccccctttcagttattcttgtctcagtgtgtaggaaatctgaaaatgtaagaaggttctgaagacgccggaaagaaatgtaatttgcgtcccttgtgaagct

SEQ ID NO: 453253 - DNA, 507 bp, Sorghum bicolor
cgtccggaaaacccaccgcaccatttcaacctctcttccctaacctcgccgcggcacagcggtttcactgctcccctcacctccgctcccgaacggccggtctttgcatggcagcagcagctagttccaaggggcgggcgatcgctggaagccttcgtcagccgcgtcctggccggcaaggcccccttccccgaggagggccgtgcacgcctcggcgtacgacaagaacctggaggaccaggtgcggccggcgttcgtgccggacgatgtgatcggcggcgcgcgccggagccccgacaagtactggagcccgcacccgacgaccggcgtgttcggcccggcggcggtggaccccgagctggccgctgctgccggcgcgccggacgctgccgccgcgaatgctgcgggaggcacggtgctggaccagaaagggtggttccgcccgctcgaggacgtcgagaagcccccacccgtcgcctgagccgcgctagctgtgccagcccacac

SEQ ID NO: 453254 - DNA, 568 bp, Sorghum bicolor
cgtccgcaggagcggcggcgatccatttcacacaaccacccccgctcgccgcaggagtttccagatcttgctccggtcacaggagctccgagccctctccaatggcggtcaaggtctacgtcgtgtactactccacgtatggacatgttggcaaactagctgaagagatcaagaaaggtgcctcatctattgaaggtgtcgaggctaaaatatggcacgtccctgaaactctccctgaggaagtgcttggaaagatgggcgcaccccctaagcctgatgtgccagtcatcacaccgcacgaacttgcagaagctgatggaatcctcttcgggtttccaacaaggtttggaatgatggcagcgcaaatgaaggcgttcttcgatgctactggtgggctctggagggagcagagccttgctggcaagcctgccggcatcttcttcagcactggaacccagggtggtggccaagagactacaccgttgaccgcgattacccagttgacacaccacggcatggtgtttgtgcctgtgggctacaccttcggcgccaagctgttcggcatgga

SEQ ID NO: 453255 - DNA, 1120 bp, Sorghum bicolor
ggacgcccactccttcccttccccctcccatcgacctctcccctccgtcgtctcccccaggagcatccgtgtcttcaccttttgttcccccacgttgatccttgatcctcgtgctccctttcttgattctttctcccgaaggatctcttgctaggagtagcctgccccgtgtgcgcgctcgcacggacatgcttcttgccgcgtcttgaaaggggagaaaaagtggagatgggtacttgcgcttcggttcacaaggacccggagtaccccaagaagcagtttcttgactcgcccaccaaggcgaagacagccaacgggaagggcggcggcggcggcgttgctccggttggtgatggctttggtgacctcaagtccaaggtcgacgctgagcagcagcgggcagagtttaaccccaagagcccggattctggtagcaaggatgaagtgttcttcgagtctcgagcttggttagattctgactgcgaggatgacttttacagcgtgaatggagatttcacaccatctcgtggcagcacacccatctaccagcccagagcacagacggtgatgagcaacatctttcaaccagacacgcacagctccaaatcaccagagccttctccaactggacggaggaagctagctgagctcctgcaggaggcaatgcaagacggccctgaagaaagcaccgacgagcagcagcagttgcaatctgttgtcgcagatgggaagccggtgtctgaatccacatccagctccgcttgcagcactgtaccgacgccgacggcagtcgacaagagcaggaaggagaaggcatggtatactggacgctgttgcctgccgagctttgttcatagcctgaccttagatgagagtgagagggggcagaagatgagctctaggcaatgtgctgtttgacagtggggctcaagtgccctcctgccctgagctgtatttaccggattgggacgctgaagagtactatatatgcatatccttagtaatcaagtggataatatagcagtactcgttaaatgctgtgcacaccatgttaatcaattgtgagggcagcgaatggtccttacctgtgcatatatcttatcgaatctttatggatata

SEQ ID NO: 453256 - DNA, 514 bp, Sorghum bicolor
  unsure (1)..(514): unsure at all n locations
cgtccgtgccgatcaacctgtagttccatcagtatctttgagtcaaaggcaagaaattgccctgaaacaagaacaagattctcccgatagcctattctccttcgccattgatatcttcgaagaagaaggtgaggaagcaagctcctctcgggcaattgggactgtatcggtagaaaccagggctaagctggaggagctatcggccatacttcatcaagacactgctcaactggtcaacgattctgacccagccaaggccttgttcaaaacccttagaggccaaattcctgccgatgctgaagaaacgctcttccatgctgcatacctagaaagcccgccagctacagtaccagagagctactcgacgccttgccgatagagccgctcaaatccagctctctgaggagatgatgaaagaaaaactcttagccgaccagaaacctttnaatcntnncaccttatagcctatgtgatgcactgaacagaagtatctgatctatcgcaaagagaactt

SEQ ID NO: 453257 - DNA, 515 bp, Sorghum bicolor
  unsure (1)..(515): unsure at all n locations
cgtccgcccacgcgtccgcgccggggctgatggggatctacgtcgtgttcctgtgctggtcagcgatcagaagtgagccgcacacggaggtttgcaacaagaaggcagaagttgccacgagcgcagactgtgtgaacatcgcgagctatgtgatcgccgtcatcgtcatcgtggcggcgaccttctcgacgggaatcgactccaagtgcctncagttcaagcaggcggagggggagtcggaggaggacgacatcccctacggcttcggcttcttccacctggtgttcgccatgggcgccatgtacttcgccatgatcttcgtcggctggaacgcgagccacaccatggaaaggtggacgatcgacgtcggttgggcgagcacgtgggttcgtatcggcaacgagtggctggcagcactcgtatacatatggatgatgatcgcgcccgtaatctggaagacaaggcgagtgggatcgtcgtgggagaccgagacatgagcagatttcactgattct

SEQ ID NO: 453258 - DNA, 789 bp, Sorghum bicolor
ggcacgaggcttttcggccctcaggcttcttcccttcctttccctgcttcggaactcccgaggctgcataacctgattcagaggcagagcgagagagcgtgaggaagggagggagatgagggagatcatcagcatccatatcgggcaggcaggcatccaggtggggaattcttgctgggagctctactgcctcgagcacggtatccagcctgatggcctcatgcccagtgacaactctgttggggttgcgagggatgcattcaacacattcttcagtgaaacgagcgcagggaagcacgttccaagggccttgtttgtcgacttggagcccactgtgattgacgaggtgaagaccggggcataccgtcagctgggccatcctgagcagctcatctcacacaaggaagatgctgcaaacaactttgcccgtggacattacacagttggaagagaagtagtagatctttgccttgatcggataagaaaattggcagacaactgcactggtcttcaaggttttctggttttcaatgctgttggtggtggaaccggctctggccttggttcgctacttttagagcgtctatcagtagattatggtaggaagtcaaagctcggtttcaccatctatccttccccacagatctcaactgctgtggtcgagccttataacagcgtgctctccacacattccctgattgaacacaccgatgttgttgtgcttcttgacaatgaagctttatatgacatatgccagaggtgccttgacattgagcgttcaacatacac

SEQ ID NO: 453259 - DNA, 444 bp, Sorghum bicolor
gacccacgcgtgcggcactggtcaatacctaagacgactcaacgccgtcacatgccccaccttcggcccacttcaacgcccgcaacatcactcgtgggcacgatgcggtgcttcgatgctgctggaagccatccgggatgccgaagatggactcgtcagcttgccttatagtgaggtcagagcgcagctcaagcgtcattgggatcgtttggattcggtatcagaggcgaggttgaccgtcactgaatggcctgccgatggtgtggtcttcgacgagaggtcaggagaggtcagagggctggtcgattacggaagtgcaatgtgggcggatccgatgttcagcgactgttttgttcgggcatcggaaggctttatggaagggtgcggtgctgctgatggttactaccacaaagtcagactgctcttggacatcgtgtaccattt

SEQ ID NO: 453260 - DNA, 764 bp, Sorghum bicolor
cgtccgatgaggaacaaggaaaccagggagctcgtggccatgaagttcatagagcgaggaaacaggatcgacgagaacgttttccgcgagatcgttaaccaccgttcccttcggcaccccaacatcatccgtttcaaggaggtggttctgaccccgacgcacctggcgatcgtgatggagtacgcggccggcggtgagctgttcgagcgcatctgcgaggccggcaggttccacgaggacgaggcccgctacttcttccagcagctggtgtgcggggtgagcttctgccacgccatgaacatctgccaccgggacctcaagctcgagaacacgctgctcgacgagagcgggtctccgcgcctgaagatctgcgactttcgatactccaagtcctccgtgctgcactccaggcccaagtcaacggtcggaacgccagcctacatcgccccctatgtcctgtcgcgacgagagtacgacggcaagcacgcagatgtatggtcctgcggcgtcacgctctacgtcatgctcgtcggagcctacccgttcgaggatccaaaggatccaaagaacttcagaaagacaatctcgcgcatcatgtccgtgcagtacaagatccccgagtacgtgcacgtctcccacaactgccgccacctcctctcccgcatcttcgtccagaacccctacaagaggatcaccatgagcgagatcaagagccacccatggtacctcaaaaacctgcccatggagctcaaggaggaggcaca

SEQ ID NO: 453261 - DNA, 801 bp, Sorghum bicolor
cgtccgtttgtatatataaataataacataaacctcatagtatgttctgacttctgaacttcctttactaccctgcagatgcaaagaggccatgttgaggggctgaatccattaatgtttgcctttgctttagtgggaaattcaacatacgtaggaagtatacttgtaaatagcatggactggtcgaaacttagaccaaatctcccgtggcttgtatacgctggaggatgtgttttgctggattcttttattattcttcagtttctttatttccattatcggaagcaaagggagccttcggatgagcatgacgatgcacataaagcttaactgatagagatcgtttcttctccggtccaaaggactggcaatctgagtgctgtgtaaatctgagtgtcgtgatagactgaagtacggagatagaacctatgcatattcagcagaactgaagctgaaatgggtacctcatacaacaggctttgggtagcagcatcattgctacctgaagaccaccagtccaccgctcaccctcgggacagttttggagcgtcatttcactggttgctgcttggagggcagttctcacggcgtcatgtcttgtggagaggcttgtgcactttatttgtcttgtatgtagtatcaaaatgtcttgtgttacattacatttatctatatcagatattagatgtcggctggtctgcttttgttttatattcatttttcccgtgctgatattttgtgctgcagaaacttgcacgagaaatgtatattcgtcgaatgaaaatgtgctgcttttcgttt

SEQ ID NO: 453262 - DNA, 589 bp, Sorghum bicolor
ggcacgaggcttgttgttgctaggaagctcaaagagctcaaggggactaagtcctgtatagtgtttcctgatcaacctgaaaagcgcagggcgtcacagttgttcaggacagctatagatacgattgagggtgtaactgtcagttccctggatgatgtacccaccgaccctgtcaacagcttcttcaaatcaataagaaacaccctggattttgacttctcagatgacaatgaagatagatggaaatctgatgaaccaccgtcattatatatcttcattaacagcagcacacgtgaccttgcttctatagagaagtatgtggaaaagtttgccacatctgttccagcccttctattcaatcttgaactagatacattgcgttctgacttggggcttctggggtttcccccaaaagatttgcactatcggttcctttctcagttcaccccagtattttatatcagacaacgtgactattccaagacaatcgcagtcgctccatacatagtgaattacagtggagctgtattccgtcgatatccaggccccttgcaggtcatgctgaagcagctcgatggcttctatgcat

SEQ ID NO: 453263 - DNA, 1460 bp, Sorghum bicolor
  unsure (1)..(1460): unsure at all n locations
ntnnanaaccctcctcccttccctcccgtagggccaaagggttagagaggaagagaagtagtagttcccaagcctataacaagctcatcatcgtgattccagcaactgttctttcagttgatatagcttgtgttgggaaattcttgtgaccctattatattatttgtagctccccctttctgtcgtaatggcaggtctatctctgcagcacccctgggcattcgcgttcggcctccttggcaacgtcatctccttcatgaccttcctggccccgataccgacattctaccgcatctacaagaccaagtcgacggagggtttcagtcggttccgtacgtggttgccctgttcagcgccatgttatggattttctatgcactgatcaagtccaacgagaccttcgctcatcaccatcaagccgccgccggctgcgtgatcgagaccatctacatcatcatgtacttcgtctatgcgcccaaaaaaggcaaaatgttcacggccaagatcatgctccttctcaatgtcggcatctttggggtcatcctcctcctcacccttctcctctttaagggtgataagcgtgttgtcatgcttggatggatctgtgtcggtttctccgtcagtgtatttgtggcaccattgagcatcatgaagcgtgtgatccagaccaagagcgtggagtacatgcccttctcgctctctctctctctcaccctcagcgccgtcgtctggttcctctacggcctcctcatcaaggacaaatatgttgcgcttccaaacatccttgggttcacctttggcgtggtccagatggtgctgtacgtgttgtacatgaacaagacgccggtagcggttgccgagggcaaggatgccggcggcaagcttccctcagctgcagacgagcacgtcctcgtcaacatcgccaagctcagccccgcactccccgagaggagctccggggtgcacccagtcgtcgcccagatggcggcggttcccaacaggagctgcgctgctgaagcagccgcgccgccggcgatgctgcccaacaagagacgtggtcgacgtcttcgtgagccgccacagcccggccgtccatgtggtgtagattctcgatcgatcgcgtgcatggcccatgcatgtttgcgcgcgccacacgtacgcttttaatatttgaacgagttgatgagaaatgatggagaatgattaaatatactagttataagtaattaattaactgccatggaagcatgctagctaatggatggaggcagagatcagagcatgtaggggaagctacatatatatatatgtataatatggggtgtgtattcatctatgccgctcactactgctaagtattatttccttggatatctgttattccttttcacgtgtaatgttttctaataagatgtaatcgatcccagactactgttgttagcagtatatatttggttttc

SEQ ID NO: 453264 - DNA, 477 bp, Sorghum bicolor
  unsure (1)..(477): unsure at all n locations
cgtccgctcgtcggcaactctgttggaagccttgcatgtgtcattgctgcctcagagtccaaccgagaagccgttcgtgggcttgttctgctgaactgcgccggcggcatgaacaacaaggcgatcgtcgacgactggaggatcaagctgctcctgcctctgctcctgctgattgacttcctgctgaaacaacggccgatagcatcagcgctctttaaccgcgtcaaaaacagggacaatctgaaggacatcttgctctctgtttacgggaacaaagatgcgcgtgcacgacgaattggttgacatcataagcggaccagctgacactgagggcgccctggacgcgttcgtgtcgacggtgaccggcccgccggggccgagcccgataccgctgatgccgcggctggccgacctgcccgtgctggtgctgtggggggaccgggacccctncaccccgatcgacgggcccgtggggaa

SEQ ID NO: 453265 - DNA, 483 bp, Sorghum bicolor
cgtccgggcgaaccccgaagcggctaagaagcaaggggatgtggtcgtgaagaaggcaacagagtatggagcagtggagatttggatgaatgaacgtgtcaggagggcatgtgccagtagttgtgcggattttctttatggctttcgcgagaccaaagcaaagggtaagggagctgaagaatactggattatttggcgttttgaaggcgaggagtgcactttatgatctcatgcaaagcaaggaattcccttacaatgtggagacaaaaattcctggcaatgtccaggacttgccaaaaggtatagcgagagagaataagatcattcaaacggtgatgagacaactcttgtttgctcttgatggacttcattcgacagggattgttcacagagatataaaacctcaaaatgtgatatttttagagggtaataaaaggattctagttggttgccatttcatgataaaatattttgcattgattt

SEQ ID NO: 453266 - DNA, 515 bp, Sorghum bicolor
gggcactgtgattcatgcaccgaatggtccacaggaaacctcgcaatatgagcattcatccattcctgcaacagtaaagaagctattcaatttacattctaactttctgacaaagagagacgcatgggctgggacctttgagaactaccttaaaatccggaaaacaccaagaactgactgtccagagaagctgcccgaggtgacaaagtcactgcgaccatttggtcccaaggaagattcatctctctcggaatttcaagtggagttgattcaacttgcctcccagcttaacggtgatcatgtactgaacacgtacccagatattggcaggaccatgactgtcgggaaagctaaccgctatgcagaggatgctgtcgccagattcctggatgctggtcggattgctttgagagctggtgcaaatgaatctgctttggtgccgatgaggcctgctctcaccagcagggcctcattggcccttggtttatcatcagagctctaatagatcgttccac

SEQ ID NO: 453267 - DNA, 430 bp, Sorghum bicolor
cgtccggtttgctctccgcgagaggagggtgcacgttacccaggaggacttcgagatggcggtggccaaggtgatgaagaaagacacggagaagaacatgtccctgcgcaagctctggaagtgaggctcatgccttgttgtacccccctttcatgtccacgctgaagctagtgccttcatatttttatctttcataccactttgccaaagcagtggaatggtgtaacggcatgctctgtgcatgcctattatgtttaaagttttccttataacagctgtagtatgttattgcaaaagttgaattttatcagatcagctagatgacggtactaatgcattgctagctcgcgatgttctgagttccagttcctacttggtgtgcagtttgccagtcaactcgtaaggaacactgcataatggttgctgctct

SEQ ID NO: 453268 - DNA, 490 bp, Sorghum bicolor
cgtccgggctgccccaaattacattgttgcgtcaggcaagaagaggagcaggaagaaatggctgcaatacctgcagtgatctcgggctgctgctcttcgtctcgcctgtcccagcctgctggcctcctgccctccacaagcagcagaaggcgcttcaaggtcacggccatggcgcccaagaagaaggtaaaccgctacgacgagaactggtcgaagcagtggttcggcgcgggcctcttcgcggagggcagcgaggaggtgaccgtggacgtgttcaagaagctggagcggcgcaaggtgctgagcaccggggagaaggccggcctgctgtccaaggccgaggagctgggcgtgacgctctcctcgctggagcagctgggcctgctgtccaaggccgaggacctgggcctgctcagcctcgtcgagaccgcggtggggacgttcaccttcgttctcgtcttcgttttgttgccgcttctcgtggtcttca

SEQ ID NO: 453269 - DNA, 805 bp, Sorghum bicolor
cgtccgcgaagaccaggccgtctgtcaccttcacagaagaggaaaccgaggagctgacaaagaggatacagaatgctgggacagaggtggtggaggccaaggctggtgctgggtctgctaccctgtccatggcctatgctgctgccagatttgttgagtcgtctctccgcgcgctggctggcgatcccgatgtctatgagtgcacatttatccagtctgagaaaactgatctgccattcttcgcatcaagagtcaagctcggcaagaacggtgttgaatccgtggtttccgccgacctcgagggagtgactgagtatgaggccaaggcactcgaggcgctgaaggccgagttgaagggaagcattgagaagggtatcgcctttgcgaacaaacagcaggaagctgctgcatctgtctgaagcgaagcaagtgaaatggaatgcagtccacaagggaataaaggaacgatgatcttgaatggcttttaagttttgcagcctagaatttttttggtgccgtgccggagtgtaggaagatgctccagatggttgctgttgttagtttctaattactacatgggggctcgactggacatcccccaagttatcaccggtatctaaaccaggccttgtttaacaccacacataaattttgctccgtctgtattgtggttctgtttgtagcttgttggagtttacaaactacaaagaagctaataaaacacttttgttgaaagtgatctgtgccatgtttgtattgtcgtatttgctactgttcaacagaaaagccctggcttcattggcta

SEQ ID NO: 453270 - DNA, 453 bp, Sorghum bicolor
cgtccgcgcgtggtacctgctcaacatctacttcaacatctacaaagcaggtgctcggcgcgctgccgttgccgttgccgtacaccatcaccgccttccagctcgcgttcggctccctgctcatcttcctcatgtgggccaccaggctccacccggtgcccaggctctccgctgcgcagctgggcaagatcgcgccgctggccgtggggcacatgctgggcacggtgttcaccaacatgagcctgggcaaggtcgccgtctccttcacgcacaccatcaaggcctccgagcctttcttcaccgtcgtcctctccgccctctttctcagcgaggtcccttccctgccggtgctgggctcgctcgtgccgatcgttggcggcgtcgccttggctttattcaccgaagtttttttcaactggacccggttttggagcgccatggcgtccaatctga

SEQ ID NO: 453271 - DNA, 847 bp, Sorghum bicolor
cgtccgagtagctccaaagcagaaagaacttctccagtatgttggaacctgagatcttgctgggacattgcatttctgcagtgtagaagaagacatggttgatggctttccgtatgaaataccagaagaatacagcaccatgcctcttctcaaaggaagagctaccgtggatatgaaggttaaaattaaggacaatcccaacgtagaagattgtgtatttcggatagttctggatggatataatgctcctgtgaccgctgggaacttcatagatctggtcgaacggaaattctatgatggcatggaaatccaaagagctgatggctttgttgttcaaactggagatccagaggggccagctgagggttttatcgatcccagcaccggcaaaattcgtacagtacctcttgaaataatggttgatggtgataaggctcctgtgtatggtgaaacacttgaagaacttggccgctacaaggctcaaacaaagcttccttttaacgcctttggaacaatggctatggctagagaagaatttgatgacaattctgcttctagtcaaatattttggctcttgaaagagagtgagctaacaccaagcaatgccaatatattggatgggcggtacgcggtatttggatatgtaactgaaaatgaggattacttggcggatgtcaaagttgggggatgtcatcgaatcaatccaagtcgtctcaggcttggacaaccttgtcaacccaagctacaaaattgtaggataacatgcttggtatcagagttccttgtcttcgaatctggtttcgagtcgatgtaaagcgctatatacatctaactctcatatccttct

SEQ ID NO: 453272 - DNA, 513 bp, Sorghum bicolor
cgtccgggcgtatgcttctcctcttgaacctgttcttccagatgtgtctgttctgatctctggacctcccattaaagatccaggtgctttattgagatatgctttaccaatagataataaagctattcgtgaagttcaaaagccactggaggatatcaccgacagcctcaaggttgctggtgttagagccttggattcagttgaaagaaatatcaagcaagcatcaagagcactgaacaatgggagaagcttaattcttgctggtcttgctgaaccaaaaagagcaaatggagaagagttattgaataagttggctgttggacttgaggagcttcaaagaattgtggaagacagaaatagggatgcagtagctccaaagcagaaagaacttctccagtatgttggaactgtagaagaagacatggttgatggctttccgtatgaaataccagaagaatacatgaccatgcctcttctcaaaggaagagctaccgtggatttgaagttaaaatt

SEQ ID NO: 453273 - DNA, 665 bp, Sorghum bicolor
cgtccgcaactggtagccaagtggagtgtcgtatagcaaccagctgaccagagcagcatcagcagccatgtcggaggagaagcaccaccacttcttccaccaccacaagaaggacggcgaggagcagcccaccggcgagtacgggtactccgagacggtggccgccgagggggggaccaccggcgaggacgagtacgagaagtacaagaaggaggagaaggagcacaagcacaagcagcaccttcggcgaggccggcgccatcgccgccggcgccttcgcactttacgagaagcacgaggcgaagaaggaccccgagcacgcgcacaggcacaagatcacggaggaggtcgcggcggcggcggcggtgggcgccggcggctacgccttccacgagcaccacgagaagaagaaggaccacaaggacgccgacgaggccagcggcgagaagaagcaccaccacctcttcggctgaccgtaccgtaccgtaccggccggcgatgatggagctccggcctccggcgcaccacgtaccacctgttgaattctgtactgcatgcgtgttaatttgactgttcacaagtaattaagtcctttttccgaaccttgttaataagctgtgttgcttgtgtttgtgtgagtgagactgaaaagaggtggtggggtg

SEQ ID NO: 453274 - DNA, 728 bp, Sorghum bicolor
  unsure (1)..(728): unsure at all n locations
cgcgtccgccccgcgtccgcactcgctcgatctgtttcctccagcaaattaaaggtcacatctcgatcactatccactactgcacacagcacacatggcggaggagaagcaccaccaccaccacctgttccaccacaagaaggacgaggagcagctggagcagcccgtcgccggcggcgggtacgggtacggcgaggccgccgagtacacggagaccacggtgacggaggtggtgtccaccggcggcgaggacgagtacgacacgtacaagaaggaggagaaggagcacaagcacaagcagcacctcggcgaggccggcgccatcgccgccggcgccttcgcactctacgagaagcacgaggcgaagaaggacccggagcacgcgcaccggcacaagatcgaggaggagatcgcggcggcggcggccgtgggatccggcggcttcgccttccacgagcaccacgagaagaagaaggaccacaaggaggccgaggaggccggcggcgagaagaagcaccacttcttcggctgatttctcccgtcgacaacgtgcgtgcacgtacggccatatgtatgtatatgtgcgtgtatatgtatgttgtacacgtatatgtatcttcgngtgcgtgtgatgagagtgagatcgagaaaccgagagggggggccgcgcgcccggtcgccgtacattgatatgcgtgatgaataagtggctactatatatggaatct

SEQ ID NO: 453275 - DNA, 751 bp, Sorghum bicolor
  unsure (1)..(751): unsure at all n locations
cgtccggcacaaaggtagctggcaaaaaggaataaagattagatgactccataagctggagttggtaacgaaggttcataaaccaacattcaggaggtctacaaatcaacattcaggccatcaagcatcaaccttgacggcggtactgcgctgcacattgccgcctgtgagggccactgtgacattgtcagagtggctgctcaactggaagaccaacatcgatgtgaatgaccgctggggaagcatgatgcagttttagcatatataaaattagaaaactgatgaagacagccaaaagtttggtagtattataggactgggccagctcatccacctggtgcttactagaaagagtcttgccgctatgttcaaacttcaacccttgctgttgggttgaaattacgtgcagtgtcaagcctacctgtgttatttcattggagaagttgtgctgaaaaaaccaatctagctggagaattacttgctgaaagatgttgttgtttagatcttgggaggtatcggcagtacactgaggaggcagaatggatcatatatatgacagatgttggtcagcaacatcactttgacatgtttttcagtgctgcaaggatggccagctggctcccagatccaactgaaaggattgatcaaagccttcttaatctgatgttgtgtaccttttctatttcagtttaggtaggttgctttctacctntctgattactttaactttcctttatgtgttaccaactta

SEQ ID NO: 453276 - DNA, 582 bp, Sorghum bicolor
  unsure (1)..(582): unsure at all n locations
agcgtccgcacacgcgtgcgcagacgcgtgggtgcacgtacaaacagtagtaaaggccantttatgagctggtatataatcacgcgctggtacaaanctccttagctgctcctctgctgtgacaactatggcacatncatagacttttgtctgttggtgcatctttgcttagctccttggccgcaagccaatatttccaggaactgattgcctaaatcagctcaagctcatagtgaacgttctcggcaccatgagtgaggctgacctagagttcatcgacaacccaaaagctcggagatacattaagtccctcccctacactcctggtgttgctctcgcaagtatgtacccacatgcgcaccctcttgccattgatctattgcagaagatgctcatcttcgaccccaccaaaaggattagtgtcaccgaggctcttgagcacccttacatgtcttctctgtatgacccaagggcaaatcccccagcccaagtgcccatcgatctcgatatagaggaaaatatcagctcagagatgattcgggaaatgatgtggcaggagatgctccactaccacccctgaag

SEQ ID NO: 453277 - DNA, 562 bp, Sorghum bicolor
cgtccgcccacgcgtccgcccacgcgtccgcaacaatccacacaagcagttgaacgcactgcgcacaggcactagaacaaacaccaagcatcaccattcaccaatggcctacttccaggaggtggactactgctcggaggaggtgaggtcggtggccccggccggcggcttcggccgctacggcggcggcgtccagcagcacgtcgtcaaggagaaattcgaggaggtcgacacggtgtcacgcgccggcggccaccaccacggccacggtcaccacggccacggcgtcgtggtgcgcgagaccagggtcgaggaggacttcaacacctgcaccggcgagttccacgagcgcaaggagagcttcctcgccagggctaactgagccgccggccgcacgaccgtaccatgcgcgcccccgttcgtgccttatgtatgtatgtgcgtataagattgtgcagggtcatcgtacttggctggcgtgcacgcactcagcttctgtaagaattacgacaataagctcgtgacctgaataaagcttctccgtaccacctacattaccatg

SEQ ID NO: 453278 - DNA, 717 bp, Sorghum bicolor
cgtccggtggagaagtacataaatgacgcgacttcaaagggagcaaatatcatctaggcggctaaagacacagcctggggatgacattgtatgagccaactgtagtacggaatgtcagcaatgatatgcttcttttcagagaagaagtttttggtccagttgcaccccttataccattcaaaactgaggaagaagcagtccatatggccaacgatacaaacgcaagcttagctgcatacatatttaccaagagcatacctcgttcatggcgtgtatctgaatctcttgaatacggcttagttggggtaaacgagggaattatgtcaacagaggtggcaccatttggtggagtaaagcagtctggtctagggagggaaggttcgaagtacggcatcgacgaatacttggagctcaagtacatctgcatgggaaacttgggttgagtcctgaaatcggccccaggctagaaacgcttggcagatgatgatgaaccgagaaaccaagtaagcaggcgtgcttagaagggtgcgagttgcgtttagctgcaagatcggagatgggaaaggggccggccactggttgtgggtgagcagttttagaataaagcgaataagtcgtggagcatgaataagaaagccgaatgagttgtaaatgacgtgaactattaaagtatggcttcgccttcgtacttttgtatacataatcatggcacttgtc

SEQ ID NO: 453279 - DNA, 293 bp, Sorghum bicolor
cgggtcgaccacgcgtccggaagtgacagccccacctcaccagtttatagccctacatctccagcatacagccctacatctcccgcatatagccccacatcggcggcttacagtccaacttcgccatcttatagccctacatcaccatcatacagcccaacatccccctcatacagccctaccctcccctcatacagccctacctgcccctcatacaggcctacctccccctcgtacagcccaacattacctggatacagccctacttcggcaggatacaggccaacatcatc

SEQ ID NO: 453280 - DNA, 487 bp, Sorghum bicolor
cgtccgggatgttgatgatataacaatgttgttacataatgttccatatggcgaggagaagacaggcaggctgcatgctgcgtggaggctatgtgagtacttgcaggccagtggcttgaacttccctgtacattcatcacatagatttccctaaagccattgacagagatggtcttgtcattggtgctggggccaacgttggtgctctcctagtcgatggtcttggggatggtgtacttcttgaagctgctgaccaggaatttgagttcctgagggacacatctttcaacttgctccagggttgcaggatgcgcaacacaaaaactgaatatgtgtcttgtccttcatgtggccgaacactctttgaccttcaggaaatcagcgctgagattagagaaaagacctctcatctgccaggtgtctcgatcgctatcatgggttgcattgtcaatgggccaggagagatggccgatgccgatttcgggta

SEQ ID NO: 453281 - DNA, 529 bp, Sorghum bicolor
cgtccgaaaagtgaagtccatgtgtttattcggcagaagaaagttttaagaggatttgatgaagaggttagagatttcgtcgctgaacaggtgtctttaaggggcatcacatttcatacagaagagagccctcaagctataactaaatcaaatgatggtctgttatctctgaaaactgtctttggcaatgaacctaccaaaccagattacagaactataccttctgctgtgttctcccaaccaccaattggacaagttggttttactgaggagcaggcaatcgaagagtatggagatggtggtgtctttgttgccaacttcaggcctctcaaggccactctgtctggactacctgatcgtgtactaatgaagattcttgtgggcgctacatcatacaaagtggtaggagtgcacatgtgtggggatgatgtctctgagataattcagggaaattgcgattgtggtaaagctgggtgacaaaacaagatttgatgccaccatggcattcacccaacatctgctgaggaat

SEQ ID NO: 453282 - DNA, 544 bp, Sorghum bicolor
  unsure (1)..(544): unsure at all n locations
cgtccgctttgccgtagcatagcaaacagccaagggagagtggggagactagcgaaagaggacagcgcacggaaagcgaggagaggggaaacagagaggtcgcatcggacggcggcgagatgctggcggtgttcgatcccacggtggccaagtgcccggagggcctccgcagcccgccggtcgccggatcggccgctgcagcagcaggcggagccggcgcgggcgcgctgatgaagggcttctccgactcgcacgacggcgccgtcaccgtcagcctgggcccctccggcgcgctggcctactcggcagccaaccagaaccccctcgtcccaaggttgtttggtgctgtcaatgacatcttctgcctgttccaagggcacattgagaacattgccaacctgaagcagcattatggcctgagcaagactgcgaatgaggtgactatcctcatagaggcctacaggaccctgagggacaggggtccagtcccagccagccaggttgtgagagacctcagtgggaagtntgcgttcatcctgtatga

SEQ ID NO: 453283 - DNA, 496 bp, Sorghum bicolor
cgtccgggatggtcacatgcagtgatgaccaaacgttaaagatatgggacaccagcgctgatttgtctcaaccaaaaactggcgaaggcgcatgaatcttggcaacacctggctactctcacaggatatcatggacgaacgattttttcagcccattggtcaagcgaggatattatagctagtggtgcgggtgacgatgcaatctgcctttttactgaggagaagagtaccatggttgagaggccctcatacagattaatattaaagaaagagaaggcacatgttatggacataaactctgtgcgatggtgtcctcaggacccaaggttattggcatccgcgagcgatgatggcatggggaaattgtgggaactgagagggaatgtactggattgagtttgttctatttactggagtgtaccttgagattatagaactgattaggcatcacctttggatatctgttttactgagctctgctcactgagtccatact

SEQ ID NO: 453284 - DNA, 460 bp, Sorghum bicolor
tgcgtccggccgaataatccacccgcagccctcaggccacgcctctgcacacgcgaccaaaccaaagtagcgaggcgagagagcgagagccgccatggggaagatcaggatgcccgtgccgtccctgttccgccgccgctccaagtcgccgccgccacagcagcagccggcggccgagggcaagggcggcgggtcccctccgcgagcggcgaccgcggaggaggagatggcgcgcgtgttccgcaggtttgacgcgaacggcgacggtcggatctcgcggtcggagctcgcggcgctgttcgagagcctgggccacgcggcctccgacgacgaggtggcgcggatgatggccgaggcggacgcggacggcgacggcttcatcagcctggacgagttcgcggcgctgaacgcgacggtggccggcgacacggctggaggcgtggaggacctcgccacgcgt

SEQ ID NO: 453285 - DNA, 443 bp, Sorghum bicolor
cgtccggtggctttcctcaccggtcacaggcgagctccgcaaaaaatcgcatggcgttgccgttgcagcacgcaagtccaggtagctccacactgaccaccaccggccgtcatggccggagctccgcagccgtcctccgtcggccaccgacggattctagcagccgttggagggtgcacgcgcagaagcccgccgcgggatcccgtggcgcgggagccgagacgacgaccgcgacgtcgtcgtcgtcgtcctcccgctcggacaacgccgtcctcaaggccgcctggtacggctcggagctcctcggcatcgccgcggtctgttcccccccgcgccgcgtcgtttccggaggggggcgctgccggtggcggtgatgcggagggaggcgcggcggcggggacggcactggatcgccccggagtggtcaaggccgtcaaggcgga

SEQ ID NO: 453286 - DNA, 628 bp, Sorghum bicolor
cgtccgcgtacacacacaaagacaacgaacactggagcgagtagagatagtaccggcttgttgttgtgtgtgtttgctgtcatctcgacgacgacggtcatggcgaaggcgcaggtggcggcggcgaggttcatgacggaggtggcgccgccgccggtggtgtcggtcatgcggcggaggaagcaggcgccgtggtgcctggacaccatcgccgaggacaccatcgccgagcagctggtggcgtgcgggtcaccatcgtcgacggactacggcttcgcggcggcgtggtcgctcaagaggatgccaccaccgcatgcgcatgcgcagccgcgggagcgcgcggccgggtttgtgggcaagtacttctccgacgcccatggcagccagcagctggtcagccgccggcgagacgtgcatgcgcaggagttgcacaaggtcggtgcttgaagacatgagggggagcatagtagcaatataatgagccaagcttgtttgggagagtatatttttagtttataccacttccccacgtgcgttcatgcacgataatttagcaaagtgcgcacctcaacgattctctatgcacctccttattattcatgtactagtgatgcacatattgatatgc

SEQ ID NO: 453287 - DNA, 782 bp, Sorghum bicolor
acgcgtccgagcggaaccaccgtcgcggcccagcggttgccggtcctccacgtccgcggacgagaccgccagatcaggactatggcgatgctgagcgatagcggaggcaagaatgtggagggggtcaacgagaataccagctgttcaggagcttgtcaagaaaatgacaggaaaggatcccaatgtgacggtcaaccctgatgaggttgttgcacttggagcagctgtgcaggctggagttttgtctggtgatgttagcgacattggccttcttgatgtgacccccttgtcccttggtttggagacactgggtggggttatgaccaagattatcccacggaatacaacattgccttacctcaaagtcggaagttttctcaacggctgctgatggccagactagtgtggagatcaatgttctccaaggagaaagagagtttgtgagagacaacaagtctcttggtagcttccggcttgatggaatccctcctgccccacgtggtgttccacagatcgaagtcaagtttgatattgatgctaacggtatcctttctgtcactgctgtggacaagggtacagggaagaaggcaggatattacaattactggtgccagcactctgccaaaagacgaggtggagaggatggttgacgaagctgagaagtttgcaaaggaggataaggagaagagagatgccattgacaccaagaaccaagccgagtcggtcatctaccagaccgagaagcaactgaaggaactaggggacaaggtcccaggtgaagt

SEQ ID NO: 453288 - DNA, 536 bp, Sorghum bicolor
  unsure (1)..(536): unsure at all n locations
ccacgcgtccgcacgcttcgttctctacatactttcggctgcattaattcgccaacaaaatggcagcttcttcttccgtgacgaccgtcggcggcagcttcctcgccgccctcgccctcctcgccgtagccagcgacgcggcggtgttcacggtggtgaaccggtgcccctacaccgtgtgggccgcgtccgtgccggtgggcggcggtcggcggctgaaccgcggcgagacgtggcggatcacggcccccccgggcacgacggcggcgcgcatctgggcgcgcacgggctgccagttcgacgcgagcgggcgcgggagctgccgcacgggcgactgcggcggcgtgctgcagtgcacggagtacgggcgcgcccacaacacgctggcggagtacgcgctgaagcagttcaacaacctcgacttcttcgacatctccctcatcgacggcttcaacgtgcccatgagcttnctccccgacggcgggttcgggtgcagccgcggcccgcggtgcgctcgtgacgtgaacgcgcggtgc

SEQ ID NO: 453289 - DNA, 909 bp, Sorghum bicolor
  unsure (1)..(909): unsure at all n locations
ggcacgaggcccgatcccgccaccggaggcgatggcggcggcgccggcggtaaggttcccggtcttcgggctcgtgcggctgctgggcttggccgccgcggcgggcatactcttctgggccgtccactaccgcggcggcatggcgctctccaccgacgaggagagcaagctgcccctcttcaacgttcacccggtgttgatgctgattggtttggtggccttgaatggtgaagctcttttggcctataaaactgtgccaggaaccaagaaactgaaaaagctagtgcaccttgccgtgcagttccttgccatgtttttgagtctgattggtctctgggctgtctggaagttccatgatgaaagaaaaattgaccacttgtatacacttcactcgtggttgggccttacttgcttcatcttcttcagcttgcagtgggctgctggattttggaccttttggtaccccggtggatcaagaagtggccgtgcatttttgcttccctggcatgtcttctttggtatattcatctatgttcttgctatcgccactagtgtgactggactcctggagaagtcaatctttatgcagagcgccaaaatgattgagcgcttctccacagaagccatgtttatgaactccctgggaatgctgttggtgctgttgagcggccttgttattcttgcaattgttagtcctggacccagcaagattgacacatacagaggctcttctgagtgagaggaaatgattacagcttagtttcttaagctacatttttaaccagtagctgagcaattnttatgtacacagaattatccctttgttcctttgacaatgagttaagtcaggttgagataatttcaatcctgttagagtgaacgacttcatttcaagttgggtaataaaat

SEQ ID NO: 453290 - DNA, 762 bp, Sorghum bicolor
ccggaattcgcacgccacgctccgctacaagaacatcaagagaagggctcagaaagcagaggttggcggtggcatgactggtcctgcttggagatcgactctgtggagcattgtcgggacggtgaaatggtatggaataggagtggctctcatctacgccgtcacactgtccattttcccagggtacatcacagaggacgtgcactctgaggcgctcaaggactggtaccccatcctcctcatcagcgcctacaatgtgtttgatcttgttggcaaggccctgcccgctgtctacctcctccagaatggcaatgtttcagtcgcgggatcctttgcacggctcctgttctacccgctcttctacggctgcctgcacggaccaagttttttccgcactgagatcccagtcaccgtgctgacatgcctcctggggcttaccaatgggtacctgacctccgtcctcatgatcctcgcgcccaaggctgtgcccatccaccactcggagactgctgggattgtcatagtgctgttcctcgtagttggtcttgtcattggttcgtttgtgtcttggttctgggtcatctgatactggggacctctctctgtcacgtcgatgtatcatagcaccatgttcgtgttctctgcttttgatttgccacacagtgacaacttgttagtgtactgtaaacccaggtgaaaagatctgggaaatctgtaatttattacaactcatggaattgatggtgaccaaatgttaatgtg

SEQ ID NO: 453291 - DNA, 451 bp, Sorghum bicolor
  unsure (1)..(451): unsure at all n locations
gtccggcaaaacgttcatcctgctccgactccgagacgaaaaaaatgcaggcgttcctctcttcgtcgatcccggccacttcctactcgaggtcgtccttattcctgccgcagccgcctcatcaggctcccgtgaagctcgtcttcccgtcgtcggcgccgcagaggggcagcggtgccgtcgccgccgacgccgccgctaggactaggagaacagcttcggaggctgctggtcggtcggggcggtgcgtggcggcgtcctcgtccccgtcgtccccggccacggccgcggtggcgacgaccgaggtgccccggggtgatgaaaggcctggtgtacgacgcgtacggggacgcccgcgtgctcaagcctgacgagggcccncgctggccggccctggccgacgaccaggtgctcggtcaaaggcgtcgccggcgcgcctcaaccccgtcga

SEQ ID NO: 453292 - DNA, 392 bp, Sorghum bicolor
  unsure (1)..(392): unsure at all n locations
cacgcgtccgggggaactgctcctgcctccagcctcctgtctctccacaaccagaagcttgattcctcgctcggccatggcttcacccgcggaggagactcccgccgccgaggatacggcgtcgcctccgccgccgccgccggcgaggtcccggtgcttctggttccttggggaggacaagtctgtgcacaaggctctcggcgggggtaaaactgctgatgtactgttgtggaaagacaagaagacctctgctgctgtagtcggtggtgcaactatcctatgggttctgttcgaaattgtggaataccatctnctgaccctggtttctcatgtgctgattggtgcactgaccatctttgtcctatggtccaatgccactgtctttatcaaaa

SEQ ID NO: 453293 - DNA, 526 bp, Sorghum bicolor
cgtccgcaatgccccaactgccgcaaaattgagaaagggaattggctttatgcaaatggttcccgatctgcacatgatgttagcatggatgagtgggcccatgatgaagacctttatgatgttagctactcagaaatgccacttcgcttccattggtgtccatttggtcgcttagcacaacttccatctttattcgaggaaggagaatcatcacctccaattacatttcatgacttcatgggacaacatgtatttacggagcaagtagctgtatctgctgcaccagggacaactcatccttgcccctatgtggcatacttgcatcctcttccaccactgacgtcatcgtcaagctcccatgtccctgagaggactatggatcgtcctgcataccatgatcattggaaccccatggctgggccatcagatgttaggcccatgcaaacaatgcaacctgctgatttccatcatagccattgggcacacgtgccccattcttatgctcaacccaacagtaataacgagc

SEQ ID NO: 453294 - DNA, 427 bp, Sorghum bicolor
cgtccgccgaaccccacccacaactccgtcgtctcctctcctgtcctccacaccacacgaggtgcacgcacagagagcgcgtgcctgcgacttccatggccggcgcctcctcgtgtgctcctcgcagcatcacgaccgcacctttgcgttagccagctctgtcttgttgtcgcacgtgagaggagcgagagacgttgattgattcttcctttttctcggcgcgcgcggcagggggtagcactagcacaccgccggcacaggatcgtgaccgaagattgtgcggttgcctgagcatgccttatgggatgccctgcgtatacaccacgagcttcatgcctatggcttacacagggatcactgtgttttactaccctacttactgattaatcctattctttgtatattcttatcaattgctttgaatttt

SEQ ID NO: 453295 - DNA, 479 bp, Sorghum bicolor
ggcacgaggcggggtctctcgccgtcgctctctgtgctctcctccaccatttccccccccgaacctctcctcctcatcctcctcccgcttccccgtccggacaatcgaaggccctccccgatggatccattggaaatgcagcacgactcgaagaaatccaataagcccaaatattctaagttcacgcagcaggagcttccagcatgcaaaccactgctaactccagcaattgtcatttctaccttcttactggttggcatcctatttgtcccaattggtctcgcatcgctttctgcatcacaagagattgtggagctggtacatagatatgatacaagttgtgtgccctcggctgataaagttgggttcattcaggacactaaaacggacaaatcatgcactagaactctaactgtacctaagcatatgaagagcccaattcaaatatattaccagatcggtgacttctatcaaaacca

SEQ ID NO: 453296 - DNA, 532 bp, Sorghum bicolor
cgtccgacttgtgtggtttgaagctaattaagaagataagtttgcaaagcaacagattgacttcaatggatgggtttcaggaatgtactgcgtgtagaggagctgtacctcagccataatggaattcaaaagatggaaggcctctctaccttgcagaacctccgcattttggatgtttcatctaacaagctaaccactatagaaaatattgaaaccttaaccaggctggaggacctgtggttgaatgacaaccaaataccatctctagatgggatagagactgctttggctggttcgcgggagaagttgacgacaatatatcttgaacgaaatccctgtgcaaaaactccagagtactcatcgacattggagaaaatatttccaaaactcgagcaaatcgattcagatatcatagcatgaaagctagctaatcattgcacagatactaaggcgaagtaagggcttgggttttcctgagaagtcattagcagcaatcaagttgtggacgaataatagacattatttgatcatc

SEQ ID NO: 453297 - DNA, 614 bp, Sorghum bicolor
cgtccgcggcgttccccgctcccctccccgccgagatccatcatcgccatcagaccagaccaggtgctcggcggcgatggcaacccgctactggatcgtctctctccccgtgcagtctcccggcgccaccgcgacctcgctgtggccgcgcctgcaggacgccatctcccgccactccttcgacaccccgctgtaccggttcaacgtcccggacctccgcgtcggcaccctcgactccctcctcgccctcagcgacgacctcgtcaagtccaacgtgttcgtcgagggcgtgtcgcacaagatccggaggcagatcgaggacctcgagcgcgccggaggcgtcgacagcggggcactcaccgtcgatggcgtccctgtcgacacctacctcaccaggttcgtgtgggatgagggcaagtaccccacaatgtcgccgctcaaggagatcgtcggcagcatccagacacaggtcgccaagatcgaggatgacatgaaggttcgagcagcggaatataacaatgtaaggagccagcttagtgcaatcaacagaaagcaaagtgggagcttagcagttcgtgatctttccaatctggtaaaaccagaggatatggtca

SEQ ID NO: 453298 - DNA, 483 bp, Sorghum bicolor
cgtccggaaagaactcaaggataccttgcaggatatccttgggaagaacaaaactattttggtggaacagaaaattgactacagcatgatgggaggattagtgattgaattcgggcagaaggtgtttgatatgtctatcaggaccagggcgaagcaaatggaggcattcttgaggcaaccccttgaattctaacagcctttggataaaaacatcatcagaatgcaaaggctgtgctgttgaaggtttccccatgtctgcaactttgatctggcctttgaataaaatgtttcctctaacaagtgaagggcactgtttttattgtcttgtgggctaaatgcctgctgaacaatttatgttcatttcttctttacttaaagaagcatgccccaaaaacatgaaggatgcatcccatggaaagtttttgagcttcaaggcattggaaccgtttaacttcttacacaatgcattaattttcttgtatt

SEQ ID NO: 453299 - DNA, 635 bp, Sorghum bicolor
ggggactgggcacctgacctcacatattacttactacaggagacattccgagtgaactatccatctgttagacgggcgtgagggggtcacagatccaaatactgggagatctaaaggatatggatctgtaaagttcgcagatgaaaatgaaaagaaccgtgcaatgacagaaatgaatggagtgtactgttcaacaagacctatgcggataagtgcagcaatacctaagaaatccactggctctcagctgcagtattcagctgctaaagcggtgtatccagcaacagcttatgcaatgcctcagctccaggcagttctccctgacagtgatcctacaaacactacaatatttattgcgaacttggaccctaatgtgacagaagatgagctgaggcagatatgtgtacaatttggagagcttatatatgtgaaaattcctgttggcaaaggatgtggatttgtacagtatgcatctagggcctcagctgaagaggcagtacaacgtcttcatggcacaatgattggccaacaagctgttcggctttcatggggccgaagtcctgcgagtaaacaggacccatcagctgtgtggagtcagcaagcagatccaaatcagtgtgcaaacacttactatg

SEQ ID NO: 453300 - DNA, 627 bp, Sorghum bicolor
  unsure (1)..(627): unsure at all n locations
cgtccgcggagatgtacaggaaggaggagaaagagcacaagcacaaggagcacctcggcgagatgggcgccctcgccgccggcgccttcgccctgtacgagaggcacgaggcgaagaaggacccggagcacgcgcagcggcacaagatcgaggagggcgtggcggcggtggcggcgctgggcagcggcggcttcgcgttccacgagcaccacgacaagaaggaggccaaggacgcggcggaggacgccgaggaggagtccggacgcggcgaggggaagaagaagcaccacttcttcggctgatgatggagctgctgctgctcttcgctactccaacaagcagcatgcatgcttgcatgcatgcagcagccagctggagaataaaaaaactcagtgtatccgtttatgtatgtatgtatgatgatgtgccggtatcactgtgtagttatactgtgatggtgtgtctgtgtatgctgttagctttgtgcactgtggagagtacgtgtagtgtgtgtttatttggtgcatggttacggacttacggtgtgcatggctgcatgtgcatttgcctaataagttgtttttcactcctatgtggtatatatatgtaaatgttntaattttcaaa

SEQ ID NO: 453301 - DNA, 613 bp, Sorghum bicolor
ccgcaatcccggtcgacccacgcgtccggattcttgtctcttgcaatcacagtacctgatggttaccatttctctaaggaagctcgcagtaaatttgatgtggaaacagagccgcctaatgaagttgagatcgagccagcgagcggatttctaaactctgaaggacaggcatcactgaagttcagaaggatatcgtcatccttctcaatgggaaggataaactgcaaggtttactactgtaaagaagatgaagtttgtctttaccaatcggttgcttttgatgtcaaattccgtgaagaggccgaacccagtccagcacaaattatgctatcctattctgtttcgccaagagataattcaggtagtacacagctaatagctgctagaaagaatgccaaggtgtagtcagactcacggtgattgttctacttgcatcattgtattgattgtcaatttggccctaggcccacaggggtaagtgttttttttattcttgaagtgcaagattaacttcccctgtatgatgtatagctgacatgctgcttgtaacccagctccattgtctccctaactgcacaacagtatcaatggagtagtttattatcagttcatt

SEQ ID NO: 453302 - DNA, 782 bp, Sorghum bicolor
acgcgtccgcccacgcgtccgaaaaaagaactgaagctatcgatccaatggcagagggcaagagctccggcgacctgttctccagcggcaagctggtcgcggaggccgccgcgtcggcgttccagcagaagagcgtggagaacgtcgacaagaaggaggtcgccggcgcggcggccgagatcctgcacgcggcgtccacgtacggcaagttcgaggacaagccggccgggcagtacatcgagaaggccgagggctacctcaaggagttcagcgcgggaggacacgccgccgagcctgcggctgcaggcgacgcggcgccgccgaagccagcggaggaggcgcccaaggagaaggagccggtgcctgcgccggcgcccaaggaggaaggcggcaagtcgtcgtcggaagggtttggcctcggcgacgtcgtgaagggcgctgagcaactcgtggagaagcagggcggcgccggggaggaaagcgccgccggtgggctgtttaagatggcgcagggcttcctcaagtagatggaactcgatcaaagctccatccacgcactgctcttgatttgtctgcccaacggcaacgtgtagctgtgtatgtctgttatgtaattattaacttcaaataatgttgccttcgctgtgtgtgttcttcaagatgtttgtgtaataataaccgagaacgttgtagcagtggtggcagtgtgcttttcgacctgtcttttgataatttaaaaaacattgtatgttgtataaacactcagtccttgtttagttctt

SEQ ID NO: 453303 - DNA, 807 bp, Sorghum bicolor
cgtccgcagaaaccacccaccggcgcctcggttttacggccgttccctcaccgccccgcgcgagccaagccatgaagctggaggtcatgcccatgcccaagcagagggtgctggaggcggagcagagggaggaggccatggagatgagcggcctggacctgtggaagcacgagaagcccccaaggatctgccccttgcccccgccgctcccgccggcggcggcggcgtgcgacgagacgacgctcgtgccgccgctcaacttcgccatggtcgacgacggcatcttccgctccggcttcccggatacctccaacttccggttcctcaagaccctcaacctccgctccatcgtgtacctgtgcccggagccgtacccggagacgaacatggaattccttgagaagaacgggatcaggctccaccagttcggaatcgaggggcgcaaggaaccatttgtcaacatacctgatgacaaaataagggaggcgctcaaagttgtcttagacccaagaaaccaacctctgcttattcattgcaagagaggcaagcaccgaactggttgtgtggtcggttgcttgaggaagcttcagaaatggtgcttgtcttcagtcttcgatgagtaccaccgctttgccgctgcaaaagcaaggatcactgaccagagattcatggagctgttcgacgtatcaagcttgaagcacctgacaccctcacattgttaaccaaggcgtgtgatcgctttgatcccccttgatccctcaactctagtacatctccaaggctatcttcctgcagctactgaaccga

SEQ ID NO: 453304 - DNA, 687 bp, Sorghum bicolor
cgtccgctttgcggtatgaaaaagagagtccagttcaattgatgcaacttttcaacaaattggcttctcattctgccaaatacaagtcagggcttgttcaattcctccttaagcaagctggcattgataagagaacaggcgacttgtatgggaaccgtgatctgttaaatattgctcgcaatatggctcgtgggcttaagggagttgagaatgtctacacccaacaccagcctcttatcttccaaacgatggaaggaattgtgaaagggagattgcgagatgttggctatccacttgttggcaatcatttccagcagggcaggcctcaagatgttgtcatattcgttggtggagggacaacttacgaggaagcaagatcggtagccctttataatgcagcaaatccgggagttcgtttcttccttggaggttcagcggttctaaattcaaagagatttcttgaagatttgggagaggcacaatggatatcaaaatcaagcactataatatgagctgaatgggtctatctcttgtttgaagagtaccatagtgtgataattgacagtgttgactccacttctgcacagaatcaaatgtgtgataaatctgtcacatagttctaggtgcgtagaatcaaatttcaggaaaatctgtagctgctacagcttcaaccttctaaatgttttc

SEQ ID NO: 453305 - DNA, 499 bp, Sorghum bicolor
  unsure (1)..(499): unsure at all n locations
cgtccgggcaccaagccaaaaagcaagcaaggagctgctcccctctgaaccagcaactgaagcagcttcctcgtctcatcatcgagaccagtagtacagtaagcacaatggcgactaatctcaagtgggctcctgttctggcccttctcctcgttgctgccatggttggcagcaccagtgctggcaatatcgccgtgtactggggccagaacggcaacgaaggcaccctagcggacacctgcaactccgggctgtacgcctacgtcatcctggcgttcctcacgaccttcggcaacgggacagaccccggtcctgaacctcgccgggcactgtgacccgggctccggcggctgcacgggcctgagcagcgacatccagacctgccagtcgcagggcatcaaggtgctcctctccatcggcggcgccaccggcagctacggcctgtcgtccaccgacgacgccaacagcgtggccgactacctgtggaacagctacctgn

SEQ ID NO: 453306 - DNA, 668 bp, Sorghum bicolor
cgtccgcgagctgattatataaaggttcactttgcgcagagctggaacgagttccatcatctcttgatcatggaagaactgggtggcaacgctttatggattgatcgtttccttgcacggtttatggcgtttttttactacttcatgactgttgcaatgtacatgctgagcccacgaatggcatatcacttttctgaatgtgtggagagacatgcgtattccacctatgataagttcctcaagctccatgaagaggaattgaaaagactaccagctccagaggcagcattgaactattacctgaatgaggacctttacttatttgatgagtttcagacagcaggagttccatgttctaggaggcctaaaatagataacttatatgatgtattcgtcaatgtacgagatgacgaggcagagcactgcaagacaatgaaggcctgccaaacacatggaaatcttcgttctcctcactcaatgcttgactgcttagaagttgattccgaatgtgtgatacctgaacctgaagacgattgtgaaggttttgtggactctgtcaaaaagtcccttacaaagtaaatagtatgtaaagcgctctttcgtgtgttttcaggcatcatggtatacaaagtacaaaattttgatgatatcctctattttttctttgt

SEQ ID NO: 453307 - DNA, 436 bp, Sorghum bicolor
gcacggaccggcccggtcgacccacgcgtacgagagatcccgcgctcaaccaccgcttctcggccgcggccctccctcggcccctcccttcctccttcccttccggtggccgccggggacggggagcgaagaagactcccttcctccttccctccgttggccgacggggacggggagcgaagaagactcccttcctccttccctccggtgatagccggggacggggagcgaagaagactcccttcctccttccctccggtggtagccggggacggggagcgaagaagcctcccttcctccttccctccggtggtcgccggggacggggagcgaagatgttctatggggccatggtgtgggacccgtggctgatcgtgtcgcagatcgtgtgcctgcagtgcctctactacctgtcgctgggcgtcgtcatggcgct

SEQ ID NO: 453308 - DNA, 431 bp, Sorghum bicolor
cgtccgcaagaaacatactgatttgtctacttttgcttctcctcctcctactcctactcttcgtctcttcaataattcggtgtgcaatgcaaagatgctgagaagagaaccgtgaataccaattttgcaggtcactaaagatggatgcccaatcatcttccatgacaacttcatcttcacccaagaagatggtaaaatttcacagaagcgtgtgaccgatattcatctggaagacttcctccagtatgggccccagaatgagcaggggaaggttgggaagcccctgcttcgcaggctgaaggatggtaggatggtgaactggaatgtgcaatcggaggatgctctttgcacacttgaagaagcgttcgagaaggtcaatacaagattgggcttcaacgttgagctgaaatttgatgacagtcttgaatacc

SEQ ID NO: 453309 - DNA, 687 bp, Sorghum bicolor
  unsure (1)..(687): unsure at all n locations
cgtgcgtggtcatcctccgctaggctggcatgacaccatatgctaccttgtattgcctgtgctactgggtgcttcgcagtatgtctctatggagatcatnaanccacctcagagtgatgacccatcacagaagaacacactgctcattttgaaatttcttccatttatgattggctggttctctttgtcagtgccgtcaggattgtctatttattggcttacaaacaatgtcctcagcacagcccagcaagtttggttacggaaaatgggtggagcaaagcctgtagtgagtaagggaggtagtgggataattacagcaggacgagcaaaacgctctaatgctgaaccagctggagagaggtttaggcagctaaaagaagaagagaacaggagaaaactcaccaaagcacttgctgcaggagattcagatgcatcatcatcaacatatgacatggaggatgaagaattagatgatgagaccacagaagagggaggacctgtggaggaagcatccagtactggcagtgacaagaaacttccaagttactcgtggaagaaaggcaaacgatccaagaggaagcgcatggtgcagtaatcgttacagcctaattggatgcattttttgtcacaactggataatttagttgaccagttaggtgccacagttgatctcggagacagttttgt

SEQ ID NO: 453310 - DNA, 432 bp, Sorghum bicolor
cgtccgatctacacagaccacatctgcagccagaggcacccaccttatcatcatcctcgcctcgctgcatcgccaacaccagcgcctccttcttccccgccgccgtcgacatggctgcgcaagaggagaagactgctactgctgtcaccacagaggagcctgcaccggcggcggagcctcagcctaagccagctgcggcggcgcgcagggcagggccgtcggcgtcggccaaccccttcgacttctccaccatgatgaaccttctcaatgaccctagcatcaaggaaatggcggagcagatcgccaaggacccggcgttcacggagatggcggagcagctgcagaagacggtggtgttctcgcggcaaccgtagcagcagtaggcggtttctgtgctgctgtggctcaactggacccgcataagtacgtggc

SEQ ID NO: 453311 - DNA, 462 bp, Sorghum bicolor
  unsure (1)..(462): unsure at all n locations
cgtccgatgtcaaacatcttccctttgttgctggagccatgattgattctcatacaacggctgaatattggaagagcaggactagcgaccgcctaaaaatacagatgccacaaacttatgttgttcacctggggaatagtaaagaactaatggaagttgctgaagataatgtcgcaagaagagtcctacgggaacatattcgtgaatcccttggagttcggagtgaagatctcctgtttgcaataataaacagtgtatcacgagggaagggacaagacttatttcttcaagcatatctatcagggtttgcagctcatccaacaccagatactaaaagtgcctacaatgcatgctatagttgtgggaagtgatatgaatgctcagaccaaaattgagactcagttacgtgactttgtggtgaagaatgcgattcatgaccgtgtncattttgtgaacaagaca

SEQ ID NO: 453312 - DNA, 454 bp, Sorghum bicolor
cgtccgcccacgcgtccgtctagctggtgaaaatcatgttgaagagatcaataatcatgtagatttcacatgctatgctcctcgtatgtttgcaacactcaaggccattgaaagtgttatgatggctgcccctgcggcattggtgcggaaaaaagcttttgttgctttgaaaaaggttatttcaatggtgccatcatctcagagatttgacatcttacaagctcttgtaaacaatagtacatctccatccttgactgcaattctccttgatctagtgagggaggaagtttcgagagagagtcgccgagctgacaatgattgtgctgaagatgatggatttcgaggtagcgggttgccccgctggtgcattttatgcacttggattattggagcttattttgagggccttcagaaggtggtcctttttgcctttttcgatcacaaggaacaggtg

SEQ ID NO: 453313 - DNA, 854 bp, Sorghum bicolor
cgtccgatcgttttgaaactaaagcatcacctactgaactgagagaccttagaaaccggctggagtctatgttgtcaagtgaagcatcatcatcaaatcagtcaaagtcaattgcttatgttggtcgtgaaggagaaggaattataggtgctattgctatatcagatattttacgagaagatgcaaacttaactgtggagaggttgcagcaagaaagcattacaacgtttctactgtcaggggatagggaagaagcagtgacaagcatcgggaggactattggaatcagggatgaaaacatagagtcttccctaactccgcaagacaaagcaagcattatatcaactttgcaagggaagggacacagagttgcaatggttggtgatggaataaatgatgcgccgtctttggcagctgcagatgttggaatagccatgcgaactcactcaaaagagaacgctgcctctgatgcagcttcagttgttctattaggcaacagactttctcaggtggtagatgcactatccctgtcgaaggcaacgatggcaaaagttcaccaaaatttagcctgggcagtggcatataacatagtagccattccaattgccgctggagtgttactgccacaatatgatttcgccatgacaccatctctctcagggggattgatggcccttagctccatctttgtcgtcagcaattctttgcttctgcagctgcatgggtcgtttcagaacacagaaaaacggcagggtgatttgagctcaagattaaactgaattattgggtttagtttgacccagccgaaggacagtgcttcaggatggtactggatgatagagtgtgctgtactg

SEQ ID NO: 453314 - DNA, 662 bp, Sorghum bicolor
cgtccgccaaaatccgatatgctgggatgcttcagtatgatggtgagttgaagcttccaagccgttaccttgtttccccaccagagatagatagaacatctggggagtacttggtgaagaatggcgtccgcacctttgcttgcagtgagacagtgaaattcggccatgtcacatttttctggaacggcaaccgttcaggatactttgatgaaactaaggaagagtatgtagaagttcctagtgacagtggtattacattcaatgttgcacccaagatgaaggcgcttgaaattgctgagaaagccagggatgctctcctaagtggaaagtttgaccaggtacgtgtcaacctgccaaatggtgacatggttggtcacactggtgatattgaggccaccgttgttgcttgcaaggcagctgatggagctggtaagattattttggatgctgtccagcaagttggtggtatttaccttgttactgccgatcatggcaatgcaagattgggaaaggacaagtgcagcatgtgcagatgggttcaattactgtccttacgcgtgatgggctgttatcatgatcgagctgaccgctgcctcgacgtgatatgtggctgtccacaacttaggtcacagtgcagttccattgtttgggagttgctgata

SEQ ID NO: 453315 - DNA, 499 bp, Sorghum bicolor
cgtccggagaaaaatggcgagaaaggaaatgatgtcgctccacaggacctgaaatcaccaactgagaagttggcaggtccaaatggctgttgattttttatttttttgttagccattgacagtggtgtgggggtggaacctaaggctgtgtgggttgtttgaggaaattctgagatcccattaagcgtgtttcttgtccctgtttcctatagttcataggagctagaggatagctagttggttgtgtttggtgataggtatggtctgttctggcgtgtcaggaatttaggaatagaaggatgattaactgggttttccaatgatggatggatcatcggtttgagggtgtattttcatttatctgcctcttttttctctctgaattctagttcgtccctctctatattctggtgtagtgcttatttaatgttggctggtttaagaacctgaaatgaacatgggaattcaatcaagcatttacaaacttcttttccttggt

SEQ ID NO: 453316 - DNA, 489 bp, Sorghum bicolor
taccgtccgaattcccgagttcaaaagaatggaacaggtgaacatttgcccccgcctaggccaaaacgaaaggctgcccatccatatccacacaaagcctcaaaaaaagcccttcaaggtgtcttaccacaacaagcttcacatataatggagcaaggctgtggtacacctatggatactgctactgttgctacagactcgagtgcaaatgatgcttttcctgttcaacatttcagtccgaggcatacacaaggtgcaacatataataactctagtagcataggtagccaatctggaacttggccaacttctgaaggcacagaacaagacatcaggcatccagcactgagtgccatgccagactttgctcgtgtatacaacttcctgggaagcatatttgatccagagacaaatggtcatttgcaacagttgaaggaaatggatcctattgatgctgaaacggtactgttgctgatgaaaacctgtcaa

SEQ ID NO: 453317 - DNA, 911 bp, Sorghum bicolor
gctcgagggcgaggacgcgcacgcagccaccggccaggcgactacggctcccggcggccaggttcgggctctgctcccggggaccgggggcccgcgcggggaagcggcaggcgcgtgctgtcttgacccgctccgcacccctcccggcggcggcggcggcgggcgtggtgctcctttgcctttgcggcaggtgcctgcttgtctgtgattctcctcctgcgtcctcggcgccatggaggccggctactgcaaccgcaagaagaccgacggcatctgcgagggcgtctgcgacagcgagcttggttcaaagtcagtcctgagcatgtcaaggttgaagtgtgcactgcgaggatttgatctgagggttctcttgattctgctgattggtgtgccaattctgatctttgccatatatgtgcatggccagaaggtgacttacttcctccgaccaatctgggaaaagcccccgaagcccttcacaatacgccctcactactatcatgaaaatgtctcgatggccaacctctgcaagttgcatggatggaaagtcagggagactccacgccgtgtcttcgatgctgtgctcttcagcaatgagcttgacatccttgatatccgttggcacgagcttagcccatatgtgtcagaatttgtgctgcttgaatccaattcaaccttcactggcataaagaaggaccttcacttcaaggaaaaccgcccacggtttgactttgctgaatcacggctgacctatggtatgataggcggaaggtttgtgaagggagaaaacccatttgttgaggaatcatatcaaagggttgctctcgaccagctcattaagattgcaggcatccaagatgacgacctgttgatcatgtccgatgttgatgagatcccaagtggtcatacca

SEQ ID NO: 453318 - DNA, 714 bp, Sorghum bicolor
  unsure (1)..(714): unsure at all n locations
cgtccgacaaaattacatactctagaactgtccaacagcttatgaaggagcaaccagatggaactaagtttcctcctgctttagatgcaataaaagatctaaaaatgaaagacatggatcttgttgaaagctaccatgcataccacagactactgcaaaaaatgtctgaaaacaagtgccatggttgtataaaactaaaggagcatatatcgttgatgaaggaggaaaagatgtacaaggatgaggtgagtaaattgaaattccaaatgtcagatgaggcacttaaacagatgccggagtttcaaggcagaattgagttgctaaagataatcgagtacattgattctgatctagttgtgcaacttaagggtcgagtagcatgtgaaatgaactctggtgaggagttaatatcaacagaatgtctgtttgaaaatcaattggatgacctagaacctgaagaagctgtggctattatgtctgcattcgtcttccaacagcggaatgcttcagagccatctcttactccaaaactggctgaagccaaaaagaggctttatgatacagcaatcgaattaggaaagctccaagcagacttacaggtgcccgtggaccctgaggagtatgcacgtgataatctcaagtttggccctggntgagttgtctacgagtgggcaaaggggacaccttttttagacatatgtgagctgactgatg

SEQ ID NO: 453319 - DNA, 550 bp, Sorghum bicolor
cgtccgaacacacactgccgtttccgaatggccacggccgtcctccgccgcccactcctcgccgcgctactcccggccggcgccggggagtccgggccctcccggctccgtctccggagacgcatgtccccgcctcctgcgcgcgcggtgtcttccgactcccccaagcccgtcgcatccacttcctctcccgctggcggcgacagccccgaggaggagccgccggtcctgccgctcctccaggagctcgcggattgcttggttcttccgcccaagttcctcgctcagctcccgcgcgaccttcgtcttgacctcaatgatgccgcttttgatctctccaatgggccagttctcgatgagtgtggccaagaagtgggtgatctgctcctgaacctggcgaaaggcatgggagttggctgatacgtcagcatcgaatagcatcgccaagcagctgccatcgatggagccctacttgacgcacagcgccaaaccaagcattggcaagcggctgggtcagctggaaggagggtcagcaatgggcagatggtca

SEQ ID NO: 453320 - DNA, 609 bp, Sorghum bicolor
cgtccgctccctcctcctccccctccccctcccctggccttcgtctccgcctcccgtcttcctccagaattcgattcccttcccacaagaacccagcccgcaccatgacgagctcgtcctctccttcccgaaaggcgctgagcaagatcgcttgcaatcggctgcagaaggagctcgcggagtggcagctcaacccccccgccgggttcaagcacaaggtctccgataatcttcaaaggtgggttattgaggttaccggagcggcgggcactctttacgccggcgagacctaccagttgcaggttgactgtcctgagcattaccctatggaggcacctcaggtcatttttctcaatccagcgccaatgcatccacacatttacagcaatgggcacatctgcttagatattttgtatgactcgtggtcaccagcgatgaccgtgagctctgtctgcatcagtatcctgtctatgttgtccagttcgccagcaaagcaacgcccagcggacaatgaccgctatgttaggaactgccgcaacgggaggtctcgaggagactagatggggtcatgcaccaggtagagtcgggatgctgcagctctacggtttt

SEQ ID NO: 453321 - DNA, 390 bp, Sorghum bicolor
cgtccggacctgttgtcttctaaggtcgtctcaagtgaagttggcaaaccatgcctgccgtctcggccgccgcctgctgcgccgccgcggcgccggctaccgaggtcgccgaggacctcttcggcttcctgcgcgtgctcagcgacggcaccgtgctccggtcgccggcaggcccggtgttctgcccgaccaccttccccggcagccacccgtcggtgcagtggaaggaggccgtctacgacaaggccaagaacctccgcgtgcgcatgtacaagccgacgaccaccgcgtccgccgtcgtcgggaagaagcttcccgtgctcgtccacttccacggtggtggcttctgcctggggtcgtgcacgtgggcgaacgttcacgagttctgcc

SEQ ID NO: 453322 - DNA, 467 bp, Sorghum bicolor
  unsure (1)..(467): unsure at all n locations
cgtccgcagaatagttcactcaccagctgtcttaagaacttcagctcaacagagactttgaatgctgaggacaagttcttctgtgacaaatgctgcagtttacaggaagcacaaaaaaggatgaagataaaaaaaccaccaaacatcctagtaattcatctcaaacggttcaagtatattgagcagcttcagcgctacaaaaaaactatcataccgagtggttttcccactggagcttaaacttcttaacacaggtgataattcggacttggaatactcccttttcgctggggtaggtcatggtggaagtgggccaaatcatggccactatatcagtttggttaagagccacaatcattggttattctttgatgacgagaacgttgagatgactgatgagtncatggtacaggcattctttggctcaccgcgagaagtcaagggtaacactgataatggctacatac

SEQ ID NO: 453323 - DNA, 762 bp, Sorghum bicolor
cgtccggcggcgctcatttgctgggaaaataaaatgccacttttgaggacagcgctgtatggtaaaggtattgagatatactgtgcccccactgctgactccaggcctgtttggcaagcctccatgacacacattgctttggaggggggatgctttgtcttgtcagcaaaccaattctgccgcagaaaggactaccctcccccaccggagtatgagtttgctggtttaggtgaagagccatctgcagacactgttgtttgccctggaggcagcgttatcatttctccatctggagaagtcttagcacgtcccaactatgagggagaggcactgattacagccgaccttgacctgggagagattgttcgagccaagtttgatttcgacgtggtgggccactattctcgacctgaagtccttagcttggtagtgaatgaccagccacatctccctgtgtctttcacgtctgccggtgagaagactccagctgccaagagtgacagcgatgctaagtcttactgattgagtgtggccatgaaactatgttgtaccgaagccttggtgaaggtcgctcagctcctctggtttgctgtttgtgtgtcgtggatgggagttgggaattgtagcttttgaactctaaaagttctctttaatgaggcggaaaaaatagtagatgcagttatgttgcttgtaaagtcttgtattcggtgaataactctgccagaactatgaatcctattactatcgttgtagtttcgaata

SEQ ID NO: 453324 - DNA, 616 bp, Sorghum bicolor
cgtccgcgccgcctccgcctcgggcggccgtgacgagcccggggagctagccgaggacgaggcgcagaggaagagggagcgggaggcggagctgaatcgccgactgaaggaggccgaggagatggaggagttggagcgcaccgccgagcagctgcagagccaggccgccgccgaggcccccgaggagtcggaggaggagaagcgtgagcgtgtacgccgcgagctccagaaggtggcgaaggagcaggcggaaaggagggagacggcgaagcaaatgtttgaattggggcaaagggcctacgggaaaggaatgtatggacgctcaattgaattcttggaggctgcactcactatcatacgtccctcctctctcctcggtggcgagatccaaatttggcttgcaatggcatatgaagccaataggaggcacaaggattgcattgcattgtacaaagagttggagagtacccaccctatgatcaacatcagacggcaggcagctgaacttagatacattttagaggcacccaagttgagatatcaaacgacgaggtggtcacaataccacaaattgggagcagcttggattggtatgctggaacatggagcgacaaaa

SEQ ID NO: 453325 - DNA, 647 bp, Sorghum bicolor
  unsure (1)..(647): unsure at all n locations
cgtccgggacgcccgtcgagccgttgtggatggcggaggcctgggcgctcaacttgttgcgaccttcctcgctgtgtacgccaactggggcttcgccaggatcaagggtatcggctggggctgggctggtgtcgtctggctctacaggatcgtgttctacttccctctggacctgatcaagttcttcatccgctttgtgctcagcggcagggcatgggacaaccttgtcgagaacaagaccgccttcaccaccaagaaggattacggacgggaagagagggaggcgcaatgggccaccgcgcagaggacgctgcacggtctccagccgccggaggctgccaccaacactctgttcaacgacaagagcagctaccgcgagctgtcggagatcgctgagcacgccaagagacgagctgagatcgcgaggctgagggagctcaacaccctcaagggccacgtggagtcggtggtgaagctcaaggggctggacatcgacaccatccagcagaactacacggtgtgagagccgcctgctgcgatcgatgtcgacgaaaaaaacctttggcgcccgaccccgccttattgcgancgagtcatctctgattattacagacaaaaaaattttccggtgatgaattgaaaacaaa

SEQ ID NO: 453326 - DNA, 515 bp, Sorghum bicolor
cgtccgatattcgcccccctgtctcctcgccgccgccgcctcctccgtctcgcgccgttgcacgtcgtcgatgactccagcaccgatctcccggaggagaggtctcggacggataagatggtcgacggcatggacttcggggagctctgcgacgacttcgaatgcataagtagcccctacgtggagtccacggcgaggcagatcgcgcgggacatcctcgagctccgcgacgacaaccgcgcattcaactgctacgctgtctccgtcaagtacaaggacccactcaggacatttgttgggcgtgagaagtacaagaggccattatggatcaccaaggcattggaaaagcctgtagtgacagtccaagaaatgtcaatgcaatcgacaagcaatctgaccattaaatgggcattcagagggaagcctaagaatccgttctttgcgaccatgggaggggatgtcattgtccgtgttgtatcacagttcgtcttgaaccaaataagtggacaagtact

SEQ ID NO: 453327 - DNA, 486 bp, Sorghum bicolor
cgtccggcctttcctcgccctcgcccctctgcatttaccactttgcccttcgtcggcggcgacgaccacccgccgccgcgtccggcgaaacaaccggctgtaggtccaaagtagtacctcatggcggccatatcgtcgcttcccttcgcggcgctgcggggagcctccgagtggaggccgtcgtcgacggcggcggccgtttccggcgccgtcgtgcttagcgcgaggtctcgccggggctcgcgctcggtggtgcgctgcgttgccacggcgggtgatgtcccacctactgtggcagaaacaaagctgaacttccttaagtcatacaaacgcccaatcccgagcatttacagtacagtcttacaagacactttggtgcagcaacacctgatgagatacaaaagaacctatcagtatgatcctgtgtttggtcttggcttcgtcactgtctatgatcagctcatgggagggtaccccaccaatgag

SEQ ID NO: 453328 - DNA, 925 bp, Sorghum bicolor
cgtccggccttgagtatggtagaacaagctgcaaaaccacttgctcgtcctgttagagtatgggttcttgatgctacgcctggcaaagttcgtgcagggggagatggtgaagatcaccctgctgaacttattgagtttctcagaagaatgcctgagcaggtttcttcaaaacaggaggttgtcgatgctcttgttaaaggacaattttctgtggatgttgcacggtgggtggccacaaatctgcgtcgaaccagtccattgggtcagcgatcatcttcaagcttctcatggacttttgacctaaatggcatctctgagatgtacaagtcctatgaggatactaacttatggaggattgtagagaatgtaccaaggggtgttcatattaattttttaaaagctgaacgaagtttgcatagatgggctcttgaagacctccaaagaattcatactgcggaggaattagctgcagatgagggttggagagttgaaatgcatgtgcttgaagatgctggacactgggttcatgcagaccaacccagatggtctctttagaattctgtcgtcaaccttccgaatcgaaactactataagaggaatgcaagactgaggatatccaatatgaggggaggcacgtccgaatcgattctactataagaggaatacaagaggatcaaaccttaattgatccagtgacaatctgaggggaggcactgacattaccagaagatgtgtatattacaagcagagagggtggagccatcatgtttctgaatgataggcgtctttgttcatttgttcattctttttttttaaaaaaaaacaaagaagagtaaaatgcatacttagtacatataaacttggcaaatgggtgcacttagatacattatctctctaattgctcgactcagttcaagaacttgtc

SEQ ID NO: 453329 - DNA, 347 bp, Sorghum bicolor
  unsure (1)..(347): unsure at all n locations
cgtccgctgaaatgttggccatcaaagaagaattttcaacattgtgctcattgggaagtgtatctatgttactgtaattcacatagtacctatgtaacagttgcacatcgccgtatggataaagatttgtacaaggcagttgatcagataggtatatgtagccagggacaaatatgtattagtacttttcctggtataagaaactggtgcagtacttggaatccgtactaagtgtcaacactggctatattactaagtgtggtatggggaaacaataccaagtgtcaataacagtacgcatgatcgtttcttccgaatgaataaatataaanaaatanaaaatgggg

SEQ ID NO: 453330 - DNA, 673 bp, Sorghum bicolor
gagtaaatctgaatttattaataaaacattataatagatataagatagagatatttgtcccatatatatatgtctcgttgataggcacatgatatgatatccatggcagcaatataagtggccttattaattagcatcaagcacatgcaatttctgtttttatttgggagggaagcatatggagctctgggtctatagtatgatgtattgtcggatagagtagacggcttaattaattagcaggcggccttggcggtgatcatggtcatggagtcgtcgtggttgggcatgtggtagcgattggtgaaccacatggtgtcggcggtgaccttgttgccgtcgtggttgcggtaccatgcgtagtaggcgtgcgtgcggttcttgatgtccagcacggcgtgtccgaagctgtactcccggaacgccgagtatgccggctgcggccaggtgagctcgtcggcgagccccgccacacggccgactccaacagcacgctggcgcactacgagtcccaccagggcgacgccgtgctgttcgtcggcgacctgtcgtacgccgacaagcacccgctgcacgacaacaaccggtgggacacgtggggccgcttcgccgagcgcaacgtcgcgtaccagccgtgggtgtggacgaccgtcaaccacgaggtggactatgc

SEQ ID NO: 453331 - DNA, 460 bp, Sorghum bicolor
ggcacgaggctggacccattctcctctctctctcctcttcctcctcctctctccatttgtcccaaacaaaatctctccttttctttagtttccccaacctgctcctgtttatcgaattcctaaatccaatcccctcgtcaagctcgctctttgctgcgggaggccgaggccgaagaggtcgtccgggatgggatcacgaaagaggtggctccccgtggccctcctgctcttggccgcctctgccctctggccgccggtcgcagcagcagccgcagccggcggcggcggcggagaggccgaacacgccgttcagcagcatagcgagcgcatctcagggagtgctggtgatgtgttagaggataatcctgtggggaggttgaaggtcttcatttatgacttaccaaggaagtacaacaagaagatggttactaaagatccaccgtgccttattcacattttt

SEQ ID NO: 453332 - DNA, 716 bp, Sorghum bicolor
  unsure (1)..(716): unsure at all n locations
cgtccgatcttttgcagcaccggcagcgctcgattcctgcaatccgccgctccgaatggactcagggtacaacccccggacggtggaggaggtgttccgggacttcaagggccgccgcgccgggataatccgcgcgctcaccactgatgcggaggatttcttcaagcaatgcgacccggaaaaagaaaatttgtgcctgtatgggtttcctaatgagagctgggaagtgaatttgcctgctgaagaggttccacctgagctcccagaaccagcattaggcataaactttgcaagagatggaatgcagggaaaagagtggttgtccatgggtgctgcacacagtgatgcatggttactttctgttgcattttactttggcgctcgatttggtttcaatagaaatgacaggaagcgcctctatagtttgattgatgatcttcccatggcttttgaaattgttagtgggaagagtgaaaccaaggcaccagcaccagcgccaccaacaccaaacagtagtaaccatagcaatatcaaatcgaagtctaacaacaaaaagaaaccatcggagcctaaggtgaagcagacaaagccgcgtgcccctgcagaggaaggcccgggcggtgaggaggaagatggcagtgcaagcgagggcgagcacggngagacgctgtgcggcgcgtgcaaggaaagctacggccccgatgagttttggatct

SEQ ID NO: 453333 - DNA, 504 bp, Sorghum bicolor
cgtccgattatacatattatcacaaacttcagtaataatcgtgagtagttgataggtacattgtgcaagattagtagggcgcagacccgatattacaataggttttggcagtgtcgaactactatagtacatgagagcggcagacatgcttgtaaggatggttattttttgctggtcttcaggctggatttttgctggccttcaggttggacgcgacgatgatcaggaattcatgctgcggttgaattcacattcacattcatgttcgcttgagttgtgtaccggtgacaatcgctcgatgtcttgttgttgaagaaaatagattgacgcatgaccaatatgggcgatgccatgcaagatatccgagcagggtgccaacaagcagcaacaccatatggtccatccaaaatcgtgaatcctatgaagatattgagcagcaggaagaaatcgacagctggcagcctggcactgtacactgactattgaactaagcaagcttaggtt

SEQ ID NO: 453334 - DNA, 614 bp, Sorghum bicolor
cgtccgatggcgtacagttcaaaggcgatggctacagcaactgtgaacctgctggaccaggaaaatgtttgataaaccatgggggatgttggcacgaaactcgtaatggaaaaacattctctgcttgccaggaatctggagatgggaaatgccggtgcccagctggtttccgaggggatggtgttaaacagtgtgaagacattgatgagtgcaaggagagaaaagcttgtcagtgttctgaatgcaactgcagagatacatggggtggctatgactgcacttgcagtggtgaccttttgtacatcagagagcatgacacctgcataagcaagacaacagttcaggctaaagcggcatgggctgcagtgtggggtatcttgatagttgttgctggtgtggcagtgggaagttatgttgtatacaaatacagactaaggtcatacatggactctgagattagagctatcatggcacagtatatgccactagacaatctaggagacgtcccaaatcatacacatgacgaagatcgttcataagtgtgcagatcattacatggtaggcccatatggcctaaactgacaccaaggccgatcgacatgaggtatacaaat

SEQ ID NO: 453335 - DNA, 1029 bp, Sorghum bicolor
acgcgtccgcccactgcgtccggccattcacagatcacgcgcgacgtgaccggccgggagcgcacggcgagctagaactagaatggccaccacagccggcgccggaggcgccgggaagctgaagctgctgggcgcgtggccgagccccttcgtgaaccgcgtgcgcgtggcgctgcacctcaagggcctcgagtacgagaacgtggaggaggacctcaccaacaagagcgaccagctcctcgcctccaaccccgtccacaagaaggtgcccgtgctcctccacggcgacacgcccgtctccgagtcactcgtcatcgtggagtacctcgacgacgccttccccggcgccggccaagccctcctccccgccgacccctatgaacgcgccgtcgctcgcttctgggccgcctacgtcgatggcaagttgcacggcatgatggtgaaggcgatcctgggggcaacggaggacgagagggcggcggcgacagcggacgcgttggcagctatggaaacgctggagggtgcgttcgccgagtgctccggcgggaaagagttcttcgccggcgacgagcccgggtacctggacgtcgtgctggggggcttcatcggctggttgcgcgcctgggacaaggtgggcggcgtcaagctcctggacggcggccggaggaccccgcgcctcgccgcgtgggcggagcggttcgccgcgctcgacgtggccagggacgtcatcccggaccccgaccacatcgccgagttcgccaaggtgctgcaggcacgctccgcggcagcagccgccgccggcaactgagctcgatcacaagtgaatgctgctctgccttcctgagaagtcatggtttgtttggctggcgaggataaaacatggtttgttcactgaaatagctcgttggcttgccatctgttttagcaaaagtatgcatgcttgttatttattcataataattgatcgatgaacattggctcctgtgtcgattcgttcaagaaaaaaagcagataattcattgttcgggt

SEQ ID NO: 453336 - DNA, 452 bp, Sorghum bicolor
cgtccgcttgggtttggttcagccaaaatgatcaggcgaatagttggaatcgctcacgtcgaggatctcgagtcaattaaggatgccagcaagagagcagagtgcgagcgtgctgccctcagttgtgcaaaggagatcctcaagggaagacgccaattcgagaccatcgagcaagtcattgagcatattcaatcgtttgaccaggactgagaaggcggcagtctatttttgcgcttaaggagacatactttcgtcaattaacccacacatacctgagtatcggtgaatcgtctgttttgaagcaccggttgtttgtgttttctgtattgagattatatgatgaaaaggtgcccatttgtggtctgatagtttggactgtgtacactaccagagtaagatcttattctgccataggccccttggttcttgaatatgaaatgtacgagattttt

SEQ ID NO: 453337 - DNA, 1254 bp, Sorghum bicolor
  unsure (1)..(1254): unsure at all n locations
cgtccgcgcgctcaccgaggcctacgacaagctgaggctgtcggcgtacgacgcgctcggtgcgtggaggaagacggtgcgcgacacgatcggtgggctcaaggcgtcggtcgacgccggtaaggagcaggccgcaggaggggtcacggacgcttccggcgcgttgcaggcgaaggtggccggagctgtggctgtggctgttgatgttcttaggaaagcgattgtttcagcagaggattcactgggcagtgcagccacattcgttgtgtattcttatgggtctgccaaggagtctctaccaccaaatgttagagatttgttgagctcgtctgaggagaaagctggtctagttttgagaccaattggaaatgctctgcaacaggtatatgtaattgttgaaggtgttgaaaagaatgttggtttcgatccaagcgatccgattgttcaattggcagttgtgcttggaggttcagtgacaatagggacaacgtactggctcttcatatacggtggctattctggagacttgtcacctgaatcagcgttggagttattgaaaaatgatggcaaagccgtacttgttgatgttcggcctgagaatttgagggaaaaagatggtgttcctgatctacgccttggggctaggtctaaatatgcaagtgtagattcacctgagatcaaaggcccagttaagagtatgcttaaaggtggaagagaggttgatgacgccttactggcagctgtcattcgaaacttgaaattggtgaagggtgattcaaaggtcatagttatggattataatggagctcgatcaaaagccattgctaggttactgaagaagctcggtgtgcagagaccttaccttgttaaaggtggtttccaagcatggtcaaagaaccttcgtgtcaaagaactgaaacctgagactgcattaacgtcaataaatgaggatgttgaggaaatcctcgaacaaataaagcccaccccaactcttgtgtttggatctcttctgggcctctcagcactttcctatgctttacttgaatgggagatgactttgcaatacatcgctgttctaagcgtagggctgactatctacttgcgattctctacatacgaacgttctgaggacttggagcaagacctanagctgttgctgtctccagtaagagtaggcgcagacgccgtatcatgggcagctaagaagatagagccaaacaaggtgggcctggcgacttncccctccacgacggg

SEQ ID NO: 453338 - DNA, 664 bp, Sorghum bicolor
cgtccggccttgttcaacccaagaggacagcatgtggaaggtattcctgagctggcagatgaggagtcaagggtggaagctcaggaggaggtgcctgaagatgaggagatgcaagatccacctccaccacagtctgctaatgcaaggatgggatggactactgagctgtgagctctggatgcctgaagcagatcctaaggctgtcttccatgagaatgtggtgttgaccttcgaacaccattacccggagtgcgcacgccacactggagatataactgcactgatgcacaaacactcctctgaggagatcactttcaggtgtgcaagagctgagcacgcaagacactcggatgccactacaggggattcgatacggggaatcaaaacacatctctcgaatcaggcgggacacgatgaaggaaagcatggcagatgcagcttaccaggccttgatctttgaccgtggtagatgctcttgaggatgtccagtacaaggcaacatatcactatactcgcatagcaccagagaagatgacttgggccatagaagttgcagatgctatacaaccaaagcttcaagcacacgtggagtagacttatgagctgaccgcaaggtgatagagtaggagaatgactacaccgcagaggagctgttggagaagag

SEQ ID NO: 453339 - DNA, 727 bp, Sorghum bicolor
cgtccgtaattttgttgcggatcttgaagacgaaagtgatagtgagctttcacttccagagcgccaagaacgaagatggtaaattcaactgggagaagatattaagttctgataaattattctttgtcaacaaaagtagcgatggttttttacctgttaataatgtccatccaaagctcaatgggaagcaaaacaaaactgttaaggagttgggcatcaaaatcaatggtcattctacaattcgaggtgatagcttcaatgagttaatgcaccctggcaattccacctgcaaggaagttttccctggtttggatcgctggaaatctggtaaaatttctagttggcatagtacggaaggcaactctgtccaatggcttcgcatagcctgtgttaaccgaaaagggatgatggcggaggttacatcagctcttacagcttgtggaattaccatatgttcttgtgtggcagaagtcaataaaaggaggggaatgggtgtgatgctgttccattttgagggaagctatgagaatgtggtcagtgcatgttccagggttgacatgattcttggtggtcttgggtggtctgtgggatgtagctggtgtccattgggtggccttgagtgctagtgagtatcaagagacgttataccacaatagtccaccactatcttcttcaagatggagataattttggaagcaccaaaacttggttggtgactgctgagcta

SEQ ID NO: 453340 - DNA, 403 bp, Sorghum bicolor
cgtccggcaacttgtgccagtccaagaccaccagcgctcgaaccaaactgctgtgtactatatgcgaggccaaagtcatccagaacacagacaggcccaaatgttccaagctgctgctcaatctgtgcagacacacactcggaaaactcagccacagacagtagttgaggtaccccaggtaaccagtcaggcaccagagttttaccctcagccgcagcatcaatggcaacatcaaactggtcagcaggttcagtcccaagcaaggcaaccacaaccacaggttgtacagcagcagcagtacagcaatatccagcaaggtccagcacagatgattcagctgcaaacgtcctctccacatgctcatagcacaccacaggtcacagtagtatatcctccatatggg

SEQ ID NO: 453341 - DNA, 464 bp, Sorghum bicolor
cgtccgcttgaatacatgcttgagcatcagcattggaaagtttcagcattttatgagctccaaatcgacatggacatgcaaatggtctcatctgtgttcaagttaccctctggaagtcctattgttcctccctcacatatatttgcttctgcagttggccactacatgaactcaactgagttgcatccagcaaagtcaactgcttgcgaagtacaggctgctgtgacagaaggggttcttgattcaatgagaaaaaaagttgcaaatttctcaactgcttttggagtacaggctgctgagggagaagaggccgatgagtcgatgggaaaagtatctgcaaagaagtgctatgacctacctgagggaaagtatccgccagaatttattgcaacgcatatgagattgaagcagcatcatgagaaggaggagtgtaggaagaagtattttttgcagcgggatgagag

SEQ ID NO: 453342 - DNA, 461 bp, Sorghum bicolor
  unsure (1)..(461): unsure at all n locations
cgtccgcggctatccaggaattgctacggcatttttggtcatcgtatccaataacaagtgcagtcctttataacaaggttcaaagagttaaagagagctgtgacacagatatatcaaaagttgcagcttataaaggaatcggcgcagcctgatgtaagacatgaaatatctcggctcgtaaagcccatgactcaggccttggatgccgccttcaaccacgatctggaacagcagcagaagtcatccaagaccgggaacaggcacaacgggttttgactgagcccaggagattggtttgaccaacacatcgaagcgagacgggcgtgctgtgccctgatatacaagagctgccgtagaattcttgaggcttctaccgattttgatctctctctttttttccccctctcttattaatagctgcaggaagagcctggtatttgcagncccaggatattgatcta

SEQ ID NO: 453343 - DNA, 550 bp, Sorghum bicolor
cgtccgtggaatatggtcaaaggtgaggaagacactattcgggcattcagacgccacctattcaggttacacttgctacacagggattgcagattttgtgccacctgatatcgatacagttgggtaccgagtatttcttggtcacaaacaatacttcgtctcttcagatgtcggtgctggtaaaatgcaatggtatgcttttcacaatgaagaggctggtggcactgaccctgaaaatggcaaaaagaaaagattgcttgagatatttgacggatggtgtgataatgtcgttgatttgataaatgcaactgatgaagaagcggttcttcgccgggatatatacgaccgcccacctactattaattgggggaaaggtcgtgtcaccttgcttggtgattctgtccatgctatgcagccaaatctgggtcaaggtggctgcatggctattgaggatggttaccagctggctgtagagctagagaatgcctggcaagagagtgtcaagactgatacttctaatgacatagttgccttcttgaggcgttattat

SEQ ID NO: 453344 - DNA, 838 bp, Sorghum bicolor
gcgacgaagcgcacactcacggtcagagaaaaagctccgacgacagctgagatggcacaagccatggcgtcgatgaccggcctctcgcagggcgtcctgcccagcaggcgcgccgccaacagggccagggcggccgccgtcgtcgtcagggcgtccgccgagggcgaggccgccgcggcgcagccgggccgccgcgccgtgctcgggctggtggccaccggcgtcgtcggcggcgccttgtcgcaggcggtgcacgccgcgaccgtcaattccatcaagatcggagccccgccgccgccctccggtggactccccgggactgaaaactctgaccaggcgagggacttcggcctccccttgaaggatcgattctacctgcagccgctgccaccggcggaggcggcggcgagggtgaagacgtcggcgcaggacatcatcaacctgaagccgctcatcgacaagaaggcgtggccgtacgtccagaacgacctccgcctcagggcctcctacctgcgctatgacctcaagaccgtcatcgcttcaaagcccaaggaggagaagaagagcctcaaggagctcaccggcaagctcttcagcaccatcgacgatcttgaccatgccgcgaagatcaagagcaccccagaggccgagaaatactttgcagcaaccaaagatgtgctcggcgatgttctcgccaagataggctagacggaagggctaataatggccatttaatttcgaacttgtgtttgttcatatggagccggcaatgtaccattttctgttgatattgtatcagaaagcacttaactatgatgctatcctgagttcttgagac

SEQ ID NO: 453345 - DNA, 539 bp, Sorghum bicolor
cgtccgcggacgcgtgggcaaaaatttttggtttacaagaatggggtaatggtggttcaactggcacagatggttcacagcagaaccttgaagaaacgagtttttttcgtgctgatggaggctattgggatacaccatatggtcactttttccttgaatggtattcaggaatgcttctcctccatggagagaggttatgcatgacagctgatgcaatcttctctggtaccggtgtgaccatatcagggaaggttgctggcatacatcggcactattatacttgttcacatccagctgaactgacagctggctactataatacactattaagagatggctatcttcctatagctcaaatgtttgccaaatacaaagctgcattgtgctgcggttgtttcgacctgagggacgtagaaagaacaaattctgagagcagtccagaaggtactctccggcaccttgcaggtgctgctaaaatgtgcaatattccactttatgcgggaaaattctgtgacaaggcttggtgatgcatcactgac

SEQ ID NO: 453346 - DNA, 571 bp, Sorghum bicolor
cgtccgtggtaccgcatttgacttgcgtgatcctaggatacttgcagtggcacaaaaccacatcatggaagctgaatatgatgattattctgccgcagatgccagcactgctgccttctgccgttctgctgctctgggtttaatggctctcttatcgttgagacacgcactgactctaactgatgaagatgacgacgacggctgcagcgatgttttcactttttctactgcgtgctgctggtttcctccttcctttctacattatggcttgggcaattagtatcttgcagcgccgcagacagagacaggaggcagctgctcttgctgcaacggaggtggcattcatcctgcagtcggggcaaggaaggggagtgcacttcaccatcgcaccggactcccctgccacaccacagcatgaaccaccgcaaccataattatatctatctatgttgtggctggctgcggcagcaggccacagatcgcttatttcgataggttcctcaaggatttctttatggctgccgtctagtgcagaaccagataatttctgcccaagtttcatgtcatcaat

SEQ ID NO: 453347 - DNA, 469 bp, Sorghum bicolor
cgtccgcccacgcgtccgcggacgcgtggggcgccagcgagggtgggctgtgggctgtggcagccatggcgtccactgtaacagccgccaacagccatggaagcgtcctgcgtacccataccgccccctcctccaggcagctcgccggttggagcagcaggcgcacgcttgccatgcctgcacaccacgcgccgtcacccagagctcgggtcgtcgccgtccgagccgccggcacccagcggccgacctggttgcccggactggacccgcctcctcacctcgacggcacactaccaggtgacttcggcttcgatcccttgggcctcggcgaggatccggcaagcttgaagtggtacgttcaggccgagctcgtgcactgccggttcgctatggcaggggtcgccggcatccttttcactgacttgctccgtgtatcagggaacagcgacctccccgtgtggtttgaagc

SEQ ID NO: 453348 - DNA, 439 bp, Sorghum bicolor
  unsure (1)..(439): unsure at all n locations
cgtccgctttaactcgggctaactatcttgcttcgccacctcttgttgttgcttatgcacttgctggaactgttgatattgattntgagaaagagcccattggacttggaaaggatggcaaggaagtctacttcagggatatatggccctcgacggaagaaattgcacaggttgtccaatccagtgtgctgcctgacatgttcaacggcacctatgaggctagcacaaaaggcaacccaatgtggaacccagttaactgtcccagaagcgtcactctattcatgggattccaacatccacttacatccatgaacccccgtactttaaggacatgaccatgttcccacccggtccctctgcagtgaaagatgcatactgcttgctgaacttcggngacagcattactacagatcacattttaacctgcaggaagcataca

SEQ ID NO: 453349 - DNA, 864 bp, Sorghum bicolor
cgcggaggaaatcgatcaggaagagatcgagaagatggggaggcagcagctttgcatggtgttcctgatggcgttcctcgtcgtctctaccatggacgtggtccacgtggccgcagggagagggctaggggaggggagctatggagccttgatccccggcggcacgccttccgtgcctcgtggccagccatacactggccgaacatgcacaaaaatctacgcgtgtaaaccgcctgctgctgctgacgctgacgccgccggcggagcgccatgacgacgatcagcatgcttggcctgtttagattggggctgaaaattttttgggtgtcacatcgaatgtgtgggaaggatgtcgggagggatttttagaaacctaataaaaacctaatttccatagcccgtcaggagacttacaagacaaatttattaagcataattaatctgtcattagcatatgtgggttactgtagcacttaaggctaatcatggagtaactaggcttaaaagattcgtctcgcgattctcaaccaaactgtgtaattagtttatttctttaatctacatttaatgttccatgcacgtgtccaaagattcgatgggatggatgaaaaatttttgggtggggaactaaacagggcctaagaataataatttcctttgaacaacaaggcgcctctagtctaggctctacataatcactagtagtaatcaggttagtatgagtctatataataatttaataagatccaaactgtaattgggcggaggcgctgtgtgtgcatgtacccgtgatggagatgtaagtgggatgttcgtaagcctggagtcttgagatgaaggcaaattattgaactattctgtgcc

SEQ ID NO: 453350 - DNA, 365 bp, Sorghum bicolor
cgtgcggagaggacgggaggcacaacaatggaggctgccactgcaagcaacaagatcgtcaatagagacgaaatcacggacgccttcaccgactctgcgcagatccccgagagggacatccgaaccgatgaggtccgtgccggcgtcgtcgtcggtgaaagacgacgactgctactgcgagctgcctgtcgtcgacatggccaggcttcttgatccggagctatctgcgtcggagacgctcaagcttggctctgcatgtcgaaactggggcttctttcagcttacaaaccatggagttgaccaaggagtgatacagcatatgaaagacaacactgccgacttcttcggcttgcactggacagcaa

SEQ ID NO: 453351 - DNA, 625 bp, Sorghum bicolor
cgtccgatttgactttgcacagtactatgcttttgacattactatatttgccctcacaatgatctactccctgtttgctccgctcgtggttcctgtgggcgcgacatactttggctaccgttatcttgtggacaagtacaacttcttgttcgtttacagagttagagggtttcctgctggcaatgatgggaagctgatggacagagtgctgtgcatcatgcaattctgtgtgatcttcttccttgctgcaatgctgctcttctttgctgttcagggtgattcaatgaagctacaggctatatgtactcttgggatgttagggttctataagttgcttccttctagaagtgatcgcttccagccatctttgttagaagggatgcagacagtgaataagctttgtagatggtcccacggatgatgaagttttttcacaacctgacctggattggaatctgtatcaatccctgaagatcaatacaacacttttgttcattacaacatctttcatgactggaaatacctgatcgcgaccctggtgtatcaaagtcattcattcttcttgtacagctatgtagattaacttttatctccttagatgtaattggtttgtcggatatgacaa

SEQ ID NO: 453352 - DNA, 454 bp, Sorghum bicolor
agctaagtccttttttttcactctttactgtaaatagtatacctctagtccaaagaatcacatgttgttacatcggaagcagcatccgttttccatccttggaaagaacttcatttaccctcccatacatgataattcttatgccaccttacattcttgattgaattgacgtgtaccaagtcacaccaatcagaggtcccgggaggctgggcaggtcttcaggcacagcccccctgagaaaaatgaagaatacgctacgttctatagtccgtgtcaatcagatttttgtgcagaggtgttcgttttcgagtcagtttggtagtagactacatctccggtgtcgctaacatagtggtcttgctttaagctttgtgctagcaccccaaataggtgccacggaagagcacccgacttctttggttctttgtagtacttgcaagaaccggttttgctg

SEQ ID NO: 453353 - DNA, 641 bp, Sorghum bicolor
cgtccgaatcggaacccttatacttcaggattgtgcagtgggcttgctgtttgctctccttcctgttcttggaggtgctagtggcattttcggaggagtgatgtcaatggcgaaactgttgcttgtgttatccatatttgtagctgttacgtatatgatgacatggtcaattgttcctcgattcttaaaactgatgattcagttatcttcacagacaaatgaactctaccaactggcctccggttgcattttgcttgcttctagcctggcgcagtgactattgtggattgagtcttgaattggggtcattccttgctggcgttatgatatcaaccacagattttgctcatcatactatggagcaggtcgaacccattcgcaatctatttgcagcgctcttccttgcaagcattggaatgctcatacatgttaagttcttgtggaatcatgttgacatattacttgcagctgttatactggttataatagtaaagagcattgctgtaactattgttgtaaaggcatttggatacagcatcagaacagcttttgttgttggctgtcttagctccataggagagttgcgtttgtgctttgagccggcctccatctcatttgtggggggaaatgtttactatact

SEQ ID NO: 453354 - DNA, 839 bp, Sorghum bicolor
cgtccgcggacgcgtgggttcaactttgagaagtcggtcgttgagatctctctggacagcatcaagcgtgtgaaggaccaggttgcaagtgagagaccaaccagaagtgctccactttcgacgtggtcactgccataatcttcaaatgtcgcgccttggcagtcgactttgcacccgatgctgaggttcgcctgggctttgcagccagcactcgccacctgctgagcaatgcactgccctcggtcgaaggctactatgggaactgtgtgtacccaggtggcctcaccaagaccagccaggaggtgaaggaggcttcacttgtggagatcgtgaccgcgatcagggaagccaaggaagctctgtcgtcgaggttccttgactggttgagcggcggtgccaaggagaaccactacaacgtatcgctagactatggcaccctcgtcgtgactgactggagtcatgtgggcttcaacgaggttgactatgggttcggtgagccaagctatgtgttcaccctgaacgacgatgtgaacattgttccctccgttgtgtacctgaagccgcccaagccaaagcagggcatcaggctggtgctgcagtgcgtggaagggcagcactctgccgtgttcagcgaggagttgcagaagcatgcatagagtgagtgtattccattctacagtgggaatttgttgtattttgttgtgtcaaattgctgctcccggaatttgcttgcaataagacagggttggtcatgtttatactttgtactattatcagcacgttacattatacatgtattgagcattgacagtaatgaaagaataatagtgttccatttg

SEQ ID NO: 453355 - DNA, 805 bp, Sorghum bicolor
cgtccggtagtacgcactgggacaccagtgagcaacacaacagccagtgcgcgcgccatggcctccctcgccgccgccgtctccgtgcagcccgtggccgtgaagggcctctccggcagctccatctccggcaggaagctcgccgtcgccagcaggccgtcgtcgtcggcccgcgccgcctgccgctccacccgcagggccgccgtcgtggccaagtacggcgacaagagcgtctacttcgacctcgaggacatcggcaacaccaccgggcagtgggacctctacggctccgacgctccctcgccctacaacccgctccagagcaagttcttcgagacgttcgcggctccgttcaccaagagaggcctgctgctgaagttcctgctgctgggcgggggctccctgctggcctacgtcagcgcgtcggcgtcgccggacctcctgccgatcaagaagggaccgcagcagccgccgcagccgggcccgcgcggcaagatctaagctcatcgaccagctccggcctccatttgcgttgcatggtctagtagtagcttgctttgtactgctagctcccggtcggtcgcactctcaactcgccatggatcatcatccctgcctgttacgctgttcataactttggtatatttgtgatgctgatattgtgtactcttttggcacacaattaaaagagccttttagccgtgtgtcattataaaagaccacacaattccttctactatatactactgaaaaataaaaaaatgggggtgcatggccttgtattaaaaaaaaaaaaaagggcggc

SEQ ID NO: 453356 - DNA, 367 bp, Sorghum bicolor
cgtgcggaaggaccacaaggaggccgaggaggccgtcggcgagaagaagcaccacttcttcggctgatttcatttctcccggcccatcaatcgtgtacgtcccgtcgacgacgtacgtgtgcgtgcacgtacggccacatgtatgtatatgtatgttggacacgtatatgtatctacgcgtgcgtgtgagagtgagatcgagagactgagaggtgggcccgctcgacgtacatgtatatgcgttctggatgaataagcggttacggtcggtaacctgtcgtgtatacgtgtgtgtatatgtacctgcgtatgattgtgatatatgatgactgaaaaatgcgtacagctctgattttgcttaaaaaga

SEQ ID NO: 453357 - DNA, 622 bp, Sorghum bicolor
cgtccgcccacgcgtccggcaaaaagattgtaacagagacccaaggagttccagggatgagaactgaggatgttcttgccaaggctgcagatgagagcacggtgccctggttcttccactgttttagttgctcactttgatggccaggtccttcatgcatcaaatattggagattccggattccttgtgataaggaacggagaggtccataaaaaatcaaaaccgatgacctatggtttcaatttcccgttgcaaattgaaaagggcgatgacccttttaaaatcgtacagaactacgccatcgatctacaagaaggtgatgtcattgtaacagcatcagatggtctttttgacaacgtctatgaagaagaagtagcaggcattgtctccaaatcattagaagctgatctcaggcccacggaaatggctgatttattggttgcaagagcaaaggaagtggggcggtgtgggtttggaagaagcccgttttcagactctgctctggcggctgggtacctgggttactccgggggcaagctggatgatgtaacttgttgtgtatctattgttcggaaatctgaggtttaaactataaacaaactcacaaagttgagcgcaactc

SEQ ID NO: 453358 - DNA, 655 bp, Sorghum bicolor
cgtccgcagagccatccatcagagcagcacctgaacgaccatggcctcgccgctgctcaagccacactctcacgtcgccgccgccgccgccctgcactccgcgaggagatcagccgaccgccacggccgctgccccgcgacagtacacctcgccggcaggttccatgaccacgggcgcagcaggtccggccgttctaagagatccggttcagcgaaggtgagcgccttgccgtcgctggaggtggtgccgctgatggtgacgatggtggagcacgtggacatgtcgcgggactacgtcgtgaccaagtccatctggcatctcagcgacgcagcgctcaagagcgtctataccttctacgccatgttcacggtctggggcgtctgcttcttcgcgtccatgaaggatcccttctacgacagtgacacgtacaggagcgcgggtggagatggaaccgtgcactggtactaccacaggcatgaggacctggaggcgtctgcgacggaggagctgctgcgggaggagctgctcgaggagattgagcagacggttgggggcctcagggaggctggaggaagtagtcacaaagtgattatacgggtgttactagtcagttctctatctgatcttcgttagcaaataagttcagacttcttt

SEQ ID NO: 453359 - DNA, 1005 bp, Sorghum bicolor
cgtccggccaacgtgaatatgcacccgcttcctagtcatctttcttgacgcttatttttttcgcaggccgataaggacttgcaggcttggattgctagagacgatgaacaaggtcagaagatgtggagagtcaaccaacgtatagtgaagcttatagctgagcttatgaggaaccatgacagccctgaagctttggtgatacttgctagtgcctctgaccttctacttcgtgctactgatggaatgcttgttgatggggaagcttgtactttgccacaacttgagcttctcgaagtaactgctcgagcagtgcatcttattattgaatggggagattcaggtttatcggttgctgatggcctttgtaatctgctaaagtgccgtctatcaaccaccatccgctgcctttctcacccaagtgcacacgtccgcgcgctcagcatgtccgtcctccgtgacatcctgaacaacggatccatgaaccccagcaagatcatccaaggggaacagcagcggaatggcatccagaacccgtcctaccggtgcctggccgcaggcatcatcaactggcaagctgacgttgagaggtgcatagaatgggaagcccacagccgccgtgccaccgggctgacgctcgccttcctcagtgcggcggcgaaggagctcggctgccctctcccctgctgacaaggccagtcccggatctgacatcggaggccacttgacggccagtgctggcagcagctgcatgcagggccggcgagtaggacgctaatctctcgatcaaggacgactcgccggtttgttcacacgatatgtgattaagctgatattagatggggtttccaaagcatatacgggacttgctcccattgtgcgatttcatttcaacctgacgtcagatgttgtacaagcttatttaactgcttgagttgtacgtaacttgtatacttgtaacttcgtttaatatggttactgaagaagcaaaacatatcttttcctttt

SEQ ID NO: 453360 - DNA, 485 bp, Sorghum bicolor
  unsure (1)..(485): unsure at all n locations
cgtccggaacaaaatgttgtgttgatatctgttcctagtgttcttagtaaggacctggcaccaccaggaaaacacattcttcatgcatatactccagggacggaacctttcagtttgtgggagggattggacaggaaaagtgcagaatatcgaagattgaaggaagaacgttctgaggtgatgtggaaagctgtggagcttgctcttggcccaaaatttagccgtgaaagatgcgacgtgaaattggtcgggacaccactaacgcacaagagatttctcagaaggaataggggaacctatggtccagccataaaagctggagaagccactntccctgggcaagcaacaccaatcctccagctcttctgctgcggtgactcgactnttccagggattggagtgccggcggtcgcggccagcggtgcaatcgtcgcgaacacgctggttccggtgtcgcagcattcagaagcttcttgatgctgttg

SEQ ID NO: 453361 - DNA, 835 bp, Sorghum bicolor
cgtccgcgcctcacccccacaaaaccaaatcgcttaccgtttcggttcgcatagcagagctgctcgtgcaacaggccaaacaaccccagagccgggggagcgtcggtggctgctaccgctaggcagagacagggggcagattgagagaggtgggcagatggcgacgccgtcgtcgtcgctttgctccagcttcgcctccctgcggaccgcctccgatcggccaccgtcgtggcctcacctcctccacgcccaggaagggattccaagcgagggcatcagctcgtgttgacaagttctcaaagagtgacatcattgtgtccccttcgattctatctgcaaactttgccaagctcggcgatcaggtaaaagctgtggaggtggcaggatgcgactggattcatgttgatgtcatggacgggcgctttgtgccaaatatcacaattggacctttggttgttgatgctctgcgtccagtgactgatcttccgttggatgtacatctgatgattgtggaaccggagcagcgtgtccctgattttatcaaggcaggtgctgatattgttagtgtccactgcgaacaaacatctactatccatttgcaccgaacagtcaatcagattaaaagtctaggagcaaaggcaggagttgttttgaatccagcgactccactcgctgcaatcgattacgttcttgatgttgttgacctggtgctgattatgtctgtgaatcctgggtttggtggccagagctttatcgagagtcaagtaaagaaaattgcagaattgagaaggttatgtgcagagaagggagtgaacccctggattgaggttgatgg

SEQ ID NO: 453362 - DNA, 711 bp, Sorghum bicolor
ttcgcgtccgagcctgactcgccgccacgcgtttgccttgcccccacccgaatccttccctgccttctctctcgccgcgtcgcgttgccggctccgtctcctcctcgggtatatagccgccagcaggggggaaggggatcggccaaaccagcagccgtcgtcgtcgctctgcccacaggaacatcgccgccggaggatcggctacttctgctgtttctgggcgcgccggagctcgcgtcgtcgttcggtaacttggggagaccatgggaggagggaaggacaagcatgatgagagcgacaaggggctcttctcaaacatgatgcacggcgttgccggtggccatgggtaccctcaccagggataccctccgcagggctacccaccaccacaaggagcatacccaacctccccccggggcgtatcctcctcctccaccaggggcatacccacctccacctggggcatacccaccacaacatgggtaccctcagccaggtggctacccaccgcaaggtggatatcctcctgcaggctacccaggctcatctcaccagggttatgggagcagccatggcgggagccacatggggatggggacagttctagctggaggtgctgccgccgccgcagctgcttatggagcacacaagctttctcatggccatagcggacacggtggacatggtgtctttggaggaggctatggtcat

SEQ ID NO: 453363 - DNA, 445 bp, Sorghum bicolor
attcccggtcgaccacgcgtccgaagcagcatcagcttcgcattactgctgcagatataccacctatagaaaagcgtggtgccgcgtccggctaaagctcgcactgatcgtgagaacactgtaacagacattccgcacgggagcatcgaagctaccaaagccaacactgccggtgaggcacctgcagcatttttggaaaagcagtgtgctaaagctgctgatgttattaccattgaagacgacgatgacgacaacaacaatcatccttgttataaaggacaacaaacagcagtagttgcttctcaagaagaaacagcagtagttgttgacctagaagctgatgatgccgggggtaaccatcccgtgcaacatgagacatatagcagaggcatagacacgcgaaggtgaatggagaagtcccgcagcgcatttggtattaccttga

SEQ ID NO: 453364 - DNA, 536 bp, Sorghum bicolor
taccgcccagtgaagaagactcgcctgaggcttgtgcagagtttgagagagtactcgccaagcaagcaaagcaagcaaccacccagctgtctgcgaagtgattgaatcagactacacaggaaggtgttctctatttgatactcctcgcagagtgatttcctctgatcgctccaagaaaaccaaaaaccgtaactggcatactgaggcatcgaagtgcccttctgaagaatgaaattttgtggaggctctgcccaggctatcttttggggttgagcgagcagaacgatcgcgggttctcctcgatgctcgtgcaccctaggtaacccctgtaaattggtttgctgacgctaggttgcaaaggccttctttgaactgctgcactgtacatgattcttggctgttgccttgtgtaattatgtttttggttagcttatacgtgtccagtggaggcaatgcaagtcgcatgcgcaatagtacagtaggagtacatgataaactgtactatcatcaagatggatttgaatgtttgcttcgtg

SEQ ID NO: 453365 - DNA, 852 bp, Sorghum bicolor
cgtccgctcctgaaacggttgatgcaatgaagaggactatttctggcatgttgggtctgcttccatctgatcagttccgagtcgttgatgaagcgctttggaaccccttcttcaagttattggtatcttcaattatgactgggtatactctgcgaaatgctgaatacaggctctcttttgaaagaaatctagaactgtctgaagaagttgcagaatgccctaaaagtgatgttgctgaagatgatcatcataacatcaatttgggtagacctgtcactatgtttagattatcagaagaagacatgcctcgggaccctggaaaaactgatgaagaatcatcatatagaaatatgggagaagagctcggcgacttaacaccacaggcagaagagtacattattcagatgcaatctcgtttggatgccatgaaaatggagttacatgatctcaggagaaagaattctgccctacagatgcaacagtttgttggggaggaaaaaaatgacttgctggactatttgaggtcactaacaccagagaaggttgctgaactatcagagtctacatgtcccggcgtgcaagaagcaattcattctgtggttcatggtctgcttgctactctttctcccaagatacactcgaaggcccctccactgctagatggcacttctggtggtgtcctaaaccttgggggtgaggatgatgaccgtgcagaacttgttgagaatgcttccctcccatttcagcccctaatatcggccccccgtgattaccttgcacgtttgctgttctggtgcatgctgctgggtcactacattcggggtctggaataccggttagagcttactcagc

SEQ ID NO: 453366 - DNA, 396 bp, Sorghum bicolor
cgtccgcaagatatggcggcaaggtcatccatgctcgtcgttgttgccatcaccttcctcctcgccgctcctccgccggccttcgcggcacgaagaagcttccgtgccaccatgacccgcaccgaaccggccatcaacttgacgcgggccgcgcacaagtcccaccaacggctgtccatgctcgccgcccggcttgacgacgctgcctcagggagcgcgcagaccccgctccagctcgacagcggcggcggcgcatacgacatgacgttctccatcggcacgccaccgcaggagctgtcggccctcgccgacaccggcagcgacctcatctgggccaagtgcggcgcgtgcacgcggtgcgttcctcagggctccccttcctactacccaaacaag

SEQ ID NO: 453367 - DNA, 354 bp, Sorghum bicolor
  unsure (1)..(354): unsure at all n locations
cgtccgcccacgcgtccgcactgcacggcgtacgtgtggttgccaccaccatgcacacggtggctatccagcggcggcgccatggcgccgtcacgctgctgctggtcgccgccgccgtagtgctcctctcggcggcggcccagacagcggcggcgcaccgcccgcgcggctgcggggtgacgagcaagtacgtgcggaagcaccaggcgtcggaggacatgccgctggacgcggacgtgttcgcggtgccgccgggccggaacgcgccgcagcaggtgcacatcgggctggcggaccagacgggcacctncatgttcgtgtcctgggtcaccgtggaggccgagggcaacagca

SEQ ID NO: 453368 - DNA, 272 bp, Sorghum bicolor
cgtccgctataccaactgtgcagcctctaactaaatatgaaatgccatcactagttgatggttctgctgttactttggctgtacaaggtctggaaagtgattctgtccgtgacatgggcctagaaattgacgctgttcatgagaagggtgttgaggttagctcaactccctgatcctgttgggttgaattagaatctgcaccagccaaaagaggtgcagtattatcttcaaagaacgagttgcattctacacttggcctcttttgtatcaga

SEQ ID NO: 453369 - DNA, 967 bp, Sorghum bicolor
cgtccggaagccatccgcagtccgcccccgggacgcgagcgccgtcagggagccgaaagtacgcttcggttccgccggcacgggaggggattcgagctgggtcttgggtagcgcctctcacgatgccgccagcccccaagtccggcgacgccctcttcgccagcgtggatcgcgtcaatgccgagctgttcacgctcacgtacggcgccatcgtgcggcagctgctcacggatctggaggaggtcgaggaggtcaacaagcagctcgatcagatgggttacaacattggaactcgattggttgatgagttcttagcaaagtcaaatgtatcaaggtgtgttgacttcaaggagactgccgatgttattgcaaagcttggcttcaaaatgttcttgggtgtgactgccactgtgaccaattgggatgcggagggtacaagttgcagccttgtcctggaagacaaccctcttgttgattttgttgagctccctgacacttgccaaggccttcagtattgcaatttgttaagtggagttattaggggggcattagaaatggtgtcaatgaagacagaggtgacatgggtccgtgacatgcttcgtggggatgatgcctatgagatgcgggtgaaacttatcaagcaagtcccggaggaatacccctacaaggatgatgactagttctatttcagtggaagatttcggcacaggacgaggcctgtttgcttgtttggatttttcacatcattgtcgtcgacggattctagttctgctataacctgatgtcatacgaggaagctgtggattatattttacacttcccgggggtattgcttatgtattgtagaaatcatacatgatcttccatgagttgcgctgaggctttgaattagtctgcagaattcagagcattagcaatgcaaattgtgttccctaaaaataaagtattttcaatctctttagcggtc

SEQ ID NO: 453370 - DNA, 723 bp, Sorghum bicolor
cgtccgatccaccgcctcctcctgccgctgctgctcactcccgacgcacgaagctcccattcccaagagcaatccatggcgtccaccaccctctcctccgccttcaccctcctctctcgcccctccacctccccttcccccaccgcctcgctcccgaggtcctccctcgccgtgccccactgccgccggggacgccgcgccgtcgccgccgcgtgcaccgccaccgagtcccccaagatcttggagcttggggacgccatcgccgggctcactctcgaggaggcccgcagccttgttgaccacctccaggagcggctcggcgtcaccgctgcggccttcgcaccggccgccgtcgtcgcggcgcctgccggcgcgggggccgccgaggaggaggcccccgtcgagaagacggagttcgacgtagttattgaggaggttcccagcagcgcgcgtatcgccactatcaaggtggtgcgcgcgctcaccagcctggcgctcaaggaggccaaggaccttatcgagggcctccccaagaagcttaaggaggccgtcagcaaggacgaggccgaggacgccaagaaacagctcgaggaggtcggcgccaagatatctatcgtgtgacactaggtataataggactcctttttttcttcaatttcttttctttgcatcccaaatcttttgtatccccacccattgtcgttcataaggaattgctgtttc

SEQ ID NO: 453371 - DNA, 517 bp, Sorghum bicolor
cgtccgccagatctccccattcacacacagtctcgcgcgcgcacagatacctccaaggccaagcgcaagcaaagcaaagcacccaccccaacccatggcgcctctcctcctccttttcctcctcggcagcatctgcgccctcttctccctcaccacctcctcgcgcgccagcggtaagaagagcgacggcaaggagcccagatgcagggacggctgcgtgccggaggagacgacgcagcagcagcaggaggaggaggaagggaagaagaagcaggcgcgggccgacccggagaaggacctgggcatcgtcttctccacgttcgaccacgacggcgacggcttcatcacggcggtcgagctggaggagtcgctgcgccgcctcggcatcgccgtgtccgccgacgaggccgcggccatggtcgcgcgcgtcgacgccaacagcgacgggctcatcgacatccacgagttccgcgagctctacgactccatacccaagaagaggaagcaccagcaccct

SEQ ID NO: 453372 - DNA, 576 bp, Sorghum bicolor
cgtccgaagcaagcaaacaaacaaaagacgaagcagcaacaaagatcacacgagctccgcttactcgacgacccactgcactcgcctccgatcgatcgatccggcgatcacactagtcgagtcgactcgactcgagcgagcgcgcgcccccgatcaatcaatggcggccaaggtggcgtcgccgctcgcgttccgccgcgacgtgcgtggcccgctcggccggcctcatccgagcggcggctgccggagcgggaccgggatgccgggggtgctgtactggagcagcggcgccggcggcagcagggtgctcgcggcgcgggcgcgcgggcggaacaggttcggcggcggatcagggcggactgccaaggacgaggcggcggacgaggacgaggaggaggtcgcggacgtggtgatcgtcgacgctggggacgaggaggagttcgcctgctacgagctgtccgggttcaggggcctggctcttgatctctcctacaggcctgtgaacgacgtgtgctagaagcgcgccatctgtctcgagttcattcgggaggccgatgtgttggagtactatgatca

SEQ ID NO: 453373 - DNA, 817 bp, Sorghum bicolor
cgtccgcggttggcagggcagtggacttgacgaggttagatgggtatgatgatcttcaccgcaagttggaggagatgtttgatatccatggagagctttctgccaacctcaggaaatggagggtggtttacacagatgatgaggatgacatgatgctggtcggggacgatccatggaatgaattttgcaggatggtaaaaaggatatatatttactcttacgaggaggccaaatctttgactcccaaagcgaagctgccagtcattggtgacaccatcaagccagacccaaacaaattgtcaccggaatctgacatgccacagagtgacacaaacagcaatgctcccgttgctgctgataaggattgatgaatgctaacttggccctatcttttcttctcctcttggatgttggtcatgggaggcaatgcccatgctccttgagactgctaagagttattctgttttgttgcttcgcgggcccaaaggacgctgccctgcatcatctgcctcggtctggaacggcttggaccagcgtggtcctttacccgcaaggaatggctgtgagggaatgcattaccattccgtgtgtggcacccgtgttttgtttgccgtgtttggtaggaggcatggcttattgccgggtactttggttttggagactgccactgactgctgccgtctcactggccgtgccgtcggcaggccgcccctctcacctctagtaaataggacttatgtagacaactattttggtagtagcagtagtagtatatgtatatcatcggtcatgttgcttgctacatatactcactcct

SEQ ID NO: 453374 - DNA, 671 bp, Sorghum bicolor
cgtccgccttatctggttaatcagaatgctatgggagttagctcaagaccaccaggtgttctaaagactgagagcactgactcgctgagtcgtagttatggctatattggtggtagtaccagtgtggactctgtcttgctgtcttctcagtccaaaaatgcacagtatggtttactgcagagtcaaaatgatgttagcggcagctggtcgccttcacaagattttgatagttttggaaattctcttgggcaaggccaccctggttccacttcatctaacttccagagttctgcccttggcaagctacctgaccaaggacgagggaggaatcatgggtttgtcgggaaaggcacttgcattccaagccgctttgcagtggatgaggttgaatctccaactaacaacttgagccacagcattggaaacagtggagacatagtgaaccccgacatattcggatttagtggacagatgtgaaactttcttgaatttgtaagtagggttgatcattgagcactggaaacaaatttagtggtttgatgaatggttgctcatattttcctttcttcctttttttcttctgtaattggtttataaagggaataatctttgtgacagcatgtggaatcttgctttatagaagtttgttcagtttaaaggacgtaaaattt

SEQ ID NO: 453375 - DNA, 395 bp, Sorghum bicolor
cgtccgctggaagggcacacaccgaggccctcaagcagtacgaggtgctggatgccaaggtcctgagcaaaatccccaggggtccggtcaaatccaagaagcagaactaggatcaaccgcagattatgaatgctggtgtccttttgcgtgaatggcttttcgtttgcatggtatatacatgtaatctcgatcggtctgatggcttcagcttggttcttttgctactactttgtgctgattgtgggtgcatgctgctccctatctccgtgatgccagttgatgttactctagtcctatgtatgtcagtgtgtacgtgatacagatgttgggatggtacgtttacggtttatgctactgctgtagcttgtaaaattcagtggtaaataaataaaccc

SEQ ID NO: 453376 - DNA, 380 bp, Sorghum bicolor
gcgtccggtcgctcgcagcaagccccgccccaacaaattcccccacgctgaccaggtaccctgggagctcggcctgaagctgcgccagaatgggaggaaattattatagataccaccatggatatgactcaggttctactagatgctcaatcttgagatgctaaccttcgaacagtagcagaaagcaacctcacacagttccaggagcagaagctctaagctacgctcaactgtctatgtgactcagatttgatgtactactttctcaacttgggtagcagcaacaataaggtctgaagctttctctacaagtacctgcacatgattttgctgtgatcttagtggcaaattgttgtgatcttcactgaacagaaatgaca

SEQ ID NO: 453377 - DNA, 846 bp, Sorghum bicolor
ggcacgaggcgatcatcttccacagcgctcgctcgccgccgaagctacctctctgtctcgctgtgaagatccggaaagccggccggcgaccgattgacgtgtcgaagtagctagcagccgattgcctctggtagaacgtatagagagagagaagcgagggagacgatggccgccgcgactgtgaccgtcgaggaggtgaggaaggcgcagcgcgcgacgggcccggccaccgtgctggcgatcgggacggcgacgccggccaactgcgtgcaccaggcggactacccggactactacttccggatcacaaagagcgagcacatgaccgaactcaaggagaagttcaagaggatgtgcgacaagtcgcagatccggaagcggtacatgcacctgacggaggagtatctggcggagaaccccaacatgtgcgcgtacatggcgccgtcgctggacgcccgccaggacatcgtggtggtggaggtccccaagctaggcaaggccgcggcgcagaaggcgatcaaggagtgggggcagccgaaatccaagatcactcacctcgtcttctgcaccacctccggcgtcgacatgccgggcgccgactaccagctcaccaagatgctgggcctgcggccctcggtcaaccgcctgatgatgtaccagcaggggtgcttcgcgggcggcacggtgctgcgcgtggccaaggacctcgccgagaacaaccgtggggcgcgcgttctggtggtgtgctccgagatcaccgccgtcacgttccgtggaccctccgagtcccacctcgactccatggttggccaagcgctgttcggcgacggtgctgcggcggttatt

SEQ ID NO: 453378 - DNA, 522 bp, Sorghum bicolor
cgtccgcccacgcgtccgcacgtcgatcaagtcgctggaagctctggccttgatggcgctcgccgtgttcgccaaggccgccgtcgctgcaggcgatgcgtcgtcgtcctgccccaagctcaccctccacaacctctgtccatacccggtctggccgctcgtcaccgccaacgctgggtacccctccgtcaccggcaccgacgcccgcctcgacgggaacggcgagggcctggtgaccatggcgctgccgcaaggcgtgtggtcgggccgcgtggtggcgcgcacggggtgcgctgacgacgactgctctccgaagtgcgagaccggcgacgcgccgccggcgacggtggcgcaggtgagcgtgggtgggtacggcgggctggcggcgtacagcgtgagcctggtggacgggttcaacgtgcccaatggggtgacgccgcacaacttcgcggcggggggccagtgcccgacgctggggtgcgccgtggaccttacccaggaccaggagtgctgccccggcac

SEQ ID NO: 453379 - DNA, 731 bp, Sorghum bicolor
cgtccgggggacacccctttcgtccccatgggtgtctttggccacattgcccctgtgttgagcataggatcactatcaaagagatggatagtgcgctgggtggcgacttggttgggtagctgtatgtgataccaacaagattctgctaaacacaaagatcattgcatcgatcacaaacttccttaacatttcaactgatccagcaacttttattcagggagcacttccccgtattcttgagaacacaaaggaagattttttcaagaggatcattggtctgctagcggaaacatcagagatatgttacagagaaataaaggacatcaagtgcatcacttgccctcacaagccagaaggttccatgtttgtcatggtgaaattaaatttgtatcttctggaagggatccatgatgatattgatttttgctgcaagctggcaaaagaagagtccgtgattttgtgtccagggagtgttttgggaatggaaaactggatccgtatcactttcgccattgattcatcttctcttcttgatggtcttgagaggatcaaatctttctgccaaaggcataagaagaagaatttgcttaatggtcattaactgtatctgagttcaaaaattgttacccagttccatcgtttttcattgtatcatcaacaaatgtggaactttgaaatccttcagaaataataaatttaatgcttgcacatcagcatatgcaagtcagtgt

SEQ ID NO: 453380 - DNA, 768 bp, Sorghum bicolor
cgtccgggccttggagacgctgtcgagcagggccttgtaaaggctgttggagtctcaaactacagcgaaaaacgtgtccgggatgcctacgagcgcctcaagaagagggggattccactagcctcgaaccaagtgaattacagtctgatatacaggaacccagaggaaaacggggtgaaggcggcttgcgatgagcttggcgttactctgatcgcttattccccaatcgcccaaggtgctctgacaggaaaatacactccagagaatccccctaaaggtcctcgaggacggatatacacaccagagttcctgacaaagctccaaccacttatcaaccggatcaaggagatcggagaaagctacgggaggacttcaacccaggtggtgctgaactggctggtgtgccagggcaacgtggtgccgatccctggcgccaagaacgcggagcaagcccgggagttcgcaggcgcgcttgggtggagccttaccgccgacgaggtggaggagctccggtccatggcgcgccaggtgaagcccgtcatcggcttcccggtggagaagctgtgagcggtcggttcagctgggagttttggtcaccgccgctcatcagaaaacctcatggcagtgacaccaggccagtgtagtagtgtatagtaggactataggtagatggacaaagcgtaccacttccattgcaagactgcagacgatgtattctactgtactgtacgtaatgtaacagcgaaattcaacagcactagtgtagta

SEQ ID NO: 453381 - DNA, 437 bp, Sorghum bicolor
cgtccgccgcctcgcgcctcgcccgcccgctcgcttcctccgcatctcggtgcgctccgatccgaagagatggcggtgcctctgctgacgaagaagatcgtgaagaagcgggtcaagcagttcaagaggccccacctcgaccgctacaagtgccttaagccaagctggcgcaggccaaagggtattgactcccgtgtcaggaggaagttcaagggatgcaccttgatgcccaacattggttacggctctgacaaagtcaaccaggcactaccttcccaacaagttcaagaagtttgtggtgcacaatgtctcttgagctggagttgctcatgatgcacaacaggacctactgtgccgagatccgccacaacgtcttcaccaagaagcgcaaggagattgttgagcgcgcctcacaagttgacattggtggtaccaac

SEQ ID NO: 453382 - DNA, 690 bp, Sorghum bicolor
cgtccgcggatctgaggcagctgtgtgaggtcttgtggactgtaataaccaaggtcaaaatataggcaaggttttgagtgatctactgatcatctcttaattaaattggtggcctctatgtcaaagagacctggttttaatttgaacataattgaacagtcgccgtagcgttagcacggacaatatactagttatactcagtgtagtcaatgtatttaatctcttagcatggcaaaattagagtaccgtattattagaaaaaaacctatatcgcacttaattagagtgaccatttaggttttgcagctagcaccactctaataattcatattttccacttaattcggtaaccttttaacttgtatcacaaatctaaaatttgaacttacaacaacattgacaagcaacattttcttctactgaaataatttcttgccttgtcttagtaaagaatcaagaccttttcttagtaaagaattaagaccttttcttgagctatagctgaatattccttgctgctggctttttgcttgcttctggaacagtagggagaaattattaatgtgttgcctggcatgttgttcagtcagatagccacacctgtgaaaatagggtcttctgacattcatctattaactgtagaagaatgtcttcggggtgtgtatattttttttctaaaaacaggatgac

SEQ ID NO: 453383 - DNA, 554 bp, Sorghum bicolor
cgtccgctctttcagaagaagtgatgagcaaccgcattatgcacatatgcaatgaagaaggtctcaatcttgatgctcaggcactgtccacactgagtgccatttctcaaggtgatcttcgtcgtgctataacctatcttcagagtgcagctcgcttatttggatcttctatctcttccagtgacttgatcagtgtttcgggggttatccctgaagatgttgtcaagtcactgcttgcagcttgcagatctggtgaatttgacgtggcaaacaaggaagttagcaacattatagcagatggatatccagtctcacagctgatggcacagtttctagatgtcattgttggcgcggatgatattccagatgatcaaaaggcaaggatatgtaaaaagcttggggaaactgacaagtgcttggttgatggggcagatgagtatctacagctgttggatgtcgccagcgagactattcgtgctcttttcaacatgccacaaacgctggtcttctaagttcataaagaggaaaggtggttaccattgcgatccctggcg

SEQ ID NO: 453384 - DNA, 1036 bp, Sorghum bicolor
cgtccgacaaaatatatactactgtgaagcatagattgctgtcaacagagaattttcttagtggttaggtatttagattgaaaatatcaaaggggcctattaagaacttttaaaattgtaaaataaagattagggattggtttgggttgcgctatatctatcaaagagtatacaataatgatggatttggtgaatcaaatccacggtttaataacgaaccatgttaacttaccataacaacaactcaattcctatcgaattccttcctatctaattccttcctatcgaattcctatagtaaaattcctataggatagaacgtacacagggtgtacacattatatatgaatgaaacatattcattaacttaagcatactcctttttttatttaatgagttgatattaattgaatatctttttttttagatttttgcaaaggtttcatttacgcctaatccatatcgagtagaccctgtcgttgtgagaattcttaattcatgagttgtagggagggacttatgtcaccacaaacagaaactaaagcaagtgttggatttaaagctggtgttaaggattataaattgacttactacaccccggagtacgaaaccaaggatactgatatcttggcagcattccgagtaactcctcagctcggggttccgcctgaagaagcaggagctgcagtagctgcggaatcttctactggtacatggacaactgtttggactgatggacttaccagtcttgatcgttacaaaggacgatgctatcacatcgagcccgttcctggggacccagatcaatatatctgttatgtagcttatccattagacctatttgaagagggttctgttactaacatgtttacttccattgtgggtaacgtatttggtttcaaagccttacgcgctctacgtttggaggatctacgaattccccctgcttatgtaaaaacttttcaaggtgcgaatcaccgtgtccaagttgtaagggataagttgtaccaggtctgtcgtcctttattgggatgta

SEQ ID NO: 453385 - DNA, 482 bp, Sorghum bicolor
ggtcgacccacgcgtgcgaccaccacgcgccacaatgccccttcctcctctcctccccgccatggcttccaccttctcccccacttccgccgcgagggccctcctcccggcctccacctcccgcccactcttcctcgccgcagcttcctcaggtcgcattcaaccatccaggaaggggctggacttccgccgcggccggttcaccgtctgcaatgtcgccgcccccaccgccgccgagcaggaggcgacggcgtcgtcggccgcgaaggagagccagcggcccgtgtacccgttcgcggccatcgtggggcaggacgagatgaagctctgcctgctgctcaacgtcatcgaccccaagatcggcggcgtgatgatcatgggcgacaggggcacgggcaagttcaccaccgtgcgctccctcgtcgacctgctcccggacatacgcgtcgtcgtcggcgaccccttcaacttcgacccggacg

SEQ ID NO: 453386 - DNA, 476 bp, Sorghum bicolor
acgcgtccgggaaaatgcaggtatgttgtcaattcttccttttaaggatcgtatcttccaaaggtcataactttgtgtccaactgaaagcaacaaactgtcttatatatgataaatgctcagattggatacagagcagcagtgtagtagacatttatgagaactgtataatatccagttggaattcacaaaaatctaaaccatgagaagacagcaaaagctagtgtcttcagtttgtgtaggaaataggaaatagagttggcccttatgaaaaattttgccatcctctctggtcagggttactaatacctgtgcaactgaaggttggtactggtgctcgatctgagaagataaggacatacaattacaaggataacagagtgacagaccatcgattaaagatgaactatgaactgaccggcttccttttaggagacatcgaatcggctgttcagtcttgtgctacactggagcagc

SEQ ID NO: 453387 - DNA, 505 bp, Sorghum bicolor
ggcacgagggtccgcttcagtccgacgccgaacaaggggagggacaagtccgtgcggtgtgcgccatgtttaagaagttctcttcagaagatatatctggacagaatcaagttaaggcctctgtacaacgaaagattcggcaaagtatcgctgatgagtaccccagccttgaacctttgctagatgacttgctcccaaagaagtcacctatgattgttgttaaatgccaaaatcatctgaatcttgtagtggtgaataatgtccctctatttttcaacatccgtgatggtccttacatgccaaccctgcgtcttcttcatcagtatcctaatatcatgaaaaagttccaagtggatagaggcgctatcaaattcgttctatctggtgcaaacataatgtgtcctgggttgacatcacctggtggtgccttggatgatgaagttgaggaggaaaccccagtggctataatggctgaaggcaaacaacacgcactggcaattggtta

SEQ ID NO: 453388 - DNA, 623 bp, Sorghum bicolor
tcgaccacgcgtccgtcgacatccagtgatgaaagtctttcagcacccccttgtgttgtgacatttaatacaggagtgaaaatagtgtctgtagctgctggtggtcgtcatacattagcactatcagatttaggtcaggtgtggggttggggatatggaggagaagggcaactaggtctgggttctagaatccgaacagtttcttctccccatcctgtaccgtgcgttgaatcagcactatgcagcaaggatccgccatcagctatgaaaggtaacaaggctgctgaaggacatgtcagtaaagtcttgggaaattgcgtgagggccattgcttgtggaggtcgtcacagtgctgtagtaacagattcaggagctcttcttacatttggatgggggctgtatggacagtgtggacaagggaatacagatgatgttctaagtccgacgtgtgtatcatctatcctgggaatcaagatgcaagatgttgccgcaggtttgtggcacactgtatgtacatctgtagatggtgatgtgtattcgtttggaggaaaccagtttgggcagcttggcactggttctgatcaagctgagactgttccaaaattggtagatgctacaagcct

SEQ ID NO: 453389 - DNA, 708 bp, Sorghum bicolor
  unsure (1)..(708): unsure at all n locations
cgtccgccaattccacagggggccggggactggcggcggttgacggctgatagagttggcgcggagtgtgggtgatggcgtcggagccggtggcgcgggcggtggcggaggaggtggggcgatgggggagcatgaagcagacgggggtgaccctgaggtacatgatggagttcggctcccgccccaccccgcgcaacctgctgctctccgcgcagttcctgcacaaggagctccccatccgcttcgcgcgccgcgcgctcgagctcgagtcgctgcccttcggcctctccaacaagcccgccatcctcaaggtgcgggattggtacttggactcattccgcgacatcagatacttccctgaagtgaggagccggaacgacgagctcgctttcacacagatgatcaatatggtcaaaatgcggcacaataatgtggttccaacaatggctttgggagtgcagcagctgaagaaggaactgggccacgcaaggaaggttccctttgaattcgatgatcagatccacgagttccttgatcgtttctacatgtcaaggattggcatccgcatgctgatagggcagcatgtggctttgcatgatcctcaaccctctggtgtcataggcctcattaatacaagattatccccaatacaggtggctcaagctgcttgngaagatgcccgngctatttgcttaagggaatatggat

SEQ ID NO: 453390 - DNA, 553 bp, Sorghum bicolor
cgtccgacgagataaagattagagatgataaggaagttgaagcaaccataattaatgggaaagggactgaaactgggcacataattgtcacggctactggtggcaagaatggtcaaccaaaacagacagtgagctacatggctgagcgcattgtaggtcaaggttcttttgggattgtcttccaggctaagtgtttggagacgggtgagactgttgcgataaagaaggttcttcaggataagcgttacaagaaccgtgagctgcagaccatgcgccttcttgaccaccctaatagttgttgctttgaagcattgcttcttttcaacaactgagaaggatgagctttatctaaacttggtccttgagtatgtgccagagacagttcatcgagttgtgaagcatcacaacaagatgaaccaacgcatgccacttatttatgtgaagctgtatatgtaccagatatgtaaggcattggcttacattcatggtactatcggtgtctgccacagagatattaagccacaaaatcttctggtgaacccacacacccacc

SEQ ID NO: 453391 - DNA, 517 bp, Sorghum bicolor
  unsure (1)..(517): unsure at all n locations
cgcgtccgcaaggattttgatggtgaagttgagaatcttccaattgtatcaactagtgttgcatatggtgtgtacatggcagtttccagtaaccccagataccaggttttggctggagtgattgaacagcggatgctcgagccactactgcaccaacacaaactagtattgagtgcagcaagttttgcagttcggacagggaatacgtttttgggttctctactgtggatcgactatgccaggtgggtaggcgtacaataggctcaagcatacaggcacaaatacaattgctcagagcttcagcaatatgggttcttcatgatttgctattaccatgcttcctccaactggcaactactcgtttgcttcatgggagactcttaggacagatttgatatcattctttgaacnaatgcctgaggaaagcgtaatttgtcgaattattcccacaagcgaaggatcaaatttgttttgacagcttaagggtgtgttgtgtgttggattggactggttaaaa

SEQ ID NO: 453392 - DNA, 829 bp, Sorghum bicolor
ggcacgagggttgagttggagtagttgactagcttccatggcgtggtcgtcgggaggcgtggcggcgacgatggcggccgctctggtggcggcgctggttgcgttggcggggagagcaagcgcgtccccggcggagggcatccagccgctgtccaagatcgccgtccacaaggccaccgtcgaaattcagtcgtcggcgttcgtggaggcgaccccgtcgctgctcggcgagcagggagaagacacggagtgggtgacggtgaagtacggctggacagacccttccgacgacgactggatcggcgtcttctctccatctgaattcaactcgtcggctacgtgtcctaacccatggccagcagaagaaccctatctctgcacagcacccatcaagtatcaattcgccaactactctgaaaactacatcttctggggcaagggcagcatccggctgcagctcatcaaccagcgctccgacttctccttcgccctcttcaccggcggcctcgacaacccgaagctgatcgcggtgtcggagccgatcgccttcaagaaccccaaggcgccggtgttcccacgcctggcgcagggcaagtcccacgacgagatgaccgtgacgtggaccagcggctacgacatcagcgaggcctaccccgtcgtggagtggggcgcccttgttgtggcgccgccgccggcgccgctcgccccgccccagcagaccacgcgcgcgcccgccgggacgctcaccttcaaccaaggcagcatgtgcggcgagccggcgcgcaccgtcggctggagagaccccggcttcatccacaccgccttcctc

SEQ ID NO: 453393 - DNA, 351 bp, Sorghum bicolor
cgacggcaccgcccacgcgtgcgcaccgcaccacacgacaccacagcgagagcaaggctccccaagcaaccaccactccacagccaaccgcgagaacaagtcgcagccgagaactcgtctccacgtctcccagcgaagccaagcttgccgtgccatgtcttccatggagctgctccacgcctgtcatccccgagaagcagagcgaggagtctgatggcgcccgcggcggcgacgacgaccacgaccacgtgcagcagccccaccgccctgagcggcgacgaggttgcccacgtgctccaggggtgggccaagaagaagcgctcgcgcctgcagggatcggagggggagaac

SEQ ID NO: 453394 - DNA, 497 bp, Sorghum bicolor
cgtccgcccacgcgtccgcccacgcgtccgaaaaaaaagacaagtcaccaccatgtctggcatcatccacaagatcgaggagacgctccacatggggggcgaccacaagaaggacgacgagcacaagaaggaggagcacaagaaggccgaggagcaccacaagaaggacggggagcacaaggagggcatcgtggagaagatcaaggacaagatcaccggcgagcacggcgagaagtccggcgagcacaaggacaaggaccacaaggagaagaaggacaagaagaagaagaaggagaagaagcacggcgagggccacgaccatgacggccacagcagcagcagcagcgacagcgactgatctcccccctcgccgcctagctacgccgtgcgcttccatacgcagatgcaggtgatttgggctgggctctggccgaacaccatgcacatacttatacgcctagattattgctcttgaacaattaaaagttctttttttt

SEQ ID NO: 453395 - DNA, 704 bp, Sorghum bicolor
cgtccggtgggaattccaagttggaccgtccgtcggcatttcttcaggtgatcaggtctgggttgctcgctacattcttgagaggatcaccgagatcgccggtgtggtgttgacattcgacccaaagcccatccctggtgactggaacggtgccggcgcacacaccaactacagcaccaagtccatgaggaacgagggcgggtacgaggtgatcaaggccgccattgagaagctgaagttgcggcacaaggagcacatcgcggcctacggcgagggcaacgagcgccgcctcaccggcaggcacgagaccgccgacatcaacaccttcagctggggagtggcaaaccgtggcgcgtcagtgcgcgtgggccgggagacggagcagaacggcaagggctacttcgaggaccgccggccggcgtccaacatggacccatacgtggtgacctccatgatcgccgacaccaccatcctctggaagccctgaagcggaagctttcctccatccagctcgccgtctcgtgtcggtttgttccgcggcagtgtcccggccgttgcattgcagggtcccgtccagcgatttgcgcaacaattgttccttcccgttccgtttgcttatactactctactactgcaatttagctagaatttgggtcaggtcgtggtgtgccaaaacaaaacacataaaaactttgacgcttccc

SEQ ID NO: 453396 - DNA, 724 bp, Sorghum bicolor
cgtccggcatctcattctcctcaaaaagtttcaaaagagcaaaaaaggtatgtatcctctcaaaagagcataagtagaattagactttcaccattgttatcaccatcatcaccatacaccattcattcgccacacatgcacatcttgatttgactcattgacttgttcttctggatccatggtttgactatgcaataaatgtcttgtaagtatgtattacttatttcccacctatgagctccagatattaaagccttattagagtaggatgagagagaaggcaatgtcactatgcctcataccacaaataccacatatcttgagagaaggcatataccatcactgccttggtaaggatccaaaaataccacaaaagagagacctgagagaatcatacaaggaatctctgagttttatttgaaaatctgcaaaaaccccagagctaaagctgatcaagaataagagacatggcacttggctagactgttctatcttttaaccactcaagacagaagtgacggttacaagtcccatggtgaaggtaaagtaagtaagttttaagtcttgacagtttactctaactcagagatgaggtcttatttaaaagcatgtgtaccgtcaattttttaaatattgcaacaacttatgatccatagctcagtctatccttgctcagggacgagcaagaggtaagcttgggggagtttgttgacggtcccggacg

SEQ ID NO: 453397 - DNA, 573 bp, Sorghum bicolor
cgtccgctctgttcttgtggaacaaccttctccaggaaggacaagctttttgggcatgttgcccttttccaaggccacacacctgcgctccccatggaagatgtgaaggtatcagaagcatcagagctacctcaggacagtgagccaacgaatgaaatggcgaggagcatggtgtatagcttccccagtagctcgtctgatggtatatcgaacctcgacatgaaaatggctgatgatgtgcgtggttatttctcgccactgaactttgatccttgctttggtgcgcttgacgacttcactcgccctgggtttgacatctctgagaaccccttctccttcctgccttcaggatcttgcagttatgggcagcaaaacggagatagctaatgggtgccgccatcgatgatgacgacaatagcactgtcaacattttatgtatgttgttgcatgatgctaggttggttctacctctgttcgagagccattttaggttatgccttttatactttcctcaagtgtacttacatttgtggtcattaataatgataaaggacttctagcatttcttaaaaa

SEQ ID NO: 453398 - DNA, 575 bp, Sorghum bicolor
cgtccgaaatcaacaaaaattagaaaagaaatttggtcagtcttctgtctttgttacatccacactgctcgagaatggtggaaccttgaagagtgcaagtggtgcttctcttttgaaggaagctatacatgtcatcagttgcggctatgaagacaagacagactggggaaaagagattggctggatttatggatcagttacagaagatattcttactgggttcaagatgcactgccatggttggcggtcaatttactgcatacctaaacgggccgctttcaaaggttctgcacctctcaatctttccgatcgtcttcaccaggtgcttcggtgggctcttgggtctattgaaatcttcttcagcaaccactgccctctttggtttgggtattagtgtggataaagtgcctgggaaaggttttcatacattaactccatcgtatacccttggacatctatcccgctcttggcctattgcacattgcctgccatctgcttgctgacagggcaatttatcacgccagagcttaacaatgttgccagcccttggttcatgtcactttttatctgcattt

SEQ ID NO: 453399 - DNA, 685 bp, Sorghum bicolor
  unsure (1)..(685): unsure at all n locations
cgtccgagccatgcccgccgccgccgccgcccggagggccacctgctgctgttcctccgccacctccttgggcttcgccacgtcgcagctcgccggcctctccctgtgcgccggcgccgcaactccaaccgccgtcgccctcctccccaagaggcagcagctccagcccattgtcgcgcggcgggtgtgcccgttcacggacaagaagacgaaccgggccaacaaggtgtccttctccaaccacaagaccaagaagcagcagttcgtgaacctgcagtacaagaagctgtggtgggaggccggcaagcgcttcgtcaagctgcgcctctccaccaaggcgctcaagaccatcgagaagcacggcctcnacgccgttgcccgcaaggccggcatcgacctcaacaagaagtgatgagagcagccaaacataactagcggtgtgtctctagcttagcattcacattcacggggtcgtctcgactgtctgcctgcctgcctgcctgcctgcctcatgctgttatttcacaatcatattacagcattatatttcctttatttactttcctccccagtttgatgtgtgtaccataccaaccagtgtaggcagatcgaggttgcacatatatatgtttttttgggtctcgtactcgtggtgggagctaaggtttcctcctctgaatcaaaa

SEQ ID NO: 453400 - DNA, 507 bp, Sorghum bicolor
cgtccgctccctctcaccaaaacagttatagcttcatctgttcttgttgggctgacaactactttgatactcttctgcagccatttccatcagattgatggagaccttgctgttggaaagatgtctccactggtaagaattggcactaaagcaggatcgcggatagtgtcaattgggattctcacgctttacattctcttggctgcatttggcttatgcagatctctcccaccagcttgcattgtcctctgtgcccttactctgcccatgggcaaattggttgtggactatgtgctgaaaaatcacgaggacaacacaaagatattcatggcgaagtactactgcgtgcgcttgcacgcgctgtttgggatggcactagcttcgggtttgttcttggcccgtaatggtatattatcctgacagtgacagatagataggcagcattgaaatccaggagagaatccagagcagtagagcaacatgcagtttcagaatcagtgaacgcac

SEQ ID NO: 453401 - DNA, 995 bp, Sorghum bicolor
cgtccgccaggtccttgcaacgcttagtggccactgtggtcctgtgtggcgtgttgcttgggcccatccaaagtatggtgctatccttgcatcctgcagttatgatggtcgtgtcattatttggaaggaggatgcacggggcaattggtctcaagcccatgtgttcagtgaccaaaaggcatctgtcaactccattgcttgggctccatatgaggttggcctgtgccttgcatgtgcatcttctggtggcagaatatccatcttgacgatgcgagccgacgggggttgggatacttcaaccattgagcgagcacatcctgttggtgcgactgccatatcctgggctcctgcaacagcttcactagctggtgcaggggagcttgtttacaagctcgtctcaggagggtttgactctgtcgttaaggtctggggattcaacgatggtagctggaagctggagggtgctcttatctctgacatgcacacggattgtgtgagggatgtcgcgtgggcaccagttttgggattggccaagtctaccattgccagcggttcacaagacgggaaggttgtcatctggaccaaggcaaaggatggagacaagtgggagggaaagctcatgcgtgactttggtgcccctgtctggagggtgtcctggtccttgactgggaacatattgtccatagccgctggtgagaacaacataaccctctggaaggaagggtcagatgggcaatgggaggaggtgatgaaggttgaaccataggttgctggtcaaggtttctgagtttcttgtagatccatgttccgataaagataaagtttgccattgtgttttactagtgtctcgataaagacaatttgccagtgtgttttactagtgcttcctgcagatcaatgttttgattaagacaaagtctaccattgtgttctgataaacactgaattcacttattctagtactttctgataagcaattactgttggatggaccc

SEQ ID NO: 453402 - DNA, 461 bp, Sorghum bicolor
  unsure (1)..(461): unsure at all n locations
tcccggtcgaccaggcgtggcggggatacaaaaacatcatggagaactgccaggagaacgcggcgatactgcgggaaggcatcgcagcgacggggcggttcgacgtcctgtccaaggacacgggcgtgccgctggtggccttctcgctcaaggacagcagccggttcagcgtgttcgacatctccgagaacctgcggcggttcagctggatcgtgccggcgtacacgatgccggcggacgcggagcacgtggcggtgctccgcgtggtcatcagggaggacttcagccggagcctctgcgagcggctcgtctcggacatcaagaagatcctgcacgagctggacgcgcgcgccacccacgccgtgacctgggtctccaccgccgccgccgncgttgngcaggcggacgacggcgccgncgngggaaagaagagcgcgctggagatcgagcgggagggcccc

SEQ ID NO: 453403 - DNA, 491 bp, Sorghum bicolor
  unsure (1)..(491): unsure at all n locations
gcgtccgacagccaagacagatttttggattgacagtaaacccggtggttcttcaagcaattagaaagactagggccaaagctctaggttttggtgatgggtatcagagccattatgccgaaatggaacatgtgaggcaggaactgctccatgcaaatcaaatttttgctcaaaacccaacgtggccggtcattgggatcactggaaaagctatagaggaaacagctgctgtcattgtgaggatttaccatgacaggaaacagaagtgctccatgccacgcatatcaaaacgggtggctccagtcctagtctacaattttatgtcagttggttaacactcatgccgagtattacaaggtctttgctacggagttntaagtctatatactccgcttcggtgaagtgatttcaaatgccgtaaacctattcaattcggcaatttttaaacgagtctatctggccagattagaataagtacaataatagtctta

SEQ ID NO: 453404 - DNA, 490 bp, Sorghum bicolor
  unsure (1)..(490): unsure at all n locations
cgtgcgggccttgtttatgctgcggtgacaccgttcctgcttcctttcatattggtgttcnttgggttcgcatatgtcgtcttccgccaccagataataaatgtctacaatcagcaatatgagagcgccgctcagttctggcctagtgttcatgggcgtatggtcacagcgttgatcgtatcgcatctgctgctcctgggactgatgagcacatacgactttgagcagtcgacgcctgtgctccttgttcttcctgtgcgtgaccttttggttttacaagtactgcaagaaccggtttgagccggcgttcgtgaggaacccactgcaggaggcgatgaagaaggacaccctggaacgtgcccgggagcccaacttcgatctgaaggcgtacctggccaactcgtacctgcacccggtgttcaagggggacgaaggcgacgacaggtactcggtggtggatgacgaanggtggatggagggagaggtgatt

SEQ ID NO: 453405 - DNA, 727 bp, Sorghum bicolor
  unsure (1)..(727): unsure at all n locations
cgtgcgcatccatcaatcagcagcagcagcagcagcatcatcatccaagaagaggcgcagccatggcgagcgagcacgcggcggcnggtgaggngaagcacgagaagcagagtctgatggacaaggcgaaggagttcgtcgccgacaagatcgcgcacatcccgaagccggaggcgacgctggacgcggtgacgttcaaaggtctgagcagggagtgcatcacgctgcacagcagcgtgaacgtgtccaacccctacgaccaccgcctccccatctgcgaggtgacctacacgctccggtgcgccggcagggaggtggcgtcggggaccatgccggaccccgggtggatcgccgccagcggcaccacctcgctggagatccccgccaaggtgccctacgacttcatcggctccatcgtccgcgacgttggtagggactgggacctcgactacgagctccaggtcgggctcaccgtcgacctccccatcgttggcaacttcaccatcccgctctccacctccggcgagttcaagctacccactctcaaggacttgttctgatctgatagcttgctttctgttctgtcgtcgcctgagctgagagcctgagacggatgagtgacagcgatctgtactgtactctgtgttgtgcgtgatctgaatgatccctacgacgaacgcaccatatcttgttgcaaataaacgcaggtcctctgttccattcaaaa

SEQ ID NO: 453406 - DNA, 608 bp, Sorghum bicolor
  unsure (1)..(608): unsure at all n locations
ttaatctgtaatgcaaggactacaattgacttcaattaatatgctgtgctgccctggcttggtgcatattgtcaagagaacaggtgcccaaanaaagatttcttgtgttcaagcacaactgctaccttttcatgtaagtgatccacgtaataattcctgataataggcgctatccaaagcgtactgagattgcngtaacatagtcaggacagagctctgacgctgcaatgcgtgcaagagattacttctgcagtaacccaactagatcatacaccgctggtcgtgtacacatctggatggatgttattggaagcatcctgcagttctggtaagctagtccaaccagacaaaacaaggagggtcttgcaaccagtggtctggccaaataatatggctggggccaggctatcaccaaccatgcacatccttgacgtctccagattgaagcttttcaagaggaagtccatcaaaaatcctgaaggttttccaacaacaatgggttctccctgtaatgacgcagcttactgcagcaaccatagttccagctcctggccattcttgggcagatgtcatatgcccagttggatcaccgcacgcgtgggcggacg

SEQ ID NO: 453407 - DNA, 559 bp, Sorghum bicolor
  unsure (1)..(559): unsure at all n locations
atctggaacagtatctacttcgtggtcttgggtttccttcggttggaatcacctaccactatctacggcgagctcaagtccacattctggcccatgcttaccgctggatggaagttgtggccttttgcgcacttagttacatatggtgtggttcctgttgagcaaagacttctatgggtcgactgtgtggaacttgtctgggtcacaatattgtcgacttactcaaacgaaaagtcagaggcaaggaattctgacagtacctccacaccagctgcttcatcaaaggacaactcacgatagcagccccatagaccttggaaagctgcttggcccttcaggggttatgtaaattgtacaattagctgcagcaactctgcaggtgtaacccttttttttgtagatatatattcatgaaacatgaattgtgcagcatgtgtcatagaatatcaggaagaaatagcttactctacaactacaatagctgatgaaattagagtttgtcggtctactcctagcaatagagtagtagccatcgttggnacgagggtcatttttttta

SEQ ID NO: 453408 - DNA, 866 bp, Sorghum bicolor
cgtccgagctgctgctgaagctgatgtcgtgtgcacaagcaccgcatctgaaactccattgttcacaaaagaacacgcagaggcactcccccttgtttctgatactatgggaggtgctcgcctgtttgtagacatatctgtccccaggaatgtcagcgcgtgtgtctctgaagttggcgctgcgcgagtatacaatgtcgatgacctgaaagaggtggtggaagccaacaaggaggaccggctcaggaaagcaatggaggcgcagacaatcatcacggaagaactgaaacggttcgaggcatggagggactcgctggagaccgtcccgaccatcaagaagctgaggtcatatgctgacaggatcagggcctcggagctcgagaagtgcttgcagaaggttggtgaagacgccctcaccaagaagatgaggagagccatcgaggagctgagcactggcatcgttaacaagctcctccatggcccactgcagcacctgaggtgcgacggcagcgacagccgcaccctcgatgagacactcgagaacatgcacgccctcaaccggatgttcagccttgacacggagaaggcgatcattgagcagaagatcaaggccaaggtggagaagacccaaaattgaggccaggaaagcaattttcctacccctttatctctatatatagcctctccagcctatttccaagtttttttatctttcgcttactgagccactcactgagatcgtcaactgtgtcgtgattttagagccatgtcagcgtgtcgtgaataacagcaatgtatcccaattccccactgaagaaagactatatatttatatgcattgattggagcaaatactactgtaaatt

SEQ ID NO: 453409 - DNA, 437 bp, Sorghum bicolor
acaagctcctccacggtccgctgcagcacctgaggtgcgatggcagtaacagccgcacccttgatgaaacgctcgagaacatgcacgctctcaaccggatgttcagcctcgacactgagaaggcgctcatcgagcagaagatcaaggctaaggtggagaagacccaaaattgaggacatgaagcaatttttcttaaccgtgtatacataccctccaatccgattccaatttttttgatcatttcacttactgagctcctcccctgcttgctgagacgtcaactgtgccgcacattagcgccatggcagcagctcattctgttgagatagagtggcaaattgtctctactccagctgcttttctttgtacattattgcttgagctgctgtgacaagagctccattcttcgtaatcttaagctatatactttattcgga

SEQ ID NO: 453410 - DNA, 622 bp, Sorghum bicolor
  unsure (1)..(622): unsure at all n locations
cgtccgactggagcgcctacaagcaagtcttcaagctggtgcaggaggccgggctcaagctgcaagccatcatgtcgtgccaccagtgcggtggcaacgtcggcgacgtcgtcaacatcccgatcccacagtgggtgcgggacgtcggcgaggacaatcccgacatcttctacaccaaccgggaaggggtgaggaacatcgagtatctcactcttggagtggacgaccagcctctcttccatggaagaactgccattcagctgtatgctgattacatgaagagcttcagagagaacatggcagatttcttggatgctggtgtcattgtggacattgaggtgggacttggccctgctggtgagatgaggtacccctcatatccccaaaggcagggatgggtgtacccaggtattggagaattcatatgctatgataagtacctgaaagcagacttcaaagcagcagcaacagcggctgggcatcctgagtgggatttgcctgatgatgctggggagtacaatgacactcctgagaagacccagttctttgcggataatggaacataccagaccgacaaggggaagttcttnctcacatggtactccaacaaactgatcaagca

SEQ ID NO: 453411 - DNA, 850 bp, Sorghum bicolor
cgtccgccaggggaaaggagctcaatcgtttggcaggaattagtggaacctgtgattttgtcaaggcagacttcatgaaaatgccgttcgatgacaacactttcgatgctgtttatgccattgaggcgacatgtcatgcacctgatccagttggttgctataaggagatatatcgtgtgttgaagcctggtcagtgctttgctgtgtatgagtggtgcattactgatcactatgatcctaacaatgcaacccacaaaaggatcaaggatgaaattgagcttggcaatggcctgccagatatcagaagcactcggcaatgtcttcaagcagtaaaagatgctgggtttgaggttgtttgggataaggatcttgctgaagattcccccttgccttggtacttgcccttggatccaagccgattttccctgagtagcttccgtttgacttctgtgggacgcatgattactcgcacaatggtcaaggccttggaatatgttggtcttgctccacagggcagtgagagggtctctaatttcctagagaaggctgcagaaggtctcgtagagggcggaaagaaggagatcttcacaccaatgtacttctttcttgctcagaagccggtttcggaatgagctcttggatcactttccagagagaaagcaaggaggcatttcaaagaagctgagggggaaccctgcaattcaagaaaatatggttcttctgtgtaggaagaaaattaacgatcagtgtagtaactgttaagctttgtgtttggttagttggtttgctgcttgagaatattggtttttagggggctgacaatgggaaatccttttcatcataagctcta

SEQ ID NO: 453412 - DNA, 576 bp, Sorghum bicolor
ggcacgaggcaaaactttagccagaactagcgcaagaaatggctccactactgcttcatgcttctgccataagtcacagtgcccatccagggcttagaagccatataggacccaacaatgagcatatctcacggcacctatcttcttcatcacaaaatactaagcgaaggtgcaacattagccttaggtcacgagctcaaaggataagcagtcagcttggaggccagaagctcgagcactgggaaatccctaaaagggactggttccctcctagctttacctttggtgccgccacttcagcattccaaatcgaaggtggttggaatgaagatggaaagggtccaagcacttgggatcacttctgccacacttatccggattttatagccgacaagagcaatggggacgttgcagcggattcataccatctctatgaagaggatgtaaaattgctcaaggaaatgggcatggacgcctataggttctcaatctcttggcccagaatattgccaaacgggacactcagtgacattaatgaaaaaggcatcgcctactacaataatctgatcaacttgt

SEQ ID NO: 453413 - DNA, 421 bp, Sorghum bicolor
  unsure (1)..(421): unsure at all n locations
cgtccgcggngctcatcttgtgccactacaaaaactatttcaggctaagctcacagggggagctctggagtcggacactgttctctgccggcgtcaccgctgttggattgggttcttcctattaccatctcaacccaaatgatgccacgctagtttgggacagactgccaatgacgattgctttcacttctgtcatggctatattcatcattgaaagggttgatgagagagcaggcgcaaagtcccttgcaccacttgtgattactggtgccttgagcatcatgtattggagacactttgatgatcttcgtccgtacgcagtggttcagtttgctccatgtattgctgtacctgtgatggctatagtaattccaccgatgtatacacattcaagctactggttgtgggcagcaggatttta

SEQ ID NO: 453414 - DNA, 631 bp, Sorghum bicolor
ccgggccccccctcgggtaaaacgggccgctcgccccgctactccgccgtccgcctctccgcctcctccggcgccggcgctgcagcggccggcccacggaatccatgggcaacatgacccgctcagactcgcccgtctcccgccgcatcgtcctctccttcctcgacttcctcaactccgtcgagttagctcctggggttgatcctgaagctcttgaagttgctaaggattgcctggagtccatttttagtgttaactcatcagccactcgtgaggcgatacagccaggactgttgcttgagctatttgcttctctggaagcaaatgaaagagaccgggcaagagctgctttgctgtcacaatctgtatcaaacaagccatctcaaaatgcgggtacatctaatgtcgaagaagacccaaacaaatgcacaacatcagatagtgacagtcagatggaggatacatttgacctagatcattcaggggatgaactatttgcaaaattttatgctgcacttgatgaaatcaatttctttaagacatcacctgctggagctgaagatcctggcctactttcaaaagcaacacaatactttaatgatgcattactggcgatgcagaagtcaggaac

SEQ ID NO: 453415 - DNA, 665 bp, Sorghum bicolor
cgtccggcggaagtggcttttagatgtgcacgagggcttcctcctgaggctgcagctgagcaaattgtcaaagaagcagttgaatcaaaaggattgagagatgatacaacttgcattgtcattgacataataccaccagaaaaaccaaaatgcactatagaatctccaaaaacgccaggaaaaggccttgtacttctaaaaaaattctttttaaggaaaactgcatccgactcgttatccctagctgataaagataatgggcctgagccagatttagtggaggaggtctttgaggacggatgcccatccctttcgaggaggcttaattctgaatatcctgttcgagatatgttcaaaatttttgcatgtgcaatttgtcaaattgaattggaatctggtcaaggcatatccatacacgagggtttgtcaaagccaggaaagctgtgtccctgggatggccctttcctttgtcacagttgccaggaaaagaaagaggcgatggaggggaagcgtcactcacgagattcctcgtcaagaaatagcgggtcaagtgaatagtgactgaatccaagagtcatcttggggcaaccactctagcggggtgacgagctaattctttttgcagttgtcattcttgcagcacttactctattacatggactacc

SEQ ID NO: 453416 - DNA, 622 bp, Sorghum bicolor
ccggtcgacccacgcgtccggcgagacagagcaggaactgacgcatttgaatcggaggccaccgctgcgctccgagggccctcctcgctcgccacccgctcacggagacagggagaggtcgatggcgagctcgctggcccgcctgggagcggcgctgccacgcgcgcgcccgtgcgccacggcccgcgccctgccaccggggcggtgggacgccgcggcgctcggcgcctcccgccgcgccgcgctgaacgcttgcaggtgccaagttcattccgacgttaaagtagcccctgcatcggatctgaaggatggtagcaaatctgaaacttggaggatcaagatgctctacgacggtgattgccctctctgtatgcgtgaggtaaacatgctgagagaaagaaacaaatcctatggagcaataaagtttgttgacataagctcgaaagattactctccagacaacaatcaaggccttgattatgaaactgccatggggaggatacatgccattctttcagatggaactgttgtcacagatgttgaggcatttagaaaactgtacgaggaagtaggacttggatgggtctatgctgttactaaatatgagcctgtagctaccatg

SEQ ID NO: 453417 - DNA, 815 bp, Sorghum bicolor
cgtccggacatgatgaagaggccacctgttgggcgaggagagagtttcattaccaaagtcatgtggcgaaatatcattgggcaaagtttatatcagttggctgtacttggagctctcatgtttggcggtgaacgtcttctgaacctcaagggtgcagattccaaatctgttatcaatacactcatattcaactcctttgtgttctgccaggtgttcaatgaaataaacagcatggaaatgcagaagatcaatgttttccgtggcatgttcagcaactggatcttcattggaatcatagctgtgacagcagctttccaagtggtgatcatcgatttcctcggcacctttgccagcaccgttccacttagctggcagctgtggctggtaagcgtcggtctcggatccatcagcttgatcgtcggtgtcatcctaaagtgcataccagttaaatcagatggaactcgcgcgagtccaaatgggtacgcaccgcttcccagcggtcctgataacatatagctggagaagagaagagaagagcgactacggagaaggtactactgacgaactgtgttcgctagcattagcgaattcatgagaacctcaggagcactgcggctaccttatattttgggacctgttcggaataagtctgacttgtctgggttcagtgattttcgcatgaaggaacctcggaaccaaccactgtcgcctaggttcagttttaacagattattctgtgccttgtcatgcaactgctcttgtttgcagttggtggtactgtgtaaaaggacatggggtgagtgagcacaaggcac

SEQ ID NO: 453418 - DNA, 651 bp, Sorghum bicolor
cgtccgcttgagacaaaagtcatggctttgcaagatgcaaaaaatgctggtgctattgcaatgttcggagaaaaatatggtgaacaggtcagagtcgtagaggtccctggggtctcattggaactctgtggtgggactcatgtcagtaatactgctgagattcgtggtttcaagataatttcagaacaaggaatagcttctgggatcagaagaatagaagcagttgcaggtgatgcttttattgactatgtttgtgctcgggacaactacatgcggcgcttatgctcatcccttaaggttaaggctgaagatgtgaacggtagagtagaaacaattcttgaggagctaagagcaaccagaaacgaagtatcatctctacgcagcaaaattgcagtgctaaaagcagcttctctttgcaagtaaagctacaactgtggaaccccacaatgtcaggattgtggtcgagaacatgggcgacgtagatgcagatgggctgaaaagcgctgcggagtacctcataggtaccctccaagaccctgctgcggtgattttaggatcaagcccaggggatggtgaagtcagcctgggtgctgccttcagccctgcagtcgtcaagatggggctgcaggcagggaagttcgtgggtggcat

SEQ ID NO: 453419 - DNA, 706 bp, Sorghum bicolor
  unsure (1)..(706): unsure at all n locations
cgtccgcccacgcgtccggaagtttgctagtacaaagaaacttgttgacttactcaagaaacaggcagaatcaaataaaccatatggtgcaatatgtgcctctccagctcatgtgcttcagccacatggtttactgaagggcaagaaggcgacagcatttccacctatgtcacacctgctcacagatcagagtgcatgtgagcatagggttgttgtagatggtaaccttatcaccagtagagccccaggcactgcaacagagttcgccctagccattgttgaaaaactgtttggtcgagataaagctgtcagcatagccaaggaaatgatctttatgtgatattgcactgaacctggtggtgtgagaagtataataatgtgaataaacataacagaaacctgttagtcatgcttctggttctatgcctgaactggtaatagctgcctgaggatttcaattgaatacttgaatggtactattacatcacactgtaaactgtgaaccaagatcgtacatgttgcataccataagagaaaggttagtgtgactcgttactttgaaatacttgtcctgtctggtcagtgaaacaccaagtggaggtgcgtgctttacaccacccacctgctctgcctctaatcatcannnatttacaacgaagttagaagctgtttggtcaatcaagagagagtgcangacattggcagc

SEQ ID NO: 453420 - DNA, 386 bp, Sorghum bicolor
cgtccgtgagagttgaagtgataactcctgaagagcatctgggtgatgttattggtgatttgaacctctaggagaggccaagttaacagcttcggggataagcctggtggcctcaaggtggttgatgcttttgtgccacttgctgagatgttccaatacctcagcaccctccggggcatgactaaggggcgagcatcctacacgatgcagctcgccaagtttgacgtcgtcccacagcacatccagaaccagctctccaccaaaacggaggaagctactgcttaattttcatttcccgtagataaatccatactgcaacagcagggcaggttgataggaagggcatcaagtgtatgtagctttgtagtgatttaaccccggagggg

SEQ ID NO: 453421 - DNA, 449 bp, Sorghum bicolor
cggcccggtccgggttccggctcgcgtacgcgtcattaacctccaagctgtgttagtggcaacagagctactagtaagttgcacacaacaacgacaatggcttccctgagaggcctcgaagcccgccggagttgcagcgcagggcaaggagccggcacccaagctcagcgagacggcgacgaagccgtccgccgccaagagcggcggcgtcaaagaaggctgagcagaagccccgggaaaccaaaaagaaggtgaagagcagcaaaccggcggcagccaaaaagtgacagtgtgagatgtagtggagcttcttcgcatgagtgtcttcatgctatgttattatgaattataaatccagtccttcctttcttgtgtcttccatgtgacggggtgtgcgtccctatgtgtgatgactgatgaaataatactacaaataagacgttgtaact

SEQ ID NO: 453422 - DNA, 1320 bp, Sorghum bicolor
ggcacgaggctcacctcacctcacctcacctcaccacacacacattctctctcccctccagctagctcgctcgcctgctcatcactgtcgcttgcttgcctcgatcgcaacgcgcttggcatggcgtccgaggtgtggctatcgccggcgtctcgcctcccatctctctccaccaacgcaccacctcgcttccgctccaacccacctgccaccacaaccgcctctttcttctctccccgcccccgccctgctcgcggcgccctgcctctgctgcgcgtccgccgccgtcttcgcgccaccgaccagcaaggccaggttcaggaacaagacgacgaggtggtggacagcaacatcctcccctactgcaacatcgacaggaagcagaagaagacgctcggagagatggagcaggagttcctgcaagcctgtcaggccttttactttgaccagaaggccatcatgtccagcgaggagtttgacaacctcaaggaggagctcatgtgggaggggagcagcgtcgtcatgctaagcgaagatgagcaaaagcttctggaagcttccatggcctatgccgctggcagccccatcatgtctgatgctgaattcgaccaactcaaattcaaattaaagacagacggcagtgtcattgtgatggagggtcccaggtgcagtctaaggagtcataaggtgtacagcgacttgaatgttgactacctaaagatgttcctgctaaatgttccagccaccactgtagctctgggactgttctttttcattgatgaattgactggttttgagatcaatgtgttccagctgccagagcctttcggattcattttcacatggtttgctgctttgcccctaatattgttcctagcacagttattgactaaggctatagtccaggactttataatcctcaaggggccatgtccaaattgtggtactgagaacctttctttctttgggactatactgtcagtctctagtggcggtacaacaaacaaagtgaaatgtgcaaattgcagtactgagctggaatatgactcaaagtctcgggtgatcacacttccagaagcatcaagtgcataaacaaaggaacagggagctacagagcttgtgaatcctatagaataaaggtggctgtccggacagcatagcaaactgcgaagcctgcaactactagaattggtttgtagcagtctcagctgggaatctgttgcagagtactgtgtgtgtataggaaggaaaagcttaggtacagctgccgcctgccgattgtacaatcactattaacagtccagtacgttggtatcacgt

SEQ ID NO: 453423 - DNA, 667 bp, Sorghum bicolor
cgtccgtcttggtgtatgagtacatggagaacggcactctgaggtgccatctttatggcacgaggtgggcacctcttagctggaggcaaagactggaaatatgcataggagctgcaagaggcctccactatcttcacaccggtgctaaaaacacaatcatccatcgtgatgtcaagtcaacaaacattcttcttggtgaccatctgttggccaaagtttctgacttcggcctctcaaaggttggcgctgatactgatcaaacgcacgtaagcacgacagtcaaagggacctttggttatctggggccagagtacttcagggcgcagcagctgacagacaagtcagatgtatactcatttggtgtagttctgctggaggtgatctgtgcaaggccagccatagtacaaactcttccaagagaaaaggttaaccttgtagagtggggtatggcgtgtcataagagaggagaacttcatcagatcattgatccacatcttgtcgggaaaatcatgcccatagcattgagcaagtgtggggagacggtttgtaaatgcctctctgattatggagtggaccgtcctacaatggcagatgtactatggaacctggaattcgtgcttcagctgcatgatgtatgggaagaaaacttcatcattcacatggataa

SEQ ID NO: 453424 - DNA, 524 bp, Sorghum bicolor
gacaagcagaggtatcacttcctagggagagtactattaaattcatatatgacttgggataggtgaaacacccactactatatcaggctttcaggtgcatgactgtgaattggtgatgtcagattaatatacaggttagttgcttgtttctaggtaacgcagaggtgtggtttacaacaccaaaaatgctagaggagcggatacaaacattttgtgaagctttcagattttagtttaatttctacatctattaggcctttgttttttgaatgagatgtgcagtgttgattgcggcacatacttagaagtgttccaacataagctggaattctgtcatacggatggataaacttgtataccaaaggaatgctgtattatctttgcccatttatggctacattagcttgcttgtttttattctctttaaccattccatttgtatactagagagttgcttggcttgttcaaactattgggggtacaaagccatattgagacccagtaataaagccaccaaaagtata

SEQ ID NO: 453425 - DNA, 799 bp, Sorghum bicolor
cgtccgattggagaagttcgagtcggttttgggatcgaaaccggagtccagtgaggcttccattgccagctacaatgttgcctgcagctactcgaaactcggccggatagaagctgggctttctgcactggaggaagccctgaaggcagggtatgaagacttcaagagagtccgcaccgacccggatctcgcgaacctgaggaagtcagaggaatttgagcccttgctgaagaattacgacgagtcgttcatcaatgagaatgccatcaacgccatcaaatccttgttcggattgggaaagaattgagcaactgaaacatggtggtaggccggtagcagcaggaggcaatgcctctcagctctggtcttgcagtttttgcatactgcagaagcctaccaaggcttaagctcatgcccatacagttcagctccccccactctgccagtagtttgcagttcacacctgtaccttagctattcttggtgaggctgactatctctgggagatgcctccttgccctcgtacttaaccatttgctggttgatgcagatacattatgtatatgagtattatatccaatttgtaaaggaaacatgagtacattatgtaaagaaaatgtgcagttgtgcttgtaagccatgccaaatatgttaagaatgaggcaaaaggtgaatatgttagcggacaaactcacgagacatccattgagaactttagtttttcaggttcagacagtgtaatgtgtcgggggaaaaaagcacattataaaaaaaaaaaaagggcgggcgttctagagga

SEQ ID NO: 453426 - DNA, 523 bp, Sorghum bicolor
cgtccgcggacgcgtgggcggaggagtactcgcacacggccgtcaacaagttcaacgtcaacccggagtccatcccggactggctcttcgacttcatgcccacccgcggcggctacttcgtcggcaacgtcagccccgcccggatggacttccggtggttcgcgctcggcaactgcgtcgccatcctcgcgtcgctcgccacgcccgaccaggccgctgccatcatggacctcatcgaggagcgctgggaggacctcgtcggcgagatgcctgtcaagatatgctacccggccatcgaggggcacgagtggcagatcgtcaccggctgcgaccccaagaacaccagatggagctaccacaacgggggatcatggccagtgctgctgtggctgctcacggcggcatgcatcaagaccgggaggctgaagattgctcggcgcgccatcgacctagccgaggcgaggctcgcgagggacggctggccagagtactacgacggcaagctgggccgctacatcggcaa

SEQ ID NO: 453427 - DNA, 553 bp, Sorghum bicolor
cggccggattccggtcgaccacgcgtcgacgtaaccccacaaggcgattttcttcgacgacagcgtacgcaacatccaggccgggaagcagatcggcctgcacacggtgctggtgggcaaatcgcagcgggtgaaaggcgcggaccacgcgctggagagcatccccaacatcagggaggcgctgccggagctgtgggaggaggccgagaaggccaaggaggacgtgctctacgccgaacgcgtcgcgatggagacctcggtcaccgcgtaaaacctcccgaatcctccggagccgaactttctcgacatccagaaacgcgacgatcacacatcactgcccgagccagggctggtgagctcacgctggaactgactgaatccagcaatggccgggccaaggatttccgacagcaggagggggtgcagcatgtaaaggggggaacagcagatgagatcatgtttgggatggtcccaatatatagttatgtatcagccagccctttgtttgtaaattaccagcattagaagtaataaggaaatggagtttacttgt

SEQ ID NO: 453428 - DNA, 471 bp, Sorghum bicolor
gcgcgtccggcagcagccagcagagcaaccaaaaaaactaaccaacgcgcgggcgcggcggctgcaacctcccggcccgtcctcctcccgcaagccaagctctgcttcagcccgagcggagtccatcccatcaaaatccaatcgatttcgatggcgccatccatctccatcggctccgcggcgccgtcctgggcggcgggcgcgaacaagaagaagagcgtcggtgctgtagtggatgatgaggcggagctcctgcggcggaggaacgcggagctggagcgggaggtggaggcgctgcggctagagctgggcgcggcgcggcggcgcgccgagacggcggaggaagccgaggagcggctgtgcgtgcagctcggcgacgccgaggtggaggcgctggagctcgcccgcgcctaccaggcccaagtccaggcgctcgccggggagctcgccggcgcgcgcgggggccgtcgc

SEQ ID NO: 453429 - DNA, 655 bp, Sorghum bicolor
  unsure (1)..(655): unsure at all n locations
cgtccgcgagcagacaggccccgcggctgcggcaggtggtggtgacgacgacgctgttcgtggggtcagcctcgccgccctgcggacgacccggtacgggtgccggccgaacttcgaagcggagttcgcggcgttcgcggagcgcgccggggacgcggcggacgtgggcgtgctggtgtgcggaccgccggggctgcagacgagcgtggcgagggagtgcagggcgcggaacctccgccgccgcggcggcggcggggcggagaagagcaggagcagtgcggtcttccatttcaacagccacagcttcgacctctaaacacgtctccggtcggtgggttcaacgagcggaattaaattgggtggaccctgggtcaccatcactgcatcaatacatgttgcacagcacacacacacacggtagttgcatatacacgttggtcctgtatgatatcgtgtatatatatatctatgtatatagctgataattacctcatgtagtaaggtatacaagagatgtataaatctgtatgcgtgttagcgcatatgcatgcatggtagaagcacgnnnnnnnnnnnnnnnnnnnnnnnnnnnnnnnnnnnnnnnnnnnnnnnnnnnnnnnnnnnnnnnnnnnnnnnnnnnnnnnnnnnnnnnnnn

SEQ ID NO: 453430 - DNA, 796 bp, Sorghum bicolor
cgtccgcctgtttctgacgaagaaaaagattccgtgagaagtgcttacctaagaaggcatcctgatgctttttgggttgactttggtgacttgagtttcctgcacatcaaacctaaagctgtgcgctatgtatctggcgttgcaactgctctccttggctctggagaattcggtgctgccgagtacaaggaagctaacgttgatccaatatctcaattctcaactcctattacaagccatatgaacaaggatcatgctgatgatacaaagctcattgtgcaacactccactactgttaaggtggattttgcttatatgctggatgtggacagccttggttttaatgtgaaggctggttatgatggaagtgttctaaagttgcgtatccccttcccaaggcaggcgcaagacaggaaggatgttaaaacactaattgtggaaatgctccaagctgcaagagcctcatcttcagatcctgaatgatgtcgtcgtcatcctagaaggtgatgaatctgtcggtgcaaatgaaagtaaacctaattaataagagttcttgggtttccatccaatctctgcaccaactgaaggtggagccacagaaatttcatggactgatacacgaccttgtatataacaaagagcgcttaattacttgtagttgcatgaatacaaagcgacttcactatattgtacttactgacatgtgcagctctttcaactgattgttcaccaagtggctgtgaacttatttcaaccaaacagcgtacaactttattacaaaaaaaaaaaaaaaccc

SEQ ID NO: 453431 - DNA, 579 bp, Sorghum bicolor
  unsure (1)..(579): unsure at all n locations
cgtccggcagaccttaagattccaaccaatagttccaacagtggtgggcgcactgagctgccgccaagagcatgttgtgttgtggtcgaatatcttgcgggaggaacactaaaacaatatttaataaagagccggcgtaggaagcttgcctacaaagttgttgttcagatagcactggatcttgctagaggattaagctatctacactcaagaaagatagtacatcgggacgtaaaaaccgaaaatatgctgctcgacacacaacgaaaccttaaaattgctgattttggtgttgctcgtgttgaggctcagaatccaaaggatatgacaggcgcgacagggacacttggctacatggccccagaggttcttgaaggcaagccatacaataggaagtgtgatgtctacagttttggcatatgcttatgggaaatatactgctgtgacatgccatatccagacctcagttttgcggacgtctcatccgccgttgttcatcagaatctgcggcctgacatccctcgttgctgcccaagcccaatggcgaacatcatngcggagtgctgggacgcaaaccca

SEQ ID NO: 453432 - DNA, 816 bp, Sorghum bicolor
cgtccgcacatgattataggtgggcttcctctgcttgttatatctgttcttaatcatgatcctgctctgagtggccatattcaagatcttacattgagcgacatattagcacttggctatacatctatatttggcagtgctgtcagctacggtgtatatttctacaatgctactaggggtagcttaaccacacttagttctctcactttcttgacccccatgtttgcatccgttttcgggtacctctacctgggtgagaccttctcaccagtacagcttggtggtgcgcttctcacactggttgccatctacatggtcaactacaaaagcattataggtgagaaataagaggctatcacatacctgtgtggtttctatcccataagggtggttgggtgctgcatgcagcacctattcccacttattgggttcaggaatctgaagattaaggacaatcggaagactcgggcaaattatcggattggagagagatgtgctctgtttcaggtctacaatgaaaatgcagtataaagtgacacaaaaccaaacaggttccatcagttccttcgacattactattagatttcctggttatgtcatcgcatgcttctaggttagccagcagcctttttctctgttatgtggagctgagaaaaaaattataatttataggatgcttccacattgtagttgatatgcattatcagatagggagcattgtgcagtgatcagagcatggaaatagttggaaggaaggctcatttgtatatatgaattcgctccattttcaaatatatgctagaatttttgtgtgtc

SEQ ID NO: 453433 - DNA, 1021 bp, Sorghum bicolor
  unsure (1)..(1021): unsure at all n locations
ggcacgagggtcctcgctggcatgctgcaattgtatatgttctggggttttggctccttgacttctccaacaatactgtgcaaggtccagcacgtgctatgatggctgatttgtgcggtcatcatgggcctagtgcagctaattcaatcttctgttcttggatggcgctgggaaacatcctaggttattcctctggttccacaaacaattggcacaagtggtttcccttcctcaaaacaaatgcctgttgtgaagcctgtgcaaacctgaaaggtgcatttctggtggctgtggtgttcctagtcatatgcttggctataaccctcgtcttcgccaaggaagtaccatacagaggaaacgagaacctcccaacaaaagcaaacggcgaggttgaagctgaacctaccgggccacttgctgtgctcaagggcttcaagaacttgccccgcgggatgccatccgttcttctcgtaactggcctcacctggctctcgtggttcccgttcatcctctacgacaccgactggatgggccgtgagatctaccacggcgacccaaagggcaccaatgctcagatctcggcattcaacgaaggtgtcagaataggcgcattcgggctgcttctcaactcgattgttctaggattcagctcgttcctgatcgagcccatgtgccggaaggtcgggccgagggttgtgtgggtgacgagcaacttcatggtgtgcatcgccatggcggccaccgcgctgatcagcttctggtcgctcaaggactaccacggatacgtgcagaacgccatcaccgccagcacgagcatcaaggccgtctgcctcgtcctcttcgccttcctgggtgtccctctcgccatcctgtacagcgtcccgttcgcggtgacggcgcagctagcggccagcatgggcggcgggcaggggctgtgcaccggcgtcctcaacatctncatcggtatcccccaggtgatcattggggtgggcgcaggccccgtggacgcgctgttcggcaa

SEQ ID NO: 453434 - DNA, 536 bp, Sorghum bicolor
  unsure (1)..(536): unsure at all n locations
cgtccggttgactgtctttctcagcataattgctgctcagggactaggattggtaattggagctaccctactggatatcaagaaggcaacaactctagcttcagttacagtcatgacattcatgctagcaggaggcttcgtttgtaaagagggtaccgccgttcatctcctggctgcgctacctgtccttcaactaccacacgtacaggctcctgctgaaggtgcagtacgatcccgtgccggacatcctgaccaccacgaaacacatggacaacggtgccaccgagggggcggctctcgtcgcgatgatcatcgggtaccgggtgttggcctacctgtccctgagaagggtgaagggcggaagcagctagcgcatcgcttcacttgcctgtgcgcgcactgactgaagcctgagctcctggaggctgcaaggttgggtgtgtatggaaagttgtgttatattgcgctgtgaaaagatggaattcttntttacttttccggctttttcaactaaattcaaagcaaaaaccaacact

SEQ ID NO: 453435 - DNA, 496 bp, Sorghum bicolor
cgtccgcgtccgggtcgtcggacggcgactcggcgtcggcggcggacacgcaccggcgcgagaagcggcggctgtcgaaccgcgagtcggcgcggcggtcgcggctgcggaagcagcagcacctggacgagctggtgcaggaggtggcgcgcctgcaggccgagaacgcgcgcgtcgcggcgcgcgccgccgacatcgcgtcccagtacgcgcgcgtcgaccaggagaacaccgtgctccgcgcccgcgccgccgagctcggcgaccgcctccgctccgtcaacgatgtgctccgcgtcgtcgaggacttcagcggcgtcgccatggacatccaggacgagatgatgcccgccgacgacccgcttctccgcccctggcagctgcccggctaccccgccgccgacatgcccatcggcgccccgcacatgctccactactgatgattgcttggagtcaggcaagcaagcagctggggctggttggttggcaacaagac

SEQ ID NO: 453436 - DNA, 399 bp, Sorghum bicolor
cgtccggcgacaacggataacgctgtcctccttcggctcctcccctctcgttcctctcctctcccctccaatggcgaccgccatttcctctctagtaactcctccagccctccaccgccgctgcctaagccctgcctccgtctccgtctccgcccctatccgtatctccttccgggccgccgcggcgtctcacgcgtggcgccggggcttggcgctgcgggtgtcagcctcctcggcagtgctcgaggcgccagacgtggtggcggcgcggaagctctacgtgggaaatgtccccaggaccgtcaccaatgacgagctccgcgacatgttcgccgcgcacggcaccgtttagcgggccgaggttatgtacgacatgtataccaatcgcagcccacggtt

SEQ ID NO: 453437 - DNA, 440 bp, Sorghum bicolor
cgtccgctcgcaaggtccacacgctcgtgtcgtcgtcgagccaggagaagatcatggcggcggatcatcaccgtgacagggctctcgtgctaagcaagcaggcaatggcgccgagcaaagagcccgcatgctggcagtgatcacggcggtggtaagaaggctggtcttagtctctttgagatcgcagggttcgacgaggaggatgatcgccatggctaccatgattattggacaaggtcgtccctcttcgacgatgacaactgtcagtacaatgatgatgaggaagatgttcatcaggaagatggtggtgatgtcgatgatgttcttggtgcgctcgatgatgagccatcaggtcatcgaggtcatcaggagcaaccgggaggctgaaggtctggcgttcaatatggacgatgagattgacgaggcttgcgatctgttca

SEQ ID NO: 453438 - DNA, 629 bp, Sorghum bicolor
gaaagtagcggttgatataaagactggagcacaagtagtatactcaaagtatgctggcactgaggttgaattcaatgactcaaagcatcttattctcaaggaagacgatgtcatcggtattcttgagacagatgatgcgaaggatatgaagcctctcaatgaccgtgttctcatcaaggttgcagaagctgaagagaaaactcctgggggccttatcctcactgaaacagctaaagagaagccgtccatcggaacggttgtagctgttggcccgggtcctctggacgaggaaggcaagaggcagccactgtcagtgccggcgggcagcacggtactgtactccaagtatgcagggagcgagttcaagggcgctgatggcacgggctacattgtgttgcgagcgtcggatgtgatggctgtcctgtcttgagccttgcgtttccagctctttctgtagtttgcagccaatagttgtgaagtggtatgaaacgatcgctttgtggtgatcatcacaaaatgctgatactgttccggacaatcggctagaatttgggtcgacacgagttacgggctacctgtgtgcggttataaacatcagcatctgatagtgaattcactcggttgttttt

SEQ ID NO: 453439 - DNA, 489 bp, Sorghum bicolor
cgtccgaaagaggtgacttgtatcagagaaactacacacatgctagtgaagctattttatcgatcctactggacaaggacaaaagcagctcgacaatcctctcactgaaaaaggctggtccggagatcactgaacttttaacgcagtgctctatgcgcatagctggaactggattggctgttcttctgtcagttatgtgcaagatggctactggcgtgaggactccatttgcttcggctcggctgcttagcaccagtgttggattcggactcttttggctatcctgggcagtcaatggattgcgtgataccattgccagcatttttagaagccctagtaacatgaatatcgaggatgatgaggtcgcagtgtaaatagagaaaagtgtgaacgataatctcttcagggccttaactctcttggcaatcactggactgaatgttgcatgagcagttatcataaatttaataggtttgtcgacctacttgt

SEQ ID NO: 453440 - DNA, 591 bp, Sorghum bicolor
cgtccgcggacgcgtgggtcaaggaaaggcctttcttcaacgggttgtgtgactttctcagctctggccctgtacttgcaatggtttgggaaggagagggtgtcatcaagtatgggagaaaactaattggtgccacagacccacagaaatctgaaccaggaaccatcaggggtgatcttgccgttgttgttggaagaaacatcattcatggaagtgatggcccggagacagcaaaggatgagatcgctttatggtttgaacccaaggagctggtctcttataccagcaatgaggagaagtggatctatggggtgaattaaccggcgagtctttttttttttgctcttttttgctcaattttcacataattgcctgacagaccaaggcaggatgtaataaagtcgctaccgtcactttttggttggattgtgattgtgaccttctggtgcagtaaggcacaaggaaggtgaggaaaggaatataccgtgaaatatagagcgtgcactgagtagtcgtgatgttcaaatcaaactatatatcaccttcactggagtcatgtaatccaagatggcgatgtagatgtttctttgg

SEQ ID NO: 453441 - DNA, 708 bp, Sorghum bicolor
cgtccgcggacgcgtgggctttgcctcaggaagtgtggacatgtgtcggatgctggccttaaggcgttcacagaatcagcaaaggtgtttgagaacttgcagcttgaggaatgcaaccgggttactcttgtcggtattcttgctttcctcctcaactgcagccagaagttcagggctctctctttggtgaaatgcatggggatcaaggatatcggctctgcgcctgcacagcttcctctttgccgatcacttcgtttccttacaatcaaggattgcccaggtttcactgatgcaagcttggctgtggtggggatgatttgccctcagttggagcaggttgacctcagtggtcttggtgaggtcactgacaatgggcttcttccattgatccagtcttctgaagctggtctgatcaaggttgacttgagtggttgcaagaacatcacagatgtggctgtctcctccctggcgaagggacatggaaaatctctgaagaaagtcagccttgagggttgcagcaagataacagatgctagcctattcaccatgtccgagagctgcactgagcttgcggagcttgatctttcaaactgcatggttagtgaccatggtgttgccattctggcatctgcaaggcacctcaagcttcgtgttctctcactgtctggttgctctaaggttactcagaagagtgtgccgttcttgggc

SEQ ID NO: 453442 - DNA, 1078 bp, Sorghum bicolor
cgtccgcggacgcgtgggtgaatatccttaatcgagcgattgaggttaaggcagcgataaagtctggggacaggagcttccaaccgttcaaagggaaatcaatggcgatgatttttgccaagccatcaatgaggacccgtgtttcatttgagacgggattcttcttacttggcgggcatgctatttatttgggtccagatgatatccagatgggcaagcgtgaggagactcgtgatggtgctcgagtactttatggctataatgacatcattatggctagggtctttgctcaccaggatattctggacttggcaaattatgcacctgtgcctgtcataaatggtctgactgactataaccatacatgccagataatggctgatgcacttactatgcttgagcacattggtcgtattgaaaacaccaaggttgtctatgttggagatgggaacaacattgtgcactcatggcttctattggctgctgtacttccttttcactttgtatgtgcttgtcccaagggatttgagcctgatgcgaagacagtggagatcgctaggagtgctggaatcagtaagattgaaataacaaacgatcccagggaagcagttaagggagcagatgttgtgtatacagatgtttgggccagcatgggccaaaaggaagaagctgattatagaaaacagaagtttcagggattcacggtcgatgaagccctgatggagattgctggctcccaagcctaccttatgcactgtttgcctgctgagagaggagtggaggtgacagacggtgccatcgaggctcccaactcaatcgtgttcccccaggctgaaaacagaatgcacgctcagaatgccatcatgctccacgtgctcggtgcttaactcccctattgcacaccagtgtcacacttttcttaaattcttaggcatcgctgagggattgaggttgtttggctttagggcatatatgaaagcttaattcagacgaactgtttggtaatgtgatgactgttcttcagggaggagtttgttgtactgtaaaagtttggtaataaaaaataaacttctgtgct

SEQ ID NO: 453443 - DNA, 575 bp, Sorghum bicolor
tggcattatgggtggccatgccgtcaagttgattggatggggaaccagtgatgctggagaggattactggcttcttgcaaatcagtggaataggggctggggcgatgatggttacttcaagatcataaggggcacaaatgaatgtggcatcgaggaggacgttgttgctggaatgccatctacaaagaatatggttccaaacttcggcagtgcagttggaacagctgtagtttaacaattacgtttggcctcaaatgctgttggaattaactgaagtatttttaaaatggaattgttaaagagccaatatggtgtatgtagtttgtacactagctcattccaaaggtcgttatgttgctgatgccccatcactttgttcagagatggtggaataacattaataagaactagaatatgaatattatggtttcaagtccaaccaaatttgtgctcagatgatatctggccgccaaaccttgtaaaaatctctgttgtaaaataaaaaatcaagtcgagggaaagtacactgcaatgcaatgtctgcaatcaaaaaaaaaatttacttattaaaatgg

SEQ ID NO: 453444 - DNA, 741 bp, Sorghum bicolor
cgtccgcgacaacatcagcagcagcagaagttgcaaggagatcgacgctcttgagttcttgaatggttgttgatcgatggcgctgaggagaatcatcaaggagctcaaggacctgcagagggatccacccacgtcctgcagcgcagggcctgtgtctgacgacatgttccactggcaagcgaccatcataggccccagtgacagcccctactcagggggcgtcttcctggtcaccatccatttccctccggactaccccttcaaacctcccaaggtggcgttcaagacgaaggtgttccacccgaacatcaacagcaacggcaacatctgcctggacatcctcaaggagcagtggagcccggcgctgacggtctccaaggtgctgctctccgtctgctcgctgctcaccgacccaaacccggacgatccgctcgtcccggagatcgcacacatgtgcaagaccgaccgactcaggtacgagtccaccgccaggggatggacgcacaagtacgccatgggatgataatgcatgcagtgaggctgcctggggagcaaacatcgttgtatccaaatccaaatgttctttttaataacgtaatctaacagtaacagcaggtggaggagctctgcatttcgttctcaaaattaagaagaggaggagagaggttctatgtatgtacaagaactgtgtccgaatcgatgtaccatcacaatctcatataaaaaatgcaagtgaacaat

SEQ ID NO: 453445 - DNA, 533 bp, Sorghum bicolor
cgtccgcacacagagaagccatggcgctgtccctctccctcgcgcgccccgcgcccctcgccgtctctgccggcgccggagccaggaagctccccgcagccagcctcgccttcccggccaaatcattcttcggcgcaccgctggcagccaccgcggcctccgtcgcgtcgcgcgctcccgcgcaagccggccacctccacctcgctcgaggtcgtcgcggcggggaagaaggggtacaagatgaagacgcacaaggcgtcggcgaagcggttccgggtgacggggaggggcatgatcgtgcggcggtgcgccgggaagcagcacttgctcgccaagatgaacaccaagcgcaagaagaggctctccaagatggttcaagccaacatgagtgactacgacaatgtgacgggcgcactggcctacctcaaagtgaataggatagctaactgagatctacgtcgtctttaaagtcaagtttaattccaccaatgtggaattttgtgtttcttcgtttgtatttcctttaaaatact

SEQ ID NO: 453446 - DNA, 359 bp, Sorghum bicolor
cgtccgacgcgtccggtactccgcaggcaggcaagcacgcaggccggccgtcgccgagatggcggcgaccctccagtctccttccgccgtctgcgtccccgtcccctgcgccgaacggctacgcacccctcgtcccatctcgcggcgagttccccacaagcctgcactctcctgtagcagagcatgccgcgccggcggccgcggctccgccgcaaacaagccctcccctcctccgcccaccactccggacagcagcgaggtaagctccatggcgaagatacggagtgaggtcctctccccgttccggtcggtgccggtgttcttctacctcgcgttcatggccagcggcacgcttgggg

SEQ ID NO: 453447 - DNA, 825 bp, Sorghum bicolor
cgtccgcggacgcgtgggcaagaatccacaaacatatactagcagcgagggagaaagcagatcaaccagccagccagggaggaagaggccaagagggggagtgtcatggcttgcactgtcgcttccaggagggccgtcccgcttgtccgcgcgctggagaagctccttgccgcgtcgtccgcgcccggggctggctccaccctcaggccggtggcagtcgccggcggtctccgcgggtacaacaccggcgctcagcttcgacgttacgaggggcgcgagtcggaagacgatagcgtccgcgagtacgagagccggcgcggcagccgggactacgccgcgcccagcctgttctcaagtaatgttttccgtgatccggtcagtgcgccgcagagcctcggccgcctgctgagcctgatggacgacttcgcggtggcggcgccaggccgtgccggtgcggtgcgccgtggctggaacgcgaaggaggacgaagaggcgctgcacctgagggtggacatgccgggcctgggcaaggagcacgtcaaggtgtgggcggagcagaacagcctggtgatcaagggcgagggcgagaaggagtccggcgaggacgaggacgtcccgcctccgaggtacagcggtcgcatcgagctcgcgccagaggtttacaagatggacaagatcaaggcggagatgaagaacggcgtgctcaaggtggtcgtgcccaaggtggaaggaagagcgcacgcagggacgtcttccaagtcaacgtccagtagatttatttccaacggcagaggggcacgtactgtaccaaactagagtttctct

SEQ ID NO: 453448 - DNA, 486 bp, Sorghum bicolor
cgtccggaatcgttcacggatatctacaccgctaaaagcttacagaaaccatggtacttagttctaggaaatcatgattacaggggcaatgcactcgcacagcttagcccagtcttgagaaagatcgacgaccgattcatttgcatgagatcattcatcgttaacacagaacttgcggattttttctttgtcgacaccactccattccaactggagtattggactcaccggggcaagcatcattatgactggagaggggtggcacctcgaggcaaatacatagccaatttgctgaaggatctggacgaggctatgaagaaatcaactgcaaggtggaagattggtgttgggcatcacactatgaggagtgtcagtgagcatggtgacaccgaggagcttctgaaactactacttccagtcctcaaggacaatagcgtcgacttctacatcaatgggcatgatcacttgctggaacacattaacagc

SEQ ID NO: 453449 - DNA, 440 bp, Sorghum bicolor
  unsure (1)..(440): unsure at all n locations
cgtccgagcagagagagtgggagatcatggagctctgcgtctctaccaccaccgcctccgtccgcgccaccaccggcgcgcccatatccttcgccccgccccgccgtggcggcgcgtctgcttccaccgcccttccggtccaccaccgccgcatcccaactcgaggctggcgttgcgccgccagtgcggccgtgcctgacccggtgccctccgaagagcccgcctccgcctcctacaccgtcgtcgtcacggacaagcccgacactcctgccgacgacaaggtcgaggaagttagcgccgcgcctagtggctccgcggaggcgcctgtagcagagctggtgtcgtcggaggcgtcctcgtccccggatggcggcggtctggatgagatactaagcaagtngaacattgaagtgactcacgctctaatcctcactggatct

SEQ ID NO: 453450 - DNA, 528 bp, Sorghum bicolor
cgtccgggtgacactgctgatgatcactatcatcgttacatggaagatattgaattgattcattccttgggtgtcaactcatatcgattttccattgcatgggcaaggattctaccaaaaggccgctttgggcatgttaatccagatggtgtagcattctacaatgctcttattgatgctcttctacaaagaggtatagaaccatttgtgacgatatctcattatgacattccatatgaactagagaagcgatatggtggatggttgagccccaaaattcggagggactttggttacctagcagatgtatgcttcaggatgtttggtgaccgagtaaaattttggataacatttaatgagccaaatatatttgcaaagctcagctatatctatggacggtaccctcctggtcactgctcaaggccatttgggaactgtaccttctgaaattcttcaactgagccatacatagtgggtcacaacatggtattgtctcatgcaaatgtggtcagcatttacaaggaaaaa

SEQ ID NO: 453451 - DNA, 494 bp, Sorghum bicolor
cgtccgattctccatccacccaccggcggcggcgcaagggaagcgaagaggaagcgacgatatgtcggcgaccacggcggccgtgcccttctggcgggcagcggggatgacctacataggatactccaacatctgcgctgcgctggtccggaactgcctcaaggagcccttcaagtccgaggccgcgtcccgcgagaaggtccatttctccatctccaagtgggcggacggcaagcaagagaagcccactgtccgcacagaagatgaataaagatctggcgccatggtgacatagtccttgctacagatgatttgaagtgttggtgcaagtttctggaagttgctatttagctggcttgattttatagtcaatggtgaagaataattactttcgcgacaattgtttttttgcaatgacgtgttattttcgttgcttattgcacttgccctacccaaatcaatcatgtgaacagcatggaatggcttaattttgt

SEQ ID NO: 453452 - DNA, 328 bp, Sorghum bicolor
gacccacgcgtccgaagagagctgctgagaggcatttatgcttatggttttgagaatccttctgcaattcagcagagaggaattgttcccttctgcaaggggcgtgatggcagtcagcaagcacaatctggtacaggaaatacagcaactttctgttctgggatcttgcagcagcttgattatggcctggtggaatgccaggccttggtccttgctcccacccgtgagcttgcacagcaaattgagaaagtcatgcgcgcacttggtgactacctgagtgttaaggtccatgcatgtgtgggaggaacattttgtacttgaggatcat

SEQ ID NO: 453453 - DNA, 387 bp, Sorghum bicolor
  unsure (1)..(387): unsure at all n locations
cgtccgcatcttcccgccacatgctcaaaagcaagcgacttcccactcccatccacccacacgcgcacggccgcaggcagtagaagcagcaggatgtggtcggcagcagcggcggcggcgcgcgcggtgtccgtgcccgtgtctccggtcccggcgccctcgctcctcagcggccggcgcggcgggccgcggggcggccgtggcgcggtgtccgtgcgcagctcgttgctgggcttcgtgggcggggccctggtgcggcccggcctgggcaagtggctgggccgcgtggagaagcacaaggcgctggccatctacccgccgcacgagggcggctacgagggccgntaccttaaccggcttcgctaccagggctactactttcttgac

SEQ ID NO: 453454 - DNA, 488 bp, Sorghum bicolor
cgtccgagataaagcatcaaaggacagattatcccgtcttgaagcagaattatcactcttgaaggataaacaacgtcaattgactgagcggtgggagcatgagaaatcactgatgactaaaattcaatctatcaaagaagagattgacagggtaaatgtggagatacagcaggcagaacgtgagtacgatcttaatcgcgctgctgaactgaaatatggcagtctgaatgccttgcagcgccagcttcaaatgacagagaaggagcttgatgaatatcagagttctgggaaatccatgctaagggaagaggtgacccaagatgatattgcagaaatagtgagcaggtggacaggcattccagtttccaaactaaagcaatcttgacagggagaagttgttgtttctggaaggaagagctgcacaagcgagttgtcggtcaggatcctgctgtgaaagcagttgcagaggccattcagagatccagagc

SEQ ID NO: 453455 - DNA, 610 bp, Sorghum bicolor
cgtccgatctttgttttctacagtgaccatggaggtcctggtgtccttggaatgcctacgtatccgtatctctacggtgatgacctcgtagatgtcctgaagaagaagcatgctgctgggacctacaaaagcctggtcttttaccttgaagcatgcgaatctgggagcatctttgagggcctcctgccggatgacatcaatgtgtatgccaccaccgcgtcaaatgcagaggagagcagttgggggacgtactgccctggagaattcccaagccctccaccggagtatgacacatgcttgggagacctgtatagtgtttcttggatggaagacagtgatttccacaatctgcgaactgaatctctcaagcagcagtacaagttggtcaaggataggacagcagttcaggatacattcagctatggctcccatgtgatgcaatatggctcattggagtcgaatgttcaaaaatggttttcgtacattggcacaaaccctgctaacgatggcaacacatttgtagaagataactcattgccatcattttcaaaggctgtaatcagcgtgtgctgtcttgttactttggcaaatccgaattgttgtgactatt

SEQ ID NO: 453456 - DNA, 893 bp, Sorghum bicolor
cgtccgccgaaacttgctcaaattaaggagagatcccctgcagctaatgctgaatccagtgagcaatccagtgacaaccaaaacaacaccctggtggtgagccagatgaagcttgccaacattgagaagagagcaacaagagttcccagaccacctccccctcgatcaaccactgcttcaggggctactaatactgcaagtggagcacaaacgccacgtgcaccaggtgcacctcctcctcctcctccacctccagggaaagctggtggcccaccaccaccgccgccacctccaggtgctctaccaaggaaccttggtgggggtgacaaggtacaccgtgcaccggagattgtggagttctatcaaagtctcatgaagcgtgaagcaaaaagagagacatctttaggatcaatgtcatccaatgtttctgatgccaggagtaacatgattggagagattgagaacagatcaacctttctcttagctgtaaaagctgatgtggagacacaaggagaatttgttgagtctctagcaaatgaggtccgagcagcaagctttgtaaatattgatgatgttgttgcatttgtaaattggttggatgaggagttatctttcttggttgatgagcgagcagtgctaaagcattttgattggccagagagcaaaacagatgcaataagagaagcagcttttgagtaccacgatctgatgaagttacagagcaaggtttcatcctttaccgatgatccacaacttgcatgtgaagaagctctcaagaagatgtattctttgcttgaaaaagtggagcagagtgtctatgcactactccgtacaagagacatgaccgtctcacgctacaaggagtaatggatcccatttgactggctgtctga

SEQ ID NO: 453457 - DNA, 634 bp, Sorghum bicolor
cgtccggcttggaattgatctttcggttaacatggtttcatttgcaattgaacgtgccattggacgcaagtgctctgttgaatttgaagttgctgattgcaccacaaaggattacccagaagatagttttgacgtcatctccagccgtgacactatccttcacatacaagacaagcctgctctgttcagaagcttcttcaaatggctaaaacccggtggcaaagtcctaatcagtgactactgtaagaatcctggaaaaccatcagaagaatttgctgcatacattaagcagagaggttatgacctccacgatgtgaaggcttatggacagatgctcaaggatgctggttttcatgatgtcattgcagaagatcgcactgagcagttcctgaatgttctacggagggagctaggtgaagttgaaaagaacaaagaggctttcctggcagacttcacccaggaggactacgacgacattgtgaacggctggaacgcgaagctgaaacggagctctgccggtgagcagaggtggggcctgttcattgcgaccaagtgatttggctttgaagtccagagtgctctcgcctcttgggaataaaaaatggttggggctctgcttctagacccgtgattc

SEQ ID NO: 453458 - DNA, 657 bp, Sorghum bicolor
cgtgcgcttctacgccgacagcaggaccactcggctgaggatcacggggtttctggtgctagtgggcgtcgcgttcgcgctcattgcgcacgcgagcatcgccttgttcgaccagccggtgcggcagctgttcgttggcagcgtcagcatggcgtctctggtctccatgtttgcttccccgctggctgtcatgggtttggtgatccgcaccgagtgcgtggagttcatgcccttctacctgtccctctctacgttcctgatgagcgcatccttcgcaatgtaccgccttctgctgcgtgatttcttcatatatttcccgaatgggcttggagttatcctaggagcaatgcagctggtgctatacgcgtactatagccggagatggaaaaacagcggctcatctgcaccggtgcttgcttgatcataactgagttgatcagtcaattatctgtgtcgtggtttgtattctgtcatcctggagttctgggagaggggcgatggagagggtgttttttttacgttaaacaggaggggcgcacccctactggtgggttattaggaagagtttgaaagtgactacaaaaagaaggaggtgggggagagtaaaaggattaggagacaaagaaagaaatgaaaaaatgagccacactaagtaga

SEQ ID NO: 453459 - DNA, 457 bp, Sorghum bicolor
cgtccgcttgatatgataaaaggcaacaatatccaagtactgatggattcacatttggagggaaactactcaacagatgaggcaaccacattggtggaccttgcctctcagtgcttacagtatgaacctagggatcggcccaacactaaaaagctggtttccgtacttgagcccttgcaaataaaatcagaggtaccatcctatgagatgcttggcattccaaggtatgaagaagaagcatctccccctccacaaccacaacaccctctttcacccatgggtgaagcctgttctaggatggatttgacagctatccatcagattctagtgagtacacattacagggatgatgaagggagtaatgagctatcgttccaggaatggacacagcagatgaggggacatgttggaagctaggaaacgcggagactttgcttttcgtgataaagatttcaag

SEQ ID NO: 453460 - DNA, 558 bp, Sorghum bicolor
cgtccggtcttagtacttttgacaaggcctcagtaaactattatgtgcagtcacacatacagatgagtgaatatcgagatcgtgttgtcctgccggctgcatcaaagaagttcgggagacagatcaatacctgcttgaaggttatggatgtgactggcctgaagctgtctgcactgagccaaataaagatgttgaccatgattacaactgttgatgaccttaattatcctgagaaaactgagacttattacattgtgaatgctccatatgttttctcagcatgttggaaggttgtgaagccacttttacaagaaagaactaaaaagaagatccaagtcctgtatgcctctgggagggacgagttactgaaggttatggactccgagtcacttccgcacttttgcaaaagagaaggatcaggctcatccagggactctttagatggagtagattgctactcggacgatcacccttttcaaccagcagctgtccaactacatgaagcagcaatctctgaaccagtactctgctggtcccagaaaacaaggctcagtccat

SEQ ID NO: 453461 - DNA, 805 bp, Sorghum bicolor
cgtccgccagagcttgcatgtggccattgatgtcagtgaacctggtaaggtgaggccactaatggagatacagatacgcaccaaggagatgcataggggtgctgttggtggagaggcatctcactctctctacaaaggtggtcttactgatcccgaagaggctaaaaggctcaagactattatgttggctgcagcggagttagcagctcttcgcctacgagacctaccaggtagtgatcgaggagctgggaactgcaagaacccagctttctgtcagcttgacaagaatggggatgggagaatcagcattgaggagctcactgaagtgatggaggatctaggtgctggaggcgaagacgcaacagagctcatgcatcttcttgacgcaaacagcgatggctccttgagctctgacgaattcgagtcattccagagacagattgaaatgatgagaaacttggagggcgatgatgatcactacaggaagatcttgaaggagaagctgcacacaatcgacagtgcaggtctcatccatgtctatcgcaaggagctcagtgacaaactgcttgtgggctgaccaggtactaaacacaacccaccaaaccgaacagccatcttactgtagttttgcatgtataccacactgagaagtgaccccagcactgatttgtaaatagtcgccgaatgtacatggtatcatatatgattgagaaaaaagagggccttcaatactggctgaatgtggatggtgttgtatatgattcaaaaaaaggcgggctgtaatactcgctgaattatatgattc

SEQ ID NO: 453462 - DNA, 631 bp, Sorghum bicolor
cgtccggatgactgcgccggtgctgacgcaggtatcgcccagcgacgggcccttctgcgcctcctccttcaccgtcagcttctacgtgccggccaagaaccaggcggacccgccgccggccgaggggctacgcgtggaccgctgggctggggccaggtacgcggccgtgcgccgcttcgggggcttcgtggcggacgccgacgtcggggagcaggcggcgcagctcgacgccagcctccagggcaccaggtgggccgccgccgtcaacgacgcgcgcagggctgacccggcatcgccctacaccgtcgcgcagtacaactcgcccttcgagttcagcggcagggtcaacgagatttggatgctcttcgacgacgccgctgccgccgccaccagtatgtgatgtgattttcaaacgtgctataaggcactgagcgaggcgtgtaggaaaggacgtgcataaagcacctatgctagcattaatttttcgtactcttttgcgctagctacgtttacttttgagtaacaatgaggtgcctcttgtgtaaacaataatgataaaactaattctacttgtaaacacattttaatggcacaaatgtattattcaatttttgaaaattttggggaccct

SEQ ID NO: 453463 - DNA, 559 bp, Sorghum bicolor
acccagaatagcgggggaacatgaaatctgttgccccagatgcagctacaaaagtgaatgcatattagcagggatctgtcgtatcgtatttttgaatcaagttggttgcctgaactcatcgtatttgttttctgaaatgcattgacaacctgtcatcgctaaaagtggaagcactgctcaaaccaccttgaaaaaaagcaaggaacctgaagatggtcaaaccaccctggaaaaaaaaagctcaagggaaccagaagatagattccaggttcattctcttcggaacactttgatttagcctttattcttcctgcgtccacgcaagagacactcagaccaaattgtatatatcgaggtctattttagatgcatagtacaacaccatatctttagtactacctcaaagttttgtgaactttggagcactatacacagcaccttcgctctgtgttgcctatctgttgttatacagcctgtacatatgcaccagttgtgcatcttaaactctatgtaaataccatgccacctatgtatggtttaagaagctccacatcagtgt

SEQ ID NO: 453464 - DNA, 850 bp, Sorghum bicolor
cgtccgcggacgcgtgggctcggtcgccggcctagccgccggttccgctgctcctcgccacaggtcgatgcagcggcggcaccgccggcgagagggcggcgagtaccggccctccttcgcggacgacctcctcctcgccttcttccggagcaagatggtggaggaggttggatgggattccgaaaagcctgggtatgctgggctaatggaggtagcaaaccgtctcatggtcaagggaaagagtgctatggagactgagcaagctgctgtccgagtactacagtcattgtttccacctgtcttgcttgttctttacaaagctcttttatcgccaattgctaatggtcaactagctgccatgatgcttgctagagcgactgctctttcatgccaatggttgatgggcccatgctcagttaattcagtcactctgcctgatggaaaatcttggtcaagtggggtgttcgtgggcaaaggcaagtatctggaagagagcaaatgtcttggcatttgcatcaacacatgcaaactaccaactcagactttcttcaaagatcacatgggcgttgatttgtacatggagccaaattttgaagactatagctgccagttcaacttcggggtgccgccttcacctcttgatactgacaaagccctcaaggaaccgtgctgggacatctgcacatatgcgaggcgacgcatagaactagggagaaatagtagcccagatgagcttatttgccctcaatgttaatatgcaccttgcacatcatagataagaatatatgatgtcataacccggtaatggtataggtactcttgctttgattatgcacattgggcaaggggt

SEQ ID NO: 453465 - DNA, 437 bp, Sorghum bicolor
cgtccgggcgaccgtggccttgctgcgctttctgcctgtcccaatcttgaggttctgttccttgtgaagacccctgagtgcactgattcgggcatcattagtgttgccgagaagtgccacaaactccgcaaactgcatgttgatgggtggcgcacaaaccggattggggatttcggactcatggctgtggcacgaggatgtccagatctgcaggagctcgttttgataggggtcaaccccaccgtgctgagcctccggatgtttggtgagcactgccggtcgctggaacggcttgcgctttgtgggtgtgaaactgtgggggatgctgagatcatttgcttggctgagcgctgggctgcgctcaagaagctctgcatcaaggggtgccccgtgtcagatcgtgggatggtagcactgaatgggggctgccccagttt

SEQ ID NO: 453466 - DNA, 553 bp, Sorghum bicolor
cgtgcgaagaagcacaataacaagctagccacacttgccctttcaattcgcgaccgacaaccggccggccaccatgagctccacggcagcggcggcaccggagtgcggcggcgccaagacgtcgtggccggaggtggtcgggaagagcgtggaggaagccaagaaagtgatcctcaaggacaagcccgacgccgacatcgtcgtgctgcccgtcggctcgccggtgaccatggattaccgcaccaaccgcgtccggatcttcgtcgacacagtcgcccagacgccccatgtcggctgataagctagctagctgcttctgctgctgcatgtctcagtgctgcttccttcgctcctcgctccagaacatcaataaaatacgatgatcgaataacgcgcggacatgccatgtatgcatgtcagtgcatctgccgaaaaaataatggatgtatacgtggttctttcgtactataaattatcactacataatgacatcgttcttatataaataaatgtatcagaatgtctttaattcttgcacgaatggatatatata

SEQ ID NO: 453467 - DNA, 525 bp, Sorghum bicolor
cgtccgcccacgcgtccgcggacgcgtgggttttttttttttttttttttttttttttttttttttttttttagcctgaatccatgaacaagggttggactgaacatcgtcatacaaagggtacatccttgcatggcgatagtacaaatcaggcaaactgaattcagcagctcagcgcaaaccgatacatgtactcaggggcatgcagcaacactcatctacttacagaagcgcagaggatttgttacatcgacatcttttcatcttttcagggggtaaaggggagtgataacctcggacaaaaaataatcacacatattgcctatcttataccacatctggcaatgtcgatctccaccagtttctaacagacattaatttggtcctcaactaatcttcaagccgtcctctcagccagagatcaccaccctacaaaggcacattgcttccgtgcatgctcagggatcaacttcaccaggaaatccatcggtacactcttcagctcatggggcttgaaattgaaga

SEQ ID NO: 453468 - DNA, 581 bp, Sorghum bicolor
  unsure (1)..(581): unsure at all n locations
cgtccggaccgactttgtggctcgcaatgagaagttcaaggagcttgtgaacgatcttgcaatgcaagtggtggcatgcccacaggtcgactgtgtctcggtggacgacatcccagagagcatcatcagcaaagagaaagagatcgagatgcagagggacgacctgcagtcgaaacccgagaacatcagggagaagatcgttgaagggcggatatcaaagaggctcggagtgatggccctcctggagcaaccctatatcaaggatgacagtaagaccgtgaaggatctcgtgaaggagatgatcgcctcgctcggggagaacatcaaggtgcggaggtttgttcgatacaccctgtgtgagaactgagtggtgtgaggcggtgatctccgtcacagtcctgacatgagaaggtgggcacattttggttcaaggaggtgcgtagctgttagtctgtactcagttccatctgtaattccgtatcacctgttactgctgttcctggttcaaaagagtngaacttagtactttgtagatgatataagaggggtcaggacttccatcaaagcatacaacattacgg

SEQ ID NO: 453469 - DNA, 533 bp, Sorghum bicolor
  unsure (1)..(533): unsure at all n locations
ccgcattcccgggttggttcatagctagtgcgtggatatatagctatatatatatatctacctgagagatcgatctctagctagctcggcaaccatggcgaggcaacaacaagtgncgtttcatgctcgcagctgctctgctcgttgcaacgtttgcgtccattcctacaagcgtgcactccatcgccgtctgctatggcatgctgggcaacaacctgccgtccagcagcgacgtggtgcagctctacaagtccaagggcatcaagggcatgcgcatctactcgccctcccagtccgcgctcaacgccctccgcaactccggcctcgccgtcatcgtcgacaccggcaacggcaacgagctcagccagctcgcgaggagcgcctcgtacgcggcgtcgtgggtgcagagcaacgtgaagccctactaccccgccgtcaacatcaagtacatcgccgtcggcaacgaggtgcagggcggcgccacgcagagcatcctcccggcgatcccggaacctggacgccgcctggcgcgc

SEQ ID NO: 453470 - DNA, 643 bp, Sorghum bicolor
cgtccgcccacgcgtccggcctcttcctccctccctcccaccacctcctctctatccatccatccatctgctgccgtccccctcccgctgcgtgcgagaggcgcgccaccacaacggcgcctgagttcgcctttcccgtccgcggcacctccgctcctcccacggtttctggaggacaattctttgttgtttagcgttcctcaaaagtaaaaagggtaaatgggatcagaaggaccttcagttgtcactgtccatgttactggatttaagaagttccatggggttgctgagaacccaactgagaaaattgtgaccaatcttaattctttcttggaaaagcgagggttgccaaaaaatcttgtccttggaagctgtacagttctcgaaacagcaggacagggggcacttcccacattatataaggttttagagtctgctattgcagacagaggaactgggtcctcggcacagggacaagtaatttggatccactttggagtcaacagtggtgcaacaaggtttgcccttgagaaccaagctgttaatgaggccaccttccggtgtccagatgagttaggatggaaacctcagagggtccctatcgtgccctctgatggaagcatctcacggacgagagagacta

SEQ ID NO: 453471 - DNA, 650 bp, Sorghum bicolor
cgtccgcggaggaggagttgcggcagtacgacgggtccgaccccgagaagccgcttctgatggccatcaaggggcagatctatgatgtctcacagagcaggatgttctatggacctggcggagcatattcgttatttgctggtaaagatgccagtagggcattggccaagatgtcctttgaaccactggatctgaatggtgatatatctggcctaacgccaatggagctcggttccttgaatgactgggagtacaagttcaccagcaagtatgtgaaggtaggacccataagaagaacagtgcctgctgaagaggtttatggcagcatttcccctgaaataagggaagaagttactgtgcctgtggttgaggctgagcttgaacctgagcctgagccgcatgatggcgatgccccatgaataggaaacactttaagacatctcagttttgataggaagagtgaagtggagagtggggcactgctgataatgttccaaaggtagtcagaatttagaaataacagaatgcctcgtacctgttgcattgcatggttgtatgcaagtatagtgtctaatttaccccaatagtagatgtgtacactgcagtaggattgaatggttgtttgcaaaaatagtgtctaatttttgctc

SEQ ID NO: 453472 - DNA, 577 bp, Sorghum bicolor
cgtccgattcatttgggccgcctgcaccaccccctggtttctggatgtccttcctacgagtgatgcatggtgttgtaaatttctgtgggagggttagctgccttattagccagaacactcaggcatttcacatgttcattactgcatttttgcagttatgtgatcgggctggaatgctttatggcgagcttgcaagatttgttctacgtttgctggggatcaaaacaaaaccgaagaagggtggtgttaagggcgcaggagctccatcatcagaaggacgaggccagcagtttgttgaggcaccgaaagctaactcctcatgggacagcgtctggactgaggatggcaaggggaagtaagggcctgtttgggtgcagtgaggctggttttgtgaaaggaggatgagtttgcttgtggaagagaaatctgccagtatgtgttcggatgcattttgcatttggatagaaggcaaaaacaagtaatcccttacgccctttgtatttgtcatgttcttccatagtgcacatatagatctggcacggtggtatagtaggtagtctgcaatgagaaatggggg

SEQ ID NO: 453473 - DNA, 487 bp, Sorghum bicolor
cgtccgcgagaagccatcctcccaaatcggcctacgcttccacgccctcctccacgaggtgaggaaaccctagcgaccgaccatggcgctgctcccgcgcaccgcgcggctggccctcctctccactccgcgggcctactccgccgccgctgctgcgggcgcctcctcgacgtccccagcgccatacgggggcgcgcccccgccggcgatgtcgaagacggccgagttcgtggtctccaaggtggacgacctgatgaactgggcgcgtaagggctcgatctggcccatgacctttcgggctcgcctgctgcgcggctggagatgatgcacgccggcgcgtcccgctacgacttcgaccggttcggcgtcatcttccgtccctcgccgcgccagtccgattgcatgatcgtcgccggcacgctcaccaacaagatggctccagccctccgcaacacttcgtttttatttggcaattattggctagcta

SEQ ID NO: 453474 - DNA, 855 bp, Sorghum bicolor
gccgtcgtcatctcccagcgcgggcgcgacgttcctgaggcgtccgccatggacttcgtcggaggttatgcacttgctttggacatgacagcaagggaccttcaatctgttgctaagtctgcaggccttccatggactttggctaaaggacaagacaccttcactccaattagtgcagtagttccaaaatcggctgtcactaatcccgatgatctcgagctctggctaaaggtagatgatgaactaaggcagaaaggaccgaccagggacatgctattcaagattccttttctgatcagctatatcagttccttcatgacattaatggagggtgatgtgatactaacaggtacccctgagggtgtgggtcctgtccgagtaggtcagaagatcacagctggtgtaactgacctaattgatgtcgagtttgatgttcagaggcgcaatcggtcattttccacatgatgcaataagcaagaaagtaatggtgaatacaaagcgcagtcctccaccgtgaatcgctttcctggacctggagcaattgcagatagctgttgagccttattcttgatttagtttacccgggtccggggagactatctatgaatatgctaactcgttcctgaagtatcttttctcccagatgattgatggagctttaagctcgctttctgcatgcaacaaaaaaatatatatatcccattttttctctaccctgctttgagaatactgcagcagcgatttgaaacagctgtgctgtgcactgccgatgaaatacactgaaacgagtgcgtgtcttgcagcgcagaacaaataaggttttacttttacaagtgttcacaaccatttggtgtt

SEQ ID NO: 453475 - DNA, 410 bp, Sorghum bicolor
cgtccggcgcatgttgccatcttcgatcagactgtggcacgtcatgcgtgcctactcctaattttggttttcactactaatttttgtttctagagatctagtgtggatgtcctgtctatttatttactaatgatgtcagttcctccttcctcctctctacaaattgttagctggccattttcaacatgcaacagaactggacctgctctaaagaagagaaagctgtgtggatgcatcggcagttagcatcttaactttgcatgatgctggttcttgccagttaaattgatagtataggttacattggctaacatgatattactacagtatgtaccatcaggctgtgttgcataaacgaccatattttgatgttgtattcgcattcgagaatgctggttcaacatcttctg

SEQ ID NO: 453476 - DNA, 579 bp, Sorghum bicolor
tggggtcggtgctggggcggtatgacgggaatgtgtacccggcactgtatgaggaggcgtggaaggaccctttgaatgagacggtggtgcctgaggggtaccatgagtacctccggcccttgctcaagcagcagctcaagctctccaggctctgatctgtttggctacaccctgcaattctccatggcggttgcccttctcagagaatttgatacggtgaccccccattctgaatgaaagaatgaaataaactactaacgattcctgttaaagccaaggaagaggtggataaatataaatgtattctgtggtgaggatcatataagaagcacgttcaattaataaagaaagagcgagaggttgagcatctctctgctgttgctcaaatgttgtacgtagtgcaagcagtagaatgaatatgtacaagtgcatgtatggtgagttgaagtttcatttattagctaaaaatgtatcaggaaccaatggcttgatttgcctcatgcccaaaatgaaagccagattccaaacacataaaactaaaggaatttgtgcccgaaaattgaaaagaatgtttttcgt

SEQ ID NO: 453477 - DNA, 376 bp, Sorghum bicolor
tcgagcatgcggttcgtgggatgctccccaagggcaggctgggaagaaggttatttacccacctcaaggtatacaaaggggcagaacatccgcacgaggctcaaaaacctgtcccactcccaatcagggataaaagaatacaaaaaactggctagagaattccatcggttgaaaaggatgcagtgacgatttcctccccagaaggttttgccctttggtttgaatgtcatcttcataatcatgcctctgaccaggggggagtataaatcctctttgtaatttggatgtttaccaaagcatgaaattcagtcatatttctatcaatgagtagtcatgtaatctggtaccagttaaatcaacgtgaaatctctatttt

SEQ ID NO: 453478 - DNA, 790 bp, Sorghum bicolor
cgtgcgccaagcccgcccagatccagtcaccactgcccgtccacaagccacaccaacccgcctcaccccattcatcgacgggaccacctcgccggcgagagagagagagagagagtgacagatggaggcggcggcagcggcggccggcgtggagctcggctcctcgaagccccagatcgcgacgcaggcggagatggcggagggcccgggtgcccctcgcctaccgcgaccagtggcgcgcacctcctcatcccgctcaacaagtgccgcgtcgccgagttctacctcccctggaagtgcgaacccgagcgccacgcctacgagaagtgccagtacgagctcgtcatggagcggatgctccagatgcagaagatccgcgaggcgcaggagaccaaggtcaagggcggcgcctccattggcctcatcccggccaccgccaagctctcctgatccggccccggcccgatccgcttgatttaggtctgccggctatcgtgcagaggcattgtgctgtgcaaggatcctgaatgtttgttgtgtgaacaaacatgtgtttgaatttggcataaagttaactgttgtcttcttcccttccccctctctccctgatgggcatcttcaagtttcaatttgatgatggaataaggaaacattcttgtcctataaccgaagactgaatagcgccttcaagttttgaatacaatccttggtgtagactgactcacctctgtttggttgtttggttgggttactgcgtagtaaaaccaactactgtggcatggtaattgca

SEQ ID NO: 453479 - DNA, 461 bp, Sorghum bicolor
  unsure (1)..(461): unsure at all n locations
cgtccgcattgctcaaggagatgtacccagaagcacaccccacacccaatgggatactgcagactacaaccgcctcattgcatgttatggtgccaatataacatagtgcaaaagattaaagctggagttacttagtttatggcttggtctttttatttgtggtgcagattattctccttttttgtgagcaaattatagaggacaaacacagntccacatatatttggttatctgtggatgaatagaatggtgtgctcaagaataatgttactctatggcccccaacgtgcagcttcctgggcgtgcgaaggtgcgtccattctactaaacacgtcacggtaatgaaactacttctgaactcagaggtacatgccccatcataaattgagcacacatttaccattatcaatacaccaacacttatcctgtgtatatgtttctacagaatcatcaaaccacat

SEQ ID NO: 453480 - DNA, 199 bp, Sorghum bicolor
  unsure (1)..(199): unsure at all n locations
cgtccggtcttcatggaagatagccctgtgaaattcaggactttcatggaacctcttcagcaggttgcatttaacctggaggcaactcctgatgcttgcttttcgaactgatgttgctaagcatgcatttattggtttgatgagaagatcacgtggcatancgattgtcactcacagccgcaagacatatggcctccta

SEQ ID NO: 453481 - DNA, 875 bp, Sorghum bicolor
cgtccgcggacgcgtgggttatgtcttggcaccaagctggagcatgtcattagctcagttagcccatgatgtagctgagaagcacccagcgatcgagggtgatgtgatcgtaaaaccatcagatgaaccttctggttcggcaagcctaggattatcctttacctgatccacttcatcctctttcagaatgcatttgagattgcatttttcttctggatactgagcacttatggattcgactcatgcatcatgggacaagttcgttttattgtgccgaggcttgtcatcggggttgttattcagcttctgtgtagctacagcaccctgcctctgtatgcaattgtaacccagatgggcagctgctacaagaaggagatcttcaacgagcatgtgcagcagggcgtcctgggctgggctcagaaggtcaagatgaggaagggactgaagggagctgcagctgctagcaagaacgaatcgacggtcaatgccgattcggcaggaccttctgttaagattgaaatggccaaggctgagggggaggatgttgaggtcgttggaaacacagggtgatcagtgatgggacagtagggttcccgtgttgtaatgatgtaacatgttcatatgccatcatttttttttttgtagatagttgttgcagcagccgcgaagtgtttgtcgtagactcgtagtatcttgaagccatttttgtggtctgtgcatgtcatgacctggaccctggcctcctaataggagtgggtgagtttaggcccgttagccttgtctgttattagtccagtaggaaccagagtcctatacttatactaggaaaaagtccacattacattcatcaatatttgcgaaagtcttttttctct

SEQ ID NO: 453482 - DNA, 549 bp, Sorghum bicolor
ttacaattgttgatgtctactgcaggatgcccatattcttgtgttaaaagggcacctcatgtgttttcattttcagatgatattggtacagctcgtgcaatatctcaaggtaatggagaagatgaccttgttcagcttgctgttgggcagtgtccaagaaagtgcatatactatgtgacaccatgccaacgcactattttggaggatgttcttgctagtgtgttgcggccgccttacgatatcgctgaagcagcagttctggattccctcctttcagaaagcgaagtttgagaataacaggtacaggaagcccaaagagaggagcaaaatcatcctccgattatgttgattggatgtgatctgatcctgaggcacaaagggggatgccagttcagccaaggcagttcagtagatttttgttggtttttctgttctccttggtcagttggcatgacgcatagatgtattgtagtttacaaaatagaatatgtttatgtggacaaactgctttgtctgtggcattgctggtaattttcatttcattttctg

SEQ ID NO: 453483 - DNA, 693 bp, Sorghum bicolor
cgtccgagaaggcttgccaagaggtgtcccgccatctcagcctgtgcatcacatggctggttatagacctgagatgggcaatgtaaataatttccatatgcaccctcgccagcccaactatggagaatttggattgatgatgccaggcccatcagctccagaggtgagaggcaatcatccagaggcatttgaaaggttgatccaaatggagatgtcagccagatcgaagcaacagcaggtgcaccacccagcaatggctgcaggccgcgtacctagtgggatgtatgggcatgagcttgatgcgaagttaagatacagatgatggatgcgcggatgctttcgttccatgcagaggaccccggaagtgtgggttgttgtatgcgcgtggtcagacaaatgtgtatcgtttctgttaacaaggtttagcatcagccatcgctcgcagctgattggattggaggtgtctgtctcacttgtaggattatagcatgtatgtacatgtgaatgggtgatggaatggagtgggtctatgatctgtaggagcgggcaagtctaccgggaaaaggggatatgatattgtgctgaatgaaaggcatggtgtcgccgtcttagcagccacctgtgtaatgatgttttctgtgtactgtgtctgacaactacccaattttcattttgtataaacgctgttctgcg

SEQ ID NO: 453484 - DNA, 411 bp, Sorghum bicolor
cgcccgcggctcgtcacctccctcgggccaacgcgaggccaaacccaattcccacatctcctgccgctctcaccgaggacccttccccttccccaagaactgcaccgagtcctagagcgggagagaggtagaaggaggagcccataagagtttctcctcgcctctctctctcccttcctgcttatctgtctgcgaaaaattcttgtcgcattggtttggttcccttgcgaaaggaggcggctttctgtcttccttgatctacatgatggcgagcacggcgtcagcgaccgccgccgccgccgccgcggcattcggggctgccgccaagccgcggggatcgtcgtcggccccctgcgcaagggtggccgccggcggcaggcggcgctccggggtggtggtgcggtgcgacgc

SEQ ID NO: 453485 - DNA, 225 bp, Sorghum bicolor
gtgtcgccaggcaccgccccacggcggcggtcccagccggcgctgctgcatcggcggcgagaggcggatggcgaggaagatggtggcccctccaccaccagccgcagcttctttcagaagctgccactctgctctcggcgatcgtcctgacgctggtcgtccagacatcgtgggcgccgccggcgctggcgcacttccacccgacggccaatgcggcgggcacga

SEQ ID NO: 453486 - DNA, 553 bp, Sorghum bicolor
cgtccgcccacgcgtccgccgtcccccgcactcgagctccgaagccatcgtatccggcggcagaagcagcggcggcgagatggtgaaggggcgcacggggcagcgcgtgaggctctacgtccggggcaccgtcctcggatacaagaggtccaagtcgaaccagtacgagaccacgtcgctggtgcagatcgagggggtgaacaccaaggaggacgtcgcgtggtactgcggcaagcggatggcctacatctacaaggccaagaccaagagcagcggcacccactaccgctgcatctggggcaaggtcacccgcccgcacggcaactccggcgtcgtccgcgccaagttcaggtccaacctgccgccggaatccatgggccgcaaggtcagggtcttcatgtaccccagtagcatctaaagataatttgaaggtttggaggatcatgcttttcttctagattttatctaaagctgtccttgtaagggttgtgttcaggttgagagttagcaggttgagctgtctatttgagaaccctttaaagttctccaagtt

SEQ ID NO: 453487 - DNA, 538 bp, Sorghum bicolor
aattccaggtcgaccacgcgtccgtaaaagtttcatgttctttgcccggtcaaaataatgttccataaaaagtatagtgtcattcggatattgcaaaatagagagcctccatcaattaggtacggtaatgatatacttaagacgtccgtccgttcggacgttgctgtccactcatttcgctcctcctcgatgccttcttatccactcattcttttccactctactcttttctctcgtctcgctgccgcccgccgctcccaccatgcggtcgcacttcctgccgcgccaatggtgagtcgctcctccctccctcctcgctgcgacccacgcgccctcgaagccaccggagtagagcgtgacggtggtagcatccagtgagcggcgcagctctctttctccctgccctttctccctcgctctcataacatccatgcatctggagatggagagaacggcgcggcttcgacgaggtatgtggggagggaattggatcttaagccctccttttcctttatccttccttcctttttggggatct

SEQ ID NO: 453488 - DNA, 748 bp, Sorghum bicolor
  unsure (1)..(748): unsure at all n locations
gagttacaggacagggtggtgagcgccgcggagatggggtcggcggaggagcttctgtgggtgcggaaggagatcgtccacttccacggcgagatggtcttgctcgagaactacagcgcgctcaactacaccggactggtcaagatcctcaagaagtacgacaagaggaccggcgcactgatccgcctgcccttcatccagaacgtaatgcaggagccgttctgcgctaccgacgtcctgtacaagctcgtcaaggagtgcgaggagatgctggaccagctcctgcccggaaaccagccggctgtgccaagcgaagacgacgggaaagaagacagcgacagtgacgacaagccggcgaagcccagcgcctcgctggccaacggaaatggcactggggacatggagctggaggaaatcgaggacatggagagcatgtacatgaagagcacggtggccgcgctcagggcgctcagggagataaggagcgggagctccacagtgaacgcgttctccctgccgccactatggtgagggccgaactcgctgccgacgttgcagatgactgggttgattgacatgttgtggggctgtgcatacaactgcttctttgcactgcagctcattcctgcctcgtgggttgtgctcaaagaagcattgccactttggtgctgcgtcatgtacacaatagtngctttatacataagcaggggccctgcggtggaatgttgcacaaatatcaaaatatata

SEQ ID NO: 453489 - DNA, 744 bp, Sorghum bicolor
cgtccgggagcgaacacctggtggtgaacttcagttccaaacagaggttgagatgattagcatggcagtgcacaggaaccttctcagacttcgtggtttctgcatgacgcctactgaacggttgctagtctacccatacatggctaatgggagtgtggcatcacgtttacgagagcgacagcaatctgagccacctcttaagtgggaaacaacaagaagacggattgcgcttggatctgcaagaggactttcttacttgcatgatcactgcgatcccaaaatcatccatcgggatctcaaagctgcaaatattcttttccatgaggacttcgaggcagttgtgggtgattttgggcttgccaagcttatggactacaaagatacccatgtcacaactgctgtccgtggaacaattggacacattgcgcctgagtacctatccactggcaagtcctctgaaaagactgatgtttttggctatgggatcatgcttctggagcttattactggccagagggcatttgatcttgctcgtcttgcaaatgatgacgatgttatgcttcttgactgggtgaaaggactgctgaaggagaagaaggtggagatgctggtggacccagatctgcagaacgcctacgaggagatcgaggtggagaacctgatccaggtggcactcctctgcacgcagggctccccgttggacctcccaaagatgtcggaggtggtgaggatgctcgaaggtga

SEQ ID NO: 453490 - DNA, 447 bp, Sorghum bicolor
cgtccgggctgaaggaggctcagaacactctgacgctgaataagagctagagcagctcactagcatattgcctgatcttgagaagaagcttgaggacctggagcaagcaaacccaagccctgccatggatgagatgttgaagacaattgcatccagggtaactgacgggatgccaagagctgcatcttttacttcttcccagatggcaacctcgagcaatggattcgactcctcggttctgtctacggcagcaacaactggaagcactggaagcactgtgactgaccctcggggttgttggcagaggtgtcaaacgagctagcatcaagccgatatctgctgaacctgctgcgaagaaacctgcacttgattcaccatctcttcaaggtgatagcagcatcaacttctgaggttgtccctgcaacacagaatggtgatgagtccata

SEQ ID NO: 453491 - DNA, 600 bp, Sorghum bicolor
cgtccgcaggatctcgtccgacacctccgcgttaccctacacgcaccgccgcggccaccggtccgccatccgcatctcccgcatcgtctccgagacgttccgcctgggcctccccggcgtgcgctggttcgtaatgggcgacgacgacaccgtcttcttcccggacaacctcctcaccgtgctcaacaagttcgaccaccgccagccctactacatcggctccctctcccagagccacctgcagaacatctacttctcctacgggatggcgtacggcggcggcggctgcgccatcagccggcccctggccgacgcgctggcgcggatgcaggacggctgcctccgccggtacccagcgctgtacggcagcgacgaccggatcccggcgtgcatggcggagctgggcgtgccgctcaccaaacacccggggttccaccagtacgacgtgtacggcgacctcctgagcctgctcgcgtcccacccggtggcgccgatcgtgacgctgcaccaccctgacgtcatgaagccgatggtcccggacgcgaggtcgagcccggcggcagtgcagcagctgttcaaccgcacggtgaagctggacac

SEQ ID NO: 453492 - DNA, 1093 bp, Sorghum bicolor
cgtccgcgaaccttcaaaattattgatcttggagcagcagctgacttacgggtaggaattaactatattcctaaagagttccttttggatccagggtatgctgcgccagagcaatatattatgagcacgcaaaccccatctgctccttctgttccagttgcaacaactttgtctccagctctgtggcagctgaatcttcctgacagattctacatatatagcttggggctcatattcttgcagatggcattcccttcactacgaactgacagcagcctcatacaatttaatcgccaactgaagagatgcgactatgacttacaagcctggaggaatctggtggagccacgagcgactgctgagcttcggaggggctttgacatcatggatctagacaatggtatcggatgggaactcctcacgtcgatggtccggtacaaagcacggcaaaggaccagtgctgagggtgcattggcacacccatactttaaccgtgaggggctccttggcctctctgtcatgcaaaacgcacgactgcaactgttccgggcaacccagaaggactacagtgaagccgctcggtgggttatcggcctcatggcaaggtcaggaactgaagaagtgggaggctttacagaagcacagcttcaagagcttagggaaataaaaccgaagaaaggcaacgcccagcggaacgtgcttgcctccgtgctgcgcctgcagaagaagatcgtgaaaacgatcaacgagagcatggacgagctcgccagccagcgcaaaagcatctggtggagccggtggatacccagggaggagtaggccgccggccgccggcgcacctgtacattgtccacttttgctgtataaaacgtcgcccagtagcactggtgatgggatactacactatcctacgggacttcgtacagtacatgctgatgactggtgagtaaagtttgtctgaaaagatcggagtaacacggtgtatagctggaaatatttgctattgaagcatcatgatttttgagatccctgtcctaagttcgtaggcactttcatcaaaaaggaggaggttagttcatcataagcactcaac

SEQ ID NO: 453493 - DNA, 860 bp, Sorghum bicolor
  unsure (1)..(860): unsure at all n locations
cgtccgcccacgcgttcggccatgtggaacttcacaaatctgtaaaatgggcttcactaagcccacgctggtgtgggaaccccacctcatggaaatagtgtcagtaacgtcgtttgtgacagcccagtcaaattcgtttcaagtgtcgtttgcagcagagctcagacttctccatcacatgatgatataaacttagaacaagcacaattaactacttcaccatatggatctgaggatacctcagcatcaggcacaagctttgcagcagtgggagcagttgttttggctgatgaatccagcaagctcggtaacttgacatcagatcttgaacttaatacaattcagagaatgccactgcacacatcttcagaatgcgtggctcagaaggatgaaacaaagtttgaggaaatcagaagcttggcaagcagcaattgtgcagagtttgtagagagctcagttcttgccattgccgagaaggtacacttagacataggtggngatgaagtgaattgaaacgtcgttgcagttgaggttttgcttnctatactttctncctgtcaaattaagattctagtttgatatgatctgaactctntgcctgtcttgctatttgtcattgatttactgtcctgatccacaaagtggatgaatcatgtgattcaaagtggtctcaaaaggtgatgcaggtgtgaagttgcatagcacttgagaggccagaaatcggagtcgaggcatgtctggtatcagaatccttcattcattccttaagcataaaaaaaaatgctctattatggttatgttgtgttttttgggccttatttctttttggcaggtcttaaatatattccatcaactgcttg

SEQ ID NO: 453494 - DNA, 396 bp, Sorghum bicolor
cgtgcgaagcacgccatggctagcacgatccctacagtccttctcgcttctgccatcctcgttgctgcagcgacctacttgcgccatgacacacgcagcagcggcggcagcgtcaccgccggaacgcacctccacttctacatgcacgaccagtacaccggcgagaacccgacggccgcgctcatcatgcagggaaggccgccgctgtccaactccaacgccaccaccaccggcagcagcgacgacgacgacccgcgccggttcggcgacatcgccgtgatgaacaacgcgctcacagaagggcccgagcgcggcagcgcgcgcgtaggcacggcgcatgggttcacggtgcgcgtggcggagcgcgggtccgttaacgccctgagcatgcacctg

SEQ ID NO: 453495 - DNA, 758 bp, Sorghum bicolor
cgtccggctgtcgctacgcctgctacagcgcctaatgcagcacctggatatgctgggatggcataccaccatgtcattcaatcgcaccaccacgcgttaccacagtctgttgcaaacatgggtggcaactctggatatgagtatgctgatcctacgcgcccacaagtctactactcacaagcagctgcacctccaacattgccacctcagtatcagcccatggtctctcctgatgccggacaggcagaaaaacattaagcagaactgtgcctcagatcgaggattggtgaattcgggtatgttgcaaattctacaggcgtagttatccatctattatcattattgttgctactgcatgtttacatgagagtctgtggcaaagagtggaaggtgttgcaactgtgcattcgggatcaaaacaagtaaaacaagtatgcatccaaggatgggttcaaaataggattttaattggatggttcttgtgttggtgagacagaagggtgaccatgttgggttagattggggggagtgaagtgttggaaccctgttccaattggtctttttttcttcttcttattttgaataaaatatatagtgtccaaaagaacctggcgaaaacgaagaactcatcatttgtgtagccctctgtatatttgatctcatggttgtcattcaggttgaggtgcagataagtgtgttattagcttgcttgtagaaaccttattcgagttaaatatatacatcggtccggtttttgt

SEQ ID NO: 453496 - DNA, 929 bp, Sorghum bicolor
  unsure (1)..(929): unsure at all n locations
cgtccgttttctagttgctttgcgtttacagtggcgtgcggtgtgccttcattcattccttcttgtcctctcccattgtcctctgcccattttttctggtgtggtgaattagttgggcttttagtgatatgtantacacttactgttgttgccattgctcttctgccaggactatgttccgacggtgtttgacaacttcagtgctaatgttgtggttgatggtaacactgtcaacctcggcctctgggacactgcaggtcaagaggattacaacagactgagaccactgagctatcgtggagctgatgtntttcttctggctttctcactgataagtaaggccagctatgagaatgtttcgaagaagtggatccctgaactggagcattatgcacctggtgtgccaataattcttgtaggaacaaagcttgatcttcgagatgacaaacagttctttggggaccatcctggtgctgtccctatcactactgctcagggagaggagctaagaaagcaaataggcgcaccatactacatcgaatgcagctcaaagacccaactaaacgtaaagggtgtgttcgatgcggcgataaaggttgtgctgcagccaccaaaggcgaagaagaagaaaaaggcgcagaggggggcgtgcctccattttgtgatttaatcatcagtagacaaagaaacaagggcgaaggtgccatggttttattatcgtcgcgtcttgcttcagcgaaacagccatggatggtcccccaccccctaggtttactggcggctgcagcgagttctcatctctttgtcgaggcattgagcgatatgtttgtttcatttcctccttcctgccttgtgattatctggtgtgtgactgacgaagtcgtggcaattaggtaacttgcttagaaggtatttcccgtgtttgcccc

SEQ ID NO: 453497 - DNA, 642 bp, Sorghum bicolor
cgtccgcagatatactctcaagaacagttctactggggagatcactataaaacatctgaacaaagagcaggaagctgatcagagcaatttccgtgacccaactaccaatactgatctcgaagttcaggaaaaaatgtctctcttggaatggtttgccaatgaatacaagaagtttggttgctcgctggagtttgtgaccaacaagtctcaggagggatcacagttttgtagaggatttggtggcattggtggcatgttgcgctaccagctggatatccgttcttttgatgagctctctgacgatgacgatgtgtatgaagactctgattagcaatcagccaacctcatgcctgtgctggcccatggaaagacgcaacagctcgatcgcgctatatctatgcaggaacacacgaaaagcaaatatccaaagattaatgggcatgggccagcctcatcctcttcaggaggagcttaagacaaagatgattttgagtcactttaatggcagtattgtgaccagaagataccttaatcacaatcatcattgcagtaatgccgtcgagaagaataccgttggcaagtgcacaaaccatggcagtaacgtgcaaaaaagtatcgattttaagggatgtaattcctata

SEQ ID NO: 453498 - DNA, 557 bp, Sorghum bicolor
cgtccgcccacgcgtccgagcttcttctcctttttttttttccattgctcctctgcttcgcgtcgcctcgcgtctcttctctccctcccccggcaggcaaacagacacagcagagcgcaggaacacagagcgagagagatcaatcgaggccatggagggctacgaccgcgagttctggcagttcagcgacacgctgcgcctgcagacggccgccttctccggcctatccctcggcgactccatctggtcccccgccaccggcggcgccgccgccggggctgaccggcgcaacaacagcaccaacgacctcttcgccgcatccgcatcgcccgccgacaccaccgccgccaagaacgtcggcggcgtcggcctcagactcaatctcaacgatggcgggccaggcctcatcggctccggaaagctcgccttcggcggcagcaaggccgaccgctacaacaaccttcccgccaccaccgagaaggccgcgtccgcgtccgcgtacaacaacaacatcaacgtcaacggcggctacgccaagaacaacaacaacaacaaca

SEQ ID NO: 453499 - DNA, 627 bp, Sorghum bicolor
cgtccggtctgcgcctacgatgtgtcggactaccagaatgatatcactaggggcacgggcatgagctactgcgtctaccatgcgcccatgggggaggggactcaagtggctgtgctgagttcctacgactacattaggcaatgccaaaagacttacagcttcgacaacatgatggatggtttctacatatccaagagcttcatggacaagctcgtggtccacctctccaagaacttcatgagcctgccaaacatcaaagttcccctgatcctgggtatctggggaggcaaaggtcaggggaagtccttccaatgcgagctcgtcttctccaagatgggcatcatccccatcatgatgagcgccggcgagctggagagcggcaacgccggagagcccgccaagctcatcaggcagcggtaccgtgaggctgccgacctcatctccaagggcaagatgtcctgcctgttcatcaacgatctggacgccggcgcaggtcgcatgggcggcaccacccagtacacggtgaacaaccagatggggaacgccaccctgatgaacatcggcgaccaccccaccaacgtgcaacttccggggatgtaccacaagggggacaacccccgggtgccc

SEQ ID NO: 453500 - DNA, 461 bp, Sorghum bicolor
caggcgacgacgacgacatctgagaaggcagctgacgcagccgagaaagctgagcccgtcaaggacgagctgtaaacatccagtgcgtggatggccctgtggctgtgtaagcatgggagaggaggggggagagaacacctggcgctaacatgcttgtcagcgccaagcctccaagtttagtttttgcgagaggggagagagggcaaagaggaagagaatgcgaggggatctgtgacgtgttttgctctgtggcgcggcatgtctgtgtatcccattgagattatgtacaatttacaaccagtcagcggtaccttttctttagttaaatatcagaagtgacagtagaaagaaactgattgtggtcgggttgaatggatgaataaattgcgagtccgccatcatggtaaaggcgtttttttttgtgatggtgaggttgaatgaatgaataaatggccgagtca

SEQ ID NO: 453501 - DNA, 806 bp, Sorghum bicolor
cgtccggttagtcttcgcgagtaaggcgatagggtggcacactggacaactatgatggaaccaaacatcattgctcaaggttcctatgatactggaatgcgggcccctggacgttcgctcatatccatccggccatgattgcacagctggcaactccagccgggagccttacctgtttctacactacacactgctagctcactcctcgggtgacaggctataccgggagaagtaccaagctgtgcggaagggctgtgcgggcataaacctctactgcttgtgcatctactcattgacagatttagctgaagatatccatgcaacggaaagagctcaacgacttcctgtttggcagcatcctgaaccctttcttatttggagactacccggagagcatgaagaaggctgccggtgcccgccttccgtccttctccagctatgaatccgagcttgttaccggcgcatttgacttcattggactgaatcactacagctccatatatgcgagcaacaatcctgatgcgtcaaagatgcctgtgcgagatcaagctgctgacgttggagctttgttcagaggttaaagctgctgtaaacttctacaccagggacgggccagctgctatacagtatccagcaggcacaatggttgatcctcaagggctagagcatgtactcaaatacattcgtgaaaagtacgggaacatctcaatttatatccaggaaaacggaaggcctgatgacagcctgatggatgtagacaggaatgacttcctgaaggtgtacattgcaagcacattgaaagccat

SEQ ID NO: 453502 - DNA, 616 bp, Sorghum bicolor
  unsure (1)..(616): unsure at all n locations
cgtccgatcctgtgaactgcaatgagatttgcagtatactattgtgacacaggagaggagctatacggtgccaaatgctaaaaactcagcaggaaacttgttcatataagcgtgggcctggtgttcttgctttttttggcctctttttagctctggatggtatgctcctttccttgctgcgctagcaccaggggtcaacgttataaggatgcttctactggggctgggacttatgaagaatgaggctatggttaaatcaataagccgctctggagattaccgggaacttctcaagggcccactgtattatgctactactataactcttgccacgtctgtattatggagaacctcaccagttgctatagcacttatatgcaacttatgtgctggggatggtatagctgatgttgttgggagacgcctagcgtaaagaaaagctttcatacaatcccaacaaatcatatgctggaagcatagcaatggcggtggctggttttctggcctcagttgggtaatgtctgacctttactgaatgctcaggtgcatcaacttatttntaatcattcggtctcatttattcaggtatatgcattactttccacttttggtttat

SEQ ID NO: 453503 - DNA, 1058 bp, Sorghum bicolor
cgtccggcagcacgaggctcacctccggcatctctgcctcaccatcggcagcggccagcactgctcgccaccgccatgacggagcgccgcagcagctgagggtgaaggcggcggtgcggccacagcagcagcaacagctgctgcacggtggccgccggcatacaaggggcagcgcggtggtggtgagggccggtcctgggccgctgtcggagatcgagccggacctggaggaggacgccatcgacgtgtatcgcaccaacggcatcgccccggaggacttcgtgttcggaaagtacgatggacatcacacctatttcgaaacccaagacaagaagggcttctgggaggatgtctccgagtggtaccaagaagctgagcctcctcagggctttcaagcactcatctcctgggcatttcctcctgcaatcatctttggcatggctttcaatgtgccgggggagtacctgtacactggggcagctgtcttcactgtggtgttctgcatcttcgagatgcgcaagcggacaagccgcacaacttcgagccggagatctacatgatggagaggacggctcgcgacaagctcactgccgactacaactccatggacatctgggacttcaacgagaagtacggcgagctctgggacttcaccgttaaccccagggacgacatcgtcaaatcaacctagatatatatgactctgtcttcagattgttctctcagcaaaagcctgtcagggaaaagaaaccgtagctgctaggaaatgctcttgatgaactaaataaaggaataacaacaacaatgtgtgcctcaagttctcagcagtcatccctgtaaaggaaaactggagagcctgaaatctttgatgccatatatgatgaatgcatgcatggcttctcatagaacatgttctgttctgcacaacagcgagcatgctgttgctccaacttcctgcatgttttttttttcatgtttctccaatacattgagaaaacacaagcaagactgatgcactgaacattaagatccgttggtctgccaccaaaaaaaaaaaa

SEQ ID NO: 453504 - DNA, 485 bp, Sorghum bicolor
cgtccgcagtcacagtagtagtcatctggctatacctgttaagatactcttcacatacctgatcgatccttgcaagatggcgaggcagtgtatcgcttccatgcttgcactggcattgctcctcggagcatttgcagccattcctacaggagtgcaagccatcggggtgtgctacggcgtgaacggcgacaacctgccgtcggcgagcgacgtggtgaaactgtaccagtccaacggcatcaacctgatgcgcatctacttcgcggacaccaacgcgctcaacgcgctgagcggcagcaacatcggggtgatcatggacgtgcccaacacggacctctcctcgctggcctccgacccgagcgcggcggcgacgtgggtgaagagcaacgtgcaggcgttcccgggggtcaactttaagtacatcgccgtcggcaacgaggtcttcggcggggacaccaacaacatccttcccgcatgaagaacgt

SEQ ID NO: 453505 - DNA, 1066 bp, Sorghum bicolor
cgtccggcaagagcaagatatacttcgccatggagtacgtccggggcggcgagctcttcgcccgtgtcgcccggggccggctcaaggaggacgtcgccaggaggtacttccaccagctcatcggcgccgtcgacttctgccacagccgcggcgtctaccaccgggacctcaagccggagaacctcctcgtcgacgagcatggcaacctcaaggtgtccgactttggcctcagcgccctcaaggagtgccagaagcaggacgggctgctccacaccacctgcggcacgcctgcgtacgttgcgccggagatcatcagcaagaagggctacgacggagccaaggctgacatctggtcctgcggcgtcatcctcttcgtcctccttgccggctacctcccgttccatgactccaatctcatggagatgtaccgcaggatcagcaggggtgacgtcaagtacccgcagtggttctcctctgatctgcggcggttcatgtccaagctcctcgatcccaacccaaacaccaggatcaccatcgagaagctggtcgagcacccgtggttcaagaaggggtacaagccggctgtcatgttggcacagccgcacggctccaacagcctcaaggatgttcaggttgccttcagcaccgccgacaatgaaggtggcagcaaggtggagcagccggcgggcagctccgtgaagccgtcgagcctgaacgcgttcgacatcaatctcccactccaaaggatttgatctgtcaggcctgttcgcggtggaccaagagcagaaggccagcaactcacggttcatgacccagaagccggcgtcagcgatagtgtcaaagctggagcagattgctgagacagagagcttcatggtgaagaaacaggacggcctggtgaagctgcaggggtccaaagaagggaggaagggacagcttgcgatcgacgccgagatcttcgaggtgacaccggccttttatgtcgtcgaggtgaagaagtcggcaggcgacaccttggagtacgagaggttctgcaacaagggcctaagaccttcactcagtgaca

SEQ ID NO: 453506 - DNA, 540 bp, Sorghum bicolor
  unsure (1)..(540): unsure at all n locations
cgtgcgcccacgcgttcgcataattacaagatactagtcaaagtgctcagaatactctacacaaattacagaagcacaagtatagcatcaaagcatcaccataaaaatgtcagagcagttgcacataccaaattaaagatatgcatttaaaatgtaacatggtgtctatttcataaattggggatcatgacttatattgtatcaaacagcagatttcagattatttccatgttatgaataccataaacgaagtttactaccaaagtagagcactagcataagcaccaattattttatatgatttactcaagggaacatgctaaatctcaaacataaattacataataaagctgcagtactccaaaaatcatgaaatatntatcatagcattctattatcacacagagactaccataaaatttgtagagcaaactaagcagtataaccagagatatgaatttattcatgaatagcaagaataaattcttaataaatatttttccagaaaacatggttcattntatatttttattaaacact

SEQ ID NO: 453507 - DNA, 516 bp, Sorghum bicolor
cgtccggttatgttaaagatacacagggaaagtggtttaaggcagacgacagtcaggtgaaacctgtatctctggacaatgttatgtcaaagtgtgcatatatgttgctgtatgcaaggtgttcaccgcgggcaccaagctctgttaggcaggctatgggggacccagcacaccccaagaaggccaaacagaaggtggtttcaggaggaacaacatggcgaggaggttccttaaacaggcaccaagctggtcagcagcatagagaccagacggcagatgaccttacccatgcgtttgacgaatatagagatgtaccatattcgccttcagattctccgagtcctagcgagagttcatccctcttcagcaactcggacgcagggtcgcacagcactgtcagcaccgacagcagcgagagcacaaggaactctaccagcaccgaggagtatgagtacatgttcggagctgctgatcagatgtactcaggaggctccatgggaggagcacctgtggaga

SEQ ID NO: 453508 - DNA, 784 bp, Sorghum bicolor
cgtccgggcaggtggtcggcctctcgctatccaccaccgccgctccaattttctcctcgatcatcttctgctccacccgcaaaaggggcagagaaatttaacccattttttgtggttcgtgaccgaagatctaggagatccgagcgacatgggtcccaccggcaccagctctgccgccatcctcttctgctgcatctgtgtcgtcgtctcattatcgtcatcgatggtggtcgtcaggtccgccgtcccagaagaaacccccaagtttaacgtcgtctcggaggaaaaccctaaggctatcgccgccgcaaaggaaatcccaaagtctaccgttgtcccagaggaaaccccgaagtctaccaccaccctggaggaaaacccgaagtctaccgccatcccggaggaaaccccgaactctacagacgctccaaaggaaaccccgaagtttatctcaatgggcgcccttgagtgctccgctaacataacgatgacaaagccagcgcgcaagctgggcgctggtgttgaaggggtgtgcccggtgcggttcgaccacacgcgcgggatcagcgcggtggccggcagctgcagggaccggccgcgcccgacgccggagcggtgctgcggggcactcaagaccttggcgtgcccctacagcgacctgatcaacgacaacgaccacaacgggtgcgccagcgacatgttctaccagatcatcgaccgcggcaggctgcggccgggcctcttctcgcagatgtgccgtcaaggcccgatgggcctcttgtgc

SEQ ID NO: 453509 - DNA, 732 bp, Sorghum bicolor
cgtccgattaaacacctcctcgatcgcctcctccaccggccaaaaaacctagccgccgcaaccgccactgcaaccatgggtgcctgcgcaaccaagcccaagacgcttgaggggcaggccccagctgaggccaacatctccacacccaaggttgcacccgagaccactaccgtccccactgaggttgcggctgaacaggtagttgagaaggtggtggaggaggacaaggaggaggagccggcggcaacggcggcggagcaaaagctgccagcgactgccgagcccgagcagaaggctgatgaggtgatcactccagaggcggcggtcgtcgccgagcccgagaacaaggaggaggaggaagaagctgtggagaagactgtcgtcgaggaggagaagccatcagcccctgcagaggaaaagattgccaccggtgaggtgatggccgagcccacggtggaggtgatcaagaaggacgctgaggaggaggagaaggagaccgataaagagatagagaagccaatacaaagctgatcgtccatgcatgcatgtcaattggttgatggctgatgatcgttgtgcgagcaaagctaaggggccacttgaattctttagagtttggcatgcatatacattgtataggtcggtagagagagtccgcctccatgttacacacctttgatgtgttctatttatgcttcacggggttgttattaaacaatattcttgggcctt

SEQ ID NO: 453510 - DNA, 829 bp, Sorghum bicolor
  unsure (1)..(829): unsure at all n locations
cgtccggngaattgaagaagatgtgtcgcgtcgtgacatggccatggctgcctatacttagggaggtcgcagcggcgaggacgccaccgccagtgccggaaggaggaatcccagcggccgttccgggtgcaccggaagccggggtcgaggaacgggcactcctccgtgtaggtcgtcacgtcggcagcatcgtccattcatccggcggccatggcctcgattctggtgacgacgaccaccgccaccgccatcctcttatgcgtcctcttctgtgctgcggcggctaacaccaccgtcgccaacgaccccaacctccccgactacgtcatccagggccgcgtctactgcgacacctgccgcgccgggttcgtgaccaacgtcaccgagtacatggcgggcgccaaggtgcggctggagtgcaagcacttcggcaccggcgaggtcgagcgcgccatcgacggggtgaccgacgcgaccggcacctacaccatcgagctcaaggacagccacgaggaggacatctgccaggtggtgctggtgcagagcccgcgcaaggactgcgaccagacgcagccgctcagggaccgcgccggcgtcctgctcaccaggaacgtcggcatcgcagacagcctgcgccccgccaacccgctcggctacttcaaggatgtcccgctgcccgtctgcgctgcgctgctcaagcagctggactccgacaatgacgacgatcagtaaagatcacatactgttgacgacgaccaccgtggtcgttgtgacaggctgtcanaactacaatcctcttaagcttacctgctggctacaatataatggt

SEQ ID NO: 453511 - DNA, 413 bp, Sorghum bicolor
tcgcgtccgctaccctcgtctcaccctccctcaccaaataaggtcctgccctttcccgacattcacaggggggcagaggggaaaacacattcatccggcggccatggcctcgattctggtgacgacgaccaccgccaccgccatcctcttatgcgtcctcttctgtgccgcggcggctaacaccaccgtcgccaacgaccccaacctccccgactacgtcatccagggccgtgtctactgcgacacctgccgcgccgggttcgtgaccaacgtcaccgagtacatggcgggcgccaaggtgcggctggagtgcaagcacttcggcaccggcgaggtcgagcgcgccatcgacggggtgaccgacgcgaccggcacctacaccatcgagctcaaggacagccacgaggaggaca

SEQ ID NO: 453512 - DNA, 339 bp, Sorghum bicolor
cgtccgcccacgcgtccgatcctaccaaaccccagctaccaactcgatcgatcatctcatcactcgaccgcacatacaaagcggaaaaaaaaacctaaaaactaactctctccaacttcctctgcctttctgcgtgcttcattcggcactaccactacgagctagatagccagctttcgtgacgaaactagctagctagctacagctagctaaagagagggaagaacaacagctggtgcgtggtgtctcgatcgctgatcatcatcgtcgatcgtcgtcgtcgcgcgccaagatgaccgtcgtcgacgccgtctccactgatgccgccggcgacccccc

SEQ ID NO: 453513 - DNA, 1016 bp, Sorghum bicolor
  unsure (1)..(1016): unsure at all n locations
cgtccgcggacgcgtgggtgtttgtgcgcgtgtgcgcgcgcgcgcagatagggacatatatatagacgggtgaggtgctttgtctccgaccaacttcaagagcgccgtggacgacctccggacgtggctcagctccgcgctcacgtaccaggagacgtgcctggacgggttcgagaacacgacgacggcggcggcgggcaagatgcgcagggcgctcaacagctcgcaggagctgacggagaacatcctggcgctcgtggacgagttctccgagacgctcgccaacctgggcatcccgagcttccaccgccggctcctggcggaccacgccggcggcgtgccgtcgtggatgcccgacgccaagcgccggctgcggaaggtctcccccggcgacaagggtttcaagccggacgtgacggtggccaaggacggcagcggcgacttcaggaccatcaacgcggcgctggccaaggtgccggtgaagagcgccgccacgtacgtcatgtacgtgaaggccggcacgtacagggagtacgtgtccgtgccccggaacgtgacgaacctggtgatggtcggcgacggcgccaccaagacggtgatcacgggcgacaagagcttcatgatgaacatcaccaccaaggacacggcgacgatggaggcgctcgggaacgggttcctgatgcgcgggatcggcgtggagaacacggcgggcgccaagaaccaccaggcggtggcgctgcgggtgcagagcgacatgtcggcgttctacgagtgccggttcgacgggtaccaggacacgctgtacacgcacacgagccggcagtactaccgcgagtgcgtcatcacgggcaccatcgacttcatcttcggcaacgcgcaggtggtgttccagaactgcctcatccaggtgcgcaagtgcatggacaaccagcagaacatcgtgacggtcanggtccgagggagagaggttcgcggcggaccgtatcacactgcacatgagccgaccgagttgagag

SEQ ID NO: 453514 - DNA, 636 bp, Sorghum bicolor
  unsure (1)..(636): unsure at all n locations
cgtccgccaaaacacacagtgtcgagccttctattggtgtgattgggggcaccaaatacctacctaaaggcattccattatactgtgtttgtgcgcgtgtgcgcgcgcgcgcagatagggacatatatatagacgggtgaggtgctttgtctccgaccatgaaaggcgccgtcatcggcgcgtcgaccgtcctggtggtggcggtggtcgccaccatctgcgtcgtgtccttgagaggcagcggcgatggcgacagcagggaggagggcgagatgtcgacgtcggtgaagtccatcaagtccttctgccagcccgtggactacagggagacgtgcgagaaggcgctcagggcggctgccgggaacgccaccagcccgacggacctggccaaggccatcttcaaggtgacgtccgaccggatcgagaaggcggtgcgcgagtccgccgtcctgaacgagctcaagaacgacccgcgcaccaagggcgcgctcgacaactgcagggagctgctggactacgccatcgacgacctcaagacgaccttcgacaggctgggcggcttcnagatgaccaacttcaagagcgccgtggacgaccttccgacgtggctcaacttcgcgctcacgtaccaggaga

SEQ ID NO: 453515 - DNA, 816 bp, Sorghum bicolor
cgtccgggcgacaagagcttcatgatgaacatcaccaccaaggacacggcgacgatggaggcgctcgggaacgggttcctgatgcgcgggatcggcgtggagaacacggcgggcgccaagaaccaccaggcggtggcgctgcgggtgcagagcgacatgtcggcgttctacgagtgccggttcgacgggtaccaggacacgctgtacacgcacacgagccggcagtactaccgcgagtgcgtcatcacgggcaccatcgacttcatcttcggcaacgcgcaggtggtgttccagaactgcctcatccaggtgcgcaagtgcatggacaaccagcagaacatcgtgacggcgcagggccgcaaggagaggaggtcggcgggcggcaccgtcatccacaactgcaccatcgagccgcacccggagttcgagaagagcgccggcgacggcaagctcaggaccttcctggggcggccgtggaaggagcactcgcgcacgctctacatccagtcggagatcgggggcttcatcgaccccaaggggtggctgccgtggctcggcgacttcggcctcagcacctgctactacgccgaggtggagaaccgcggtgccggcgccgacacgagcaagcgtgtcaagtggaggggcgtcaagaacatcacctaccagcacgcgctgcagaagtacaccgtggagagcttcatccagggccagcactggctcccacagctcggcgtgccattcatcccggggctgctgccgcagaaccagtctggcaggatacactgacgagcgacatgtggcacttgacatgacgta

SEQ ID NO: 453516 - DNA, 586 bp, Sorghum bicolor
  unsure (1)..(586): unsure at all n locations
acgcgtgcgctcctggccaggccatttactctgcctcaaacatgctcttaatggatattttgcttctctgcgatctgagttgtgtgcggagggcgttaaggtcactggtgtctgccccggaccgatcgaaacaccacaatcttctgctgcagcctctcaagtacaaacacattctgctgagaaacgtgagatacgtgtttcggtggaaaggtgtggtgaacttacaatcattgctgctactcatggactgaaagaagcatggatatcatatcagcctgtgttgactggtatgtacttggtgcaatacatgccaacagttggttactggctcatggacaaggttggtgcaaaacggctggatgcggctgcaaagaaagggaacacgtatagttggaatctcattttcggcagcaagaaatcagcatgaccaagttactcgtagctcctagtaccagggtatttctggattcggatggtcacgtgactttatgcttgtaagcaaaaagtttagactgaaaaggaacagagcatctatagaangctatacagttagtgaaaaactggactcttaactatggcagggtct

SEQ ID NO: 453517 - DNA, 506 bp, Sorghum bicolor
cgtccgcccacgcgtccgcacacagcagcaagcaagcaagaagcagccaaggcagatagctagcagcgtcgcaataatggcccgcgcctgcgtgttcctggtcgtgctcctcctggccgccgtcgcggtggcgccgctcacgacggtcgtcgacgcggcgcgccccgacgtcgtggagggcaggtccatggagtcctcctccgacgcgcccgctcccagccccgacgcctcgtccccggagtcgtcgtcgtcgtcgtcggacgcacccttcagcagcagctctttcgactagccgctcagagatctccatgcatctaccgcaatccagttcttggcaattggcgtcatatctatccggccgatccaaccaaactatttcccttattttgattctttccaacaataatgtgcgtgcatgggtgcgcgcggcaaacacacacatgaatgtgctttccctattgttttttttaaaaaaaaaaaaagggcggcgtctagaggatcagcta

SEQ ID NO: 453518 - DNA, 474 bp, Sorghum bicolor
cgtccgcggacgcgtgggctcacacacacaacaagccactctcggtcaagccaccaaggcagctagcatcagcaatggcccgcgcctgcgtgttcctggtcgtgctcctcctggccgccgtcgcggtggcgccactcacgacggtcgtcgacgcggcgcgccccgacgtcgtggagggcaggtccatggagtcctcctccgacgcgcccgctcccagccccgacgcctcgtccccggagtcgtcggacgcaccctccagcagcagctcttccgactaaccgaccggtcgccgtcgccggcagagagatatctcgccctccgtctacggcgatcgatccggccggccagttcttggcaattggcctgatctacatatccgatacggcaaaactatttcccttttgattttctctagaacaaataatgtgtgctgcatgcaccctgatgatatatatatgtgcatgcgtggtgcgc

SEQ ID NO: 453519 - DNA, 468 bp, Sorghum bicolor
cgtccgcggacgcgtgggcacagcagcaagcaagcaagaagcagccaaggcagatagctagcagcgtcgcaataatggcccgcgcctgcgtgttcctggtcgtgctcctcctggccgccgtcgcgggtggcgccactcacgacggtcgtcgacgcggcgcgccccgacgtcgtggagggcaggtccatggagtcctcctccgacgcgcctgctcccagccccgacgcctcgtccccggagtcgtcgtcgtcgtcgtcggacgcaccctccagcagcagctcttccgactaaccgaccggtcgccgtcgccggcagagatatctcgccctccgtctacggcgatcgatccggccggccagttcttggcaattggcctgatctatatatccgatacggcaaaactatttgtccttttggatatttgttgtggaacaataataatgtgctgcatgtatgtgcatgcttgcg

SEQ ID NO: 453520 - DNA, 313 bp, Sorghum bicolor
cgcgtccgcaatcagctatgcactggacatagctcatgcaatggactgtttacatgccaatggcataatacatagagacctgaagcctgataattgatggcttacggcaaatcgtaagaaactgaaacttacttgattttggacttgcacgtgaagaaactgtgactgaaatgatgacggctcgaacagggactcaccgatggatggccccagagctatacagcacagtcacacttcgacgtggtgagaaaaagcattacacaaataaagtggatgtgtacagctttggcatgttttgtgggaattgttgacc

SEQ ID NO: 453521 - DNA, 351 bp, Sorghum bicolor
cgtgcggccatggaaacctctcgcgctcgctcgctgtgattcctgctgcgagtgcgagctcctcccaaccacgctctgaatagccgttcccgtctcctgcctttgctctgcacgccgcaccgcacgtcctctccgaagcagagacgttcccgtccgtccggtccccgtggccatggccgccgcgccctcgtcttgctgcgccgcgaccgcgtccaccagcgctccgcttcgccccgcgcgcgtccagtgcagcgcgccttgggtacccggtgccacccggagcatcttcaggcgcaggcagcttcagcggcggcagagagagctgccgtccgcgccacggacttcgtgccg

SEQ ID NO: 453522 - DNA, 537 bp, Sorghum bicolor
cgtccgcgtacttctcctccgacggcaactggttcatggacgtgttcaatgtcaccgaccgtgacggcaacaaggttcttgacgccacaaccatctcctacatccagaagacgctggaggcggacgactggtactacccggaggcgcgcaacacggtgggcatcgtgccgtcggaggactacacctccatcgagctcacgggcaccgaccgcccgggcctgctctccgaggtgtgcgcggtgctcgccgccatgggctgcgcggtccagagcgcggagctgtggacgcacaacacgcgcgtggccgccgtcgtgcacgtcacggacgccggcgccggcgccggcgcgggcagcctggcgctccacaaggagcggcgcctgcaccagatgatgttcgacgaccgggctcgacccgacggctcccccggcccgccgcggacggaggtgtccgtgaccccgtgcgccgagcgccggtacaccgacgtcgtggtacaaggaccggaccgggccaagctgctgttaaacacggtgggcacca

SEQ ID NO: 453523 - DNA, 878 bp, Sorghum bicolor
cgcgtccggactgattaaggttgatcgagtcctctactcatcggttgtataccctcacaattatggtttcattccgaggactctgcgcgaagacaatgacccaatggatgtgttggtcctgatgcaggagcctgttattcctggttcgtttctacgagcaagagcaataggccttatgcccatgattgaccagagtgagaaggatgacaagataatagcagtctgtgctgatgatcctgaataccgtcactacaaatgacattgagcgggctggctcctcaccgcctgcaagagatcaagcgtctctttggagattaccagataaatgagaacaaagagggtgctgtggatgcattcttgcctgcgaccacagctcgagatgccattcagtactccatggatctgtatgcgcagtacatcttgcaaagcttgaggcagtagattgcaagcaactatttatcggggcgtcttggattgagcgtgattttaataagtcgaaacgcttgatattgtgtgcgaaccttggaattgagaacaatgtcactaccctatactgctttcctacttgtactccttttttgttattaatttataaatgagcgtccatacgtataccgtgtggcttcatgggtcttcgtctacccaagtaactagctgtgtggagtaatgaaaggatgtctagcgtccgttgttttgctgttgtgaatgagatggcactccctaggcctgtgggaggaggccgaggtgtagctgtagcccattgccaggcgtcgtttggaacatgggaagttttccccattcctgtatcttatgggtgaaataaaatttatttaaaattgaattaataagttaatgagaattttttgtttgtttttttt

SEQ ID NO: 453524 - DNA, 558 bp, Sorghum bicolor
acgcgtccgcttgcatttctctgttcattgctaccaatatctgtgagaatatcatctggaaggcatttagccccacaaccatcaacagtggccgtggtgctgaatttgaaggggctgtcattgcactgttccatctgttgattacgagaactgataaagtccgtgctcttcgtgaggctttctaccgccagaaccttccaaatgtgaccaatttgcttgccaccgtcttggtcttcctcataggtatctatttccgaggcttccgtgttgtgcttccagtgagatcaaagaatgctcgtggccagcaaggctcatatccaattaagctgttctacacttcaaacatgcccatcattctgcactctgcactgattaccaacctctatttcatatcccagcttctctacaggaagtacagtggaaacttccttgttaaccttcttgggaagtggaaggagtctgaatactctggccattctgttcctgttggtggtctggcttactatgtaaactgccccatcaagtttggctgattccttgcaaatccattccatgcgc

SEQ ID NO: 453525 - DNA, 595 bp, Sorghum bicolor
ggcacgaggccgaggctaattaagacgcaacgcaagaggcggtaagcagcctgccatcagcagcagcaatggcggccgccggcgccgaagtgggagaagacaagtaccggtccttcatccacggcgagagcgagaggaacaccgtgtggaggtacggcggcccgcccaactacgacacggtgaacaagctcttcgaggaggagaggactcacgtgtgggccgagggctcgctggaggagaaggtgcagcggctgctcaagagctgggagatggagctggtgcacaaggcgcggcccgaggaccagaagaccgtcagctcggagcgatacaccaccagcaccaacgggatgagcgccctgacccgggcggaggtgatggccatcggcggctacaacaacttcctgcgcaccaagctgccgccggagcaccgcatctacgacccggacagcgagtccccggagtccgccatggacaccttcaagacggccttcccgagggggttcgccatcgaggtgctcgacgtctacagcggcccgcccaagatcgccttcaagttccgccactgggggtacatggaggggcccttcaagggaca

SEQ ID NO: 453526 - DNA, 515 bp, Sorghum bicolor
ctgaacaatctgtcatgtgtcactgggcatgtctccgatgccagtttgctcacatagtcacattacatgctgtatgtatacctgtactcgaattagcttcagtttcaaaacgtatgataccagtttaattttccctgatcttaaatatacaatatagcaccaagagccggggggagaaacaccctatttctgctacccaaaagaaccagatcatcatcgtcctctagccctcgttggaaccgagctctggatccacaacatagcctctcagcgaaggcgtcttgccgaaactgggactagggcctttcttctgcattctcttcctcgcgatgtggccacggatccacggcagcacatcctcgttgatcttgatcatgaggaagaagaggatgcggtagatgaagatcatgctgaaaatgactcacaagtcgatccacttgttccggtccacgttgatctggaagatgtacttcaggatgaagtccccggggatcttgggttgatctgggcgcacg

SEQ ID NO: 453527 - DNA, 801 bp, Sorghum bicolor
cgggccccccctctgagtcgttgtcggcacgattgagcctacctccaaatcctggggtttgtccgtcagcttcatcagcatcatcctgctaccaatcgtcggcaacgccgcagcgcccgcccgggccatcatttttgctctcaagaacaagctggacatcaccctcggagtagctttgggttcggcaacccagatctccatgtttgtggtgccactgagtgtcattgtagcttggatcgcgggtattcaaatggatctcgacttcaagctgctagagaccggctgtctcttcgtctcagtaatagtgacagcattcactctgcaggatggatcgtcacactacctgaaggggatccttctgctgctatgctacattgtgatcggtgcatgcttttttgttacgcggcaacctgcaagtcatgcaaacaacaatggtgctgggctgttgctgccaactgatactttgggtgcacaagttgcataacggttcaagagtcatgcctgaacaaatgagcatccaagacagcaacgcagtgttcgagtctgaaacagtgcggtgcaaagattgatgctttcagaagagacgaaatcggtcagtggctcagtgctttcggagaaatgtattcatcactgcacaaaaatcggcatatgaaaagtattatttgtgcttgtattactattggtttagttagcctagctgctgttgcaataagggtaccgaatatgcatccggtctatgtatatgatggtgtcttgtttcatttattatacagcttaataagatatgcagagcctcgtgcc

SEQ ID NO: 453528 - DNA, 461 bp, Sorghum bicolor
gtttgtggttttggccaatccttcccctccctctcatcccgggccccgggtgaaaattttgccccacaaactctagcgcgtcggatcacaagcaagggcaaaattttctgtgactccggctgaaggaccctgcgacacccaaaactatgtcggtggcgaaggacgacactggccgcactatacccaagttcggcgaatgggacgtcaacaacccggcctctgccgacgggttcacggttatcttcagcaaagccagggatgagaagaaagccccgacgaccaaaccacaaccaggccacatcacccaaaggtcggcgtcggctgacagcaaggactccaggaccgacaagatgacctcctacaactccaggaccaacgcatcgaagaaatggttctgctgtgtctcgcccagtcctacacaatcttgaggaaagcaaaagaggaacgcaatgctgcagtct

SEQ ID NO: 453529 - DNA, 864 bp, Sorghum bicolor
cccacgcgtccgggctgagcgtgatcgtgagcgccgtgctcaccatccgcgccatcttccagcggatgaagaactacaccatctacgccgtgtccatcaccatccgcatcgtgctgggcttcctcctcgtcgcgctcgtctgggagttcgacttcgcgcccttcatggtgctcatcatcgccatcctcaacgacggcaccatcatgaccatctccaaggaccgcgtgaagccgtcgccgacgccggactcgtggaagctcaaggagatcttcgccacggggatcgggctcggaacctacatggcgctcgccacggcgctcttcttctacctcgcgcacgacaccgaattcctcagcgagaccttcggcgtgcggtccatcaaggagaacgacaaggagctgatggcggcgctgtacctgcaagtgagcatcatcagccaggcgctcatcttcgtgacccggtcccggagctggtccttcgtggagcggcccggcgcgctgctggtgatcgccttcctggcggcgcagctggtggcgacgtgcatcgccgtgtacgccaactgggagttctgcaagatgcagggcatcggctggggctggggaggagccatctgggcgttcagtgtcgtcacctacttcccgctggacgtgctcaagttcgccatccgctacgcgctctccggcaaggcctggaacaacatcaacaacaagacggccttcaccaaccgcaccgactacggcaagggcgagcgggaggcgcagtgggccaccgcgcaaaggacgctgcacggtctcaaccaggccaccgtcaccttcgacctcttcggcgacaaccagggctaccgagagctgtccgagctcgccg

SEQ ID NO: 453530 - DNA, 481 bp, Sorghum bicolor
cgtccgcccacgcgtccgcccacgccttccccaactccgcaggctgctcatcgccctcaccccgcgccggacgcgccccgatccagatccaggggcttatcatggcatcaaagcgtatcctcaaggaattgaaggacctgcaaaaggaccctccaacatcatgcagtgcaggtcctgctggtgaggatatgttccactggcaggcaaccatcatgggtcctcctgatagtccatatgctggaggtgttttcttagtgaacattcatttccccccggactaccccttcaagcctccaaaggtatcttttaagacgaaggtcttccatccaaacatcaatagtaatggaagcatatgtctcgacattcttaaggagcagtggagccctgctttgacaatctctaaggttttgctttctatctgctccctgcttactgatcccaacccagatgaccctcttgtccctgagattgctcacatgta

SEQ ID NO: 453531 - DNA, 693 bp, Sorghum bicolor
cgtccggctggtcaggaaaggtttcagagtcttggcgttgcgttctaccggggagcagattgttgtgttctggtctatgatgttaattctatgaaatcatttgataacctgaacaactggcgtgaagagtttctaattcaggctagcccatcagagcctgataatttcccttttgttctgttgggtaacaaagttgatgtagatggtggcaacagccgagtggtatcggagaaaaaggcaaaggcatggtgtgcttctaaagggaacatcccctactttgagacatctgctaaggatggaacgaacgtggaagatgccttccagtgtatcgtaaagaacgctctgaagaatgaaccagaggaagaattgtatgtgccagataccgtggacgtggtgggtggcaaccgggcccagagatcatctggttgctgttaaggcatgaggcatcacgagggcgttgtgatcatcaccggctatgcagtaaccaaacagtacctttgacattgctgggcctccatggttatactacggatccgtattccatttgttacctttccagtctcctgctatgtacccaagggcgcctgtcccatgctgtcaatccgtggactttgtgcagtttcatcagtagcgtcatatcttgtgaatacaattgggcaaaataagaggaagtgtaaactaaagttcatcctt

SEQ ID NO: 453532 - DNA, 682 bp, Sorghum bicolor
cgtccggcagggaacccgttctgctctttatgcaaatgaccgggagtctatctctgttaccgtgcaagaggtaactcctagagctgttggagcactggttgcactttatgaacgtgctgtggggatttatgcttctttggttaatatcaatgcctatcatcagcctggtgttgaggctgggaaaaaggcagcaggagaagtattggctcttcagaaaagggtgctgactgtattaaacgaggccacctgcgagaaccctggtgagccattgagtatagatgaaattgcagatcgctgccattgccctgaagatattgagatgatctacaaaataatccagcacatggctgctaacgacagagcacttatagcagaaggcagctgcggctcacctcgcagcgttaaggtgtacctcggtgagtgcaatgtagacgaagatatgcaggccgcatagattcctggtctggaactgtgtaaaattgttggaataaatcaggagcaacacgataacgatgctatgcatgggtgttgctgatgtgccattagtttcttgtttggtgttgtttgcacacgattgccgcaacgatgtattttagaatttgtttttttttgggtccccttaaatacagaaggtgcttgaacacgattgcagcaaccaatgtattttagaatttgatttgtt

SEQ ID NO: 453533 - DNA, 390 bp, Sorghum bicolor
cgtccggccctttttttttttttttggaagccaagtgctgcgtttttgcattccaaaagagaccaaacagttggtatcatccatccatgatccctcgcacaccattttctagaacaggttgatgacagacacacaaagcaggggacagcgcttacaacaatacacagccgcatggcaaagctcttctcggcgccaagacttaaaacagtcttgacacagcaacgcaacgcaacgcaacgctccacaagacggtctcttcttcctcaacccaaagtcgtcacgtcgcacacaggaccatggccatctttggtgatgaggaatcacagtccagatcgctctgctgctgctgctgctggtgctgcaacgggggaagcccgcgaggcaacgggg

SEQ ID NO: 453534 - DNA, 957 bp, Sorghum bicolor
cgtccgggatcctctggttttacttgaggctacttccgacaacaacagatcagaaggtgctccaactaccagcataaatagaactgaaattgatgaatctgcagaacccattaccgataagcaaattatcgagtggaagctgacattgcatcaaattgggcttgacgtcctacgcactgatcgcaccatggtattctatgagaacaaagaaaatctttcaaaattgtgggatattctagccgtgtatgcatggattgacaaagatgttggttactgccaaggaatgagtgatttatgctcaccaatgatagttctactaagggatgaagcagatgcattttggtgccttgagaaattgatgcgtagattgcgaggaaatttcaagtgcacagatcaatctgtgggagtagccaaccaacttcaacaccttgcgtctattattcaggttcttgacccgaagctacatgaccacctagaaactcttggtggaggtgactacctttttgcgttccgtatgttcatggttctatttaggcgtgaagtatcatttggagactccttatacctctgggagatgatgtgggctctggaatacgatcctgacattttcttcgcagcgtgtgaagaacaaggtgcagtacataaaaataaagtttctaaatccaaattgaaaggactgcgccattttggcaagtgggaaaatagtaaggataaggacaaggataaggataaggacaaggataaaaatggggctgaggatggtgaagatgggcccgttccaatttcagttttcatggctgcaagtgtccttaaggaaaagagagaaaagctcttacaggaagctggaggactggatgatcttatcaggattttgaacgatgtaaatgggaacttagatgccaagaaagcttgcgccggagcattgaaacttcacataaaatacctgaaaaaggtaca

SEQ ID NO: 453535 - DNA, 503 bp, Sorghum bicolor
cgtccgcgccgtttcgtccctggaagctctccctggtcaccaagctccagcaggttagcctgtcttgtggttgttgaggcttgaggggagcttggcgccatggggggcgggaaggacagccacgatccctcgaacgcggacaagggattccacggagggtaccccggtggctacggccagtaccccgccggctaccctgttccaccgggcggcgcataccctcccggccccggacaagggtacccggtgccacctggtgggtacccgcctccgggtggctaccctcagcctggagggtatccgccgtcgcacggcggcgcgtaccctcctggtgccggcgcgtatcctcctggtgcaggcgcgtaccctcccagcggatacccccatcaaccggtctacccacaggctggttatcctggtcactgtccaccgatggctggtcatggtgctatgtacggaggaggccatggtgcctggggttctggaggcttcggggcgatgat

SEQ ID NO: 453536 - DNA, 825 bp, Sorghum bicolor
cgtccccccccgcgtccctttctgggtttaaataaataaataaatagcaaacgtttgtttcacttatttgttacagtaacaagttattaactgtgaaacagtactcaacagagattaatcaagttgtgactgtgtggaccatatatggatgcatgagacgtcgacgacgacgatttatggatacgtcatttcggagcggggaggcgtgtagccgctgacgagaccctggacgacgagtatggatgggtacatgacagccttggtgggcagcagcttgtcggcgtcggggacggccttcatctccggctggcagtcccgggagaacttcatgtccatctcgtccatccacgaagagatgtcgtacacgtactccaccttgttgtcgtcgcccatggcggccagggccctgatcttggcaagcttctcgggctccttcttgccggggcccggctcgaactccgcggcctgctccgcgcacttgcccagcttgtactgcttggtgccgttgagcttccgcagctcggcgagcaaggaccggaagttggccaccatgagctccgtggcggcgccgatgaccctgatgctgctgccgttgaagctcccggcctccggcaggagggagtcgtagcagtgccgcgcgatcacctttggcatcacgctagggctgcaccgaccttggaggaactccgccgccgccggagacgccgccgctgcttctgtcgtcgtcgtcgtcaaggtggcagcggcggcgacgacgatgaatgcaacgaggcaaattgcattagtcgacctcatcatcatctttgatgtatctacacggacgcg

SEQ ID NO: 453537 - DNA, 539 bp, Sorghum bicolor
cccacgcgtccgcttaggagttagtaggatccattttttgttctttcttttccccattttttcccttctttcttggacatagagaatatcagccatcttgggcggtcgccgcgccgtcgagggccagccagagctagctcgccatggcggccgtccagtccaacagggcccacccgcaccgccgctccgaggcgtcctccccggcgacctccgtggccgtggcggcggcgagagccgacgacgcccagcgccagcgtcgtccgagggtgccggtgcaggtccgggagcagggcccgctggcggtggggcatcaccatccacaccaccagctgcggcggtcagcggcgttcccgccgcgccgcccaggtgcagtgcctgcagtgcgccgccctcctcagcgctgcgacagcgacctcaacatcagggagcaccgcacctgcagcgaggtggccggcggcaccgcggcgggctgcgccgccgtgtgctgctgcttccactgcgtcatggtggaggtcgtggtgctcgccacggtgcgcgcg

SEQ ID NO: 453538 - DNA, 918 bp, Sorghum bicolor
cgtccgcgccggtggaggtgtttcaggtggaggatctggtggtgccaaagctgatattggtggtaccgtgggtggtggtgtctctggaggtgccaaaattggtggtggcgtcaagggagatgcatgaggcagtgctggaactagtgccgatgcaagtgtttccggtggaggatccggcggcgccgatgctgccgtgagtggtggtgtctccggaggtgccaaagttagcggtggcgtcaaaggagatgcaggagggagtggcaaggcctataccggaactgatggcgatgcaagtgtttccggtggaggatctggtggcgccgatgctgccgtgagtggtggtgtctccggaggtgccaaagttagcggtggcgtcaaaggagatgctggagggaggtgacaaggcctatactggaactgatggggatgcaagtgtttccggtggagggtctggtggcgccaaagctgatattggtggtacccgtgggtggtgttgtctccggaggcgccaaaattggtggtggcgtcaaaggagatgcaggaggaagtggtgatgccgctgcaagtacttctgcagaagctaaggctggagggagcaaatcatctgggggtgggtcggattttggctatggtgcatcgagcaaggaattatagatgagcaaggaattttggccaccgtaagaatgatgcattcagtatgctcggtcccaaagaatttattcctattatttttgtaaccaagtgttgttttaccatgcaccggtcaatagtgtggaggcaatatggtaactccccttgactggacaataccaataaccttttgtatatttttctttgcttattaattgacattgtcatgtaaaccagaacagcctgagaggctgattctcatgagaaatatgacatttctaatttaaa

SEQ ID NO: 453539 - DNA, 470 bp, Sorghum bicolor
cgtccgcggggacaacctcggcgcctgcaagcgcgccatcggcttcagggacgccgtcaccatccgcgccaccatgagcatggtggcacaggacatgcagaattgcgacgaggagttcaggaaggccggctccaccaaccccatggaggaccacaacaggtcgctcatcgagatgtccgagatctgccgcacgctctccaacatggtcccttacgaacatacccattgattttttttttattttttccacccacaatgttcagtaacgtcgtcgtcgtcgtcgtcgtctaagtgcggcctaacatgcaatttgatggccgcgtgcgtgtgtgtgtgtcagtcgatgatagagctggacgcatgccacagttcatgcggagctagcgcgtcctccttttttctgtgttgcctcatgcggctcgttgagaggcacgcgtgtaggcagctatatgtatctatatacctgctaa

SEQ ID NO: 453540 - DNA, 359 bp, Sorghum bicolor
gtaataatcatacatgctttcaccaagacacgctgtggcctgtgggcattcacagggaggaagtggtgattgctacaacgacgcgccatgaattcaggaagagtttacaggagcaacttacaaggagggaggaggacagttagaaatcttcccggtgtaaatgaacatacgaacgaatctttacaaataatatgtgtgtgtatgtatgtgtctaatccaaaagaaacctgagtttgagtttacacggtgtagctctgattaatggtgtcaatgtcgaggcccttgagcttgacgacggattcgacgtggcccttgagcgtgtgcagctccctgagcctggccacctcggcgcgcttggc

SEQ ID NO: 453541 - DNA, 586 bp, Sorghum bicolor
ggcaacagaagggtatatataagtatattctaacatacaaaattgcacgccaacttttatgacagctcttgcatgaattattattccactctttctacatgcaacaagattatctactgaacagtgcaatcaatctagtactatcaaggggtcccattttatctaatcggcatcaaatagctagtgcaccatccactgtttcgctttcatcatcgggggtgacagacttcgatttggacgtaactctggaaaacccatagccaagagaacttcctgtcgtagcacacaactctgtaagctctgacagatgtcgattccggaactcgctgatggtttcctgaatctctgacattggaagttttgcttgtgcaagaacagcagcagctagctgaaggcttggctccaaggtctcagggacaaccgccattgcaccagctttctccaaattaacaccatgatcaacgtcatgtgctctaacaaatgtcttcacatttgggaaatatttgctcaatgcccagacagctctgtagtttgcaccaggagtatccaaagtaattgcagcagcacaagctctttcagctccaac

SEQ ID NO: 453542 - DNA, 544 bp, Sorghum bicolor
cgtccgacgaccgcctggggaagaaggtgcgggtgaagtgcaacgaggacgacaccatcggcgacctcaagaagctggtggcggcgcagacggggacgcgccccgagaagatccgcatccagaagtggtacaacatctacaaggaccacatcaccctcaaggactacgagatccacgacgggatggggctcgagctctactacaactaggcgccctgacccaccccgaccgtgctgcgtgcccccctactgctgtgaggttaatctgaatttttctgaagccatgggtgcacttccagtcgcagtgtctttagctaatgagctcacatacatataggcaacttgagtgagctatgtagtacatacatggttgttgcaagttaccaatgactattgacagccttgcatatattgtcatgtgacaaggatgaacctgcaaaattagtgtgctgctactcgcagaccttaccttaaataacacaggttggtcgtgataatcacggtcctgtgcttctgctatgtgataatgtcccccatacttggcc

SEQ ID NO: 453543 - DNA, 537 bp, Sorghum bicolor
cgtccgcggacgcgtgggtgggatcctagcaagagaccaaaggccacagaggtcctccagcataccttctttcagggttgtacatctgttccacttcctgtccgtccaaaagctcctaaaacacctccatgtgttggagcaaaaggaatttcagagaacagtgtcgctagaagattctcaactggaactctatcaacgttgaagtctcatagcaatgcatccgcaaaattaaacagtttatctaagactggtgtccaacgaaaacttcacttggatcggcagtcatcacataagagtacaaaaccagccgagaatagcaataaactaactacaaatcgggtaccagctcggaatagcccagggtatcctgtgcttaggcattcacgcagcttgcctgaaactggtcgaggaacagtccaaaaggtctcatcaattacagagaaactatgccagatgtctgtgacctcgagaacacgaagcactgtgaagcctgctgccccggtgctgaaggccggacatgggaagtcggactttctt

SEQ ID NO: 453544 - DNA, 629 bp, Sorghum bicolor
cgtccgggaggaagtcgagcccggccgattcgtccgcaagtgcgagaagacggagcagctcctccgcgactgcgtcggcaggccctctgaactggtggaatccaaaaccgaaaacactgaggaagatgtcacagaagaaatgaaaagcggttcactttctcttggctttccaagaaacgagccctttgcattccctggactccgcagtgacatggaagcccttgagaaagatttctttgggagcctagggaacgtcctggacgaagctgagcggatgactaatagtttcatcaaatcttttggttttccacctgttcatgacagagaatcaagtccatttcgacgacagcctgcagagaagcatattgaagaagatacggcaaggaagactaaggagagtgactactctgaattcaggagcaagatttcagatgtgtaagcagctgtagagctgcagtttgctggcatgtgtctacagagctgaaacctgggaagtgagagctttgcaatctcagggtccttgtatgttctctctttggaacaaaacgcgtacttgcgactttcagctgctttttagcctcgcttagtatggtaatcgtaatggtaggtgaagaagaaatatggtaatc

SEQ ID NO: 453545 - DNA, 401 bp, Sorghum bicolor
tcgcgtccgcacgcgcacgtcgtcctacaacctttctccctcctccaactgtctaccatttcttcccacggcaaaacacacctcgccggcgcgcttggcaatggcgtaccgtgtcctggaggtcacccttgtctcggcaaatgacctcaagaaactgtcggtcttctcccggccgcgcatctacgccgtggcttccatttccgggctcgacctccgcatgcctagccacagcacccaggcagaccagaccaacggttgcaaccccgcctggaacgccgtggcacacttccccatcccggctgccattgacacccgcggcctcgcgctccacgtgaggctctgcgcccagcgtgtgtacctgggcgaccgcgacatcggggaggtgttcgtgcccatcgacg

SEQ ID NO: 453546 - DNA, 823 bp, Sorghum bicolor
cgtccgcgcgcgagcccgagcgagggaggagggtcaaggggggaagaggggaggcaccgtgccaggaccctccttccccgtcggcgccgcctcctatcttcgagaggtagtcaggtttcaagatgtcgaccagcacatttgctacttcctgcacgctgttgggcaatgttagaacacaggcctcccacacagcggtgaagagcccttcatctcttagcttcttcagccatgttatgaaggttccaagcctgaagacctccaagaaactcgatgtctctgcgatggctgtctacaaggtgaagcttgtcacgcctgaaggtcaagagcacgagtttgatgctccagatgacacctacatacttgatgccgctgagactgccggtgtggagttgccgtactcgtgccgtgctggggcttgcttccacctgtgctggcaaaatcgagtctggtgcagttgaccagtcggatggatccttccttgatgacgggcagcaggaggagggctatgtgctgacatgcgtctcctacccaaagtccgactgcgtcatccacacccacaaggaaggtgacctgtactagggctagggcttttcaatttggcaagggaccaattgctctcaaatgtgttgtcaagcaaagctccatctgccctaccagttgtgcaaactgtttggcatcaaacttttgtggttgctgtcttctgtgttctgctagtttatgttcggggttggtgcattaagattgggaacccatgggaatactagctaatcaataaaaaaacatgatgtgatgccataatagtataatttcatggctttttgtt

SEQ ID NO: 453547 - DNA, 572 bp, Sorghum bicolor
cgtccgcaacaactggcccgaggacaccctcttcttccgcgccgacaacggcgggtggagcacccagtacggcgacttcttcctgtcgtggtactcgcagatgctgctggagcacggcgaccgcatcctgtcgggcgccacgtccgtgttcggcgcgtcgtcgcccgtggaggtgtccgtgaaggtggccggcatccactggcactacggcacccggtcgcacgcgccggagctgaccgcggggtactacaacacgcggcaccacgacgggtaccgccccatcgcggacctcctggcccgccacggcgccgtgctcaacttcacctgcgtggagatgcgggaccacgagcagccgcaggaggcgcagtgcatgccggagcacctggtccggcaggtgggcgccgcggcgcgcgcagcgggcgtgggcctcgcgggcgagaacgcgctgcccaggtacgacggcacggcgcacgaccaggtggtagccaccgccgcgcagcgcgccgccgaggaccggatggtggcgttcacgtacctgcgcatggggcccgacctcttccacccggacaact

SEQ ID NO: 453548 - DNA, 805 bp, Sorghum bicolor
acgcgtccgaaataaattacatatatacagctatatagcaatggcgggcaggaagatcctcctcctcctcctactttgtgccatggatagggtagcagtggtagtgctcgccgtcgcagggcagcaaggcgccgatccgcgggcactgccggcggagtgggcgacggcgataaagtacaaggccaccatggacgtgaagacgcgccaggctttcgacggcgtggtggctgccgctccggcggagaagcgttcggaggccgtggaagccgtgctgcagcagcagctcaacatggacgtctccctgggcaaggccacggcgtccggcgacgagaacaacttcgtgagcgtggccggcgcgtacgagaaggcggccgacgccgtcatcgcggcgtcgccggcgaacaagctgggcacgatggcgttcgcgtacaacggcgtggtggcgccggacccgggcaggtgcaccgccgccgccgccgccgacaagcccttctgcgagacgtacgccaagacggagaaggccttcgccggggtcatcgccacgggggactcgccgcggacgaggctggggttcacggacgtggtgctcaagcagaggctcgccaccgacgccgccatcaacaaggcgtacgccgagggggacaaggacaagatcgccaaaatccttgctgcctacgcgcaggccgccgtcgcggtcgctgccgccgcgcctcctgaaaagctcagagtcatggagcagaccttctcggcggtggccgccgccgctcatcagcctgcagctgctgcaaaagcttaattaataaag

SEQ ID NO: 453549 - DNA, 489 bp, Sorghum bicolor
cgtccgacgagatcgtgcctgagaagatcatacgcgaggactcgccgccgcctgcgccggtcgtttctgaatggaaggagaccgccgccgccgcaaccacggaagacgaggaggtggagacccccaagaaaggagcggcgcctgcaccggaaccggtgccggagcccgtcgtcgtcgtcgtcgccgccgctgcagccgaggacgacgtggtggcggacaagttcgtgacggtggtgaaggaggcgatcaagaagcacgaggcggacgagaagaaggaggcgatgcggaggttccagggcagccgggtgaagacggcgatggaggcgcggccggagtcggagcagccgcgtcgccgggaggtggtgcggagcaacgacgtcattgaggaggcgcgcaccaagctgctggagaagcgccagtgcagcagggtcaaggcgctcgtcggcgccttcgagaccgtcatggacaccaagaaggacgccgccgtcg

SEQ ID NO: 453550 - DNA, 389 bp, Sorghum bicolor
  unsure (1)..(389): unsure at all n locations
cggtccggaactncccggggggagccacgcgtccggttggaactggtagatttttcgtggcatgagtctaaccaagatgggcttcaaaggggggtgcaactaaccttggcagatcggttccaagggagtcagacaatgcgctcaataaaaacaagctcaacagcagtttatccgttgcttatatatatttctaatgactgtatcgagtgaggaggatagtcctagtatttcattttgctttgtttaccgggctgtgaagagtttttatcagtagataagatgtagtacaactatcagtagataagatgtagtacaactatcagtttgggtgtgcttggtccctatatttattatgacttagtgaaagtatcttgtttcgtttgccaaaa

SEQ ID NO: 453551 - DNA, 730 bp, Sorghum bicolor
  unsure (1)..(730): unsure at all n locations
gagagacataaatggctccctgtaaggtcccaaattcacaccanagaccagagggaaaagaaatnactgagcaagcacagacaggcatcacaatcccacacagaattaatgttcttagcccacacagaattaatgtttttagcacaacaggctgccagcgaaggattacattacatatttagatggggcaacacaaccgaaagcagctgcagcaacagcaacagcagctgagacccattgacacatagtatatggcaaccagtcactgatgaagacgacagtacttggtggatgaccacacttttctctctttgttgagctgagcatatgccccttgtctgaggaagcatatgctgctgcttactaactcttcaggtgggggaagcactggtagaggtcattcttgggatgcctcgcctcggcatgctctttgcacttggcctcagaggtggtgcagataaaagtctgcatacagatcttgcactgcgttcagaagaaagcatggttagtgcatttggatgtaagcatttttcagatgaccaactgatgagaactgaaataccagaccacaactacacaaacaaacattgttcaagttcaaaaattctgggtacatacatttggccaatgagagaaatggcagctagtaactagcaattcacacaacaggtttcagtagtgattctattgtccctccagagtccggggtatctgctgatgttcccggacg

SEQ ID NO: 453552 - DNA, 867 bp, Sorghum bicolor
  unsure (1)..(867): unsure at all n locations
cgaatnccaggaaggaagcagcagcgtgaccatcgagtcggacttcttcattgccagcggcatcttgttcaggaacgacgcgccggagccggagctgaagagggatggtcaagggaagatcggcgaggtgactagcgcaaccatggcgccagcgctgcgagtggcaggatccaaggccaccttctacaaatgcaccgtcgacggcgggcatggcgccctgtatgaccataagggactgcactactataaatcgtgcacaatcaacggcaccttcgacttcatcttcggcaatgcaaggtccttttacgaggactgcaacattgtctccaaatccgccactgattacctcggggacctgccggtggcaaagccgcccttgaccttgtcgcctgcggcggccgacggcggtttctctttcaagacatgcaccatcacagggcaaagttttatcttcctaggaagggcgggctggcctgtcgtctactcctacaccaacataggatacgacctttttcctctaatcgtctctggctctgacgatagccaagcaggggctaaatttcagttcaaccgggagtttgccccgttcctctttatatcatacaagaactacggtgttccgagtggtgcggcggggataaacaaaaccgatgtcgcaccctttcttggaacccaatttgtctccggagacaattggatcctgtccataccacctgcaacagagtagcagcacgcggcggcggcaaggactgactagggatcggatggagcacatatgtttatatgcatgatatatatatgatggccaccatcatcatcctatgacacaacccgcggaaggtgttggttgttttacttcttttgtac

SEQ ID NO: 453553 - DNA, 931 bp, Sorghum bicolor
cgtccgacgaccccgagttctcgctgcgccggcggcgcgtcaccgcgttcctgcggctcctgcacgagctccgtgaccgccagctgcagcgcctggaggctgctgccggcgtcgccctcgaaggcgaccagctcacccctttcggccggagcctcttcatcggcgcagctggcggtggcggcggcagcgagcatggcgtggcgctgggcgactacttcctcggccctagcctcgacgcactggtgcagcagcttgccgagaacgacgcggggcggcaggggacgccgccggccaagaaggaggccgtggaggcaatgccgatcgtggaaatccccagtggcaacgatgacgacacggccagctgcccagtctgcctggaggactacgccgccggcgagcgcgcccgcgagatgccctgcaggcacaggttccacgccaattgcatcgtgccgtggctcgagatgcacagctcctgccctgtctgccggttccagctgccggccaccgatgacaagagctcatgcagcagtggcgacggcggtgggtttgtcagtgtcgatgcggatcgtgaaggcaatgacgacggcggtggtgatggtactggtagggcaacctctcctccaggcaatgccgagccagctgaagccgaagagagcggcaggcggttgccgccatccttgcagtggctcaacagcctgttcccgccgtcagcgcagtcctccggtagcggcagcagcagttcgcatcattgggagaattgagcaacaatgcaatgccaatatataacgacggatggttgctgctgcttgacaccttgagcccattggtgccaatgtacataggaaggagcaggagcatgccgggttgctgccatgaaaatttggagcctttttttcagtgtgttagtttggctcatgtaatgttctctctg

SEQ ID NO: 453554 - DNA, 693 bp, Sorghum bicolor
cgtccgtaccaacacaaatataaatggcaatggccaagatcctcctgctcatcctcctcggcgtcgtcactgcggtcgtagaggccggcgatccaccggtgaaatggaaggccgccctgacggtcttagacgccatggacgcgaagatgctgcgcttcgccgacggcatcaccaccatgaagaccgccaccttctccatcgaggcggccgggttcatctgcaagaacatggggttccacaacacggccggcgcggcgaagcaccaggcggtggcgctccgcgtccagggcgacctcgcggcgttctacaactgcaggttcgacgcgttccaggacacgctgtacgtgcacgccaggcggcagttcttccgcaactgcgtcatctccggcaccatcgacttcatcttcggcaactcggcggcggtgttccagaactgcctcatcatcacgcggcggcccatggacaaccagcagaactcggtgacggcgcacgggcgcacggaccccaacatgaagtccgggatcgtcatccagaactgccggctggtgcccgaccagaagctcttcgccgaccgcttcaagatcccctcgtacctgggccgtccatggaaggagttctcgcgcctcgtcatcatggagagcaccatcgccgacttcatcaagccggaggggtacatgccctggaacggcgact

SEQ ID NO: 453555 - DNA, 628 bp, Sorghum bicolor
  unsure (1)..(628): unsure at all n locations
cgtccgcttgctcgctagcccataaatatatactcatcgccaccgagcatatattctctataacagaataaaccatggggctagcctactactaccaccaacggctcgtcctcctggccgtcgtggcgttcctatgtgctggcctcttcccgcaggcattagggaaggggcatggcggtgctgtcaacccggcggttgccggcatctgctctcgcaccccattccctgaggtttgcaagtccacagccgggaggcatgcgtccaagtacccggtcatcgacaacttggccgtgctcaacatgcaggtggaggcgttctccaagcgcactgcgcaggcgcggcagcacgtcgcgaagtcggcccgcactattccaccggcgcagaagcaggcccttacattctgcgacacaatgtacatgaacacacaggacaccatcggtgcggcgcagcgggccatcacgttcaaggacacgagcaccgcaaaaatcatgctgcagctcgccgttcaggacttcgactcgtgtgaccgtccgttcacccaggctggtatccccaaccccattgggaagttcgataaggaactaaaccagatggccaacaactgcatgacgcttgcanacatgatatg

SEQ ID NO: 453556 - DNA, 669 bp, Sorghum bicolor
cgtccgcagttgtcaaaggcagttttggttaccttgatcctgaatacttccgcaggcagcagctcacagagaaatctgatgtctactcttttggtgttgtgctgtttgaggtcctctgtgcacggcctgccctgaaccctactcttccaaaagaagaagttagcttggcggagtgggcgttgcactgccagaagaagggcattcttgatcagattgttgacccctacctgaagggaaagatagctccacaatgcttcaagaagtttgctgagacagctgagaagtgtgtttctgatcagggtattgaccgcccttcgatgggtgatgtgctctggaacttggagtttgcccttcagatgcaggaaagcgcagaagagagcggaagccttggttgtgggatgtcggacgagggcactccccttgtgatggtcggaaagaaggatccaaatgacccatcgatcgagtcaagcaccaccaccacaaccaccacttctataagcatgggcgatcaaagcgtcgcgagtatggactcagatgggctgacgcctagtgctgtcttctcacagatcatgaaccccaaggggcggtgaggtaaagctcatcccattcgttaccttgcaggcataatttattcattcagcatgtttttcatgagttcgtgctgttgat

SEQ ID NO: 453557 - DNA, 555 bp, Sorghum bicolor
cgtccgcgaaaaagcaagcagctaacattacaacagcacctcgagggacggcgatgggcaaggcatcatggaggacgccgtccttggtcgcattggcgctgctggtggcgctcctggcggcagcaacggtggctgccgcggccgaggaggaggggtcgtcagcggcgccggcgccggcggttgcggatgctgatgcgccggcggcggcagacgaggacacggcaggcggcggcggtgacggagctccggcaccagcgccggtgagcgaggaacccagccacaagacgataggcgccaaggccaaggcagggctgcacaccgtcatggcgagcatctccaagggcaagaacaagttcgagtgcaaagtcctgggccgccattgccccgcctctgaagctccctccgcccagtgattaattaataattaattaaaacaacaacaacaaaaagccatccatcagatgatcatatccatccacaccacaccacacattcttcatttgttcaatgcagtgatctgcaatcttatctgtatgaatgtatgaattattatga

SEQ ID NO: 453558 - DNA, 722 bp, Sorghum bicolor
cgtccgccaggagtttccggacgcgacggcgctcatgtccgccaccccggccgtggcgtagcgggaggcggcgtgcaacatcacccggcccaagaagcgcgcctccaagtgctgcgtctccttctccgcctactacaacgactccgtggtgccgtgcaacacctgcgcctgcggctgcggcaacgacacgtgcacgtgcgacccggacaggcacgccatgctgctgccggcggaggcgctgctcgtcccgttcgacaacctgtcggccaaggcccgggcgtgggccaagatcaagcactggcgggtgcccaaccccatgccctgcagcgacaactgcggcgtcagcatcaactggcacgtcatgaacaactacaagtccggctggtcggcgcgcatgaccatcttcaactggcaggactacaccttcaaggactggttcgccgccgtcaccatgggcagccacttcagcggctacgagaacgtctactccttcaacggcaccaggatgggcgcccccttcaacaacaccatcttcatgcagggggtgccgggactcgcgtacctcgaccccatcaccgacgggaacacgccggcggaaccaaggcttcccggaaagcagcagtcggtcctctccttctccaggaaagacgcgcccaacatcgacattcccaaaggggaagggttccccaagagggtctacttcgacggcgaggagtgcgcgc

SEQ ID NO: 453559 - DNA, 634 bp, Sorghum bicolor
cgtccggtgggctatgggtgccattatcgctgagcttttttcactgcggccactttttcctggctcaagtgaaccagatgaactctacaaaatctgtagcattcttggcactccgaatcagcgcacttggcctgaaggactgcagctagcagcatctataggttttcagttccctcagtgtgagagcgtacatctttcggaagtggttcccttagcaagcgaagatgcaatcagccttatttcgtggctttgctcatgggacccacgaagaaggccaacagcagtggaggttttgcagcatcccttctttcagcaatgcttctatgttcctccttcacttcgcttcaaatccaccggatatgcatcaacgccaccatcagctggggctaaaggagctgtggatcagaagaacattaggagatactccatggggactgtacccaatgcgaggccaacagttaattactcatacttgagcaataacgctccagcaagagcagctggtgtgcaaaggaaattggagttggatcatcagctcccagagactaataaccataaggtgacaaaggcgaacatgatgaatcagtcttggtccagaccagcagcagtaaggagcaatgggaattaccttgcc

SEQ ID NO: 453560 - DNA, 1664 bp, Sorghum bicolor
  unsure (1)..(1664): unsure at all n locations
cgtccggcgccggccggctccctctccggcagggctcaggcagcatcctttggaagaagaagtacctcttctccctgaggcctgagcccctccccgcggcgagccaacaagccggcgcacgtcgccacccggggctcacgctcaccaccgatcgagccccaacccatttaataactatatagagcagctagctaggatcgatcattagaaatggcggtcaccgccgtcgtgacgaggagacccctgtccatcctcttctacatcatcctcgccgccgtggctgccaccaccgccgccgccgcggagacgccgacggacgccgccatcgacgcggcgtacgcgcagctcgtcaacgtcaccgccaaccaggagtactgggcggagcgcgccccaggtggcgcacgcgtacaacccgcgcggcgtacgagagcgaccccgtgggcgtgatggatcgcttcaacgacggcgtgcgcagggccatggagacgtcgacgccgacgcggtcccggtcccggtccctggcgcacaaggcacggggtggcccctgcacggcgaccaacccgatcgaccagtgctggcgttgccgcggcgactgggcgcgcaaccgcaagcggctcgccaggtgcggcatgggcttcggccaccggaccaccggcgggctcgccggcaggatctacgtggtgaccgaccccagcgacgagcccgccaacctcgtcgtccccaggaaaggcacgctccggtacgccgtgatccaggaccgcccgctgtggatcacgttcgcgcgcgacatggtgatcaacctctgcagggagctgctggtgaccagcgacaagaccatcgacgggcgcggcgcgcaggtgcacgtcgtgggcgcgcagatcacgctgcagaacgtgcggaacgtgatcctccacaacctccacatccacgacgccgccccgcgcggcggcggcgtgatcagggactcgaagcaccactggggcctccgcggggagagcgacggcgacggggtctccgtgatggggtccagcgacatctggatcgaccacgtgtcgatgcggagctgcgccgacgggctggtggacgtggtggacggctccaccgccgtgaccatctccaacggccacttcaccaggcacgaccacgtgatgctgttcggtgccagcgacgccgccgtcaaggacaaggcgatgcaggtcaccgtggcgttcaaccacttcggaaaggggctggtgcagcggatgccgcgctgccgccatggcttcttccacgtggtgaacaacgactacacgcactggctcatgtacgccatcggcggcagccagaaccctaccatcatcagccaggggaaccggttccgcgcccgtcgacgacgggaggttcaaggggggtgaccaagagggagtacacgccgtacagcgagtacaaggactgggtgtggaagtcgcaggacgacctgttcctcaatggggccttcttcaaccagtccggcgggagaacgagcgccgttcgacagctcgacctattcaggcaaggcgacagacgcgaagtgtcacaagtacgccgcgcctcactgccggtngcaagaaggctagccgccgnggtgccatggtgtgcatgctagatatatgctttgatttgggggatcgggggggcgatcgatg

SEQ ID NO: 453561 - DNA, 564 bp, Sorghum bicolor
cggtcccggtccccggtccggcacgcgcccgcaagcacctctccccccagctagctagctagctagctcctcatatatattttctttccaccgcacgaggagaggagaggcgcggagaggagaggagcgaggctagccccccagcatggcggcggcgaacaacacggcgaggctggccatggcggcggcggcggtgctgtgcctgctgctgctgtcgacggtgccgcaggaggtcgccggcgccgatcaggggcagtacttgtcgtatgacaaggtgctcagctgcaaggcgctgggcaactgcgacgacaagaatcagagccccgaggccaaacgcccgatgaagcctgtcaacggatacacccgcggctgcagcaagatcttcaagtgccgcggctgatcgatgcatggatggatggatgcgcatcatagtccgtgtgggcgtgcatgccaattgccaactgatgtttcttgcgttgcatatcatcgatccgcgagttctgtggctattgtatactgatgtgtccgtatgtggctctcaacttctcatggttaatgtgatat

SEQ ID NO: 453562 - DNA, 492 bp, Sorghum bicolor
cgtccggcctggttgagctaacatgctgcattgtgaagagcgcagtctcactcgagcgccttacattcgacacatttcgtggcgatgttaggtctccatgttgctcgggggatgattctgtcgttggctacagcaagtataggatggagcaagcatctagagccgtggaagctataagaatgtacattgaggataaagttgcgcctacaactaagctgactgttctggagccctgcgcacggtgtcacgccaccgcttttgatgattaggattaggcagaccttgcaagagctatagccggtgctaggatggagtatcattagtgaattgtgcttggtttctttgattgttcggagcggtttatatgttttgtctagccacaaaggcaaaatcaaactactcttcttaggtttgattagtttggatgaaatagtattgccgtgtatgactttgagtacttgtttataatagatatatatcagtaccctttta

SEQ ID NO: 453563 - DNA, 458 bp, Sorghum bicolor
gatgcacagtgcacgaagaatatccatctgctttttatgatattcctagcttgctgcaacagccagccaaattgcccatacaagtataaacaagaaatccagcggaaactatagtcaaataagatactgatttgctgcataaaaacaagatacagatccaaggaactattcaaactcagaaacctattcttccaatgtttcacaaagcacaacagggggcttaagcaaaaatccagggcaatcaaataccggttcagcttagatgagagacccttcatctttgctgcgattaaacaaacaggtagcgacgagccagagaccaactactgctatagttcaggagggtttcatccatcatattccccattggcaaacttgtcctcagcatagcaaacagggaccacagggttcccaccaaatttgcttccatgcaatgctgtgtttgctttgggcgcacc

SEQ ID NO: 453564 - DNA, 449 bp, Sorghum bicolor
cgtccggcaatcaccaagaagcggaagttcgtggcggatggcgtgttctccgcggagctgaatgagatgctcacccgcgagctcgcggaggatggctactccggcctcgaggtccagcgtcacccccatgcgcactcgagatcatcatccgcgccactcgcacccagaacgtcctcggcgagaagggccggagaatcagggagctgacttctgtggttcagaagcgctttaacttcccggagggtggcgttgaactctacgcagagaaggtgaacaaccgtgggctctgcgccatcgcccaggccgagtcgcttcgctacaagcttctgggtggactagccgtgagaagggcatgttatggtgttctcaagtttgtcatggagaggggcgctaaaggctgtgaggttattgtaagtggcaagctcataacccagcgtgctaagtctatg

SEQ ID NO: 453565 - DNA, 763 bp, Sorghum bicolor
atgtgcaatataaccttttgctgcttttatttgataactcgatacatattcaggttcaggtagcaaggtacatgcatgtaatgataacgaaaacagagagccatttcgcttggcttgcattgttacagacaaatccggacacgcgtacacggactatagtttgggctgaggatatgcatccatctgatgcgcatgtgcagttttgtcgtagtctactagctcttgacatgtatacgtatgtctcatgctcatgctgctcttcttatttcttgattcttgacttgacgacaatgacaaggtaaggaaaggacgaaagacgaacggcggtggacgattagtactgaagaacaactcggacacgcctcactcaaccacactcttattcatattcacttcgttcactactagcagtagcagtagcagccagctgcagctccatcctcgccatcatatcactcacatgtttggcttcatgttgagccgtgtggcaatcttcatccccagcgatgcgtcgcactttgagaggaggtcgatccagatggacctgagctcctggctaacctttggatgccccagcgagtcagcaaaccgccgcacaaacctctcctgccgatcggcgtcccagctccggtacctctccccaggctgcttgaaatcattcggcttccgtatggtctccttctgcctcttccccaccaccggcctcgccgggatcggcaccggcggcgcctgccggagcggcgcgtgcctggacgggtagtag

SEQ ID NO: 453566 - DNA, 450 bp, Sorghum bicolor
  unsure (1)..(450): unsure at all n locations
cgtccgagagattgacaaataccatcaaatgttccataccatggacaaggacaatgacggtaatttgtcacttgacgagctgaaagagggtttccggataaacggtcatcctgttccagaggaagagataaagatgctgttacaagcgggtgatatacatggaaatggcacgttagattgtgaggaatttgtaacagtcttacttcacattaaaaagatgagtaataacgactatctacctaaagctttcaagttcttcgacaaagacgggaatggttttattgaaatggctgagttgatggaggctctaggtgatggtgaactaaaatctaatgagcaagtggttaacgacattattcgtgaggttgacaaagacaatgatggacgtatcagctatccagagtttgaattgatgatgaanggtggatcggactggacgaatgcctctag

SEQ ID NO: 453567 - DNA, 870 bp, Sorghum bicolor
cgtccgcccacgcgtccggcggattagataggaggcagggagggaagaacacctcaccgctgcactgctccttcgcggcgctgcttctctccctctcccggctcccctcctcccccgcgccgcgatgagcacggccatggccaccacttccttatccctccaaggccgcccttcccatgcccccaccaggaagctctcctccccgtttctcggcgcccccgcgtccttcctccggccgctggcgcccgcgcccgccgccgccccctcctcgcggcggactctcgccgtcagggccatggcgccgcccaagccgggaggcaaggccaagaaagtggtgggccttataaagctggccctcgaggccggcaaggcgacgccggcgccgcccgtcggcccggcgctcggtgccaagggtgtcaacatcatggcgttctgcaaggagtacaatgccaagacggccgacaagcccggctacatcatccccgtcgagatcaccgtgtttgatgataagagctttaccttcgtcttgaagacccctccggcttcggtcctgctactcaaggctgcaggtgtcgaaaaaggttcgaaagagccacaacgagcgaaggtgggaaaagtaacggcggatcaagtgcgtgcaatagctcaagagaagttgccagacttgaactgcaagagcatcgactctgctatgaggatcatcgctggcaccgccgctaacatgggcatcgatatcgatcctccaatccttgtgaagaaggaaaaggtcctcttgtagtttgttttgctggcacacgcagatcatcccaccaatggccatttgtagattatgctttccttttttgctcgtcaattcgctgtgcctacttg

SEQ ID NO: 453568 - DNA, 550 bp, Sorghum bicolor
agccgcttatggtaattactggcgccacacagttcagctagaattattaccttaaagcgaatattcttctctattgttggcagagatggcctagttggcagtgctaccatacaccatgactttgaccactatagatggacctgacgaatcgtcatgctatgccaacaatttcaagctccttcaaaggcttctctgatgacttcctgctgtcgacaggttaccttccattggggtagtcacaatgatgttgacctccctttatatcgtggattactccaattcttgcagttctgaaatgatcagaaacaaccattgatatgcactgaaacattggaagggcaacacgctgcgagcacatatatatcaatccatgcatcagcaccgattgggttgacttatttaagggtgtctaccttgaactcatgctatatgcctgtataatattcctccaccttcatgatttaccacacaaattatatatgtatcttataaatagtatcaatatatacctctccttatgaattattcaatttaaattaaactgaattgc

SEQ ID NO: 453569 - DNA, 813 bp, Sorghum bicolor
  unsure (1)..(813): unsure at all n locations
cgtccgcccacgcgtccgcggggattccacctacgttgctctgctgccatctgggtttgccatcctgccggacggtccaagcggtgtcggcgctgagcataagacaggtggctcgctactcaccgttgccttccagatcctcgtcaacagccagccgaccgccaagctcaccgtggaatcagtagagaccgtgaacaaccttatatcctgcaccatcaaagaagatcaagacagcgctgcagtgcgacgcttgagtgtcgccgtcgccgcangggggatggtcgtcgacgacgagcctgagtcaagaacgaacctcgtgctggaaagaaacctttgctaggtgataaggatccatctcggacaggtccttagcacagagcaatggtggtggttcgggtattgactcggtctctatcgtctgcttgttctccctgccaacctggctgtttgatacaggacctttgcatagtggacaataatggttagatggctaatcttatgtttcagtcccgtcgtttcatcagggaatcaaacgttgagtttttggccgggtcgttgttagttattacgtataatatactgtccattattctctgttgtgaggagctatatgttatatgtaaacttgagagcacagaaacgttgggttgtagtggtgtcgtccataggtcatggtagcatgcataagtgtagctaggcatcaaactatcagccaataatgtctgatcgataaagtggtgtagtggtttacctggaaatgcttatttagcttcatcaattattaaaatttattctgcaaggtatatatgtagg

SEQ ID NO: 453570 - DNA, 1435 bp, Sorghum bicolor
gatctggagtatttaaatgttctgtccttgcctggtaacaacatcactggtggcataccagagcagtttggcaacctctctcggttgacaagcttacatttggaaaacaacctgttggttgggccaataccggcttctcttggcagactttcaaagctccagcttctgatactaagtcaaaacaatctcaatggctctattcctgatacgatagcaagcatctcaagcttgacagacattcggctggcttacaataaactcactggtcaaataccatcccagctgtttcaagttgcacgttacaatttttcaggtaataacttgacctgtggagcaaacttcctccatcagtgtgcctcaaacatgtcttaccaaggttcatcccatggttcgacaataggcattgtccttggaacagttggaggtctgatggggcttctaatcataggggctatattcattatctgtaatggaaggaggaaaagccatctacgtgaagtattttgtggatgtatcagtgagaaaaatgttcttggacaagggggctttgggaaagtatataaaggagcacttccagatggcactaagattgctgtaaaacggttaactgattacgaaagtcctggtggagaggctgctttcttgcgtgaggttgagctgattagtgttgcagttcaccggaatcttttaagattgattggtttctgtacaacacaaacagagcgcctgcttgtttatcctttcatgcagaatcttagtgtggcctaccgtctacgagaattaacctgggagccaatattagattggtctgcaaggaagcgagtggctataggcacagctcgtggactggagtatttgcacgagcactgcaatcctaagattatacatcgtgacgtcaaggctgccaatgtcttgcttgatgaaggttttgaaccggttgttggtgatttcggcttggccaagctggtggatgtacagaagacatctgtggctgctcaggtccgtggaactatgggtcacattgcccctgaatatttgtccactgggaagtcatccgagagaaccgatgtttttggttacggcataatgcttctcgagctagtcactggtcagcgtgccatagacttttcacgtctggaggaagaagatgatgtgttacttgatcatgtcaacaacgtgcaaagggaagggcatctcgacgccatagttgaccgtaacctgaacaacaattacaacgggcaggaggtggagatgatgatccagatcgcgctgctctgcacgcaggcttcgcctgaggaccggccgtccatgtccgaggtggtccggatgctggaaggcgagggcctcgcagagaggtgggaggagtggcagcaggtggaggtgacgaggaggcaggactacgagcggatgcagcagcgttcgactgggtgagact

SEQ ID NO: 453571 - DNA, 991 bp, Sorghum bicolor
gatcgtagaattgcatttggccagttgaaaagatttgcatggagagaattgcaacttgcaactgataatttcagtgagaaaaatgttcttggacaagggggctttgggaaagtatataaaggagcacttccagatggcactaagattgctgtaaaacggttaactgattacgaaagtcctggtggagaggctgctttcttgcgtgaggttgagctgattagtgttgcagttcaccggaatcttttaagattgattggtttctgtacaacacaaacagagcgcctgcttgtttatcctttcatgcacaatcttagtgtttctaccgtctacgagaatttaacctgggagccaatattagattggtctgcaaggaagcgagtggctataggcacagctcgtggactggagtatttgcacgagcactgcaatcctaagattatacatcgtgacgtcaaggctgccaatgtcttgcttgatgaaggttttgaaccggttgttggtgatttcggcttggccaagctggtggatgtacagaagacatctgtgactactcaggtccgtggaacaatgggtcacattgcccctgaagatttgtccactgggaagtcatccgagagaaccgatgtttttggttacggcataatgcttctcgagctagtcactggtcagcgagccatagacttttcacgtctggaggaagaagatgatgtgttacttgatcatgtcaacaacgtgcaaagggaagggcatctcgacgccatagttgaccgtaacctgaacaacaattacaacgggcaggaggtggagatgatgatccagatcgcgctgctctgcacgcaggcttcgcctgaggaccggccgtccatgtccgaggtggtccggatgctggaaggcgagggcctcgcagagaggtgggaggagtggcagcaggtggaggtgacgaggaggcaggactacgagcggatgcagcagcgttcgactgggtgagact

SEQ ID NO: 453572 - DNA, 608 bp, Sorghum bicolor
cgtccggagctttggcatatattcataacagcattggagtgtgccacagggacattaagccgcaaaatctcctggttaaccctcatacccatcagctaaaactgtgtgactttggcagtgcgaaagttctggtaaaaggcgaaccaaacatttcttacatctgttctaggtactacagagctccagagctcatatttggtgctactgaatacactacagccattgatgtttggtctgctggctgtgtactcgctgagctgcttctagggcagccactattccctggagaaagcggtgttgatcagcttgttgaaatcatcaaggttctgggcacacccacacgtgaagaaattaagtgcatgaatccaaattataccgaatttaaattcccgcaaatcaaagctcacccatggcataagatcttccataaaaggatgcctgctgaagcagtagatctcgtgtccaggcttcttcagtactcgccaaaacttcggtccactgctttggaagcattgatccatccattctttgatgaacttcgggatccaaacacccgcttaccaaatggccgctttcttccacctctcttcattttcaagccccatgag

SEQ ID NO: 453573 - DNA, 552 bp, Sorghum bicolor
cgtccggtaacattgaccgcaaagggccatccgctgcggtcagtgtaagtttctgaatcatattttggcaatgcctaaggctagacaatattgagctagcctttacaaagaaagagactgagagaggagaagaatggcactggcgcattgaggaaggttgagaaccagttaacaagaattgccagcatttggacaatcttgttaacagtgttttaaggttcccagcagacaatttgcgagttcaagaagagtgcgtgcatccacattgatataagcaaggtttaataataagagaagaaacatgggcacaaagatgaagaaggggatcctgaagccgttccgctatatctcaaacatgatggatggtaaggagcctgaaatgcaaattgggttcccaacggatgtaaaacatgtggcacacatcggttgggatggtcctggctccaacaacaataacagcaacaataatgctggaggagcacctacctggatgaaggattaccactcggcaccgcttgactcgtcctcttttaagagcgagagtgggggcac

SEQ ID NO: 453574 - DNA, 510 bp, Sorghum bicolor
acgcgtccgcatgtacatatggccgctctctcctccacctgtatgcacctccaaacccaagaacacaaataagaagcagatcggtcgtcctctcctctccgcttcccggcgaggcgatggccatcgccgaggggaagaagaggaggcccgccctgatctgctgcggcgtgctggtggccgtgctcgtcctcctcgccgtcatcttcgtgacgctctacttcaccctgttccggccgcggtcgcccaaggtggtggcgacggcggtgggggcggagatctttcccaagaacaacggcggcggcgcccaggacctcaacctcaccgtgcacgtggacgtcaccgtgaacaaccccaactacgccgcgttccggtacggcgacgtggcgacggtggtgcggtaccacggggaggacgtgggcctgtcggtggtgcccgcgggggagatcggaccgcgcgagacgcatacgatcgccgtcgccgttgaagtggacaccggcaaggtggcgacca

SEQ ID NO: 453575 - DNA, 629 bp, Sorghum bicolor
cgtccgcaactagctactgctggtaaagtgaagaagatatttgctcattgcttggataccataaaaggaggtggaatttttgctattggagatgtggtgcagccaaaagtaaaaacaacaccattagtagccgacaagccacactacaatgtgaaccttaagacaattgatgttggtggcactacactagaactcccggcagatatttttaaaccaggagaaaaaaggggtaccataatcgacagtggtaccaccttgacataccttccagaattggttttcaaaaaagtaatgctcgcggtatttaacaagcatcaggatataaccttccatgatgttcaagattttttgtgtttcgaatattctggaagtgtagatgatggattcccaacactcaccttccattttgaggatgatcttgcgctgcatgtgtatccccatgagtactttttcccaaatgggaatgacgtatactgtgtgggattccaaaatggtgcattgcagtcaaaggatggaaaggacattgtgcttatgggagatcttgtcctttcaaacaagttggttgtctatgacttggaaaatcgagtcattgggtggactgactacaactgttcgtcgagcattaaaat

SEQ ID NO: 453576 - DNA, 830 bp, Sorghum bicolor
  unsure (1)..(830): unsure at all n locations
cgtccgcggatttctgcatacgacgtcctcaatcacccgtggatcaaagaagacggcgaggcgcctgacacgccgctggacaacgccgttctcggccggctcaagcagttcagagctatgaaccagttcaagaaggctgctctgagggttatcgccggatgcctgtcggaggaggagatcaaggggctcaaggagatgttcaagagcatggactccgacaacagcggcacgataaccgtcgacgagctgcggcgagggctggccaagaagggcaccaagctcagcgaggctgaagtccagcagctcatggaagctgccgacgccgacgggaacgggacgatcgactacgaggagttcatcacggcgacgatgcacatgaacagaatggaccgggacgagcacctctacaccgcgttccagtacttcgacaaggacaacagcgggtacatcacgatggaagagctggagcaagccctgagggagaaggggctgctcgacggccgagacatcaaggacatcgtagcagaagtcgacgccgacaacgacgggcggatcaactacaccgagttcgcggcgatgatgaggaaaggagacccggagccatccaacatcaagaaacggcgcgacgtcntcctgtagaggccggagctagctagtgcgctgcgcacggcggcgtggagctctcatgaacagatcgatcgcacggctagctgctggcaggaatattcatggtggcccgctgcacggagagacaaacgcgtacgtgcgttctatctctctctgcacagatgtatgtatagcgcgaatgcccgcgattggaaagggggggg

SEQ ID NO: 453577 - DNA, 611 bp, Sorghum bicolor
ggaacaaaaatagtactagcagcatttgccattaatcccgtgtcatcttcagtctggcacctcatcaggttatcataagttgattaacctctcccggtgcgccagaagacccctttgttcgtcacaacaagaaaacacccaacgcgacgccactgcagctgcagccacagggcgcgcacggcacgcatataccacgcacacaccaaaccaaaacgcctaccaatattacaccatcgctgcgcctgcgcctgcgccacgccaccgagcgcggcgttaagcaccttacaggaactgcaggaggcggcggccggcggcggcaggcttcttgcgcaggccgacgacggaggcgtcgtcgacgagcgggccgcagagcgtgccgtcggccttcatgtggtagaaggtgctctggaacacgacgcgtgtgcggttggcgacggccgtgaagtcgagcacggcgcgcttgtaccctccggtgcccttggactcgtacggcaccttgacggtggcgcgcgccgcgtaggcctcggcgaccatggaccccgtgcagccgtcgccggagtcccccacggcgaaggcgaggcggtagctccacccgggcacggtgccggacg

SEQ ID NO: 453578 - DNA, 747 bp, Sorghum bicolor
  unsure (1)..(747): unsure at all n locations
cgtccgggagtttaagccaacaatctctcatcatatcgtaatatagagcacaacgacagaagccatgggcagtaatggcagagagcataggtgcggagtcccacgcccgccacctttatcactttacagggactgggaggaggaagaggtcgtcaaggtcggcagacgccagcagtcgccgctggaacagtcaacatcgatttcagccacagccggcattgccaacaagaagaggttgtcaaagcaggtgtccatgaaggagaccacccgggaggtcaagtgggagaagcggaggcgacagatacagcgacagaggagcagcatgcgcctcaacgaagctgacgacagggctggtagcaggactgtctgtcatgttgacagcgaggcgagctcgagcgcggagcgggtgtcgtccaagcgtataaccgacgaggacctcgatgagctgaggggatccatggatctcggcttcaggttcgatgagcacaagggcgggcaggacctgtgcgacacgctcccggccctcgacatctacttcgctgtcaaccggcagctgtccgagcccaaaatgcggttttctacgagctcagcaccgtctctcttggccaccaagtcgtcgcccaacctctgcggcacgcccagcctcggaagtcctagtacgcactctaataaccccttggagtcatggaaaatttgcagtccaggagataacccacagcttgtgaagacaaggcttangcactgggc

SEQ ID NO: 453579 - DNA, 645 bp, Sorghum bicolor
cgtccggctccttccgtgctcgctgcgtcctcctgcttcccacccttccgtgcccggcaccggcagccggcaggggcaggaggagagggtcgccagttcgccgccgtcccggcaccggcggatgtcggatcgggagctccgtcctctgcgctccatcagaatcacaggggacggtcgatgcctgttcaggtccgtcgcttatggtgcctgcttgaggagagaaaagcatgcaccgagcgacagcgcccagaaggaactggctgacgagcttcgagccaaagtagctgacgagtttgtcaagagaagaggagacactgaatggttccttgaaggcaactttgagaattatgtgagacagatgagaaagcctcatgcttggggaggagaacctgagctgttcatgtgttcccatgttctcaggatgcccattaccgtctacatgtatacaagcagctctgatggccctaggatcatagcagaatatggccaggaatatggaatggacgatccagtccgcgttctctatgatggttatgggcactacgacgcccttcagccatctgttgtaaggacacaatcaagactgcgagggtgtagataaccggggactgcgtacctaagcttctctataggacagtgcatact

SEQ ID NO: 453580 - DNA, 492 bp, Sorghum bicolor
cgtccgggttttcccttcccttcctatactatttggatccgacaaagttcgacaatctaattaagtcggatccaaatagtacttccatatctcagtgcatggtttgaacatctttgttgctgaaaagatttttgaaggttcaagccatgtgaacgtcagtcatgttatccatgagctgtcatttggcccaaagtatccaggaattcataacccactggatgaaacttcaaggatacttcatgacacaagcggaaccttcaaatactatatcaaggttgttccgactgagtacaaatatctatcaaagaaagtattgccaacaaatcagttttctgtcacagagtattttcttcccattcgcccaagtgacagggcctggccagcggtttacttcctgtatgatctctcaccaattacagtcaccatcaaagaggaaagaaggaacttccttcattttataactcgtctatgtgcagttcttggtggcacatt

SEQ ID NO: 453581 - DNA, 1022 bp, Sorghum bicolor
cgtccgatgaagctggaggaggcgcgtcggctggaggaggccaggcacgccgaggaggctgctctggcactggccgagatggagaaggccaagtgccgcgcggccatggaggcggccgaggcggcgcagaggctggccgacctggaggcgcagcggcgacgcaacgccgaggtgcgcgcgcgccgggaggccgacgagaaggtgcgcgctctggatgccatctccaaccatgacttccggtaccgcaagtaccacatcgacgagatcgagatggccacggagcgcttctccgacgagctcaagatcggcgagggcggctacggccccgtctaccgcgcctccctggaccacacccccgtcgccatcaaggtgctccggccggacgcgcaccaggggaggaagcagttccagcaggaggtggaggtgctcagctgcatccgccaccccaacatggtgctcctcctcggcgcgtgcccggagtacggctgcctcgtgtacgagtacatggagcacggcagcctggaggaccggctgttccgtcggggcggcggcgcgccgacgatcccgtggccgcagcggttccggatcgcggcggagatcgcgacggcgctgctgttcctgcaccagacgaagccggagccgctggtgcaccgggacctgaagccggccaacatcctgctggaccgcaactacgtgagcaagatcagcgacgtcgggctggcgcgcctggtgccgccgtcggtggcggacagcgtgacgcagtaccggctgacggcgacggcgggcaccttctgctacatcgacccggagtaccagcagacggggaagctgggggtcaagtcggacatctactccctcggcgtgctcctgctgcaggtggtcaccgcgcggccacccatggggctcacgcaccacgtctagaaggccatcgacgccggcaccttcgcgcagatgctcgacatcaccgtcaaggactggcccgtcgaggaggcgctcggctacgccaagctcgcgctcaagtg

SEQ ID NO: 453582 - DNA, 480 bp, Sorghum bicolor
cgtccgcacaacttatgaagaatatcacattcaaatatacgagggagcatcaacgttgtttggtcctcacacgcttgagcgcctacatgcaagaattccagaaactcgctacatccatggttacaaacaaggaggttgttccatcaaatctgcagcctcctgatctactaaaccggcagatcggtctgctcccaggtgtcatagtcgacgagacacctcccggcgtcaagtttggagatgtcaggtcagacgtccctgcgaactcatccttcaggaagggcagcgttgtgaacgctacattctactcggcctccccaaggaatgatctcctcaccgaccgcactttcgcgactcgttgagaagctggatggccgtagcgattgggttcctgtctatgatgacgacgattggtcgctgcgcttcaggtggtcaaggccattgccggggagtccaatgagtttgcaacgctggagtggacag

SEQ ID NO: 453583 - DNA, 687 bp, Sorghum bicolor
cgtccgcgctgctcagagcgacgacacagactcggtccggccgtttgcccggccggaccttgggcgatgtccacaccaagaacctcctttgcttccgatggccacgatggagaagaaccaagactcccagttgatcatgggccggtacaggctgggccgcctcctcggctgcggcacctttgccaaggtgtacaaggcccataaggtggccaccggcgaggccgtggccgtcaaggtgctggacaaggatgccgtccaccgctccggcatggcggagaaagtgaagaccgaggtggacgtgatgcggcgcgtgcgccaccccaacgtcgtccgactccacgaggtgatggccacgcggtccaggatctacttcgtcatggagtacgccagcggcggcgagctcttcgcgcgcctatcccagagcgcgcggtttccagagcccgtggcgcgccggtacttccagcagctgatcacggccgtcgagttctgccacagccgcggcgtctaccaccgcgacctcaagcccgagaacctcctccttgacgcgcgcggcgacctcaaggtctccgactttgggctcagcgcgctgcagcaggacagcggcgcccgcttccgcggcgacggccttctgcacacggcgtgcggcacgccggcgtacgtcgcccccgaggtcctcttgaagagtgg

SEQ ID NO: 453584 - DNA, 562 bp, Sorghum bicolor
cgtccggaccagtgttgtggctgacaccggatttccctctgaagacagatgaactcatccctctgcttgatgtcctagcaaacaaagtgaaggctgtcaggaggcttagggaactcttgacgaccaaacttcctacaggcacatttccagtcaagattgccatcccaattgttccaacgatacgagtcatcgtgacattcacaaagtttgaagaactacagcctctagacgagtttgccaccccaccttcaagcccaacacaatttcaggacgcgaaagccaaagaatcagaaggatcaggctcatggtattcatgggtaaagggtggccgaggtacgcagtccagtgacagtggtgatagccggaattggaaagatgagattgatccgttccacataccatcggactacacctgggttgatgccactgagaagaagcggaggatgaaggcaaagaaagccaagagcaggcggggcacagcccgaaaacagtcctcaaagaacacttcggaaggaggccaccatcccatgatggatggcttcgaggagtaaaccacgttttt

SEQ ID NO: 453585 - DNA, 817 bp, Sorghum bicolor
cgtccggggctccccagcgtctcggagaagagaagcatcacggcacggcggcggtggcgaggaaggctcccatcccaatcccaacccaaatagcagccgcccaaagaggaggagctccaatcgtcgcgcgggcgtccgtcgtccctccattcatcgatccaatctgcaggaccctgcatcgcggcttcttcgtggaggagaggttgctgtggaacccgccgccagttagccatgtcgtcctccgtgctgagggccgcggccgacagggccatccgcaggcaggccctcacgctgacggacaccgcggcgtccaggatccggcagctccttagcctcaggcagcggccatacctgcggctcggcgtcaaagcgcgaggctgcaacggcctctcctacacgctcaactatgccgatgaaaaggggaagtttgatgagcttgtcgaggagaaaggagtcaaagtattgatcgaccccaaggctttgatgcatgttataggcaccaagatggactatgttgatgatccattaaagtctgagtttgtgttcataaacccaaattccaaaggggagtgtggctgcggtgaatctttcatgactacaggcagcaaagggtcgacgtcatgaggcgtttttcagtgtaaatgcatagcgaagtgtctgcaggctccagctacaggttttcttgcatctgttgcgtcgcagttcatcataatataacacagcagtgggttcgtactggatatgcaactaactcacatgtacttctaaatttcccctcaaatgttgttattacatggtctgattatccatgttctgt

SEQ ID NO: 453586 - DNA, 600 bp, Sorghum bicolor
  unsure (1)..(600): unsure at all n locations
cgtccgcaagaaggggtgcaacgcggacggcgacacctgggacgagtgcataggaaaatgtactgaaatatgctacaaagatccggtgttagaagatcgccagtggagcgcctatattgatcgatctccagggcaggatagttactctttggagtgcttcaatgcttgtgtgtctggctgtggatacaggtttgatgtcccaacggagaaggtcgaagagatcaagcccaataggccgtccaagccgccagctcctgaacctgatgtgaaacggactaagggtccagattgtactgaagatgtgccgtgcacatcggcctagattgagtgttgacgtgcctcaaattttgtaaagccgatgtgcttctccatgttgtatacctactcgacctaatttctctcttgaaaacacgcgagaaatttatctagcttagggtgaagatttactgccctggccgtgagaggtgatggcctggctgaaggtttgatggcctgatgaggaatgcgccaatgtaatgtacccaagtaatggagtcagagtttctactccnnnnnnnnnnnnnnnnnnnnnnnnnnnnnnnnnnnnnnnnnnnnnnnnnn

SEQ ID NO: 453587 - DNA, 643 bp, Sorghum bicolor
cgtacgggccgacggcggggagctccgcctcgcgcccttcagcgacacctgtgccctcgtctccgtgctcttcagcagcctcgggatggccttcaggttcgtcgagatcgagtacgtcaccaaggtgaacgatctcatcggcgccggcaagtcgtaccgcacgctgagcgacatcctcgacatggacatccagaatgactgcgtgaagaagcaggggagccactcccggaacctgcgcagggtccgcctcggcctcggcctcatcaaggccctcttcgagcagttcctcgccaccgagggttcattgtatgatgctgctacgacagcttacgggcaggtctgcgcgccgtttcatagctgggcaatcaggaaggctgttggtgctggcatgtacacccttccaaccagggagcagttgatagtgcggctgaacgaacctgatttctcggtgcagcaggagatgaggagatacattgatgcttctagtcctatcatagagtacatcgataaccttttcctctcgaggaacattagcctagattggtgaactgatctgaactggactgaagatcaagtctgcagcttgttcacaaagctgtttgtggtgccatcgatttattcttgttggagttacttattattc

SEQ ID NO: 453588 - DNA, 528 bp, Sorghum bicolor
cgtccgtatagatcgcatcaggaagcatagcgccggccggtcgcgagaaacaaagctgacaacgacgatatgatgccgcagctgcgtagcctcgtcgcgctgctcctagtggccacggcagtcgccgccgtcgtggccgtcgccgcagccggtggtgggtttgtcgtcaccggccgcatctactgcgacaactgccgcgccgggttcgagaccaacatctcccacgccatccaaggcgcgacggtggagatggagtgccgtcacttcgagtcgcagcagattcacgacaaggcacaggcgacgacggacgccggcgggtggtacaagatggagatcgccggcgaccaccaggacgagatctgcgacgtgaggctgctcaagaccccaggcggactgcgccagacgagtcaccgcacgggccggtcactacgcacacgctaacaacgctcatccaccatgcttcgaggcctccaccgagtctcactcactaacagcttgatcagctcaatagtcttttttttatggtct

SEQ ID NO: 453589 - DNA, 545 bp, Sorghum bicolor
cgtccggcgtggtgtcggacacttgcgtggccatgggcgattgggtggctcacccgcaggcgcacacggcgctggacgacatcctcccctgcatggacgtggcgacggcgaacgagtcgctgtaccggagccaggaggtgacggcgcagctggtggcgctggtgaacaacgtcgtcgtcaacatctcgaatcggaacttcccgttaggtctccgcccgctctacttcaaccagtcgggccccctcatgcccgtgctctgcaacccgttcaaccgggacatgagcccgcgccggtgcgcgcccggcgaggtcgacttcgacagcgcggcgagggagtggaagcggttcgagtgccagaccacggggccgccggggtcggaggtgtgcgccacgccggggcgcgtcacgccggcggcgtaccgccagatgacggcggcgacgagcgtcagcaagggcctgttcgagttcagcccgttcctggtgcagctgcaggactgctccttcgtgcgggagacgttctcgttcatcaccaacaacaactgcccc

SEQ ID NO: 453590 - DNA, 429 bp, Sorghum bicolor
acccacgcgtccgggcggtgacgaggatgagggagtagagtatgaaccttcggtagcggtggctgatccgctgcagctggacgcgtatccggcggtgctgcctcagcacggcggcgacgtcggcgcactggccgaagtcccgcgcgaacccggtcatgcgaaggatctgcaggtagcagatggtgcggaacagcacgcacgccatgaagaacatggcggtgcggtacatccacgacgccatctccagcgcgcacgccgcggccgaccaccagggcgggaagggtgcgttggcgcagtaccagaacaccttgtacccggcgtcggcgaggaagcaggggagcacgaagcaagcgaagaggcggaacgagcccgcgagctggacgatgtacccggcgcggacgttctgcgagtcgtggcggaagcggtcga

SEQ ID NO: 453591 - DNA, 1200 bp, Sorghum bicolor
cgtccgcacacacagaatgatgatcatggctctctcccgtgccgccgcgtcgtcgagagggttcttcttcgcgctgatgcttgtcgcgtgctgcagcctcatgctgcaggcggcggcggcggcgggcggcggcgcggacggcgtcgtcgtcggtgctgatggtgacaataagctgatgatggaccggttcctccgctggcaggcgacgtacaaccggtcgtacccgacggcggaggagcggcggcggcggttccaggtgtaccggcgcaacatggagcacatcgaggcaaccaaccgggcgggcaacctaacgtacacgctcggcgagaaccagttcgccgacctcacggaggaggagttcctggacctctacaccatgaaggggaggatgccccccgtccgccgtgacgccggcaagaagcagcaggccaacttctcctccgtggtggacgcgcccaccagcgtcgactggaggtccaggggcgccgtcacgcccatcaagaaccagggcccatcctgctctagctgctgggcattcgtgacggcggcgacgatcgagagcatcacccagatcaggacagggaagctggtgtcgctgtcggagcaggagctgatcgactgcgacccgtacgacggcggctgcaacctgggctacttcgtgaacgggtacaagtgggtgatccagaacggcgggctgacgacggaggccaactacccgtaccaggcgcggcggtaccagtgcaaccgctcaaaggccgggcagcgcgccgccaggatcttcaactacaggcagctgccgcagggcgaggcgcagctgcagcaggcggtggcgcagcagcccgtggcggcggccatcgagatgggcggcagcctgcagttctatagcggcggcgtgtggtcggggcagtgcgggacgcggatgaaccacgccatcaccgtcgtcggctacggcgccgactcgtcgtcgggggtcaagtactggctcgtcaagaactcgtggggacagacctggggcgagcgcggctacctaaggatgcgcaaagacgtcaggcaagggggactctgcggcatcgcgctcgacctcgcatacccgattgtgtgatcgatcgagggttcctgaatcctgattcttactatatacacacatgtagcaacggggctgcattatataatgtattgatggacatgtaaaagccagca

SEQ ID NO: 453592 - DNA, 442 bp, Sorghum bicolor
  unsure (1)..(442): unsure at all n locations
cgtccgatcgtggagtcatgttctcagtatctcaatgggttggcggaccttcacactgacaagattgagttgacccaagtaaagtctgcctttcccttgccattcctttcatctgagttctccaagttcctctcaagtgccagaccctgggcacctgctgcacgggtccttactagagcttccgtcacagcaccctctgcagcaagcttcaagacacatggtctggtggacgtccttgtatgcagtggcagaccctgtacacctgccctacgggtgcttactagaggtttgttcgcagcaccctcttcagcaagcttcacgccacggtgtctggtggaggtcctgtgatttgcccaggctcgattcacgagcttggtcggccacagattgcatgggagaaggatatggatcgagtcatgtctgcctgcatcactntcatgca

SEQ ID NO: 453593 - DNA, 803 bp, Sorghum bicolor
cgtccggccacatctccggggcgcacctgaacccgtcgctcaccatcgcgttcgcggcgctgcgccacttcccctggctgcaggtgcccgcgtacgtgtccgtccaggtgctgggctccatctgcgccagcttcgcgctcaagggcgtcttccacccttttctcttcggcggcgtcaccgtccccgacgtcaccatctccaccgcccaggccttcttcaccgagttcatcatctccttcaacctcctcttcgtcgtcaccgccgtcgccaccgacacacgcgccgtgggtgaactcgccgggatcgcggtgggagcggccgtgacgctgaacatcctcgtcgccgggccgacgacgggcgggtccatgaacccggtgaggacgctggggccggcggtggcggcggggaactacaggcagctgtggatctacctgctggccccgacgctgggcgcgttggcgggggcaggcgtgtacacggcggtgaagctcagggacgagaatggcgagacgccgggcacgcagcgcagcttccgacgatgatcatgacgacgcgcacgggcgcgcgcgagacattattgtccgtggtgtccgtctcgcgtaccgtgtcaagtgtatcgtgtcggtgtcgagtcggtacgtactgtgtccgtgtacgtctgtctgtgtgttgcaataagccccgttttgcttctccagctagaacggccggcggcgtccagtgctatgtgtggtctgtgttgtgacttgtgagtcggattattctgggtcgtcattcgtcaaagagtcgtgtgttttgaacga

SEQ ID NO: 453594 - DNA, 508 bp, Sorghum bicolor
cgtccgaatcccaccaaaaagctaggaaaaagcttttcaacaatggccgccgccgccgccaagaagacggtcctcgtcgtggcggcgctgctgctcgtcgcgctcatcgcgctggaggccgccactccggcgtccgccgtgacggactgcatggccgggtgcgacgagctcagacgactcggcgtcttcaactgcgagaagaggtgcgaggcgatcgccgcccaggcacagaagggacccaaggacgctagcaagtcgtatttttgacgtccccgtacggtaacgctcctatatatgtatgtatatatacctcatgcatgatgatacaacggcgaggctacatcagtatatatggatatatatatagcgatcaaccatgcattagagagatcatgcattcttatacatatgtaaatgctggcctgttgtccatgtaatatggtttcccgtggttcgtttggcgtccgtaatgtaatccatacactcaagaaatggacgttggtggttt

SEQ ID NO: 453595 - DNA, 645 bp, Sorghum bicolor
tggtgatcaccacagagaatctaatgaggcatgggcagggctatacgttgacgaaacataccatgacttgctctgagaagcaaggcggtccctatccctgcgcctggccaaagacttcaacttcaacaacgtcgacgttgctaatgtggagccaagcgtgggatctgactggtgggcgaatgagaaagttgctgggatgacatctgagccaaaaaagaactggtccttccacctcgtggctcagcctggggtgagctaacctttgcactgaccataataatcttttacaggatgaatcaattagcttcttttacttctgcttgagtgctcgattcagcaggtatgactgtgggggggatgccaacttgtgctaaacatgcagttagtggtaattctaaatttagatagtataagtaatcggatgtccgtctaatgtcgtcatgggatactaaagggttatttctggggggtgtttggatgtaacaaaccgcaaactctttggtttagggtcggtcggaactgtctgtgtgtctcttgtatcctgtgtatgtactgacttgtcgtcctgataccggtgctgtgttgtgtatgtacataataaagtggttttaagttaaaagggtacaactctttcctttgataaaa

SEQ ID NO: 453596 - DNA, 883 bp, Sorghum bicolor
gtcaaagattcaccatcttacaaggagctgcataagaagtttggcagctcgaaagaactgatcgagtcggcgaggagcatcatttcaggggacatgttcagaacaccaactgaggttgtggcagacctaacgagtctcatcgaagcagccaaacaagtctccgcctgcagctacgagaccggcacgagctggggtcaggaggtcggctgggtctacgggtccatgaccgaggacgtcctgacggggcaacgcatccacgccgccggctggaggacggcgttgttgaaccccgacccgccggcgttcctcggcggcgcgcccaccggcggacccggcagcctcacccagtacaagaggtgggcgacgggcctgctggagatactcctcagccgccataacccgttccttctcgccgcgttcaagcgcctcgatctccggcagtgcgtcgcctacctagtcatcgacgtgtgggccattagggcaccctttgagctgtgctacgcgttgctcggaccttactgcgtcatcgcaaaccactccttcctgccaaaggcgtcagaaccgggtttcgtcatcctgctggccctgttcctaggttacaacgtgtacaacctgggcgagtacaaggactgccggctctcggtgcgcgcctggtggaacaaccaccggatgcagcggatcgtgtcgtcctccgcctggctgctcgcgttcctcaccgtcgtcctcaagacgctcggcctctcggagacggcgttcgaggtgacgcgcacggagcagcagagcacgtctgatggtggtgcggacgccgtcgccgacccggggcggttcacctttgactcgtcgtcggtgttcataccgccgacagcgctcacgatgctgagca

SEQ ID NO: 453597 - DNA, 652 bp, Sorghum bicolor
  unsure (1)..(652): unsure at all n locations
cgtccgattttaaaatctagctggcccaggtctaacgtgtggtcgctgtagcctaaggtaagtgctgcgtggtggcaaacgtcaattaaggattttacgtatgtggtttaggctcaagttatgtttgcattatgggatatctatgtacctacaaactctatgtagtatgtgctttatgtggcttgcttggtcggtctccgcgatggtcaggtacttctctttgctgttgcaaatttcactcttgctgttttcgaattccacatgagtccagataaataaagttgtaaggtatgcaggggactgctatttgttaaacaatgagtcttttgtgttgtgcctatgctgtaattcagtgcatttatttcttgttgctcacnnnnnnnnnnnnnnnnnnnnnnnnnnnnnnnnnnnnnnnnnnnnnnnnnnnnnnnnnnnnnnnnnnnnnnnnnnnnnnnnnnnnnnnnnnnnnnnnnnnnnnnnnnnnnnnnnnnnnnnnnnnnnnnnnnnnnnnnnnnnnnnnnnnnnnnnnnnnnnnnnnnnnnnnnnnnnnnnnnnnnnnnnnnnnnnnnnnnnnnnnnnnnnnnnnnnnnnnnnnnnnnnnnnnnnnnnnnnnnnnnnnnnnnnnnnnnnnnnnnnnnnnnnnnnnnnnnnn

SEQ ID NO: 453598 - DNA, 462 bp, Sorghum bicolor
cgtccgcccacgcgtccgcccacgcgtccggtagccgagaaaggggacatgcagcagtcaagcagctggaaggcgagagggtcggggcgcgacgaggccaccatgagcactctcaagttctgccgcgggtgcaccaacatgctggacccgccgcaggacaaggcgacgcgcaccctgctctacgcgggccaatcttgccagcatgaggagatcgccactgatacttgcgtgtacaaaagggtatccgtccgcctgctggtgaacccaaagatgccctgacggatgcagcatctgatcctagcccccctcgcaccagaagtgttagatgctataactgcaaccatcccgaagctgctttttttcaggccccaactttgggagagcaagccatgacactgtacttcatctgctgcaacccaagctgcggtcacaggtggagggactgagaagggtctgggtctg

SEQ ID NO: 453599 - DNA, 475 bp, Sorghum bicolor
cgtccgcgctgatttccgtcctgaaatccaaggagcttagcggccatgacatctttgctcctccggaagatccacggcctcgcaactcggagaacggctcaacctcgcagactccgggcaaaaacgcatatgtcctgacctctgaactgacctcgtcctaatataaactcagttacaacagctccagtgttgctcactgttggtggttgttctcacaacaggtaagcaatatcaaatttggcgaggctgacgaggacagcgtggtgaagaccgcgaagaagatccccaccaagaaattcaccgacctcgcgggcaatatctttaagggcgacgagacccctggggcggcggagaagcacctgagcacggcgaagctgaaggagatgacaggcagcgacatctttgcggacgggaaggccccctcccgggactacctgggcgggatccgcaagccgtccggtggagagagcaacat

SEQ ID NO: 453600 - DNA, 471 bp, Sorghum bicolor
cgtccggttctgatatgcttccacctaggataactgccgaaatgttggcgctgggaactgtgacacagtctgaggctatgaggaagcgctatcgcgtgtttgagtcatttctcattaacaactacattccaggtctgtgaaattgacctgagtgatatagtatctcctagctcattggctccattcttggatgaaatcaagaagcgtgagaaacaaagaagacgaaccgccaagatggaagaaagtgagagagcaaaggcagaagttgctgctgctgtgcaggcatcagctatgcggtttgagtatgcaaattcctctcaaagtcacaacgatgtcatgttctctctggatgacttcgaagctctgggaaacaatgtctgggccatccaccagtccacgagtctgtgaaaggaagcttttctctgacgtaacacgcctgggttttgcatctggtcaagacttcacctccct

SEQ ID NO: 453601 - DNA, 864 bp, Sorghum bicolor
  unsure (1)..(864): unsure at all n locations
cgtccggctgctgctgtcgtgccaggtcgccggccatccaaaccagccgccgctccttggctgggataggtcggcgcgcgcgagggattacgccgacgatccacccgccgccgcaggctcaccggtggccgccgcagcttgcaggctcgctcattccgtacgtcactattggttcccggcgaggctaagcgcgagcgcaaccagaaccagaaccgtaccagctggtttattggagatgtatccagctaagccctgcgcgccggccgggatggcggtggcgccagtggtcggcttccccgtcgccggagctctcaggcagcaatggtcgtcgggcctcttcgactgcttggacgactgccacatctgctgcctgacgtactggtgcccgtgcatcacgttcgggcggatcgcggagatggtggaccgcggcgcgacgtcgtgcgggacgagcggggcactgtacgcggtcatcgcctgcctcaccgcggcgcagtgcacctgggtctactcctgcacctaccgcgccatgatgcgcgcgcagttcggnctccccgaggcgccatgcgccgactgcctcgtccacctctgctgcgagccctgcgcgctctgccagcagtacagggagctcacggcgcgcggcctcgaccccgtccatggctgggacttcaacgccgccatgtacccgccgcccacgcaggggatgcgacgacgctgatcgctccgtccatcgatggatatgatgaggtccagttcattggtttgttgatgacagatcgagacagagtacaaggtatatatattcgatcagttgtttagcgtcgtcggagatagatgctacntgtgatcgtctgacaacagtgcagc

SEQ ID NO: 453602 - DNA, 451 bp, Sorghum bicolor
cgtccgcatgaagtccgtagagggttccattcgaaggagaggcatgctaaggcctgctactgtgggggtctctactggctctggcaaacaaagcgcaagctcataggaggggagcaaagatgccgttttgtgaatctgatcaaacgaccatcaggaactgagagacaaggaacctctccttttgagcaacttttctgttcataacatggcaaatgtgtttgatatcaaatgagataggtcacctatgtatggtgttgccaggaagcatcatattgaagttttgctgttatttgcaatctgctagaattttgtccaccaaaagagagtgacacattcaacatacatactccctccgtacccataaagaaagtcatctaggacaatgacgtggtttccaaagtttaactttgactcctggtttttataaaaatatttatcaaaaagtggtata

SEQ ID NO: 453603 - DNA, 544 bp, Sorghum bicolor
cgtccgcacgaggcagcagctggaggtccaaatcaacgcaggacatgccatcccagggcggcaagtacgtcgggttcggatccagcccagcgccgtcggcaaataggaacggcggtgctgcccagggcgatgtcatgcaggtcgtctctcagggatttggacgcctttcattagttgcagcatctgctgcccagtctgctgccagtgttgtccaagtcggcacaaaagaaatccaatcaaagatgagggatgggggctatgaccagaaggtgaatgaaactgtcagtgttgttgccaataaaactgcagagattggaagcaggacctgggggatcatgagaggagttatggcgttggcctcacaaaaggttgaggaatatgccaaggagggaggaatgagtggctggggagatgattggcaacgcagcgagcagaacagtgagccttaccaaaggtttgagcacgagaccaacggccacagttggaattcctcccaaaattcttcatcgaagaacaacaatttcagttcttgggacgattggga

SEQ ID NO: 453604 - DNA, 820 bp, Sorghum bicolor
cgtccgaattggctcatttcatattcaaaatactccaaggctctggaatccttctacgaaaagtttgatccggacttcattgatattaggacaaaagcacgtgaagtattacagagagaggatgatctaaatgaaattgtccagcttgttggcaaagatgcactggcagaaagtgacaagattactctggagactgcaaagctccttagggaagattacttggcgcagaatgcattcacaccatatgacaagttttgcccgttctacaaatctgtttggatgatgcgcaatattattcatttcaacacattagcgaaccaggctgtggaaagagctgctagtgctgatgggcaaaagataacctacagtgttataaagcatcgcctcggtgatcttttctatcgcctagtttcacaaaagttcgaggatccagctgaaggtgaagaagctctagtcggaaaattcaagaaactgtatgacgaccttacagccggattccgcaacctagaagacgaagcacggtgaatattgtacagtccgccgtgtcaacaataagaccaaattccccggaaggttccgggagcagtctgttttgttcagcctgaggttgtaaattcggtatcagattttcccccaccaacactgtttatttctgtaccttgttttcctctggtgcttgacgggcactgtttttatgtaccattattaatttattgtaagatactggtgcacatgtccatagttgaataagcgcgatgcccattagcttgaacattacaatttttatttattattattattactattattatttgggtgt

SEQ ID NO: 453605 - DNA, 334 bp, Sorghum bicolor
cgtccgcggacgcgtgggggtgaaccagcagcctcctccaaataagagccagccaaaagaaactaataaactctcgccgtcgtcgccgctccaccgagagagagaaacaagcccgccagccagccagccgaccgacctcaggtaagccgccgccgccgccgccgtaccagtaccgccaccaccaccgcaagagcgagatggagatgaagatgaggatcctcttcgccctgttcgtcgacgccgcgtctgtcaccgcggtgctgggctgcaccgaggccgccgccggtgccgccggcagtggcgccgacccgactgcctccgaagtgtccgccgc

SEQ ID NO: 453606 - DNA, 465 bp, Sorghum bicolor
aattctaaataaatagacatatataacatatagatcatagagatcaaatcaatctgtaacttcgtagagttcaagagtgctttgtcagatctgcccttgcaccacacacaggagttcaatcgaggagttcaagctaatcaagccattagctaccccatagtagatagcaaccaattcaacatgttcaagactagataggcatggatataaattattaatattttatatattgaccacgtggctctatcttgcgatggcgggagaaggtaggatagtgccaacgcaacttgggcacaggccatctgtttctgttttggttgtccataatctcaggagagacgtccccttttccatcaaaatagttcaataatttcataattgtatcccttggtaaatacggagtctctttcctaccgtagaagttcataccaatgaaattcccatcacaatcaatcaggggtcctc

SEQ ID NO: 453607 - DNA, 547 bp, Sorghum bicolor
  unsure (1)..(547): unsure at all n locations
cgtccgttatcgtcttcctgtgtcttgtttatcttctaaatgatcctgcagtgtctgaagcaagaaaaagaatgggattaggtaaccttgaaccaacatttgagacattggtcgagtcatttgtcttcttggacaagaacaaagatgggtatgtcagtaaaagtgagatgatacaagcaataaatgagaccattggaggagagcgctcttctgggcgcataggcgtgaaaagatttgaggaaatggattgggacaagaatggaacagtgaccttcaaggaattccttttcgcttttactcgctgggtggggatcgataatgaagacgatgacgaggacgatgaagaagcagcatgagtgtgtcaactgaagattattaggcgttctgaattggccaagtcagcccctcaggaggcctccagcagcttcctcctgccgcgatcagaagtagtagctcatgttctttgtgtgacaactgccaagccgatgatagatgtttatgttcgtataaatagaatgaacactagtcgtgtnaaagaaaatttgct

SEQ ID NO: 453608 - DNA, 660 bp, Sorghum bicolor
  unsure (1)..(660): unsure at all n locations
cgtccgcgcgtcacctcgagctcggggagccatcctcagggaagggcggccacggcaaatccaagcgcagcgcagcggccgacgaggtcgtccaggccaacaccatcgtgcagtccctgaacgccttctcgtcggtggcgcacatctcagggatgggcctcaaggtgatgccgatgatcgcgcccttctcaaccctccgggcagttaacctctccagcaacttcatcgttcatatctcccctggatcgctgcccaagggcctgcactctcttgatctgtctaggaacaagattgccaacgtcgagggcctccgggagctaaccaagctacgtgtgctcaacctcagctacaaccggatttcgcggattgggcatggtctgtccaactgcacggcgatccgggagctgtacctggcgggcaacaagatcagcgacgtggtgggcctgccaccggctgctcaagctgccggtgctggacctcagcttcaacaagatcacgactgccaaggcgctggggcagctggtggccaactaccactccctcctggcgctcaacctcgtgggcaacccggtgcaggccaacgtcggcgacgacgcgctgcgccgggcggtcacggggctcctnccgagccttgcctacctcaacaagcaagccgtgaag

SEQ ID NO: 453609 - DNA, 536 bp, Sorghum bicolor
tgctcgtcctccagagaagaggcaacgggttccatcggcgtataacaggttcatcaaggaagagatacgcaggatcaaggcgaacaaccccgacattagccacagggaagccttcagcacagcagccaagaattgggcacattatccaaatatccatttcggtttaaactccggacgagagggtggcaagaagctcgtggatgaggctgttgcagcagcaccggctccgaaaaagatccaaggtttctactgatagatgtccgagctcatcaatcatcaactgggtggaagaattaataccacaaattataatttactgtaagtaaagaattaagggggaaagggaaagttaagttataattaccttataccttattaatgggtgaaaacttgtgaagagatgtaccgtacatagtaacagtggtgagtgataagtgggaagtgaagcatacaatcacatgaattgctattaggcgccatgcacttgcattggttgaactgagaagacttaataaaccatttgacgacctaccata

SEQ ID NO: 453610 - DNA, 752 bp, Sorghum bicolor
tcaccggggcttcggtcgccggcttccctgtcatcagttcaccaacttccttgaccttccggcactgggcaggcgtcagcccccatacatggtcttacgactttgcggagacctgtgtttttggtaaacagtcgcccgggcctggtcactgcgacccccttttgcgagggggcaccccttctcccgaagttacggggctattttgccgagttccttagagagagttgtctcgcgcccctagattttctctacctacccacctgtgtcggtttcgggtacaggtacccttttgttgaaggtcgttcgagcttttcctgggagtatggcatgggttacatacttcagcgccgtagcgcctggtatgagcctcgtggagaagcaatggctagtccacggggctcatacttcagcgctgcagcgcttggtactcggacctcggctcgaggcattttctctaccccttcttaccctgaaaaagcagggtcaccttgtgtccttaaacctataaccatctttcggctaacctagcctcctccgtccctccgtaccaacaaggggtagtacaggaatattgacctgttgtccatcgactacgcctttcggcctgatcttaggccctgactcaccctccgtggacgaaccttgcggaggaaaccttgggttttcggggcattggattctcaccaatgttttcgttactcaagccgacattctcgcttccgcttcgtcgacccccgctttcgcgtttgctt

SEQ ID NO: 453611 - DNA, 669 bp, Sorghum bicolor
cgtccgcaacaacaaggcccaccccgttcgacgacatggcccgcctcggcgccggcgccctgttggcgctcctgctggcggtggcggcggtcgcgttcctcgcggtgccagggtcggcgaaggtcggggacctgagcgcgatggacttgacggtggggaggagcagcaagtgctccggccccatgagccagtgcgacgtggacgaggcggaggagctcgggctcagcggcggcggcttccccgccggcgacacgatccggcggacgctggcggcgcggcagcccaccaaccggtacatcagctacgccgcgctgcgcgccgaccaggtgccgtgcaaccagcgcggccggtcctactacagcaactgcgcgtcgcagaaggccgccaacccctaccgccgcggatgctccgccatcacccgttgcgcacgcaacaccaactgatccatatcatatatatcattcgggcctatatattgatgctagctagctaatcaaatatatttgcatgcatccaagaagatgcagccatggcagatgcagatcgatccacatattggcgtgcaggtgtgcatgcatccagggtggaggaagacagggaacatatattcaagagtggtagtgtttgcattggactgatatgcatggttgacctggggtaatttttttc

SEQ ID NO: 453612 - DNA, 586 bp, Sorghum bicolor
  unsure (1)..(586): unsure at all n locations
cgtccgatcgcacgtggtattgcgacggtgagcatgtctaactagcaacaacctcgatgcatgacctaaagacagggtacttaacactaacctcaccacacgccgtgttcatcagccaggcaatcggcacggcactagggtgcatcatcaacccaatcatgttttggatcttctacaaagtgcaaaatggcaacgctgacatttttgacgcgccctatgcccgagtgtaccgcggcatcgccatgctgagtgctggccagaacgggctacctatgcactgcttgtggctatgcaagatcttcttcacactagcgctagtgcttagcatgtttcgagagatggccacatgtaagcagtggcgcgtggcacaatacattccgagcaccatctgcatggccatcgccattgtaatgccagcacgcatactcattgacatgtttgtagggagcttgctactgtacttgtggaggtgcgccaaccctagcagggcaccagcgtactcaatggcggtggcatcangggatggctgtgtgggaatgggttggggtgctactaacatcggcaatggcacttacacaagtgcacg

SEQ ID NO: 453613 - DNA, 796 bp, Sorghum bicolor
  unsure (1)..(796): unsure at all n locations
cgtccggtgatcggaagctccctgattttccatcatttatccccttcttgcctcctctgagtgcagctaatctaaaggtctactatgccacatgtttcgccctcatagctagtataatggtcttcggtggtcttcttgcaccaatcctggaacttaaacttggtctagggggcacatcttatgaagactttatccgcagcgttcatctgccgatgcagttgagtgaggtagatcccattgtggcatctttctccggcggagcagttggagttatctctgccctaatggttgttgagataaacaatgtcaagcagcaggagcataagcggtgcaaatactgtttaggaaccggatacctggcatgtgcccgctgttcaagcacgggtgctcttgtgctcactgagcctgtgtcaacattcagtgacggcaatcagcctttatccgcaccaaagacagagagatgcccgagttgctccggctcgggaaaggtgatgtgcccaacatgcctctgcactgggatggccatggcaagcgagcatgacccccggatcgatccgtttatttgaggcgcactgtagtccaggaactgttgtagcgtgtggaagactggaagtggaagatgctttgtagataatagtatcgacaaatgactcacagataggccgaatcgtgaaatttgaatcgacattgtacttgtacggcacgaataggatgagctgaagagtgcanagaggtgttatgttgcaaagtaataattcgcgcgttactggatactactactagaacgtctnttttc

SEQ ID NO: 453614 - DNA, 592 bp, Sorghum bicolor
cgtccgatcttggagcagatcctcgcctgcacgtcgcaagagcacctgctccccgacgtggtcacgcaagaaccgccccgcccgtcgacggccggtgcgcggtccaaggccgtcctgatgaccggcctcagctcgtggtactacgagaacatccggtggaagtactggcagtcggcgacggccaccggcgaggtcgtgagcgtgtaccagccgagccacgaggagcaccagctctccggctacacgacgcacgacatgaaggcggtggcggagatgtacctcctgggcatgacggacaagatcgtcaccagcggctggtcgacgttcggctacgtcggccacggcctcggtgggctcacgccgtggatcatgttcaggcctgagaaccacaccacgccttacccgccgtgccggcgggccaagtcgatggagccgtgcatgcacgggccgccgttctacgactgcagggcgaagcacggtgccgacacgggaaagctggtgccacatgtccagcactgtgaagacatgagctgggggctgaaacttgttcaccccgagtgaaaacaacaataatgaaaagaatattttcctt

SEQ ID NO: 453615 - DNA, 843 bp, Sorghum bicolor
ggcggccgttccctctcgagcgtgaccatggcggcgcaggggtccctcgtcacgtggagggcggtcttcgcggcgctgggcttgctcatggtggccacgctggtgtacaccatagccaccgacggctcgccgttccgccccgagctgcttacgccgtggatggtggcaacactgattgatttttatgtgaatgtaattgcgatctcggcttgggttatctacaaggaagcaaactggattagttctgccgtgtgggtggttctgttggtttgctttggcagtgctgctacttgcgcttatattgttaagaaactttttgaagtaacatctgcagggtcatcccaagatccacttgatcttctgtttatcaggcaaggtaatctatcccaaagaaagtgctcttatattgtaattggaagggttattttcagcattttggggatattcatggttgcggttgtcacatatactgtcatcactgatggactaccttttaggaaggaattgttgacaccgtggatggcggcaaccttaattgatttctacataaatatctttgcaatatcggtctgggttactcacaaggagtcatcttggatatcaactaccatttggattgtcttgttgatatgctttggaagcatcacaacatgcggctacattgtcctccaacttttcaaagtatcatatcaagatccaatctaccacgtgctattgaactctcacagcaagtatggaatttcaacttcactgtgataattcatcttctatgatcctggttggcttgcagttgcgtaatcttcagcttgtcatctggtcattgattttccattcataattcac

SEQ ID NO: 453616 - DNA, 472 bp, Sorghum bicolor
ggcaaccttaattgatttctacataaatatctttgcaatatcggtctgggttactcacaaggagtcatcttggatatcaactaccatttggattgtcttgttgatatgctttggaagcatcacaacatgcggctacattgtcctccaacttttcaaagtatcatatcaagatccaatctaccacgtgctattgaactctcacagcaagtatggaatttcaacttcactgtgataattcatcttctatgatcctggaagatttgaaaattcattgaagttgtatgtgcagcttggctggtaataccaaaatgttcgttctgtctatatgtaaggtaccacaattaacgggacagcaggatagcaattagagaagttatcttgctttgaataaaataactcatgtgctgacttctctgcaaaatgaaactgtaacctgaagttctttattgtatttctgatttaaattgcttgg

SEQ ID NO: 453617 - DNA, 645 bp, Sorghum bicolor
cccggggacagccccaacaccgacggcatccacattggtgactcctccaaggtcaccgaggaccggcaccaccatgggcgtgggtgacgactgcatctccatcggccctggcagcaccgggatcaacgtcactggcgtcacttgcgggcctggccacggcatcagcgtcggcagcctgggcaggtacaaggatgagaaggatgtgacggacatcaacgtcaaggactgcacgctcaagaagaccagcaatggcgtccggatcaagtcctacgaggacgccgcgtgcgtgatcactgcctccaagctccactacgagaacatagccatggacgacgtggccaaccccatcatcatcgacatgaagtactgccccaacaagatctgcactgccaagggtgactccaaggtcaccgtcaaggacgtcacgttcaagaacatcaccggcacctcatccaccccggaggccgtcagcctgctctgctccgacaaaatcccctggcagcggcgtcaccatggataacatcaaggtcgagtacaagggcaccaacaacaagaccatgggccgtatgtcaaaacgccaagggaagcgccacaggctgcctcaaggaactggcctgcttctgagcgatccgttcacattcactc

SEQ ID NO: 453618 - DNA, 586 bp, Sorghum bicolor
cgtccggcaaagttaggacaggagtttagggaccagttacagaaggtccagcaaaaattccctcaaatcataagagaagtgcgcgggaggggtttgctgaacgcagtggatttaaacaatgacgcgctatctcctgcttctgcatatgacatctgcatcaagttgaaggagagaggcattttagcgaaacccacacatgacactataatccgacttgctcctcccctctcaatcagtcctgaggagcttgcagaagcatccaaggcgcttagtgacgtgctggagcatgacttgccacagttgcagaagcagataaaaaagccagaatctgaggcagagaagccagtctgtgacagatgcggccgggacttgtacggatgagtgaagcctccgaacagagatagctgcaattttcgtaggtacccatctcgccccaaaagaaataaacagagcaggggattctagctacttaggtcactgtagtgttatgcgacttgttgcatcgtatattaagggtatgagctatgctaccttgatgaatatcaaataaatgggtagcattcccttgcactgtgaatgtaccgtc

SEQ ID NO: 453619 - DNA, 484 bp, Sorghum bicolor
cgtccgctcctcctcgccggccgaaccgctgattgtttctcaaccagaggaaggaagagatcggaagcgtcagccatgtcgaactcggcgtctggaatggccgtttgtgacgaatgcaaactcaagttcctggaactcaaggcgaagaggagcttccgtttcatcgtgttcaagatcaacgagaacgtgcagcaggtggtggtggacaggcttggggaaccaggtgaaagctacgatgccttcaccgcctgcttgcccgccgacgagtgccgctacgcggtgtttgattttgacttcgtcactgatgagaactgccagaagagcaagatcttcttcatctcttgggccccagatacatcgagggtgagaagcaagatgctgtacgcaagctccaaggaccggttcaagagggagctcgacggcattcaggtggagctacaagcaactgacccgagtgaaatgagcatggacatcgtcaagtcgc

SEQ ID NO: 453620 - DNA, 440 bp, Sorghum bicolor
cgtccgcccacgcgtccgagccggccggccggcagccccgcccaagaatggcgcgcctcgccgccgtggccgtggccttggccgccatcgccgcggtggccggcgcccaggagacgtactacgcgtccgtggagaaccaccttcctgcgctgggcatgaagctggcgtgccatgcgatgggcgggttcctgacggagctcagcgtggtgccgcgcgggcgcgtgccccacggcagggccgggcggcgcgtcgccgagatgctggtggagcgcgggaagcacgggtgggtgcgctgcaactgggcgtacgcgggcaactacgtcgccgggatcacggtgctggactctcgcgggcccgaggcaaccgggtgccaggaccccgccggccagggcctgttgccggtcgtcttcgagaaccaccgccgggtcctcaagacgccc

SEQ ID NO: 453621 - DNA, 521 bp, Sorghum bicolor
gacagttgcggcttcagtgctaagtgagatgggtttgaacggagcatccttatccgaagacctgataaccgaaatgtgccggttcgggggtgcagaaatccatcctgtggctgcttttgtcggtggagtcgcttcgcaagaagtaattaagctggtcaccaagcagtttgtgcccttgcggggaacattcatatttaatggaatcgacctcaaatctcaagttttggtgctataacatggatattgagcgttgtattagtgactgaatttaagttggtcgagattttgtgccagggcaccatgccgcaacgaagtctgtttgctaaacgagtagccaaatatatattgttgcaatgatatttagatgtgtgccattgtcgccaagtagctttcgcgtcccttttgtgacacggaaaatgagcccgaaataagtggttcattgagaatgccacagtgtcgtaatttatcaatacttccgtcgtatgatttgtgcaagtgcctagcaaattcttagctaaaaa

SEQ ID NO: 453622 - DNA, 446 bp, Sorghum bicolor
cgtccgcggacgcgtgggcggacgcgtgggcagccgctctctcctcccgaacccccccgctagttcgccgccgccgttcgcccccacatggccgccgcgtcgtccgccacctccgtccacgacttcaccgtcaaggatgccagcggcaaagacgttgacctcagcacctacaaggggaaggttcttctcatcgttaacgtcgcatcccagtgtggcttaaccaactccaactacaccgagctggcccagctctatgagaagtacaaggaccaaggctttgaaattctggctttcccatgcaaccagtttggtgggcaggagcctggtaccaacgaggagattgtgcagtttgcctgcacacgcttcaaggctgagtaccccatcttcgacaaggttgatgtcaatggtaacaatgctgcgcccatctacaagtttctgaaatctag

SEQ ID NO: 453623 - DNA, 486 bp, Sorghum bicolor
cgtccgcttcattcctccgagaagatcgagagaggcggccgcgggggctgtcgggcaccgagaaccaacagggaagaaggcaagatcgagccgagcctaatccgtcgtcgtcggatcacgatcggatggcgcgtgctgcgtccagctatatatccaggaggggcctctctgcagcgataacggtggcggagtcgtcggcgaagaaggcggaggagaaggcggtgaagctgggcacggtggccaaggacatcgccagcgccatggcgaccacgacggaggagaagacggcgtgctgggagccggaccccgagaccggcttctaccgcccggtgaccggcaccaaggaggtggtacgccgccgacctgcgcgccgggaatgcttcagcagaggatgctgcagcaggactgacgcacgcactactggccctggcttccttggttgtcaagatcatcacacgaccaagctactgtacctagaatgtgcat

SEQ ID NO: 453624 - DNA, 597 bp, Sorghum bicolor
cgtccgatttgacggaagaagaagaggaagagtattggatggttgtatctgccatattcgagggcaaagaaacttgcagtctaccatctgaatcgagttatgctgataaatcatcatctgaacctccaagttctactccattaagtgatcccatcaacaataaggtgcatttgctcagaaccatgcttcagtgggaggagcaagttcgccgtggtgcatctttggcagagaaaagtcttggtgtaaacacctgcacaaaaccaatcctgcgagaggtggccataatattctggcctaatggcaagattatgagaatgagcactggtagcacagctgctgacgctgctagaagaatgggcgttgaagggaagctgctttgggttaatggccaagtagttctgccccaaacagagctcaaggatggggatatagttgaagtgagggtatagatgcaagtaccagtttccagtacacctttctcaggggttatggatcatattggttcctcagttcttgccagatcttggcaatgcaacagactggaggattgtagacataggaacccaaatctcaactgtacagtccatttgtcgaaat

SEQ ID NO: 453625 - DNA, 617 bp, Sorghum bicolor
cgtccggtctcacactgtctcacagctgacctgccactgccaggaaggtagggagaggccaggatgccccgcggcggcttctcggggtcactcaggtcgcccaagatcgacgtcgtcatcgacatggggaaccccttcctcaaccgcaccgtcgacggcttcctcaagatcggcgccgtcggcgcctgcaaggtggccgccgaggagaccttcgattgcctccacaggggggatgtttcaaagcacaaggttaagcatgccctgaagaagatgtgccaggagggtgcatattggggtactgttgctggagtttatgtgggcatggtgtttggcgtggaaagggtccgtggtcgcaatgactggaagaatgcgatgataggagggcgccttatctggggctctgatctctggtgccagcaacaaccacaaagacaagatcatcaaggatgccattaccgctggggcggtcgcaacagctgtcgagttcatcaactgccttacctagttgagcaagagcaactgcatttgcagtgccattgtcgtacaataagaataaagtacttcttcagtggatccatgtccagttcaataaaccacccatcttcagtcttcctttc

SEQ ID NO: 453626 - DNA, 418 bp, Sorghum bicolor
cgtccgattcaatttgccaggtcaatacttccaagatgtgaatagtgggggagacattggtgaggctcacatagccaagcttactggttttcggctcttctgccttctgaatgccactgctctcttcatttctctcgcgggggtcgttgtgcagatcaccttggttgcctgggaaactggtgcccagaagcaaattatcaagatcgtaaataagctcatgtggacggcatgccttagcacaggtgcggcttttatctcgctggcctatgttgtagttggcccgcagcatgcgtggatggccttcacagtatcagccataggaggaccgatcatgattggaacccttctgttcctagactatctgctggtgcgcccacgggtcaaggttggcgaagacagacagcgccgcattaagagg

SEQ ID NO: 453627 - DNA, 717 bp, Sorghum bicolor
cgtccgtgcaagggacctcattggtatgcttcagaggattgatggtgacaactatccagagaccctgtgccggatgttcatcattaatgcaggccagggattccggcttctatggggcacagtgaagagctttcttgatccaaagaccactgcaaagattcatgttctgggtaacaagtatcagagcaagcttcttgaggtgattgatgctagtgagttgccagaaatttttggtggaacttgccagtgtgaaggtggttgcatgaaggctgataaaggcccttggaaggatcccgaaatcatgaagatggttcaaagtggtgctgggaggtgtggatcacacagtatgtcctcttttgaggttgaggagaaaatgatttgcgaagatgacatgtatcctaagaaacatgctttattcgatgcggaaacacaattagctggagatggtcagcgttctcagtcacagaaaatttcccgtagccgaattgaacatcctcagttgtcacctcttcacgaggaacttatgcccacttcacatcctatccctggatcaccctattcttgtgatgtcccaatggttgaaaaggccatagacgctatctgcaagagccagggaacaccagcagatgagaagcttgccatcaccaaagctattataaatgcctctaatgaatccaagcccccaatctatgctggcatcatagcacttgtgatgag

SEQ ID NO: 453628 - DNA, 632 bp, Sorghum bicolor
cgtccgccacaagctaagctgacagatgagacttgtgaagacgacggcctcgatgaagatgactctgctgaggaaattgggtctactgatgaggagaatgacactgttttcaccagtggcttactacaggagtttgacaaggagatggacaccaggcccgaccaggcatttataaaggagctgctccaggatcttaaaaccataaacctaaatatgcttcgagccacgtacaacgaattcaaagacaaaacaaatcatctgagtactgcataggtacagcaacctagggatgttgtgttggttcgtgaacaggggaacagccaattggggcttgtaataaatcgtcttacttctgttttagtggtgaaacgctatgcaatagtatcgaagcataagaattcaacctgtgctattccgtcaccggaaatgaacgccagcttatatacctgttattttatacctccgtgctaaatagcttattgtaactgtgcactgatacccagcttaacagttcatttttctccttatttagaaagaagttgtatttgtagagattgatgatttcaacttatggtagcttaccgagaactcgtatggatcaatgctgttgatctcgagttttgcgttctgtc

SEQ ID NO: 453629 - DNA, 549 bp, Sorghum bicolor
cgtccggatgattgtgtatctgcaaattctagtggtgtcacatgctgccggaccattgctttaattttgatgttccttttgcttgtacgccatgtaattgtcattgtgagggatgttagcatgctacaagatgcaacggtgctgttcagtgcaactcttcagtttgcgggattctttctcccttgttatgtaatagctcgttcttgctatgctttgcagcatcggagacgaagacaggtgtagggagactcccctgacccttaaagaacccaaaggcgtaccaattgaagccccccctcggcgagaggatgcattggaagcttgcgaagtgagcttcccgttgttgcttggagtccccgcaaagcatttggtttctctcctgaaaacgtaggcggtttaattaggtgattgatgagtagcgagaacaggcgttgtgaagctcaagtgtacatacgttgagagaacaaggccttttgtttttacagctggaaggaagcaaaatgtaccctcccacgtttttactgcaaataaaagaacgttctcccctcc

SEQ ID NO: 453630 - DNA, 434 bp, Sorghum bicolor
cgggacgcacgcgtccggccggcgtgagatctgtccagattttgatgtgtgcaacgcttgtttccaaaaaggagcgggggctcatcctcacaaggtagcaaaccatccatcagctgctgaccgtgatgctcaaaacgcagaagctcggcaaatgcgtgttcagcagctaagaaagatgcttgatcttctgggacatgcgtcgacatgccgctctggtagttgccagtatcctaactgccgaaaaggcaagggactattccgtcatgggatgcagtgcaaaacgcgtgcttcaggagggtgtgtcctttgcaagaaaatgtgggacatgcttcaactccatgcccgagcttgcaaagattcagattgcaatgtgccgcggagcagagatctgaaggagcatcttacaaggttgcaacagcagtctgattccagga

SEQ ID NO: 453631 - DNA, 793 bp, Sorghum bicolor
cgtccgcgctggccaacagcaagttcttccacctcaacatcttcgcgagcaagaacgtgttgatcgacaaggtgacggtgaaggccccggggaacagccccaacacggacggaatccacatgggggactctgagaacgtgaccatcagcggcaccaccatcggcgtcggcgacgactgcatctccatcgggcccggcagcaagacgatccggatcgacggcgtcaagtgcggccccggccacggcatcagcgtcgggagcctggggaggtacaaggacgagaaggacgtggaggacgtgaaggtgaaaggttgcacgctggtgggcaccaccaacggcctgcgcatcaagtcgtacgaggactccaagtcgtcgcccaaggtcaccaagttcgtgtacgaggacgtgaccatggacaacgtctcgtacccgatcatcatcgaccagaagtactgcccgaacaacatctgcgtcaggtccggcgcgtccaaggtggccgtcaccgacgtcgtcttcaagaacatccacggcacctccaacacgcccgaggccatcacgctcaactgcgccgacaacctgccatgccagggcgtgcagctccacaacgtcgacatcaagtacaacaagtccaacaacaagaccatggcgtctgcaagaacgcctcggcaagtccttcggttgtcaaaggagcttgcgtgcatctgaagtctgaccaacatgcatgatatatatcactctcagtgaccatatccgctggttggttttggtttggttttgtttttcctatcacaaat

SEQ ID NO: 453632 - DNA, 548 bp, Sorghum bicolor
cgtccgtggctggaagatcattcacacttgtgcagaggattggagcttttgtgaggaacgctgcagagcttttggtagtgggaactactgcttctttggttggcactagtgtcaccagtgcagcgctcaaagcaaaggcggctgttaacaaggatgaagccgtggaaattccagttctccaaactagcattgcctatggtatatacatgtcaatttctagtaacctcaggtatcagcttctggctggtgtgctcgaacagaggatcctggagccgttgctgcataaccagaaactattactgagtgcaatgtgcttcatggttcgttcgggcaacacattccttggatctttgctctggattgactatgccagatggataggcgtccaaaagggtcacgatcacgaagaggcctaaaagttgtagcagcttgtctgcatggtcttctgtcagtggggcatgttcacaataccatcgatgatggcttgcctgcctctagaatgccgctcaactcttcattggattggaggccccccctatatataggac

SEQ ID NO: 453633 - DNA, 611 bp, Sorghum bicolor
  unsure (1)..(611): unsure at all n locations
cgcgtccgcccacgcgtccgattgatttcantagtnttgtgtttctgttttttcctttgctgtgttatttaggtttttgtgtcttataaagcatgtaaattatttttaaggtctaatttgaaagataagtattccgtgtttaaatgctttatttgctccatatgaaatcgcaggatttgtgcatacggggggcaatttcttctatgaggcaggcattggaaaaggcaacatccagggaatgatcccacaaggtgccttggtgagaatcgtgcagaaaggtcttcagtacattgaacttgaagcaaattctgagattggcaacgatgacgagcaccacttttttgaatctctggacctaatggccaatgatttagatgacctgatgaagaaaattacccgcagtgggaagcacagttctgtcaagaacgaaaaagagcagaagatcgattcagttgagactgacaaagcacagatgattggtttttctgagactaccacaacttataggaagcaacctgtgcagaaaacaaaggctgcacagaacagcaaacctgatgagactgctacaatgcgtagagctgagccagtgaagcatgtgaaggcacaaaaca

SEQ ID NO: 453634 - DNA, 605 bp, Sorghum bicolor
  unsure (1)..(605): unsure at all n locations
cgtccgggcgcggcaggcgcggcgctggtccaacaccaggcgcaaggactgccagctgaagcgcggcggggacaaggggcagagcgtgttcaggagccacgacgactggaacgccaccgccacggacgccatccaagagtggagcaaggaggaggccgtctacgacaagcaaagggaaaaatgcctcggcggcaggacctacatggagtgcggccacttcgcgctcatggtcacaaagaggaccgccaaggtcggctgcgcacgcgcagagtgctaccagggcggcgtcttcatcacatgcaactacgccgccgcagccgacactggtaccaaggacaagaaaaagagcagcagcaaataataaatcatctattacttaattgtgcctgatcgatcgagcctcactcacaccacgtacatacccacctatcgcattgcattgcattgtattctacgtacgtgtttgtatacggtctnttacaccacccacccacccacctaatataagtacgtaccaactcgatcaaccccctccatcacctacatatatactctttccacatccaccaaccacccgngtatgtactattttatatataatatac

SEQ ID NO: 453635 - DNA, 361 bp, Sorghum bicolor
cgtccgcccacgcgtccggtctgattagcaaggggaagcaagcaagagggaggcggccgaggaggctggaggcctagggcctaggggtagtcccgtacggtctcctgcggctaaggtccggcccgcgactgactgcccttgcgtcgccgtcggcgaatcgatgggctactggtgggatcgcgtcgtgctgccggtgcggcgggcctggctgggcgtcgcgtcccgcttcggggttcgccaaacaggtacgtacggcagcgcggggcggctcgacgtcggcggcggcggcgtctctcgtacgacgatctcttgggtctgctggtgtgactgacaccgtcgcttgttgcttgcaaggctgtgg

SEQ ID NO: 453636 - DNA, 478 bp, Sorghum bicolor
cgtccgcccacgcgtccgcaagtagataggcctgtctcttctcagaagaaggagcagcaggaggaccacggaagaaagcacagaaggatccactactctggaccatggatgccgccaggtgggaacatcgaagacatgctcaaggagcatgagaggcacatccaagaagcagtgcgcaaagcacgcctcagtaagggaagcagatagctaggagaacatagagcaactgaaggtcctaggagaagatgaaccagggttcgatggtgcggctggccgttttagcactacgaatgccaacatagcactcatcagcaaagctgccatatcgagatgctgcaagagctgtcacatgtaacatggtcaggctataccattgaagattagtaagatggaagcatcataatataacagagcatgagtgaattacatcataaagatcaggaagttcataggtaggataaccctttaatattgatga

SEQ ID NO: 453637 - DNA, 813 bp, Sorghum bicolor
  unsure (1)..(813): unsure at all n locations
cgtccggacgtaagaagtcgtctaattctttgatcgaattaggcgccttcttcgtcccacactcctctctttatttgtaatttagcacgctaacttctaatctacaggatctaaagcaacacttgattcaattatggacggattggtaggcctcttgaaagtccgggtggtccgagggatcaaccttgcctaccgcgacgcaagaggcagtgatccttatgttgtcttacgacttggcaagaagaagctgaagacaagcgtgaagaagagatctggccaaccccatctggcatgaggagctaactctgaccgtcacagatcccagccaaccactcaagcttgaggtgtttgacaaggacacattcagcagagatgacccgatgggagacgcggagatcgacgtcgcaccagtgtgatagaggcggtgaacatgaacccagaggagatcaggaacggcgccatcatcaggtccgtgaggccgagcaccaagaactgcctcgccgacgagagccacgtgtgctggaggaatggcaagttcgtgcaggacatgatcctccggctcaagaacgtcgagagcggggagatacagttgcagctgcaatgggtaaacatttctcctgttgcagccaggtgaatcatcatccgattgtatatagctgctgttcctgtcattgcctgacaggcacaacgacaggaatttatttccaaatcggtgggcacgggacggatgcctgcccctctgttcatccgcgaaatgaagcgtcccgtttcaatcgcnnnnnnnnnnnnnnnnnnnnnnnnnnnnnnnnnnnn

SEQ ID NO: 453638 - DNA, 571 bp, Sorghum bicolor
tcgcccatcgcgtccgaggacattgctgatcaaggatgtgacggtcacggcccccggggacagccccaacacggacggcatccacatgggcgactcgtgcggggtcaccatcgagtacaccgtcatcggcgtcggcgacgactgcatctccatcggccccgggacatccaaggtgaacatcaccggcgtcacatgcggccccggccatggcatcagcatcggcagcctggggcggtacaaggacgagtaggacgtcacggacatcaacgtgaaggactgtacgctgaagaagacgagcaacggcctccggatcaaggcgtacgaggacgccgcctccgtgctcaccgcctccaagatccactatgagaacatcaagatggaggactcgtcgaaccccattatcatcgacatgaagtactgccctaacaaaatctgcaccgccagcggcgcctccaaggtcaccgtcaaggacgtcttcttcaagaacgtcaccggcaccttcgccagccccgaggccgtcagcctgctctgctccgacaagatcccctgcactggcgtcaccatggataac

SEQ ID NO: 453639 - DNA, 733 bp, Sorghum bicolor
cgtccgcggacgcgtgggcacacactcacctggtgtagccgcaagaaagagattggatactgttactggtgctactactagctctcagaaggcaatgggggcatctgcaaccaggaaggagaaacataaggacccatcgatgcaaattaagggaacaaagtgcataaacaccaccctatccacagaagagcacttgcacaaggagctcactgatccagatgatttgaaatccatggagatgaccgtacctgatcagcatgagccatcttccaatcaaccagaacaagtattcaaagatgatgaggaatccaagaggcatttctctgaagggaaagtagatgcccgaactaatgggatccataatggagggcaagatatcaatggtggcgtcaagactatatatgaatgtgggattgttgagaaggaggaggctgatctctcaaaaaagaaggaggaggctgaccgaagtgcagataaggtagtgccgaggactgaagtggctcaagtgtggaggaaggatgatccaaggggcaacgacgtgattgaggaaaccaaaagcaaacttctggaggagaggaagagccgggtgaaggccttggtgggggccttcgaaactgtattgtcattcaaggaatagtgctcaaccttgtctttggatctattgtgtccatctctatattgagtacatcctgtcatgaatatatatgtgatcatgaggaagctgagtgtttat

SEQ ID NO: 453640 - DNA, 678 bp, Sorghum bicolor
tcccatcgcgtccgcggacgcgtgggttccataatagacgactagacattcccaaggatgtcgatcctcaagtggctagcataatatcttcatgctgggataacgatccgagcaaaaggccagcgttctcccagctcttgtctcctctaaagcaactacaacgtttagttgttacagaaagctgctgacatacgtttcctgagacaaatctcaggacacatatattcaggtatttaagctctgtcacagggctaaattttcattttgatgctcgtggaggtatattcagaatctctgcggtatagatgtgttgggcgaaggttctacacatcaccttgtgaaaaatgtgagtctctgaagctgtgcaaaggcgctgctggagaaagcttagtgtgtagtctcaagtgaagaaaagtggcgctgacacgaagtgctctgtgccatggtaaataattgttcagttctggatttgaacgggtgattctgaaaatcagaattcaccacaaagataggatcttgaagttttttcccttaccttacaaaagatgaaaagagaagtcaaaatttcatcgtgtctgcaaaaagttgcagcccgatgccatgtgcaaatgtatatcatgtatactgatgctatcttgcgtctttgtgaatgtgcattttaatacttttggttccctt

SEQ ID NO: 453641 - DNA, 589 bp, Sorghum bicolor
gttaatcttggcatttatgtggaggatggcaacaaagagttgtctgtactggtagacaggtcaattggaggttccagtataaaggatggacaaatagaactaatgctacacaggaggctactccatgatgatgggcgaggcgtcgccgaggcgctaaatgaaacagtctgtctcgataagcaatgtgaaggactaattatacaaggaaaatactacgttaaaatagatccacaaggagaaggagctcggtggcgtcggacatttggccaggaaatatactctcctctcctccttgctttcacagagcaggatggaggcaactgggcgaattcgcatgttgcaaaattctctgccatggattcatacttacagcttgcctgataatgttgcaatgcttacccttgaggagcttgaagatggaagtgttctccttcggtttgctcatctatacgaggctggggaggacaaggatctttcagctttagcgagtattgacctcaagagagtgttcccagataataagattggcaagatcatcgagacaagcctatcggcataccaagaacgcacggccatggagaagaagcgc

SEQ ID NO: 453642 - DNA, 526 bp, Sorghum bicolor
ccatcccaatattgacttggagggaaatgtctgcctgaacattctgcgtgaagattggaagcctgtcctgaacatcaacaccattgtgtatggcttaaatcttcttttcacgcaacctaatgacgaggaccccctgaaccatgatgcagcagctgttctccgcgacgacccgaaaaagtttgagaaaaatgttcgaatggcgatagctggaggctacgttgatgaaacccactttcctcgttgtatgtaaggcctgatgaagatggtgaccggtatctgaccatggctgtttctgatcatagcagactagctgtgtgtgttatatgaaacataagatgcccagagaaaaaacgctattgaagtacccctgtaatgtgagataagttgatgtgacagtcactgaactcatgctaccttctagccgttagcagggttcattagggatggtaatgatgcatgtgattcttttctctgctttggagaaaacactcaacacgttgcatgttaagtaacagaaagctttggc

SEQ ID NO: 453643 - DNA, 845 bp, Sorghum bicolor
cgtccgaaaatttgaacctgagctgccctcatggaagagctctgccattgcggacctcggcgtcggcgtcgagaacaagatcgctatgcactttgacagagtcttctggcccaacgttgaggtgctgggaatggttgggccgacgcctaaagcctgtgggtacttcctgaacctgcacaaagcgaccggcaatccggtcctcgtctacatggctgccggaaggtttgcccaggaagtggagaaattgtcggataaggaagccgtcagcttggtcgtttctcacctgaagaagatgcttccagatgcctctgaaccaacgcagtacctggtgtcacgctggggctccgacccgaactctctggggtcctactcctgcgacctggtcggaaagccggccgacgtgtgcgcgaggttctccgcccccgtggataacctgtacttcgccggcgaggcggccagcgccgagcactcggggtcggtgcacggcgcctactcgtcgggcattgccgcagccgaagaatgcaggaagcgcctactgacgctgaagggcatcccggacctggtccaggtcgcggcatgggaggagatggccggagctgtggctcccctgcagatttgcaggacctgactacctgagtgagctggatcagtgattcagtggctgccttggagtggtttgatgacgttgttgctgcttcctgacgatcgcgaaagtcctttatattgtgtaataatgttattatcttgaacgtgtgtattgtctggaataagtcaagatcgactgatactgaacttattacgttactccttcaaatacttaataataaattatgagtccttaattc

SEQ ID NO: 453644 - DNA, 681 bp, Sorghum bicolor
cgtccggtctgccgcaccaccgtcgtcgacgcggtcaccctcgccgtcgcctccgtgatccagccccccgccgccgtcgaggtccccaccgaggcgcgcgtcgcggtcgccggcgacgagctcttcctcgtcgtcaagtccaagtggatgtacctcttcggcgacgacgtcgacttctccaaggccttccacgtcaaccaccgcggcgtcaatcctgtctggcaggagctcacaggcatcggcgaccgtgcgctgttcgtggataaactccacgggtttgcagtgccgacgccggggttcggaaatcttgagggcaacacaatctattcagtgagcagcaaggatgtgaacaacaataggcgtcacactcccaccacggtgaactacagcgtgtcggcatttagccttgagagccgtatctccaagaaacttgtgtgcctgctcaacggccgggagatggcgaagcgtggtgagacggcatcgtggatcgtaccgagcttggatgaaggctgactctgcagagcttggacatcatcattattgtggaatcagtgttgatatatggctctaggtaatttattcggtatcccttgagttgctatagttcttttgagttcgaaccagcaataatccccttcaatatataagttcactcctgtaaattcttaattctgtcgatta

SEQ ID NO: 453645 - DNA, 1505 bp, Sorghum bicolor
cgtccggaaacacaagaagcacaaatctgatgacggtgatttggacagtacatctcccaagaaacacaagaaggagaaatccattgattcggatgcatcttcatatcttcagaaggaagaggagaaatccggcggcgattcggacgaagccacgtctcttaaaaagcacaagaaggagaagaagaacaagaagaagaaggagaaatccggtgaggacgccgacgaagacaacgctgcgcccgtcgacgtctccatggacggccaatatgtgtctccctctcccagggaggaccaatccgacgaggatgacgccatgccggtcgacgtctccaccaccaccggccaatacgtgtcttctccgaagtccaagggaggagagcgtcaggtctccacccctacggatgcatacacgtctcccgacgagcttcctccggcggccaagagctccgccacctccgatgcatacgcacctccaaagcaacaggtcgtcagcagcagcaccagcaccaccagcagccagcccatagccggtggttctccggacgagcttccaccggcggcgaagagctccgccacccccgacccgtacttatcttcaaagcatcaggtcgtcagcagccagcccatggccggtggcgctcccgacgaggttccgccgaacgtggccgccaacgggcagccgaacttgccggcggcggggaataagccgaagctgtcgacggccgcgttatcggggatgatcaagaagccgatcgccaagttcctgagcccggtgatcaagagcgtgtgcgccaagacggagtacccggtggactgcgaggcgtcgatcggcgggctccccggggcggcgtcggcggcggcgacggacagcgtgggcgtgctgaagctggccatggaggcggtgcggcagaaggtgatcgtggcgatgaacgcggcgacggaccggatgaacgcgccgggcgtggacgggacgaccaaggacgcgctggactcgtgcacgtcgtcgtacagcgacatcaagacgagcttggactcggtggacgacgcgctcaagcgcggcgacgtcgacacggcgcacaccaacctcgactcggtggagacggacctcaccacctgcgacgacggcttccaggagcacggcatccccgtcggtgatgaccgaccatgaccaggagctccagaagctcgccagcaacctcctctccatcggcgccgccatccatcgctagaaagggatcggagaagggagaagggaggaggtggccgtgtgcaggcgtacgtgcacacacgcggtgcgtgcatgcatgcttgcattgcgttttcatctcaagaatgaattttcggttgtaaaatctgtaaccgaggaagaaaaacacctcgattaaccatgcatagctgctatgattctgtgattcgacgagacgatgttaattaatctgcagctttcactatgtataacagtatatatgaatgtgtgaatgtttcggaaaaaaaactagtagtat

SEQ ID NO: 453646 - DNA, 405 bp, Sorghum bicolor
cgtccggcgaatgcaggtggacgccttcaaccagcgcacggaggcggcgagggcgcacgtcaaggaggcggccatgacggcgtccccgaaggcgcggacggtgctggacctgtgcaacagcctgtacctggacgtggaggacaacctgggagcctgccgccgcgccatcggcttcaaggacgccgtcaccatccgcgccaccatgggcatggcggcgcaggacatgcagaactgcgacgagcagttcaggcagatcggcgagcccaaccccatggagcagttcgacgcgtcgctcgtcgagatgtccgagaactgccgctcgctctccaacatgatctgatctagatcgagctcgctccgttgatctccacggacgacgactacgacgacacggtcggcgcccgt

SEQ ID NO: 453647 - DNA, 501 bp, Sorghum bicolor
cgtccggccccggggccggggggaaggccaacccgaccgtcccaccgcgtcgtctccctcctcgtctcctctcctctcctctcgcgtccgcagcttcccttgcaggctagggtttgcagatgacgacggcggcgcgccccacctgggcgccggccaagggcggcaacgagcaggggggcacccgcatcttcggcccctcccagaagtactcctcccgcgacctcgccgcgcacacctccctcaagcccagaaaagatggtcaacagacccaagaggagttacagaagaggaacctcagggaggaacttgaggaacgcgagcgcaagcactactcttccaaggataagtcctattctgaagaaagagaccggcggaaaagctcaagccagctactcttagaaggttcaaagagagaggcagaggataagatagttccacgagaaatcgatgcagatgactctgatgtggagcctaaaagtgatgatgagagtgatgaagatg

SEQ ID NO: 453648 - DNA, 396 bp, Sorghum bicolor
cgtccgccaaaagggaaagcacggaagtgattcgggcgtgtacgatgccaatggaaggttcgttcctgaaaaatttgaggagatcttcaagagagcatgcccacaccaggcctgatgccctgacgggcaaagagctgaaggagctgctcaaagcaaatagggagcctaatgacttcaaaggatggcttggtggtttcacggagtggaaggtgctctacttcctatgcaaagatgagaaaggttttcttcacaaggacactgtcagggctgtctatgatggcagcctgtttgaaaagttggaacacgaggggaagtctaagaaggagtctactaagaagaaatgataagagcatcgtcatgttactcgctagtgtcctgaagaatttggtaaatcgc

SEQ ID NO: 453649 - DNA, 659 bp, Sorghum bicolor
cgtccgccctactgccctctcaagagatcttactcctgccaactgcttgctctagctaggtcaccaacaatggcctcctcgtcctccttcctgctcgccatggcggcgctagcggcattgttggctgttgggtcgtgcagcaccctaatgacctggacgatcggcaaggactccaccttcacccgcctcgtcctcgtcgccagcgccgacgtctctgaggtggccgtcaaagacaagggcgccacggatttctcagacgacctcaaggagtcaccagccaagacatttacatacgagagcaaggaaccgatcaagggccccctctccgtccgctttgctgtcaagggtcaaggctaccgcaccaccgacgatgtcatccctgccgacttcaagcctggctcagtttacaagactaaggaacaggtttgaggaattaattgatgggcaaatctgctctttgagagagagagattgagcatataaataagcaagccaataattcatttactatggttatttatatcttgtggtagacactatcgaaaaaataaagtacactatgttctcctgccgcgtattgctggatagctatatttacgcgcgattattgtaaaccttttttgtcaagatgggtgtgtacgattgatttttgtttaaaa

SEQ ID NO: 453650 - DNA, 706 bp, Sorghum bicolor
  unsure (1)..(706): unsure at all n locations
cgtccgcgtcgcgctgctctgcctgtacaaccacctccacctctccctctccgacccggcatccgtcgtccccgtccccgtccccgccgccgccgtccgctcgcaccgccgcgccggtggccaccgtaccaacaccactccgtccgggtccggcaacatcgtcctccgcttcggcctcgccgcccagccgctccgcgtctactcccccgcccccacccccaccgctggcggcggcatccctgacatcgacacgttccgcgacaagctcgaccggctgctgcccgactggtcgcgcttcgacggcgagctcggccccatgcaccggtacttcgggcttggacgggccgctggacgtgcgtcagcggctcgcgtacctgttcgtgatccttgaccggtcgcctagggacggaggcgtcggcgtcgacgagctggaggcgtggctgcgccggcaggccgtcgcccggctggacgccgncacgcggagggagatggcccggcacgacagggaccgcaacggtgccgtcacgctgcgcgaattcttcgcagactggagcaacatggggcatggcaaaatggcgaggtggatggacaagtttgcgagcgcggacagaaacggagacggctcgctcaacgccgtcgaattcaacgacttcttgcatcctgaagacaccagccaaggagatgctcaatgtccgacgctagaaga

SEQ ID NO: 453651 - DNA, 442 bp, Sorghum bicolor
  unsure (1)..(442): unsure at all n locations
cgtccggaacttggtcctgagttcaagaaggttgggtgcttccttagtcgcttcaagtcaatccctagcattgttgagcttgacagcttgaaggtttctggtgatgtttggtttggttctggcattgtactgaaggggaaagtgaccatcacagcaaaatctggcgtcaagctagaaatcccagacggagcagtgcttgagaacaaggatatcaatggccctgaggacctttagatgggaatcatcaaggaagctcacttcaccaagtggcggatcattttttgcatttttttcccgtgttctcaaacaggctccatgacactatggagaatattcattgcccagttttgcttccccataatcaaggaaaattacatgtattttacttctttgagggnnnnnnnnnnnnnnnnnnnnnnnnnnnnnnnnnnnnnnnnnnnnn

SEQ ID NO: 453652 - DNA, 515 bp, Sorghum bicolor
  unsure (1)..(515): unsure at all n locations
cgtccgcttccccaaacttggcaaacaacgcaccatccccgaaaagcttctctcccgttaagccaggccggcgaggctgcgtgcgtgcatgcatgcggcgacgtcggccggcggctgcagcatggccctgatcgacctcgggcgaggaggcggcggcggcggctcaagcaccgcgccggccaagccccggctggtgatgatcgtcgccgatcccggccgcgagtcgacagcggcgatggagtgggcgctctcccacgccattgtcgagggcgatgacatcatgctcctccacgtcaacatgccctacccccacaacggggccgccggtccctcacgctcctcgtctggcgggagcaccggttccccgatcgccgcgctcctaggtggaggtggtggctcgggcgccggcggcgcggatccggtggatttcgtggaggcgatgcgcggcgcgtgcaggggcgcggtacccccgcgccgcgggtgcaacggngaaggcgcgtcgagcccgctaccga

SEQ ID NO: 453653 - DNA, 454 bp, Sorghum bicolor
aacagtagaaaatctaaaacttttcacacaagcagcataaaactacaagcactacagtcgtctacaaaccatcagttcccagcacatcgaactccaacgctatggcattattctcaactctccgggtagacacatatcacgccctcaccgacatactcactcccgagcgacggcgaccagttgcttgccgacgttgcggccggtgaagagcccgatgagcgccgccggagccttctctagcccatcagcaatgtcctcaacataggttatctttccctccttgaggtacccggccatctcctgctcgaacttgtggtactggccgtagtagtccatgactatgaagccctccatgcgcaggcgcttagcgacgatctggaacaggttgtgcacgccctctggctcctccaggttgtactgcgagatcatcccgcaggtcgggatccgcccatgg

SEQ ID NO: 453654 - DNA, 550 bp, Sorghum bicolor
cgtccgagtcagctcaccaccaccacctataaaatcacctcctccagtgagatcaccaccgcccccgatgaaatcccctccaccgccaactccggcaagatctccacctccaccagtgaagtctccaccaccaccacctccggtaagctctccaccaccaccagtgacctcaccacctccaccagacgcctgtgagctcaccacctcctccagtaaagtcccctcctccacctgcaccggtcagctctccaccaccacctgctctagtgagctcaccgcctccaccggcaccatcattaagtccaccaccggctcctatggaagtcatcttgccaccaatcatggcgcagaagtacgcgtcgccgccaccgcctcagttccaaggatactaagcggtgatcacagcacgctctactgacaatgagagtaatcgtgatgaggaggccaggagaagcagtgatcaagtgatcgcaccatgcatgctctagcgacgtgaattgaaagctcagatgagtgcatggtccgtgcgtgccgttgtgtataagagcat

SEQ ID NO: 453655 - DNA, 491 bp, Sorghum bicolor
ggcagacaaactatacattacgttgcacttttgatcccaacctctaactagagtacaggaccacattaccaggggtatactgtgttcaaaacatcacgacgctctgacaaggttggcacagggtacatcttgtttgacccactagttatcggattgcatgctcctgagcatgtttaggatggaaaggaataggttcaggatgtcaaggtatagcccaactgatgcccagatgtactcatcataggtgtggcgcctgatcaggttctcggtgtcatacagaatgaagcctgcgaagaccaacgctcctagcccaccgaacaaaccaacagacactggtcccaatgggaagaaaatctgaagaaagctagttaggacaaggatagtaagcgcagaagacagaataggccccagatacccgaattccttgcccttctttgaggcccagaaagcataggcagtcaaagaaaccaccacaccagctgtcacggacg

SEQ ID NO: 453656 - DNA, 503 bp, Sorghum bicolor
cgtccgcgaagcgcggcggcgcggaggcgatcgtgggcatcgacggcgccgtggcgcgtcttgtggccgagatgcggcgcggcacggagtggggccgggagaacgcgacggcggcgctggtgctcctgtgccggcggctgggcgcgcgcgcggtgacgcaggtgatggccgtgcccggcgtggagtgggccatctgggagctgatgggcaccggcacggaccgcgcacgccgcaaggccgcgtcgctcggcaggatatgccgccggtgggccgccgcctcggccgccgacggcgagcggggcagcgtgtgcccggccgccagcaccgtcgtgcctccggccatgatggcgtcgtaatcaaggctagccaagggcaatgccggataggatattaaagctcattttttcccctctcttctcctcctcatgatgtacaaagtttgcttaggctgtcacgattctttgatcagagagtgataatggtgagtggttgatcaactgtgc

SEQ ID NO: 453657 - DNA, 598 bp, Sorghum bicolor
cgtccgctccgtgctggtctccaccctccctccctccctcttgtataaacttggccaagaaaagcaaccggagggaggagaaaggcaagggaagtgggaaggtaggagagagagagggagccagggaaagctctcttctttcttcctcctcctctcgaattccgtctctggtctctgtcctcctcgcccggtttcccccgttttttgagaggggaaagaggaggcggaggcggaggagggagggatggggcgggacgagaggttcccggtgtgggaggccgcgctcggcgccggggtcgccgccgccttcgccgctgggctcgtcggggtctacctttccatgccggactccgactacagcttcctcaagttgccacgtaatctcgaggaactccaaatcctcactggccatcttgagaactatactagtgattacaccctacaggtgttagtaggttattgcgctgtgtacatcttcatgcagaccttcatgatcccagggacaatattcatgtctctgcttgctggtgctctatttgggcaactccggggcttggccctggtggtctttgctgccactgctggtgcttcttcgtgc

SEQ ID NO: 453658 - DNA, 838 bp, Sorghum bicolor
cgtccgcaaccatatccgaagatgaaattctgaacgacaatagtagtaaccataagaaatctagacatgaagttgatttggaagttgatgaagcaaatgatgcgggctctgctgtagctgaccttaatgggaaacatgaaactggagtagatggctctttagggggcgctgcagaatctgctatatgatggcagctgtatcattcagttggctgtttacagattgattgacgatggagaatgctgaactggtgtttattatctccctttctgatttaggagttttatttgcagggtatgaagatcttcggagaacttgagtgctgttcggagtgctcatctgatatattaaaatgtattcctcattaactcgagttttgctccttggagcaaacttctaaatgtaacgccggagcttgtaaggagatttcatacagtgaggtagaaaccaaccatatatttgtcgtttcaggctcatgattccatgaagagttgttggagcacatttctgggatgtcggttgaagatacaagggagtgcacacttactcaagtaaagtccatatacaaggctataaacaactcatcttctaggctgttgcatttgaattcaaatgctttggctagtaaaatggtccaaatatgcttgtctacatactgcaaacaccttctgatgcacttagtttgcctgaagttctgtttttgtatcttgtatcagcaatggttcaaaagtttgacttgaccatcttttgacagtcacatggaattgtgatgtaggttttatctatcatcttgtctgctgcttaattttgaccagtctatctaaagttgatacgagta

SEQ ID NO: 453659 - DNA, 525 bp, Sorghum bicolor
ttttgcttaaagcaatgcacagattgtacttttatttttaactaatatgtactctgtagtataaattttacataataagtccacaatagcaacatcaagtccaaagtcaaagctatgccaactgaagataggtgaggccatgtgatgatattataggttttataggtttatcacttcttctcttctttcttctcttctttcttctcctctttcttctcttctttcttttcctcctttttctcctctttcttttcttccttcttttcttcttttgcaggtccaacagacacaatgtcaatcttcccaatcttctttaacttcttggcaatcgccactgcgtccatctcgcctatgatggtcatcttgttctccttcagatctgctgcaatggagtcaataccgtaaatgtcggcaacagcttcgatggccttctgcttgatcttgtcatctgtcatggttggcaccctgagcaccaccttttgctgagccatctcacagctttgggacaccggaatgcagcggacg

SEQ ID NO: 453660 - DNA, 674 bp, Sorghum bicolor
  unsure (1)..(674): unsure at all n locations
cgtccgatgatggattgttcagtttcgcattgggatgcgtaaacctgcggaagcttgaactcaggagttgttgcttcagcgagcgagctctggccctcgccatactacgcatgccttccctgaggtacgtatgggttcagggctacaaagcgtctcaaaccggccgagacctcatgctcatggcgaggcccttctggaacatagagtttacacctcccagttccgagaacgcaggtcggttgatggaagatggggaaccttgtgtagatagtcatgctcagatactcgcataccactccctcgccggtaagaggttggactgcccacaatccgtggtccctttgtatcctgcctgagtgtaaatagactaagctggtgtttttctccctcatccctgcttccttagcctcctggtcaacaagaacgatgttgatgacttgatatgtggttattgtatggatctagatggctagctgctacgtactgtaataagctactagtagctgagatgtcctggaataagcccttgctattttcgcctgtactgctatctaatcctaggaagatgtatactactaagtaacggtggaagatgtgagtcttgcttgctcgccctgatttgtactattggaggtataagaatacctgggtttttgccgcctactttgagcana

SEQ ID NO: 453661 - DNA, 715 bp, Sorghum bicolor
  unsure (1)..(715): unsure at all n locations
tgttgtattgctgattgctaatggaattattatgatatcaagatcaattttatttttgatgtactaaaaattgcactatttattcagctttttatgatggaatttgtatggtgggtcagtgataatttttttattgcctaccttatagccaattgactaatattttcgatatacatattcaattgcttgatatagtacatgaatgctgcttgcaacatattggcgtagggctgcagcctattagtactgatattagcctcctcattttcatgcaacagtggtgcaggctcgcagttcctctctgactaaatctaatattcatgtgttttattgttttgtagaacaagtttggactttgcattcaccagttgcactcatccgtcagactctctaaaagcattttctatttaatgttcttgtgtactgacttgcggatgtgaagaccgtcaggatggaaaggggtgtgaaggccgtcaggactaactcgcctcaacttttgctgggttaactagctctaatcacagcttgtacagttgccggctatagatttttatgccttttcaattttttatcttaatgtgtcccgtgcttcaaattaaataagttaattatactatgcgagacatgactttattatgtctcattatgcatgagtatttttttgtattatatgtatggtcacattttnnnnnnnnnnnnnnnnnnnnnnnnnnnn

SEQ ID NO: 453662 - DNA, 601 bp, Sorghum bicolor
  unsure (1)..(601): unsure at all n locations
cgtccggagcgctaagaaatcggtccctggtgagcctaacatatcgtacatttgctcgcggtattatagggctcctgaactaatatttggagctacggagtataccactgcaatcgatatctggtctgttggctgtgtantgnctgaacttctgattggtcagcctttgattgctggtgaaagtggtgttgatcaactggtggaaataataaacattttgggttcgtgcatcaagagaggaaatcaggtgcatgaatccaaattattctgaattcaagttccctcagataaaagcccatccatggcacaagctttttggtaagcgcatgccacctgaagctgttgatcttgtgtcaaggctacttcagtactcaccaaatctgcgctgcactgcggttgatgcttgtgcccatccattctttgatgagctgcgggaccccaaggtctgcttgccaagtggacggccactgccaccgttgttcgacttcacagcagccgaactcgaagggctcccaattgagctggtccatcggattgttcctgaacacatgaggaagtgaattgggggacgccctggaaatcccagtttctctagtagttc

SEQ ID NO: 453663 - DNA, 805 bp, Sorghum bicolor
cgtccgccgcaactgcatcatctccggcacggtggacttcatcttcggcgacgcggcggcggtgttccagaactgcatcctcatgctgcgccgcccgatggacaaccagcagaacatcgtgacggcgcagggccgcgcggacgcgcgcgaggccacggggttcgtgctccagaagtgcgagttccaggcggaggcggcgctccgggacgccggcaagccggccatccgcaactacctgggccggccctggcgcgagtgctcgcgcaccgtcttcatggagtcggagatcccggacttcatcgacaaggccgggtacctgccctggaacggcgacttcgggctcaagacgctgtggtacggcgagttcggcaacaccgggcccggcgcaaacacggcggggcgcgtcaactggccggggttcaagaaggtgatcagcaaggcggacgcgagcaagttcacggtcgagaacttcctgcacgcccagccatggatcgaccccacaggcacgccggtgaagtacgacctgttcacatgaggccggacagccggccggcggccgggggatcgatcggagggcacttttttcacggtgggggatgggcggaggaggctgctggcgcgcggtagcaggccatgcacttcgtttgttgggtgtcggaggcaaggggaccgatcactgcatacgtgctacaagagtggaaaatgcactgtcgtccagtttaagttcgcgttggtatgtatactggctgctatgtgagttttgtacctgtacatgaagtttcttttttcttataacacgtatagc

SEQ ID NO: 453664 - DNA, 711 bp, Sorghum bicolor
  unsure (1)..(711): unsure at all n locations
cgtccgctcggcaccgcttgactcgtcctcttttaggagcgagagtgggggcaccgctgctgcaaatccctgggcttctcaagagatagtgatggatggaggcaacagcatcggagacacctccttcagggacacgaaaagcgaggcaggcggcgccgacgtcggcggcggcgattccccaccgacccccggctcgcgccgggcgagacgacaccgctcccggggctccgccacctcgtccatggacgtcagcaccggcgctgagggcggcgccgaggagaggaagaaggagaagggcaagaagggcacccgcaagaaccgcaagaaggacaagtcggccggcgacgacgccgcctcggccacctgccaggacctccccgccgttcccaagaagtccaaccgccggaaaaacaagggcagcagcgacggtggcgccgcggccaaggacagcgccacggccgcgccggagggtggggcggcggcgccccctcgaaggtgtccttcaagatcattctcacctncgaccccaagctccctttcaaagtgttcagcgtgcctgaggcggtgctcttcaccgcggtgctcaagtacgctctggaggagttcaaggttccgccccagacaagcgccatcatctccaacgatggagttggcattaacccccagcatagggcaggcatcttgtttttaaacatggttcggagttgcgcc

SEQ ID NO: 453665 - DNA, 872 bp, Sorghum bicolor
cgtccgagaaaatgtcataactaaatcagtggagaaggtcaaagagactacaacgactgtgttgcaggggacacaactcttagcaattgatacaggagctgctatgggtttgctaaaaagagctcttattggggatgaactaactcagaaggaaaagcaggctcttcaaagaacgttgacagatttggcatctgttgttcctataggaatactcatgcttttgccactcaccgccgttggtcatgctgctattttggctttcatccaaagatatgtgccatcgatgatcccgtccacatatgctcccgataggttggatctccttagacagcttgagaaagtgaaggaaatggaagttgctgaaggcagcagtgaagatatattggaggccgttggttcgagaactgagcaagtgaaataagctggccatgtacagatggacgattatactgcttagcttacgatctttcctgtaaagttgttttggaacacgacatgaggggtttattttgtttaaagattctttgaatgacacataccgctggaaacagaactgcaaggccatacgaataaccaatcatcgggtcgataaggcgaagaaagatccttccaaatgctccacgtctgtaggctgtatccatacttcacagtatacatgggcgcatggtgcccttcaacatagtagagggtggatgtccaagctcctcttgggcagtctgggtagggtagtggttttggtagaggattgtatatatagttaatatgttgtgttgatgatcatttttttctcatgcagcctccacctggagggggagtaaaaccttgtaaccttgttttttgggaaccaagggaatgcttcattccctgtatcc

SEQ ID NO: 453666 - DNA, 592 bp, Sorghum bicolor
  unsure (1)..(592): unsure at all n locations
cgtccggcacagagccagctagcagccgcgagaagcagccagctcgctcgccgcgcccgccgccttcttcctcgcctccgttccgccgcgccgtctctacggttgctaagccgccgccgcatccagggatggagatgaagaagatcgcctgcgccgtcctcttcgccgcctcggccaccgtggcgctcgccgcggaggctccggctccggcccccaccagcggctcctccgccgtcgcacccgccgtcggcgccgcactcggggccgccgtggcctccttcttcgcctactacattcagtgagccggccggccgcgcccagagggaggaggaggaggaggaggaagagtccaaggggaggagacatggctgcgctgatcccaacacgcgcgcgcattccgatgcgtgggcgtgttctgattcgacactcctttgtcttcgtttctttgttctcttccttaatttaacgaattcattgatgcaccaagtttaatttggtgccttgttatttgttcgtccctttagagagagggatcgacacttgtaccattgcttgccatntatttggatcaattcaacaattcgatttaacc

SEQ ID NO: 453667 - DNA, 673 bp, Sorghum bicolor
cgtccgatgtctcaaagggccaataccactgtgatgggtgtggcatatgcagaactggtggcgtcgataacttttttcactgcgatacatgtgggtgttgctacagcaatgtcttgaaggattcccaccactgtatcgaaagagcaatgcatcacaactgccctgtctgcttcgagtatctgttcgactccacaaaggacatcagtgtgctgcaatgcgggcacacaattcatctggagtgcatgaacgagatgagagcgcaccatcacttctcgtgcccggtgtgctcgaggtccgcctgcgacatgtccgccacatggcggaagctcgatgaggaggttgcggcgacgccaatgcctgacatctatctgaagaagatggtatggatcctgtgcaacgactgcagcgcgacctcgagcgtgcggttccacgtgccggggcagaagtgccccgggtgcagctcctacaacacccgggagacgagggccgcgtgccccaggacctgatcaggcgaacgaggcaaagtcgcaaacacgccagggagatgctgttcaacgactagtggagatcatccagcagcagcaggacgttgccgcgctaagggtgacgagcgcgagaccaagccggggcagtccagtcttggagttggtgctgtgcatttgcaatgtttcct

SEQ ID NO: 453668 - DNA, 896 bp, Sorghum bicolor
tcacccaaggaattccaaattgaaaaattgcaactggtggaagctgaaaagaagaagggcaggcaggagtatgatcggaaagagaagcaacttggcatcaagtagaaaattgactactcgatgcagctcaatgcttcaagaattaaagttcttcaagctcacgatgacttggtcacagatatgttggagtcagcaaggaaagatctactgtgcataagccgagatcaccaaacttacaagaaacttcttaagatacttattgttcagagtttgctgcgcctgaaagaaccagctgtgcttctccgctgcaggaaggaggatcttgaacttgttgattcagtttttgagtctgcaagcaatgagtatgcagataaagcaaatgtatatcctcctgagatagtggtagaccgtcacatctttctgccatctgctcccagtcattatcaggcacctggtccctcctgctccggtggagtcgtgctagcttcccgagatggaaagattgtctgtgaaaacacactggatgctaggttacaagtggttttcagaaagaagctgccagagggccggcggagtctttttgttcaggtagctgcgtaaccaattcttgaaagcggaacgtggctcagtactctttcgggtaccctgattatgtccagaagcggaacgcagctcaagagtgatttatcacactgttttggatctcgattattatgtgtgtatactttttttctggttatggatgctctgtcattagattccagacctctgaatcctgcactgaagcaaataagagcaaataatctgtcttcatatgtgggacgaccttttgtaaaataaagcatcaagatgtgttgcgatgccacttctgttaatagcatcatgtttttaattgc

SEQ ID NO: 453669 - DNA, 894 bp, Sorghum bicolor
cgtccgcggcgcacacgctcatcgcccagcgctgcaagaacgccgaggacaactcgccgctctgctcgggggccagggacacggcatacaaccagctcggcaacatcgacgtgtacaacatctattccagcacctgccatgacaagaataaagtcaagcccacaggatccaactgcatggacttggctgatccttgtgctcaatactacgtggaggcgtacctgaaccagccagaggtgttgaaggtcatccgtgccaacacagagctcaaatacaaatggactagatgcaggcaaacgttctacagcctgctcaaattcggcgactcgccgacgaaatcgatgctgccgtacatcaaggccgtcgtcgccggcggcgtccgcgtgtgggtcttcagtggcgacctggacgcgatggttcctgtgatcgcgacgaagcagtccatggagaagctcggcctcggcgtcgtagcggactggcgcccctggtccatcgaccccaaggacccggaggtcgccgggtacgtgatcgagtacaagggcgtggtgttcgcgacggtgcgcgggtccggccacatggtgccgatcgacagcccggcccgcggcctcgcgctcttctgcgggcttcatcaagggggagccgctccccaaggccgcgccgatggtcgacggatgaagaggcacgccaggccacctgcggctgtgccccgcgcgcggtggcattcaattcttctgttcatgttcaaggatcggagccgccacggacgttgagacttcattgttgcacgtgagtatcattcttctctttgttaatccatactggcttcgttgccacggttactaccacactagactgtctaactaaactctgtgaccccaactcgttgatgaatgt

SEQ ID NO: 453670 - DNA, 666 bp, Sorghum bicolor
  unsure (1)..(666): unsure at all n locations
cgtccgagttaatggtcaccgcaaacatgaggggaaacagcgcagaagaagtggcagagagagttcttagccagacatcaatatgtggattgcagggcccgactgtaagtcctgtctattgcagacgtgatggaaaagttgatttggaatactatgccattaatgtggttgttccacagaagttgctttacaaatctatccaacaactgagatcaattggtggcagcggagtcttggtaacaaagctgacctacatattcgatgaagagacaccaaggtggcgcaatctcctctcggagctggggttgtaacttgggtgcatggtcagcttctggtctcttttacaacttcctatatgtactgcaccgcattcgtttgcccatgttgaagcatgtagacccatacgcagaagtgagaccgtgcggtatcagtgtaccccttcgcttcgcttcaggaaattttggcgtgtaccaccgtgtgttgtgctcagctgtttatactccaggcatatatcttgaccatctgcgatgtattgatagagttggggaatcctgttgggcgtgtgtgtgtgtatttcttgtgcggttgtgcctgacctctcttgccgcggcactgaataatcggccatgtttgaataaagaaagccggtatggttctcattccnna

SEQ ID NO: 453671 - DNA, 605 bp, Sorghum bicolor
cgtccgggaaaaacagattattgcattgctcatggtggaggccgccgatgtgaacatcctggctgtcctaaagctgcccggggtaagtctgggcggtgcatcaagcatggtggtgggaagaggtgctcggttaaaggttgcattcggagtgccgaggggaaggctggactgtgcatttctcatggcggtggccgacggtgccagtatccagattgtggcaagggggcacagggcagcacattgtactgcaagggacatggtggtggcaagaggtgcatcttcgatggttgcagcaaaggcgcagagggtagcacacctctgtgcaaagcacacggtggtgggaagcgatgcatgtttgaaggaggtggtgtctgtgcaaagagtgtgcacggggctactgaatactgtgtggcacatggaggtgggaagcgctgttccgtgcccggctgcaccaaaagtgctcgtggccgcactgactgctgtgtgaagcatggtggtggtaagcggtgcaaggttgacaactgcggcaagagcgcccaggggagcacggaattctgcaaagcccatggtggaggaaaacggtgcacttggagcacagggtgtga

SEQ ID NO: 453672 - DNA, 545 bp, Sorghum bicolor
cgtccggaagaacctgagcaagaaccagaacctcagcctgtgcctgatccagaaccccacccacagcaaacaactggagatctactaaacctggatgcagaggtgaatccttcagttgcagaactcgaagaaagcaatgcattggcgcttgctattatagcaccaggtgactgcaaggcgtcagtatctcaaagtatgtttgatgtcaactcgtctgggtgggagctggcactggtcactgctccaagcacccatacaagtcaagcagttcagaccaacttggctggaggctttgacaagctgttacttgacagactctaccaagacggagcaaggaggcagcagatcgccagtgtgacctacacaggtagcctaggagcagccaaccctttcagcgtcaatggcaacgatccgttcgccatgtccagcagcttctcaccaccggctaatgtgcagttggcactgatgactcaaaaccaacagcagtactaccaagcgcagcagtatttccagccacagcagcatattttcagcagcataacaga

SEQ ID NO: 453673 - DNA, 618 bp, Sorghum bicolor
cgtccgggccaagaagaggccattcatgacaaagagagcctacttctactgggtgaccagagaagagggatcttttgaatggttccgaggggtcatgaatgaggtggctgagaaggacaaggatggagtcattgaactccacaaccactgctcgagtgtgtacgaggaaggggatgcacgttctgccctcattgtcatgctccaagagctccagcacgcaaaaaagggagtcgacatcttgtctggaactagtgtcaagacgcactttgcgcgtcccaattggcgaagcgtcttcaaacatgttgcagtgaaccatgagaaccaacgcgtcggagttttctactgcggtgagcccgtccttgtgccacagctacggcagttttcagcagacttcacccacaagacaaatacaaagtttgagttccacaaggagaacttctaagggcgtaactggagaagcgctggacgtggtcctctaatgatttcagaatgtgaatgacaagggttgtaatatatatacaagtagatgaataagacgatgggagttattttgttgtagatgtcaaagtagatgaagtgtctttgggaacatgacatttcattttaaagctggttttg

SEQ ID NO: 453674 - DNA, 536 bp, Sorghum bicolor
cgtccggcggagcaagcaacggggtcaaagccaaggaggccgatccatcctccagcatcccatcccatcccacgatatggtttgcgtcgcgtgcctgctgccgctcttcttgatcccgctggtcaacgccctcccttacctcgtcgacctcatcatcagcaaggtgtatcggctatttggatgggagtacaggagacctgaaagagccccaccagcttgtccttacaagcctgcagctcagaagaacgatgagggtgcgagtgaatcaaaacccctagtcaatccacatggtgctgcggcagaagataagaaagaggaataactcatgtattggatcctgctcgtgtcagcaggcgcttaattaaaatggagaccactgctctatatgcggacatatcgtaactaagaaataattgctgtgattgatgaatatgtatctggattgacgagtcgatgaatgtatatgtacctgtaatgccactccggatccttaccagttgcgcgactaatcactgctggcctgtctgaatcgatgg

SEQ ID NO: 453675 - DNA, 430 bp, Sorghum bicolor
  unsure (1)..(430): unsure at all n locations
ggaccgcaggccggcatccaacatggacccctacgttgtcaccggcatgatcgccgagaccaccatcctgtggaacggaaactgataaagccccggttgttccttttttgcacaacgctactacgcctgcaatgcacgcatccgctttgatgtcatgtcagtttggttttgcgatttcggttccccgtcgtggggtgtcctaaaattttttacttcggtctccggtgtactgcttggaaagtctgaataatggctgcaaatggattttgctttcgtcataggggtacctagctacctttagctgttctttcctgtttattggatatgtataatgtaatgtaatactattactacgtgattttatatgaaaagaatcattgtcgttttgttcgcgatcacaaaannnnnnnnnnnnnnnnnnnnnnnnnnn

SEQ ID NO: 453676 - DNA, 518 bp, Sorghum bicolor
cgtccgaattgcggtcgccacgcgtacgcgtccgtagtatccccctggccgtccacacaagtgatctgttggcagacccaagatgcacccttgttgtacaggtacctggatggagtggactatcaatgcacgagtaactatctttggtgatgtcattccgttgcccgttgaacagcgggaatgggctcatcaccagtatgtttcaaagcaccagcggggggcatcccaactgtggggtaactcttattactacagaatgcacacaataagtgacatatatttcattggaggttctggtgctgttgcttggatagatgtgatcgaatatgacgctctgcagcctgtcaagattgcaatggatggaggggaacacaatctataggaactcaactcaatgttctcaaagcctctgagacaacttttatcaactgatgaaggagaggtagatgatgtagtttttatttcaatggatagcaaaggtattgatatccgtgttcgacatggttcacagatcaaca

SEQ ID NO: 453677 - DNA, 1041 bp, Sorghum bicolor
cgtccgtctgtacctaaaaatatcttctttcttatccatggagacggctgcgctcacctcccactcgctgcagtgtccagctgctgctgctgctgctgccgcgcatggcaagcggcggaggggaggaggagcggcggccttgccgcgccggcggcagacgttcgccggcaggatccgggctctgccgtcggcggaggtcatcagcgagatcctgcacccgaagctggtgcccggctcgccctccgacaccggcgacgtctcctcgctcgtcccggtcagtgctctcatgctgctcttctacttcgtgtccaactgggtggtgcccgagctgctcatgaagcgcctcaacgagcccaagcccgaggaggacgaagctgctgctgctgctgcatccatggcgtcgtccggcgcagcggacggcggcgacgacgccgccgcctcgccccgtaaaatccggctcaaggtcaagaagaagaagaacgggaaagcaaccatcgtgaaggtctagttattaggtaatatgcaggagcacacgcatggagcgtgcgagggcgtcgacctctaaacacagatcgatcgagtacgtacggagtaagtgtattaccgccgacgtcatagtaagataagatactgtattaccaatctccatcagagcattgaagaagaattactctagtaataattactgtcagatgatatgcacgttagtgtgctgtgtgtgtgtgcgcctgtatttgtcttttgtgatcgaataaaattaagctccagtgcttatttacactacaccacgtctatggatgatggatgctatgttactgccacactcagcggcgtcccggcaaaatacgagaccctattcgaaatagtaaatggaggtctaatatctagtgccaaaataaaaaaataataatacatatcaatgtattacttatattacaaagtatagcagcatagaccaagaattataacagttgtataatcatcacttgaaaagtgatattcttttagcattctttgaaacaaatcttcaatgatatactc

SEQ ID NO: 453678 - DNA, 392 bp, Sorghum bicolor
cgtccggaagaattgcgatgcgatcgccgccgggcgcaatggacaacccagggacccttacaaggatgacaagcttgacatcccaaaataaatggctgtaactggtgatatctgcctatatatccatgcatggtcgacagatcatgcatctatatatgtactatgcatatatatatgcctgtccatgaaatttggtttcccctttctatatttttggcgtccgacaaagttcgacaagctataagtcacccatgttcctccatggatccatcggatctgtagtaatgtaatcggtccattcaagggatcagtgcttgttattctatttgtattccacattataagaaatacaaaggcatgcaattgagccaaaaaaaaaaaaaaaagggcgg

SEQ ID NO: 453679 - DNA, 632 bp, Sorghum bicolor
cgtccggtccagaggcccggaacacagactaggagcttctgctatgttgccgatatggttgatggtcttattaagctgatgaatggaagcgaacactgggccgattaacttggggaacccaggtgaattcaccatgctggaacttgctgagaatgtgaaggagttgatcaacccagatgtaacagtgacgatgaccgagaacactcctgatgatccccgccagaggaagcctgacatcacaaaggcaaaggaagttctggggtgggagcccaagatcgtcctgaaggacggcttggtgctcatggaggatgatttccgggagcgcctggccgtgcccaagaaaaccaaggcctaaactgccctgcggttggcaaagaatatccacgggggagcatactcatagttgggttcgtcattattcgtggtcacatttcattacggaatttgagttccaataaacggaatatacctttgtcgttccccttgaaggattgtattattagaattttcatacagggctggcagtttgagtctctgcctacgcagatcttgtgggacttgtgtttgtagccttatatgtactccctgagtcgattatagcaatgttgatgccattttgagctttttggtcc

SEQ ID NO: 453680 - DNA, 700 bp, Sorghum bicolor
cgtccgcccgagtctaaggcaacaactgaaagtgtgtatagtgctgccttggctctcggaattgctaaccaactcacgaacatactccgggatgttggagaggatgctacaagagggaggatatatttaccacaagatgagctcgcacaggcagggctctctgatgaggacatcttcaagggggtcgtcacaaaccgatggagaaacttcatgaagaggcagatcaagagggcgaggatgttttttgaggaggcagagagaggggtaactgagctctcacaggctagcagatggccagtatgggcttccctgttgctgtacaggcaaatcctggatgagattgaagcgaacgactactacaacttcacaaagagggcctatgttggtaaagaggaaaaaattgctggcacttcctgtggcatatgggaaatcgctactgctaccgtgttcattgagaaatacccaaacctagccgccagagaagctgcaaagaaaggggttcaggttaggctagatagaaattaaatagggcaatgtcatcacatcagacctgatgaaaatagacaacctggtgaattggtggggtatcatacgaattggtgggatcaggtacagcacagattaaagccaacctaaatggatgtggaacattatattcgcatgtataatcttttattaattaagagccaaaagggaaaat

SEQ ID NO: 453681 - DNA, 759 bp, Sorghum bicolor
cgtccgctccgtctctccgccgcttgcttggaagacgaagaaaccctccccccaccaacccaatccagccaaatccgggcccggagcagttcgccgccttcgttcgattcgttcgcatcccccaacgcggttcgatcccaccggaaggagcgtgatggccaagacgagctcgttcaagctggagcaccccctcgagaagaggcagtctgaggctaaccggatcagggagaagtaccctgacagaattccagtgattgttgagaaggctgagaggagtgacattcctgacatcgacaagaaaaagtacctcgtccctgctgatcttacagttggacaattcgtgtatgtcgttaggaagagaatcaagctcagtgctgagaaggctatcttcatctttgtgaagaacacccttccaccaacagctgctctgatgtcttcaatctatgaagagaataaggacgaggatgggttcctctacatgacttacagtggtgagaacaccttcggtctgctctagatggatggcgcaacaccacagctcaccgcaatcgggtcgccttgcccttgcttccctaccaatgccctgcccatgcggccatgcctcctgtaaataaggcctgccaagcaactgtgtatattctggtttcctcgttgcaagtgactgcactctactgctaaaacctacctatcagattgtcatcgatgtaatggacatcccttaaaccaaattgattggacctgaatcttgggtcgatgtgt

SEQ ID NO: 453682 - DNA, 514 bp, Sorghum bicolor
tacattggaagtatggttgctgatgtgcaccgtaccttgctatatggaggtgtatttttgtaccctgctgaccagaagagcccaaatggaaagctccgcgtcctgtatgaagttttccccatgtcattcctaatggagcaggctggaggtcagtccttcacaggcaaagaacgggctcttgatctagtcccaaccaagatccacgacagatccccgatattcctcggcagctacgacgatgtggaggaaatcaaagccttgtatgccgagcaggcaaagtcaagctcggcttgatcagcgaacccaaatgaggtgtaaatcgacctgattcagacatttcttcccttggtgtcgtcgtaagtttgtaacattcagtgtaatatatagtatgggggcccggaacagcttcacaagcaactaaggtcctccgaaaaaagttacatactcatagtttgattcgagttatccataaattatatacatacatgcatgcacatatgcatctctagcacct

SEQ ID NO: 453683 - DNA, 524 bp, Sorghum bicolor
cgtccgatttttatcaccgcttctcctgctggttccgtccgccttctttcccggcctcccgtccccggcggccagccggccgtcctgttcgtcgtcagcggagggctaagctccctctcgggctcggccatggcgacgccggacaaggggcaggggcgtccgctgcccatgtgtggggagtgggacgtgaagaatcccgccacgtccgagggcttcaccgtcatattccagaaagcccgcgacggcaagaagactaccggcggccccgggaacgttcgcgcaggcataccgccggccttcaggaacggcgatggcgccgacgacggcgggtacaggcctgacttcaaatacggcgacagcagccagcacacgccgcccaaacgcatcaagaagaagtgggccttctgtggctgctgattcttcatagctcgctgctgctgccgctgactccaaaggagaatgatcgtgccgcacctgaagcaatccatgatgggagcgcctggacagactgtaaaacatttcag

SEQ ID NO: 453684 - DNA, 544 bp, Sorghum bicolor
cgtccgcccacgcgtccggcgacattcgttgaatatcacagttgagcgcaaagaagacatccgcgatgggatccctcgccaacaaaatcgtggccatggcggctgtccttgcggcgctcgtcaccggcggctcgtgcgcgcccaagaagttcccgcctggccccaacatcacaaccaactacaacggccagtggctctctgccagggccacctggtacggcccagcccaacggcgccggcccctgacgacaacggcggtgcgtgcggaatcaagaacgtgaacctgccaccctacaatggcttcacggcctgcggtaacgtccccatcttcaaggatggcaagggctgcggctcatgctacgaggtgagatgcaaggaaatgccggagtgttcgggcaacccgatcacggtgttcatcaccgacatgaactacgagcccatcgctccctaccacttcgacttcagcggcaaggccttcggctccctggcaaagcccgggctcaacgacaagctccgccactgcggcatcatgaacgtggagttc

SEQ ID NO: 453685 - DNA, 466 bp, Sorghum bicolor
ggcacgagggtcgggagggaaagggatggccacagcgcatctgctccgccgcgcctcctccgccttcctcttcagcaccaccaacccgttgcgctcgtgcttccctctcgtccgcctccagcacccccgcgccgccatggccaccgactcctcggtagccccgttccagaagatccagatccagcgcgaggacaccacttttgatgcctatgttgttggcaaagaaaatgctcctggaattgtggttttgcaagaatggtggggagttgactatgagataaagaaccatgcgatccacatttcccaacttggtggaggatacagagcactcattccagatttataccgtggaaaagttgctctggatgttgctgaggcacagcatctgatggagggtctcgactggcagggtgcagtcaaggatattcaggcttcagttaaatggctgaagtcaaatggatcaccc

SEQ ID NO: 453686 - DNA, 454 bp, Sorghum bicolor
  unsure (1)..(454): unsure at all n locations
cgtgcgcngacccntgggccgacgcgtgggcggacgcgtgggccggccaccacaatttcttcnccttgctctgcgccnncaatcccacatccaatcanccccccctccanccttccatccatccatccggtcgctgctctgtgaactccgcctgcgatccaggagaccaagaggaggaggaggaggagcgatggccaggagctcgttcaagctggagcaccccctcgaaaggaggcgagctgaggccaaccgcatcagggagaagtaccctgatagaatccctgtcattgttgagaaggccgagaggagtgacatcccagacattgactagaaaaagtaccttggtcccttctgacctcacagttggacagtttgtgtatgttgtgccggaagcgcatcaagctcagcgctgagaaggcaatcttcatctttcttgaagaacacccttccacca

SEQ ID NO: 453687 - DNA, 447 bp, Sorghum bicolor
cgtccgcacggcagcaacagatgatgtctttcctggctaaggcaatgcaaagtcctggtttcctagcacagtttgtacagcaaaacgagaatagtagaagaagaatagtagctgcgaacaagaaaaggcggctacccaagcaagatggtggcctagactctgaaagtgctgctgcttcgttagacggtcaaattatcaagtatcaacctttgatcaacgaagcagccaaagcaatgctaaggaagatcctaaagctagattcttcgcataggtttgaatctatgggcaattcagataataataattttctgctggagaattatatgccagctgctcaagcttttgagagctcttcgtcaacaagaaattctggggtcacccttgcagaggttccagctaactcgggcttgccctatgtcagcgcaagctctggactgtcagctatct

SEQ ID NO: 453688 - DNA, 615 bp, Sorghum bicolor
cgtccggcctcgtcgcccgccgccggcgccgctatggggaggggaaagttcaagggaaagcccaccggccgacgcaacttttccacgcccgaggagatcgctgctggtacttcaggccgcccacgcacctttaagaagaaggaggaagaggaagaggaggaacatgaagaaagacgcgtggccgaggaggaagaatctgaagacgagtctgacgacaaacctaaacataaaggtactgagggtattattcagattgaaaatccaaacttagtgaaagccaagaatataaaggccaaggaagttgatcttgggaagacaactgaactctcaaggcgtgaaagagaggagcttgagaaacaaaaagctcacgaacgttatatgaagcttcaagagcaaggaaaaacagaacaagcacggaaagatttggaacgtcttgctttaataagacagcaaagggctgatgctgcaaagaaacgcgaagaggagaaagctgccaaggagcagaggaagtccgaagcacggaagtaacagcaataatcatggaccacgagtccacgaaggcgttgcatatttatttctaaatgcatcagttatcttctttttataaacccagtc

SEQ ID NO: 453689 - DNA, 507 bp, Sorghum bicolor
  unsure (1)..(507): unsure at all n locations
nnnnnnnnnnnnnnnnnnnnnnnnnnnngagaagagaagcaaaacttgcagatgctatttcatcgtttcgtatgaattagagatttacaaggacaataatctccatcactgcacggcaagatctaaaatgccaacgcatcgttgaaccctgcatcataggcggcgtcggcctcatagtcaccgatcgcctctccaagcatcatccctccgacagcaccgcctaggagccctaggccaagccccatccccatgcctccgccatggctcgcgggtgcagccaccggctgcgcggcgtagccgtacatcgccggttgtggggtagccgcattgtacccgtacggtggcggagcagcgtacgcgtaaggctgcggcgggtaggccgggtacggcgagccatattgcggcggagggtacgcagccgacatggccggcggtgggtacgtagacggcatggccgacggtgggtacgcggtgggcggcaccatcgcccggacgcgtgggcggacg

SEQ ID NO: 453690 - DNA, 353 bp, Sorghum bicolor
cgtccgggccgccgtgctctccgttgcgtcgctcgtgccgctgctaaagggggacagcgccgaggccaggagcggcgccgtcatgagcgccgacgccgagctctggaacggacgcttcgccatgctcggactcgtcgcgctcgccttcactgagtacctcaccggcgccccgttcatcaacgcctagatctagatgcatgccagtgcatgtatatgcagtagtaacttcgtaggaatattttgtactatgctagtagaactgctttccgtgtacgagcatacgtacagatggacgagctagtttttatgtacgttttggatcaaaatatatagctacgaaactatttgttggg

SEQ ID NO: 453691 - DNA, 555 bp, Sorghum bicolor
cgtccgcaagtccagccccttcatctccgcgctcgaggtcatcgacctcgccgactccatgtacaacaccaccgactttggcaggttcgtcatgagcaccgtggcgcgcaaccgattcggccgccagcgccacctcgccagatgacccgtacaaccggtactgggcgccgttcgcggacgccaaccccatggtggagagccactccgacatctcgcccgacgacttctggaaccagccgccggccaaggcgctcaaggccggggtcaccaccagcaggggcaagaagctcaccgtgcagtggccgacgacggagctcccggcggcgacctactacgtggcgctctacttccaggactcgcgctcggcgagccccttcagctggcgcgtcttcgacgtggccgtcaacggcaaggaattcttccgggggctcaacgcctccgcggccggcgtcatggtctactccagcatgatgcagctgtccgggaagacggagatcctgctcacgcccaacgagacgtcgcccgtcggcccgctcatcaacgccggagagatct

SEQ ID NO: 453692 - DNA, 420 bp, Sorghum bicolor
cgtgcggcgagaggagagaaaaagaaaggagcaacggcggcggctgcggggaggtctatggcgtccacggcagggtacctggcgcggcgggcggcgcagaaggagcgggtgcctctgctctaccgcagggcgctcaaggacacgctcaactgggccgttcaccgccacctcttctaccaggacgcgtcggatctccgggacaagttcgaggccaaccgacacgtggataacctggacgtgatcgataggctcatcgacgatgcggaggctcggtacaggaacttccagcaccccgatccctacattgttccatgggcaccaggcggcactaaattcactagaaacccccctccacctcaagggatcgagatcatctacaattatggcaaggagggaccagtaacaagagtcctgcgagcg

SEQ ID NO: 453693 - DNA, 590 bp, Sorghum bicolor
cacctttgctcccaataatgctataccagcatcttacatgcaaggtggagagtcaaagagaatgaggaacaactatggtgtagccatgtttcagggaaatggcgcccccagtctcgcacaagtcatgcctggttttgatcctgagatgaactatcagccattgccttatgttgagagcagctcatcagatgcatcaatggacagccttctaccacaggatggggcaagcaatggggatatctggagccttgatgagctgctcatggcagctggtgcttattgagaagctatggttattatcagtgtggcgtgttaacagcaaaaaaaatggctcctacctgtggtgatgctggaggggcaagccagttgaatccgctacattttgtcgcggtagttatatatggtagattacatatatatgcttttgccagttgaactctatgaccatgtttatagtatgttgctgcgtggtgcgtctatgattggaagcgagtttgagactgattcaataatttaccttgcctatgcctgctggactgtagtgtgcgtactgcatgttatgtgtatatatatatatggtgtgcttatgt

SEQ ID NO: 453694 - DNA, 1181 bp, Sorghum bicolor
ccgggccccccccatccccgcagccgcaggagcaggtgccgagcagatagcgtggcgccaaaccagtgccgtccaactgaaccagtggacaggaggcaccccctgcaacgggctgcactcgactactcgaggggaggaccccgtctggccgtctccagttaaaccagtcgcctcatcctctatcccgatctcttcttttgtcgcctccgtgcgtgccccgggggccttcgcgcgcaacgatcagctcagtccggctgatgcgcatgctgccaacacccctccgccaatcgtgaaacacgacccgtcgtcgggtggtttgcttgtttggtcgtcgtcgccgatcctcgcggacgctcatggtcatggcgcctcagcctttgcgcgctctgaggccgagcgcccccgccgcaggccacgcggcgtgcaggtgctcggcggccgcgccgctcttcgggaagcgggcgcccctcgtcgtagcgttcccccgcgccggtagcggcggcggcgccgtcgtcgtctcgtgctcggccgtgcaggagtcgtccacctccaccaccgttagcaagaagaaggatgctgcggacggtgccaaggaggccacagcagcggcggcgaagccggccgcggctgccaagccaaagaaggccgcagcactgccgctgccggagatgatgcagcaggagatcatcccaccgctgaaggccgccttggaggcggaggatgacgtgtcccaggtcgagcttgcgttccaaaacaacacgctggaggggtccttcataaagaatgacgtcccttattatttttgggctttctttccaaaaggagatctcacaggaccgaagggctttgcgctatcgtcttacagcaacgaagtgagcaccatcgagccattcctgatcgacgagaagaggataacggccaagtacgtggtgttctgggtttacaagaggctggctgggcaaggcatccttccggtctggaaggaagaggagggggaggagaggacgcgaagtagtaggttgcgcaggcacatacgcatacacacagggtgctgctgtgaacatacacacatgtaacgctgtaaagttaatctgctatctagtaaagttcatctgctgtgaacatacacatgtaacaaagatacttcagtttcagcagttaaaaaactttcttccgctgtg

SEQ ID NO: 453695 - DNA, 354 bp, Sorghum bicolor
  unsure (1)..(354): unsure at all n locations
cgtcccgatccnggtcgaccacgcgtccgtcggaagcagtacaaggtgacggcccaggggtacgtggagccgcacaaggtggtgaagcgggtgcaggccacggggaagaaggccgagatctggccctacgtgccctacagcctcgtcgcgccccctacgccggccggcgactcgggagcgcacttcgagatactgtcgccgtctgatctcattcattccagtgctctctcggcctcgcttgtatgatagatgaggggtgccaaccatttggggagtccaattttgtacattttattttacagagggcttccattaatatatacaatgcagattgctcacagcacattccccttt

SEQ ID NO: 453696 - DNA, 687 bp, Sorghum bicolor
  unsure (1)..(687): unsure at all n locations
cgtccgcgaagctttctcatggcgtttgatgatcatggaccatatggacggngaagatacaactggaatatgacccccgaggttgaacttgaccaatggcgcaaaggttcacagtggttcgaagtacacagagaacttgccattgaaattgtgaaggacacagtctactatccaaaattcaaggagttctgcaggccccattgttatgttgatgagcactatttccctacaatgctgacgattgaagctccgaacagcctggctaacagaagtgttacttgggtggattggtcaagaggtggtgcacatccagccacgtttggcaggggtgatatcacagaggaattcctgaggagggtccaaaagggacggacatgtctatacaataaccagaactcaacgatgtgcttcttgtttgcacggaagtttgctccaagtgcattggagcccttgttagagctagcgcctactgtgctcggttttggttgacgactagtgtgtttgaagagtctgtaattttgatattattagatcattataggattacacgcttggaggcatggctcagattgatggatggaatcgtggaaacgtacacagtgccccctccgcttgtgcattatacacaaacctgtattgttttgtatagtaaactgaccctggatcaggaaggaattttctctagga

SEQ ID NO: 453697 - DNA, 792 bp, Sorghum bicolor
cgtccgccagtttccaccgcacccccctcttcgctccggtccggcgagtgagtcgtcgtgccgccggtatccatggcggcggtggtgcgcggcgtcttgaggggcatcaaggagaagggactcaccaacttcatccgcgatgcccgcgacgaaggatacttcaaatgccttctggatgggaaccttttgcaaacgaaaattcacaatattggcgcaacacttgtaggagttgacaagtttggaaacaaatactatgagaaactacatgacactcagtatggaaggcataggtgggtagaatatgcagagaaaggtcgttacaatgcatcccaagtgcctcctgaatggcatggatggctgcaccacgtcacagatagcactggggataagctgctgaaccagaagactgctaggtaccttgtagagcacaagcagaactactccggtgagggtgaagagctgatctaccactccaaggggcatgctttgaatccggggcaaagggactggacgaggtatcagccctgggacccaaagaaagagcaagcctagcttctgagtacattgtggggaagctgctgaaatgtttgtgttttcttacatttcgttgggtcaagtatccccgagctggatagcctctgggttattgcttggactgggcccaaataatgttctgaataccaataatgtacaattggatcatcttttgacattgaagtgttgttgttactgctgtaaaagcagctttgaggaatatctcatgcagttgttactgccttctggtggctctta

SEQ ID NO: 453698 - DNA, 812 bp, Sorghum bicolor
caagggctgcggctcctgctacaagattcggtgcaccaaggacagatcctgctccgggcgggcggagacggtgatcatcacggacatgaactactacccggtgtccaagtaccacttcgacctcagcggcacggcgttcggcaggctggccaagcccggcctcaacgacaagctccgccactccggcatcatcgacatcgagttcaccagggtgccgtgcgagttccctgggctgaagatcggtttccacgtggaggagtactcgaaccccgtctacttcgcggtgctcgtcgagttcgaggacggcgacggcgacgtggtgcaggtggacctcatggaggccaactccgggtcgtggacgccgatgcgcgagtcctggggatccatctggaggctggactccggccaccgcctcaccgcgccgttctccctgcgcatcaccaacgagtccggcaagacgctggtggcgaaccaagtcatcccggccaactgggtgcccaacacctactaccgttccatcgtccagtattagcaatatataccctgctgcgcacaataataattctgtgtcactgtggttgattagtagtttggtactagtattgtagtgctgcatggactgatgagctactgatgaggtcgcctcagtcagttactagtaagggtgttggtggtgcgtggcttctttaattcagggatttgaaggctggggaaatggaggaagcaaagttaatttgcaaatgctttcccgcccattgtcaatgcatgtaccagtgcgattaagattataattattaatcgtattttgtgcc

SEQ ID NO: 453699 - DNA, 911 bp, Sorghum bicolor
ggcacgagggcctaccgatagctctaatagctgccctctcaagtactagctacacgatggccacctgctcctccacagtagttgcacttggtgcacttctcttctcgctccttgcaacgtgtggctcatgcgctagaccagtgagctttaacgcctccgacttcaccgccgatcccgactgggaggctgccagggcaacctggtacggtgcgcccaccggcgccggccctgatgacgacggtggcgcctgtggattcaagaacgtgaacctgccgccgttctcggcaatgacatcgtgcggcaacgagcccttgttcaaggacggcaagggctgcggctcctgctaccagatacgatgccaaaacaacgatgcctgctccggcaaccctgagacggtgatcatcactgacatgaactactaccccgtgtccaagtatcacttcgacctcagcggcacggcgttcggcaggctggccaagcccggcctcaacgacaagctccgccactccggcatcatcgacatcgagttcaccagggtgccgtgcgagttccctgggctgaagatcggtttccacgtggaggagtactcgaaccccgtctacttcgcggtgctggtggagtacgaggacggcgacggcgacgtggtgcaggtggacctcatggagtccaagacggcgcacgggcccccgacggggcggtggacgccgatgcgcgagtcctggggatccatctggcggatggacaccaaccaccgcatgcagccgcccttctccatccgcatccgcaacgagtccggcaagacgctcgtcgccagaaacgtcattccggtcaactggaggcccaacactttctaccggtccttcgttcagtaccagtagtagcacgtacgtacctgattgattgattgattg

SEQ ID NO: 453700 - DNA, 951 bp, Sorghum bicolor
ggcacgaggccaaggacagtcttgatgtattacgccaattttctttcttcaccagaaggttacttccacacagtcatctgcaatgtccccgagttccggaacaccacagtcaaccatgatctacatttcatttcttgggacaacccaccaaagcaacaccctcattatctcacacttgctgactatgatggtatggttaacagtaacgcaccctttgcaaggaagtttggaagagaagatcctgtgctggacaagattgaccaggaactattgggccgccaacctgatggatttgtgcctggtggatggacagatgtactgaatacaactgagaaagggaaacccttcactgttgagcgtgtgcaagatctccgccccgggcctggtgtggacagattaaagaaacttgtcacaggcttgctcacacaagaaggttttgatgacaagcattgcttgtgaaactcccagtaagacaattctggggcagtagtttacacggtcaaatttgagggcattgagccatttgctaggaatgcctactagctgaagcagcagcacatagcatcatgtacgcgtggatgcaatgataagataggtgctcttatagacaaccgcttgagttgagttaccgtacagcaggagaccccggatgtagcaggcggagattatacagaactagtagctccctaggttatgttagatgattatatcagcccccaaccatcaataatgttggaatttttgacatctctgcgctgcgggttgtgcaaggtagtccattctttgttcggaagccaatggcacctggtgtaccaactggtagcgtgtgagacttcgttgtattgactagtggatatttttgggcaaactgatacatttgattgcacacaggtattcatttatttctctttctctttgatgagaaaagcaaaatgatcgtgctgttttctt

SEQ ID NO: 453701 - DNA, 424 bp, Sorghum bicolor
cgtccgaccaggcatatgggggggataaaaatataattaaatttgatggtgatcataattccccaagacctcaatcatattatgattcagtttctatattcttctataaaactgtgcgtcctcctatgctgcctacaacacgatcaaagcttcatgtgggcccatttaaagttggtagcataaccaatgagagtttcttctttgaaatcatcaatggtctacggtcagcaaacactgcagcctgcagttcatcaagagatgcacctaacatcccacatgatagcacatctggagtggaattgttggctagcatgaatcaactgtccattaagaatgagaatgacttggactttcttttaaatgaaaactgcagcctgtcagagattgatggggatagcgttggatcacgtttgcaggataaaac

SEQ ID NO: 453702 - DNA, 488 bp, Sorghum bicolor
cgtccgcttcgccgtcaagctcgagagcaagaaatggccgtcggagctgaccagccggctgtttttccggttcgtcgtgctggctctgggaggggtgactggattccaggccctgatgctgcaaggcatgaagatgacgtccccggccattgcttccgccatgcccaacctggcgcccggcttcatcttcgtcatctccggttgtctcgggttcgagagggttgacctgaaatgccggtacacgagagccaagatcctgggcaccgtggtctgcctggggggcgccgtggccatgagtttcctgcagagcccggacgcccggtcggggcacgtgctgccgcgatcgccggaccacgccgcgagctgggtggtgggctgcgtgtgcctcctcggcgcggtgctcgtgctctcgggcacgatcgtcatgcatgcggcgaccatgctgctcttcaggcgcccttcacgctctgctccgtgacgtcgctgat

SEQ ID NO: 453703 - DNA, 627 bp, Sorghum bicolor
cgtccgctggataagatcacgaagtcctcggccatccttgcgtccaacactagctccatctgtataggccgcctggcttgagctgccagacgcccctctcaggtgatgggcaacctctggcgtcaaagaaactgaattcgctcttcaaggttgtgaagtgagtttcgtgctgcaggtcataggcatgcacttctttaaccctcctccgataatgaaactgatcgagattatccgaggagctgatacatcagatgaggtgtttgctgcagtcaaatctttttccgaaagacttgggaagtccgttatatgctcgcaagattacccaggattcattgtgaaccgcatcctcatgccgatgatcaatgaggctttttgggcactgtacaccggagtggcaaccaaagaggacattgacacagggatgaagttgggcacgaatcacccgatgggccctctgcagcttgccgatttcattgggttggatgtgtgcctttcagtacttcgggtacttcatagtggcctgggagataataagtacagcccttgccctcttcttgttcagtatgttgatgctggccggcttggaaagaagcgtggagtaggtgtatattcatatggacagaagtc

SEQ ID NO: 453704 - DNA, 430 bp, Sorghum bicolor
  unsure (1)..(430): unsure at all n locations
ggcaacctgctgctggaagaggtactgctgctggaactggaagaggtactgctgctgctcaagaggagcttctgcgggagtgtgtcatctggactgagaggagcaaggcgtggctaaagctggaggtggttgggcctttggcatgctggacttttgctgtgtttgtgacttgtgacttgtgagttgggaggggaaacattgtgagttggcaggtgaaactgggtgagttgagagtcatgtggttggacattgaacaatatgaacctgttttggatgaaaattttgggctgggtgtttgtgctgtactcttttccttttatggggttttatctcacaagggtgagttttacccataaaggtttttaatgaggcagcattgcacacaaacatacagctcaaattacatttaaaaaaaaaaacaaanaaaatt

SEQ ID NO: 453705 - DNA, 745 bp, Sorghum bicolor
cgtccggctggtggttcatctcctagctctcgctgctagcttattgctggcagtaacaacaatgaaggcaacaactgggtcatcatcagtagctcgcgttcttgttttgcttgcgacgacggcatgcctcctgtggaaagaagccgcgtgcttctcggcgtccggcatgaacaaggcgttcgccactttctacggcggtagcgacgcttcaggaacgatgggtggagcttgtgggtatgggaacctgtactcgacggggtacggcacgaacacggcggcgctgagcacggcgctgttcaacgacggcgcctcgtgcgggcagtgctaccggatctcgtgcgactaccaggcggacccgcggttctgcatccgcggcacgtcggtgaccatcacggccaccaacctttgccctcccaactacgcgctgcccaacgacgacggcggctggtgcaacccgccccggcagcacttcgacatggccgagcccgcttggctcaagatcggcatctaccgcggcggcattgttcccgtcaactaccaaagggtgccatgtgtgaagcaaggaggggtgaggttcaccatcaacgggcgcgactacttcgagctggtgctcatctccaacgtcggcggctgcggctccatccagtcggcgtcgatcaaaggatcgaggaccgggtggatggccatgtcgaggaactggggagtcaactggcagtctaacgcgtacctcgacgggcagagcctg

SEQ ID NO: 453706 - DNA, 488 bp, Sorghum bicolor
cgtccgccaaccccaactacctggccgtgctggtcaagaacgtggcggacgacggcaacatcgtgctcatggaactcgaggacaaggcgtcgccggggttcaagccaatgaagcaatcctggggcgccgtgtggaggtttgacacacccaagccggtcaagggccccttctccatccgcctcaccagcgagttcggcaagaagctcgtcgccccaaacgtcatcccggcgacctggaagccctacaccctctacaacttcaacatccagttctaatagactttgcatgcccttcatccggcctcttatgtttatttgcatgagagaatgcaccgcttataaatagtagtactgagtcttctgcattctagctagtatgtgatccctgttggtgttcgcgctcatgatcgaattccaaacagtggaaaataaaaggttgaatatatgtatcgtcattgatggatacttgaaatgtgctattcttctaat

SEQ ID NO: 453707 - DNA, 757 bp, Sorghum bicolor
cgtccgaaataccttcctgtttacactgtgccactagatgaaaggttccttgtgaagcgaattggtcccaagaacttccacatgtttagatgtgtggcgcggtatggctacaaggacatccacaagaaggatgacgacttcgagcagatgctctttaacagcctgatgctctatatcaggctggagagtatgatggaagagtacacggattctgatgactacagcacccgtgagctgaaccaggcaggcaacgccaaccaaagaatcaatggcatcagcaccagttcaaacatggatctcagctatacatcccatgactccattatacaggtgcggcccccaaatcatatagggaacagccaggttgcgtcatcaggtcagatgtaccagactgtgggcgacgagattgcgtttctgaacgcgtgcagggacgctggggtggtgcacatcctacggaacacgattgtcacggcctcgtagggattcagggttcatcaagaagtttgctatcaactacatgtatgctttccttaggaagatctgcagggagaacagtgccatcttcaatgttccccatgagagccttctgaatgttgggcaggtgttctatgtgtaagcactgaaaccaaatacatgtcgatgagagttcagcttcagaaccactcgagataatctagctgtgttttgtacttttgttcgtaggccacataggagtacaatagttgaaagaatggtacagaagacagcatcatgacca

SEQ ID NO: 453708 - DNA, 507 bp, Sorghum bicolor
acgcgtgcgcaaggtcaaatatgtacctgagcttgaactctggtttggcctctccgccaatgcccaacaattgattgctgctggcctcgccaccacggactcccagccacagccagtttacagttggaagctgtttcagcctctagaagaatggatcgaacacaaagacgctcaacttgtgaacctgggctcaggcagattttgcattgcaaggttcttcaaacatgactttgattttgttgaacaagatgactctccccgtgattgtattgtcttgaccggtttggaggtggtcccgcgtgtcctcaatggtaaagtgaaactcgaaatgttccatcacaaatcgatgcgtcacacgactttgcctatctatggaaattccgtctgatttagtgttctgatgaataaatttggggatttgctatcaaactctcttttatcatcatatgcggtcttgatgtctcatggactgcttatttcctttgcgtgattgtgtatacttttaaa

SEQ ID NO: 453709 - DNA, 350 bp, Sorghum bicolor
ttttaacacattcacacccaagtttcagaaactcttattgacccaggcacgtctaccatcattttcacatagtttttttttccagcattcaaagggtaccatttcagcaaccccggcccaagcgaaccactggagtcgagaaaccagttacaagatgggattgtatgcactgctaagttaggatgaggaagatgacatgatgaacatctggatcttcctctcaagctcgtccttcttggccccgatcacacggcttacctccttcccatccttcactagtacgaagttggcatcgcctctaccttccatgtcttgcgacctccgcgagctcgtcgacatcgatcttgacg

SEQ ID NO: 453710 - DNA, 471 bp, Sorghum bicolor
tgctggagcacccggtcgtcgtgtcggcggcggagaagctcgggaagacgccggcgcaggtggcgctgcgctggggcatccagatggggcacagcgtgctcccgaagagcaccgacgaggagaggatcagggcgaacttcgacgtctacgactggtccatcccggacgacctgttcgccaagttctcggagatcgagcaggagaagctgattcgcgcgggcttttttgttgatcccgaaggcgtgttcaaatccatcgaagagttttgggatggcgagatctgaatgggaggagctggagtgaggaacttggccagacgtacggggaagaataaatttatgcgtatgaaactgtcaaagacagcgtagttttcgggtacttggtatttggtactacttggtacttggcatactttgtactccaataattttcggtcgtctttaaataatactaatactaatattcaatttg

SEQ ID NO: 453711 - DNA, 524 bp, Sorghum bicolor
  unsure (1)..(524): unsure at all n locations
cgtgcggggacacggatggggtcaaaatcaagctcattgcagaggatcacagcgtgcggggcactttgatgtgcccccctgaggagataatggaggaagtcntctttgccaggtttgcaacccngatggcatgtgcggcaacttcactggaggcacttggcacacgcccaatgcgaagcagatcggtgagaaggaatgcctcggcaagccatcctgcatgctgccggtggatcacacagtgtacggcgcggacatcaactgccaatcaacaactggaacactgggggtgcaggtgagatgcatagggggcaagaagggtgcctgagaataacaaggtggatgctgctaaatgctaattgacgtttcagcttggttggttggtcatcccttcggtttggcactcatgcttgtgacccattggtctgccattgcaattgaaatgtgattggaacatgcttgatcgggaactaacatgaaatgaatgaaggtttannaaaaaaatnataaattatttaaaaaaaata

SEQ ID NO: 453712 - DNA, 464 bp, Sorghum bicolor
  unsure (1)..(464): unsure at all n locations
ggcacgaggctgccttgtgccttgtttatctatacacccaatccaatccaatccaatcctcgagttggtccaagtccaacccaaccaccgtcgtctcgtctgtcctcgtcgcgtaattcagggagctggcggcgtctactgcttctaagctggagagagctgcaccagtgcgcggcgccaccgccggagagggcgacgagataggcatcgatccggggaacgagactccggagcagcgcaacaagttcctcgtcctccgcctctacgaggcgctcaacgcccgggaccacgccgccgtgcagtcgctcctcgcccccgacctcgagtggtggttccatggcccgcccaagcaccagcacatgatgcgcctcctcaccggcggcggcggcagctctggaggcttccgcttcgtcccgcgctccgtcgacgcgctcgtcgnccccacccccaccacctccaccacc

SEQ ID NO: 453713 - DNA, 426 bp, Sorghum bicolor
cgtccgcccacgcgtccgggagatcttccacagcgtcgccaaggtggcgctggagtcggtgaagacggcggtggagcaggccaagaacatcggcgaggccaaggccagcgacaagatgacagacagcgcgcgcgaggactgcaagaagctcctcgaggacgccgtggacgacctcaggggcatgctggatatcgccggcggcgacatcaaggtgctcttcagccggtccgacgacctcgagacgtggctcacgggcgtgatgacgttcatggacacctgcatggacagcttcgtggacgagaagctcatggccgacatgcactccgtgctgcacaacgccaccgagctcagcagcaacgcgctcgccatcaccaacagcctctgcgggatcctgaagaagctggacctcgacatgttcaagaagga

SEQ ID NO: 453714 - DNA, 756 bp, Sorghum bicolor
cgtccggtctgtctctgttcattcgttccccacctcgccctcgagccgtctcgctagggtttcgccgccgccgccgccgccgccgccatgcctcgccgcagctcaggaaggtctgccccacgcccggctccacgtgctgctccagtgaggaacccaccacagccagcacgccaggctcctcctccagctcctgttcgggatggtggtggctccattcttggaggaattgggtccaccattgctcaaggtatggcatttggtactggtagtgccatggcgcacagggctgttgatgctgtaatgggtccccggaccattcagcatgagactgttgtctcagaggcggctgctgctgcccccgctgctccagcgatgaacactgatgcttgtggcatccattctaaggccttccaagattgtctcaacaactatggcagcgacatcagcaagtgccagttctaccttgacatgctgaacgagtgccgccgtggtggtgtgtctgcctaagcacctctattgggactactcatgggttttcttttaactctcatggtatctcattaataagacaccgtgaaacttgaaccatctgcttgaaacgtatgtaccgtgacatcactggtccatcttgttgaagctatggttataccgtctttcctgggagtggtacattctgttatcccgtattgttggaacagacatctgtatctgtgtctctggtgatcataaatatttgaatgaaccacgttatgttgg

SEQ ID NO: 453715 - DNA, 545 bp, Sorghum bicolor
  unsure (1)..(545): unsure at all n locations
cgtccgcaggcacattttaaatttgtgttttagtcgtgtgcaaactgcattcattcaacatagctgcaatcagttacaaaatctctcagcaatttctgcttgatttagctgctgtcctgatgcagtttacatcacagatttggggctacagatcctccccttattttcaccttttggccgtacaacaaactcacatttttatctgaaactacctggacccgacgtctcgcctaccaaaaaataatatggtgatcaccttcgtcccatggggcaactgcngctttgccatatcatctcatcacttcatcagtatccatagccagagttgtccatcgggttagcgaggggcgcggcctccggctccttgatatcgacgaccacaacatctgatgtcaggaagttgtggatcctggccgcgtcgtcgtacgacnaccacatcanggactgctggtgctgtggttcatcaccaccttgtccttgttgttggaagctcctcgctgtcctgatggtgacggcngngagctggaagatgcagtccccgagca

SEQ ID NO: 453716 - DNA, 689 bp, Sorghum bicolor
cgtccggcacaagaacgcgctcaagacggcggaggcctacgacccccgcgccgacgcgtgggacccgctcccggacatgtcggaggagcgcgacgagtgcgacggcatggccacggtcgcgggggaccggttcctggccgtcagcgggtaccgcacggcgcggcagggcgggttcgagcgcgacgccgagtggttcgacccggccgcgcgcgcctggcggaggctggagcgcgtccgggcgccgccctccgccgcgcacgtggtcgtcaaaggacgcgtctggtgcatcgagggcaacgccgtcatggagtggatggggacccgccgcgggtggcgcgaggtcgggccgtacccgccggggctcaaggctggcacggcgcgcgcggtgtgcgtcggcggcggggagaaggtggttgtgacgggcgcgcttgatggcgagggcggtggtgggcggcacgcactgtgggtgttcgacgtcaagaccaagagctggactgttgtgcgcccgccgtccgagttcgccggcttcgtcttctccgtcgcctccgtccggatctgactgagcatctgcatcttgcttcgcaccgttcgtccgcccacggctatcagacgtgaaggaaaggaaaagtctactagtacaagtagtatactagtacatggctacatgcatgtacgccaacttgtctgtc

SEQ ID NO: 453717 - DNA, 610 bp, Sorghum bicolor
  unsure (1)..(610): unsure at all n locations
cgtccgctggatcctcccctcttttttttttggaagaaggcaggaacgttgcctcgtacaattaaggaggagcgttccccgggtcgggagctgtatccaatatatatatctctctcgcacatcttccctgggattccgtgctcctcttgcagtcctcagaacgcagctcccgcagccagcccccagagcgccgccaggcacagggatctgaagtatggcaccgtctcaacttccggagctggagctgtcccctactgctatcttcacccgctgcaaggtgtgtggaggctgtgaagagatggacaagaggttcctggtctgcagccactctgagtgcttttacaagtactaccacgttcgttgcctgactaaagagcagattgcaagtgatgtgcagatgggcagccagctctggtactgtccatcttgcctctgccgtgtctgcctgtgtgacacggacgatgataagatcatcctgtgtgactgctgcgatcaggcctatcacctctactgcctcagtcctnctaaaacaaaggtgcctacgaagtattgggactgcgacccctgcaagaagcggaaggaaaaagagaagaggatatttgatgctcac

SEQ ID NO: 453718 - DNA, 758 bp, Sorghum bicolor
ccgattgtcaatgctgtcattgatggtgacgatatcatatacagagactatgtggacgtcagtgttgctgttggcacatccaagggccttgtggttcctgttatccgggatgctgataccatgaactttgctgacattgagacagggataaacaaccttgcaaagaaggcaactgagggggcactctcaattgatgacatggcaggaggaacatttaccatctccaatggtggtgtctatggaagcctcatcagcacacctatcatcaaccccccacagtcggcaattctggggatgcattccattgtgcaacgccctgtggttgtgaatggtgacatcctcgcgaggccaatgatgtacctcgcgctgacatacgaccacaggctgattgacggcagagaggctgtcttcttcctgcggcgcatcaaggatgtggtcgaggaccccaggaggttgctgcttgacatataaattcacgcacaagcgctcccctgccagactgtttttgtgcttatctggaaataataccatgcaaatttttgactgatgaaaaagaattacttcctcaggaagacaatctgagctgaggataccgtgagttttttctctatatataatcgtagaagagagcagcaaactcaactcaatgtgaggtcatgtttaattttcgggatgttccatttcgggatgcagttcccagtcatttttatttaccatgcaagagcaatagaggctgctgcatttttgtttgttggttc

SEQ ID NO: 453719 - DNA, 440 bp, Sorghum bicolor
cgtccgagcaaattaaaccataattaattaaccaatcatgtctggtcgtcgtcgtcgttcgtggacaatatgggcgcctctcctggcgtcgctgctgctcgccgggctggcgctgtcggccaaggtggtggacgaggaggaggccgaggcggacggcgacgacggtggtggcgccagcaagaagaagaagccccacgttaaccacggcaagttcaaggcggacccgtggacggacgggcacgcgacgttctacggcgggcgcgacgggtccggcaccacggacggcggcgcatgcggctacaagggcgagctgggaaaggactacggcgcgctcacggcggccgtgggcccgtcgctctacaccaacggcgccgggtgcggcgcgtagctacgagctcaagggctacagagggcaccggggaactgacggccacaaacta

SEQ ID NO: 453720 - DNA, 500 bp, Sorghum bicolor
cgtccgcccacgcgtccgcaaccggccatcactaagtttgcttttgcctacactatccgcatatgaggttggacagcttttatccatctatgagcaccgggttgcagttcagggcttcatatggggaattaactcgtttgatcagtggggagtggagctagggaagtcgcttgcttcccaagtgaggaaacagctgcatgaatcccgaatggaaggaaagcctgttgatggctttaaccacagtacttcaagtttgcttgcacgatatcttgctgtcaagccacccactccatatgacactaccgtgctaccgaaggtgtaatgtctcagatgtttgacatgctaattgctgagttctgacttggcaaggttgagcattaagtcttccttttgggagttgttacagccattttggcagtgctttagttttgaggttttgtatactccttgtaaaagaagagaaacaaatttttgggtgctttaccacatacccgtggaat

SEQ ID NO: 453721 - DNA, 444 bp, Sorghum bicolor
cgtccgtcatgattgaggaggcacttgataatggactgacgaaccagaatgagaaactgatggagcactgggaaaggcgtgttgcaaacaataagatgatggaagatgagaacaaattgctggcctttaaacttcaccagcaggatattgcactgagcggcagcatgagagagcttgagctgggttatcatcctgaccgggacttggcggcccagatgccaatcaccttccgcgtgcagcccagccatcccaacttgcaggacaacaatgagacggctggaataccccccattccacttgccgtctcatttgaagatttcacacaccaccactggcttgtatgtcctctcatgcgttgccaactgtatcttttctttccagtatgtttggatgaatgtataatgtgtgtcagtcgatctttagcacacgttctcagctggtcta

SEQ ID NO: 453722 - DNA, 701 bp, Sorghum bicolor
cgtccggccctcaaggactgccctgggacacacgagttcctcctccttgacgaaggtaaatggcagcatgtcaaggataccacgaccattggggaaggcaagatgttctctcctggtaacttgagggcaacattcgataacactgagtacgacaagctcatcaactactacgtcaaggagaagtacacattgcgctacactggaggaatggttcccgatgtcaaccagatcatagtgaaggagaagggcatcttcaccaacgtgacgtcgccgacggccaaggccaagctgcggctcctctttcgaggtggcgcctctgggccttttgattgagaaggccggcgggcacagcagcgacggcaagcagtcggtgctggacaaggtgatcaacgagctcgacgagcggacccaggtggcctacgggtccaagaacgagatcatccggttcgaggagaccctctacggctcgtccaggctcgccgccggcgccaccgtcggcgctgccgtctaaagtttttgctgccgatcgagtggctctgaattactatatataatccaatcgggtgatgcgtatacagatgggctcgtagatattgaagtataaatgaatgctggtcttttcttatcagaaacttttaggttaatcttgtccgcgtatacaagaactatatataactcaacataattgttatcgctctttt

SEQ ID NO: 453723 - DNA, 456 bp, Sorghum bicolor
cgtccggcattgcgtctcggcctccttgcgtgcgtacgccggggaccggagccgatcccggcccgccttcgcgcgccatggccgagatttgctgcgaggagaccaagtcgaccccgccggcgtcggcttcggccatcacggcgcttgccaggggtcgccccagggtggaaatggccgtggccgaggcagcatgccgctccagctccagctccacgccggccgcggacgaaggtgccggtggcggtggcggtgccagtgccacgcggtgcagcaagcggcggcgggtggcgtgcgcggcgcccgtgcgctcgtgccagaggtcccggacgacgtcggggttcggctcgacttggtggtggccgaggtacggcgtcacctcggtctgtggcctccgtcgcgagatggaggatgccgtgtccatcaggccggacttcctgcgcggtgccgttgaccctt

SEQ ID NO: 453724 - DNA, 509 bp, Sorghum bicolor
cgtccggatgaaaaacctgtcaatcaacctaactagcccaaactttgaggaacataggaggttgctctcttcacatgcctcaagcatggatcaagaaatgggctcttctcacattcatcttccattcatgataacagagcaagtgagagaagctgccctcaagccaacggcgttggagtcactctggagcatggcgatgtccctaggggtgcttgctagcctcctgttgtagtgcggcatttgtacatagctcttagtaatgcccctaaccaccttaggctaggtttgctcgacatgttgtaggttatgcgccttttgattctttgcccctccagttttgcccattgtaacttataatatgcgtgccttatgcctctttaccccttttcccccctcataaggatgaatgggtggcatgtagttttggccgtgtgtgtatatagcatgcggatgtatgtgtacagcaggcggctatagcaaactggttgtgaaggcataataagctgata

SEQ ID NO: 453725 - DNA, 824 bp, Sorghum bicolor
cgtccgcgtcaagcacgtcaacccggagaaagtcacgctgctcgaccagtccccgcaccagctcgagaaggcgcgccagaaggaggcactcaagggggtcaccatcatggagggcgacgctgaggacctcccgttccccaccgactccttcgaccgatacatctccgccggcagcatcgagtactggcccagacccacagcgggggatcaaggaagcctacagggtgttgaggtttggtgggctagcttgtgtgattggcccagtgtacccaaccttctggctgtcccgcttcttcgccgacatgtggatgctcttccccaaggaggaagagtacatcgagtggttcaccaaggccgggtttaaggatgtcaagctgaaaaggatcggaccaaagtggtaccgcggtgtccgaaggcatggcctcatcatgggttgctctgtcacaggcgtcaagagacagagcggagactctcccttagagcttggtcccaaggcggaggatgtcagcaagccagtgaatccgatcaccttcttctttcgcttcctcgtaggaacaatatgtgctgcgtactatgttctggtgcctatttacatgtggataaaggaccagatcgtgccaaaaggcatgccaatttgagtgaaagggaatgagctgcattgaagagaggatagccaaacatctgaattagtcttctctatattaggcgcttcctgtctgttttgtattattacctcttgttttcctgctgctatgtacttcttgtactgctcctgtttgtgcgaattaataatattaagacatggatattctccagtttcttga

SEQ ID NO: 453726 - DNA, 426 bp, Sorghum bicolor
cgtccgctgcctgttatttcctgtccaagctggtagggaaaccactggtcttctcgttgtggccagacaagctcatgttcttccaaaagcaggttgcaaaaagaagagagaagctgctgaattacatgcttttcctgagagtcaccccaacactgcccaatactttcatcaatttttcttcacctatagtgggtgtgccgtaccatactttcttcttggcgacagccattggcctcatcccagcagcctatgtgacttgtcagggctggaattgctttgtgcgacctgagatcgttgaatgacctgtacgatccgcagtcgatagcagtgcttgttcctgatcgggcttgtttcggtgatgccgacattgctgggcaagattgagacgcctagcgggacaccagacattgtatcttgcaccatact

SEQ ID NO: 453727 - DNA, 592 bp, Sorghum bicolor
  unsure (1)..(592): unsure at all n locations
cgtccgcgacgacggtgttcccggtgggcgagccgggcccgcgggcggcggggacgacgacgacgaagaaggcggcgccggcggtgaagctgctgacgaacgtggagaagctgcggctgctgacgaaggcggagcgcgcgggcctgctgtcggcggcggagcgcgcggggctgtcgctgtcggcggtggagcggctgggcctgctgtccaaggcggaggagctgggcgcgctgtcggcggccacggacccgggcacgccggggaacctgctggcgctcgcgctcccgctgctggccgcgggccccgccgtcgtgtacctcgtccccgaggagcaggcgtggcaggtggcgctgcaggccgtcgccgcgctcgtctgcgtcgtcggtggcgccgccgccgtcgccgcgtccacgttcgtgtccaggctgcagggctcctccagctgagacgatctcgcacgcgtttgcagccggattagcaaggcattgctctatgcttgtaacattttttttttggggatttgtgtgctcctgtgtnaagataattgngatttatatatatatatgtatatatatatatatatatatatata

SEQ ID NO: 453728 - DNA, 814 bp, Sorghum bicolor
cgtccgcgacgacgggacctggccgtcgtgctgccgccgcacccaattcgagctggacaagatattgccactgatggaggtgcttaataagtactggccgtccctctactgctccaaatctggaacttgcttcagcggcaagggactcttctgggctcacgagtgggagaagcatggaacctgctctgcccctgtggttcaggatgaactacagtatttcaccattgcccttgacctctacttcaagtataacgttacagaaatgctgtcaagtggaggaatacaagtttcaaatggtaaggaatatgcactgagcgatgtcatcgataccatcaaacatgcttttggcggatcaccacacattgtttgcaagaatggttcagtccaagaacttaggttatgcttcgacaaagaattgaagcctcgtgattgtcttactacttctttgacgaatggaagtgtatcaaaaagcaagcactgcccacggtacatcaccttgccaacatatgatccccttgtgcttgccaattcaactgtagaaatcatgtcacagttcgatgaatttgtggtgcctactgctctttatacagcctaaggtgcaactatcacagtggagcatttcttggctgtgatgaaacaaatgtcttcagcaccaccgccgtggctgcatctcttgcataattatgatagcagaaggtgcttgcgtgagcacctagatccagggaaattggtccctggaatattcaaccatttgtacatgcacacttgaaagagaattgtacttttttaacctggaaatttataagctttatgt

SEQ ID NO: 453729 - DNA, 629 bp, Sorghum bicolor
acgcgtccgatcaacgcaatcaaaacagggaaactgcggacactgtcagagcaagaggtgctcgactgctccggcgctgggacctgtaaaggtggggacccgtacaagtcatttgatcatgccatgaggcctggattagccttagaccatcaggggaatcctccctactaccccgcctacgttgccgagaagaaaaagtgcagattcaacgcggagaagcctgtggtgaagatcaacagcaagagaatgatgagaaacaccaacgaggcggagctgctgatgcgcgtgtccaagcagccggtatctgtcgtcgtcgaagctagccaggccttcagtcgctacagcaagggtgtcttcacggggccttgcgggacgaatctaaaccacgcggtcctggtcgtaggctacggaactacgtccaacggtatcaactactggatcgttaagaactcgtggggcaaaggctggggcgagaatggctacatccggatgaagcgtaacgtgggtaccaaagcaggtctctgcggcatatataggatgcccatgtaccctatcaagaataagtaattgaccggccattgtcggtgccacaactgcacctactactacttcagccagcagatgcatgc

SEQ ID NO: 453730 - DNA, 595 bp, Sorghum bicolor
catcctgcagaaggtgttctaccgctccaacgccgcgcgggaggcgttcgtggagatgtgcgccgacgactacgtgcagaagatgaccttcgacagctacctctacaagcgcgtcgtgccgggaaacccgctcgacgacatcaagctcgccgtcaacaccatcggcagcctcgtcagggccaccgcgctgcgccgggagatggagaaggtcaccttgtgagccgctgcctgcgacgtcgtcgtcgaaatggcattcacttgaggtgttggagtcgcagctgatcggtgtattagtagagatttgcggctgatcgaccgggttaatttaggccaacgtgcgtgggcagtgggcacggagaggaagagaaagaggttgtgcaagtgcagcaagtagatcgaagtgctgcctgtttgtatcgatcgatcctgcaacatatagcatctgatgatgttgagaactcggagcagttcatcgattggattgctgacgacggcaaacttcgacgtgaatgaatgtataatatagattaagacataataatgaagctaaactatgcccgacctagttcttgagattaaaacaataatgggctgg

SEQ ID NO: 453731 - DNA, 466 bp, Sorghum bicolor
gcattgaagcggatgatcaagacaaggcagaatttcagaatgtaaaccttgtggtcttctcatgcagccagttctgtacacaccttttctgctgcttgccagcaatcatagtgttagcagttcagagggttcgccagcacagcggtgttatcctgcttctttgttcttggctcttgattctgcctcggcgtgttggtgaaattggtctgatactttggttctcttatacattttgataatagttttggtttttgacactgtaaggtgacatgttgctgggttggttattctgaatggtaattgtaaggccacttagttcgttatagttggtggatcaccgttttcaattcttgcacttagaattctgtcaccttggacattcggagaactctagatggttaaaacgagtggcagtcgcttgtttttttgtaccgtcaacagcaatcaataaatttctgtaatcttg

SEQ ID NO: 453732 - DNA, 509 bp, Sorghum bicolor
cgtccgccaacgtcggcctcgtgggcgccataccggcgaacatggcgaagctgacggggctccggttcctggcgctggaccacaaccgcctgacgggcgccgtgccggccgagctcgcccagctgcccagcatcggcgcgctgtacctgaacggcaacaacctgacggggccgttggagttcttggcggggttctaccagcggatgggccagcggttcgcgtcgtgggacaaccccgggctgtgctacaacatcgcggccgtggacgtggcgcacgcgccgtcgggcgtggtcgtgtgcaaggacctgcaggagccccagcgtggcaccggacggggaccgggaggtggaaggcgggaggaagcccgaggcgagctccagcctcgtggcctcgtcgtcgtcccgggggtcgtctgccaagggtcggtgggctctggtaccctggtggtggttcagggaatggtggctgccgttcttggattggttgtcccgactactatagcaacttaa

SEQ ID NO: 453733 - DNA, 1011 bp, Sorghum bicolor
cagcacgaggagttgaacaagtacggtcgtcctttattgggatgtactattaaaccaaaattgggattatccgcaaaaaattacggtagagcgtgttatgagtgtctacgcggtggacttgattttaccaaagatgatgaaaacgtaaactcacaaccatttatgcgctggagagaccgttttgtcttttgtgccgaagcaatttataaagcacaagccgaaaccggtgaaatcaaggggcattacttgaatgcgactgcaggtacatgcgaagaaatgattaagagagctgtatttgcaaaggaattaggggttcctattgtaatgcatgactacttaacaggaggattcaccgcaaatactactttgtctcattattgccgcgacaacggcctacttcttcacattcaccgagcaatgcatgcagttattgatagacagaaaaatcatggtatgcatttccgtgtattagctaaagcattgcgtatgtcggggggagatcatatccactccggtacagtagtaggtaagttagaaggggaacgcgaaataactttaggttttgttgatttattgcgcgatgattttattgaaaaagatcgttctcgcggtatctttttcactcaggactgggtatccatgccaggtgttataccggtggcttcagggggtattcatgtttggcatatgccagctctgaccgaaatctttggagatgattccgtattacaatttggtggaggaactttaggacatccttggggaaatgcacctggtgcagcagctaatcgtgtggctttagaagcctgtgtacaagctcgtaacgaagggcgcgatcttgctcgtgaaggtaatgaaattatcaaagcagcttgtaaatggagtgctgaactagccgcagcttgtgaaatatggaaggagatcaaatttgatactttcaaagcgatggataccttatagatataagtagataaaactagatataaagaaggtctaaataaaataaaaaag

SEQ ID NO: 453734 - DNA, 655 bp, Sorghum bicolor
cgtccgcaactctccagacctggcaacgcaggtcgggcgtcggggccttaggcgagggcgacggtgtcgggggcgggcgagggtgaagggcgagggcgtcggtcgtcggtggcggagggcgagtctcctgacctggcaacccaggtcggccgtcggacttcgggggcgagggcgtcgacgaggacccaggacgatggaggaagaggtgcgacgtcgggtgagggcgagtgcgagggcgtcgggggcgaggatttggtaccgtgcgcgattccttcctttagaagagcgtgcgattaattttgtttcctttacaggactgagattttatatcaggaatcctttctttttctttatttcatttcgcccccttccacctctctgttatatattattctgtgttggaaatttgcatcaggaatcctatctggtttttttattcaattttgacccttccacctcctaagcacgggtatcgcacgtcgggggtggggggagcgaccccacatatggtggtcttacttttgttctttttatagttgtaggagatatgaagaacatgcttgacgatgctccgggtagatcgaccgagtgcaatgtaaattcaggcctggtttagttcacccctaaaataaaacccttttcaagatttcctatc

SEQ ID NO: 453735 - DNA, 684 bp, Sorghum bicolor
cgtccggtgcttctcgcataacgtggagtacgagggggacactgtccatgtctccttcgtcgtcatcaaggctgacaccccgtggcattacagcgaggaaggcgttgatcttgtggttaaggatcctaatggcggtcaagtccgtgattctcgagataagactagtgataagtttgagttcatagttcagaagagaggtgtccatcgcttctgcttcacgaataaatccccgtatcacgaaactatagactttgatgtgcatgttggccatttttcatatttcgagcagcatgccaaagatgagcattttgcaccacttttcgagcaaatagccaaggtagacgaggcactttacaatattcagttcgaacgcactggctagaggcccaaactgaccgtcaagcaatattgaacgaaaacatgagcaggagggcagtacacaaggcactcttcgaatcagcggcactgatcgcagccagcgttatccaagtctatttcctgcgccggcttttcgagcgcaagctgggaacgtttagggtttaagactttgctagaagccaactcccccttgtggcccccatgatcataaccgatacacctgtaatcgaatggttgctagatcagctaatactgcttgtttgtggactttagttacatgtaatcttttgtgattccccagatgcc

SEQ ID NO: 453736 - DNA, 471 bp, Sorghum bicolor
tgggaggtgcgctattcatcgctgatgatgtcttcccacaaacttcatatctccatgcagcatggcatctagctgcagcgctgggtgttggcacatgcaataagctgcttgagggacgaagcaggcgagatgcgagatgagtccaagatgaccttcaaccttgctgtaactgctgttatcaacaagctgttgatagcgatatatcaacatatcctcactaaattcagagtacagtgcacttccattgtttgatgttgagcccgaacattggagcaatccttgaggcagattagtgcatcagatattagattatgtggcatcagtttgtgcctgtatttgttgtatgctattgtgtattgtttgtgccaacataaactatactgtttcgaagttggttgtgtacatatatagaaactttggaacgtttggattctattaaacagaaaatcaattgaaattgagcatcaaaaa

SEQ ID NO: 453737 - DNA, 351 bp, Sorghum bicolor
cgtccgggatgtgcgtgctggagatggtgacgcgggaggtgccctacgccgagtgcggcagcgtcgtgcagatcttccacaacgtcacccggggcgtcccgcccgcggcgctcaagcggctcaaggaccccgagctgcggggattcatcgagcgatgcatcggccagccccggaaccggccctcggccgccgagctcctgcaggacccgttcttcaacggcatccgcggcggggacgacgacgacgcgcttgctgatgcctgcagcgtcgtcgccggcgcgccggccgtgccacgcccgcggagctacgtcgacgacctcgccgggctccggctggactgaccgaccgtgt

SEQ ID NO: 453738 - DNA, 593 bp, Sorghum bicolor
cgtccgcagaagtaccgcgtcgacatcgcctactttggccacgtccataactacgagaggacctgccctatgtaccagagccagtgcatgaccagcgagaagagccactactccgggacgatgaacgggaccatcttcgttgtggccggcggcggcggctgccacctgtcgagctacacgacggcgatccccaagtggagcatctaccgcgaccatgacttcggcttcacgaagctcacggcgttcaaccactcgtcgctgctgttcgagtacatgaagagcagcgacggcaaggtctacgactccttcaccatccacagggactaccgcgacgtgctccggtgcgtgcacgacagctgcttcccgacaacgctcgccacctgataaagccattgttatgacactactagttttggcttggtcgtccaaataaaatgtgtcaaccacttagtataataatgtgctctgtgaaggcacactgtaactatattgatgcctaaactctatctaaataaaaaaaaatgataatgtaaatcatccaaacatcttccaagctagctagaaccagtggagctcacgtggtggttctgatt

SEQ ID NO: 453739 - DNA, 248 bp, Sorghum bicolor
cgtccgctctctacagaagcatcttcgatcagtgcgtgtctgggccatcgtctggccagagttctggtatttcatcccctgcgcgcaccaaggctatcactgctaggacaagaaggcagccaagcataatatcaagtgcattttgctcatccaagaagctcccacttcagcccttccacatatgggtactctcgattggagccagattctaggtaacacccactttaggactgttatcctctcacaca

SEQ ID NO: 453740 - DNA, 598 bp, Sorghum bicolor
  unsure (1)..(598): unsure at all n locations
cgtggcgtagctactacggccagcagccccccgtcggcgtcccgccgcagcaaggctacccggggaaggacggctacccgccagcggggtacccgccggccggctacccccctccggcgcagggctacccgccgcaggggtacccgcagcagggctacccgccgcagtacgctcagccgcctccacagcagcagcagagcagcgggccttccttcatggagggatgcttggctgccctctgctgctgctgcctccttgacgcttgcttctgagagggccatccgaccggttcaacacgacagcaagggaaactactactagcttatggaagagctggaactgaactgagcttcaaacgctagcgtgcttctattctagctttgtcctgcattatcgccttcttttttctctctgttatgagactactagtactatatcgatgttgattggatcagactaggctggtgtgtattctctggatgttccgtgtttctggtggaattcaaccctgggattgttattggattttcgctgtcacttgcatcnggttctttgctggcactctggtgctgagcacgttttgcttactttattagaa

SEQ ID NO: 453741 - DNA, 569 bp, Sorghum bicolor
ggcgagaaggagccgccgccgccgccgcgcaaacccgcttcgacgccgtcactcctcctcggggcgcaaccatggtggccgcaaagaagacgaagaagtctacggacaacatcaacaacaagctgcagcttgtgatgaagagcggcaagtacacgctcggctacaagactgtcctcaggaccatcaggaactccaagtcaaagctagtgatcattgctaacaactgtcctccgctccggaagtctgaaattgagtactatgctatgcttgctaaagtcacagtccaccacttccatggaaacaatgttgacctgggaacagcctgtggaaaatacttccgtgtctgctgcctcagtattattgatcctggtgattctgatatcattaagactacaccgggtgagcagtaaggaagccacaccagtagagcgctcttgtgcaatagtgctgtagcggatcttcttgctggacttgtcttttgttttgttcctatagaatttacctgacagtaaacagagttcgtgggaacattattctctttgattgaaaattttgtacctggcaattga

SEQ ID NO: 453742 - DNA, 633 bp, Sorghum bicolor
cgtccgataagatgactgttttgacaccatcttatcatgctgagagctattcaccagaggacaataggttcgaccttcgccagtttctgtacaactcaaggtggccctaccagtttcggaagatcaatgagcttgtgcaagagatggacaaagatggcaaatgggaaacttctgcagaagggaagctgagagggcagacaggtgcgcagggaagcggaatgggagttgtggcggcgggatctgccaatcccagtgctgggttctgaagagaaccatactaacacacgggggctggttcctcaagaataatgcaccggcccccaggacacgggctgccaatgtaaatttgtctgcttggttcccttgtactgcatttcttctccctgataagagagctgaagttgctctggtaacacaaatcggactgatgcaaaatgtaggctaccagttctttttctcccattttgtctaatgtctagtacgatctacaaagtgggcaaccaaaaaacatgtgaaaataagatggaatccctttactaaacagattgtcgatccaaagtgaaaaggaaagcattagtgtaaagatctacttaaactgatatttctttgttatgtacagtaagtgtcctttct

SEQ ID NO: 453743 - DNA, 377 bp, Sorghum bicolor
tcggcacgaggcaaaggatggttggtcggtcgaaagtgtcgatctgattcggcgtctactggttcctccgacgggctttgctggccgggcgtcgcaatctgaggtgccttttgtagatgcggccaggatttccctgttgaggtatattcagatggatagtaaccttcgggtgcatcatttccaacaaagcaagtcaaggtgccatgctcaaccatattagctgtgttcagatggataattaccttcttaggtatgaattccttcacaagcctgatctgtgtgtatattagttttgtttactgctacaaacaatgttcctttcctcatatgatctgctcggaattaattcacagaccagttacttgcacaaggataga

SEQ ID NO: 453744 - DNA, 512 bp, Sorghum bicolor
tccggaattcccacgcgtccgagacgaatctgattggtgaagcttcttgtcaattcggcactcaacactgctcccatgattgccgacatgacagtgaagactctgattggagaagcttcttgtagaatctgtcaggaaaactttagcacaactgttaatgcactcacagagcctattgatatatatagtgagtggattgacgagtgtgagcgtgtcaacactggtgaaggtgacgatgatgcgtgagcttgtaccatgcggatgaaacgggtacctatacaactgtaatgtgacggcattctcgaatgtcatagcccacagtcagccatggctgcggaatagcgtagtggctgactgatatgccagtaggcagctttatctagtacttaagagctccaaaaagtttgtagtatacatgtatggataacccttaaaagggggtatgtgtgtgcctatggaattaacgcttatcccagatggtgtaacagcgtttttctgtgagattgttttcg

SEQ ID NO: 453745 - DNA, 657 bp, Sorghum bicolor
ggcacgaggccctcgtcccggcctcccgtcaggtggtcaggttgacttcgcggtcggcaaagcctgcgactttcagcctccggaggccgcctctcgccgcggcggccgccgctggcaacgcacccacgtccccggtcagcgaggtcgtcactgagctcgacgcggtggccggcttcagcgagatcgtgccggacaccgtcgtgttcgatgatttcgagaggttcgcacccacggcagccacggtgagctcgtcgctgctgcttggaatcgctgggctcccagacaccaagttcaagagtgcgatagatactgcgctggcagatggtgagtgtaacgcattggagaagcctgaggacaggatgtcctgttacctcaccaaggctctggcaaacgttggcgctgaactagctcatcaagtccctggacgcgtttcgactgaaatagatgctcggttggcttatgacacccagggcattatccacagggtgcatgaactgttgaatctatacaaccagcatgatgtctcaactgaccgcctgttattcaaaattcctgctacatggcaaggcatagaggcctcaaggttgcttgaatctgaaggagttcaaacacatctaacatttgtttacagtttcgcacaagcagcagcggcagcac

SEQ ID NO: 453746 - DNA, 256 bp, Sorghum bicolor
cgtccgtctcagctaagctgcatgcatcatggcgatgtccacaagcaagtcgtgatcgatcgatcatggcgatggttatggagagccagcagccgctggcggccgccgatgccggtggtccgggcgccgcccctgcctcctcctcctccccctccgccgctgccggcactctccgcaggcgtacaagcaccgctgtagggtgtgcaagaaggggttcatgtgcgggcgcgcgctgagcagtcacatgcgggcgcac

SEQ ID NO: 453747 - DNA, 693 bp, Sorghum bicolor
tgtaccgcggcgtgcctagtgggctacatttcatgaacttccccgcgccgatggcgctgctccccggtgcgcagcagcagctcgggctcggcggccccgtgggcggcaacgaaaatggcagcgccagcggcggcggaggcggagccgagggccacatggggatcctcgccgcgctcaacgcgtaccgggcacatgctgtctcggacgctacgccggcggcgcagaacggtgcaggaggaggcggctctagtcagcatcagcagcatggccatggcggcggcgagcgacaggagagcatgagccccagcgacgactcgtaggtcttcggaggcgtgtgcatgcactggtctgctaaggcgtccctcctgtttttaatctgtgcttcttgacttcccgtttgcagtatttttttggtttgcattgttatggctggccttctctggctccttcacattcttgcaaggatcatacagagtttcatttcatggcatctgggactgggatatataatcacgctccgcattcgtgttggcttcaccaatcacatcacaagagaagacgatagagggaattcatggaggagaggacttgcattgttagggcttgacgggcatggcggagatggagctgttacagaccacttggcagccttgtttatatgacaatcccttattgtccaatgttcaaccatga

SEQ ID NO: 453748 - DNA, 513 bp, Sorghum bicolor
cgtccggagtgccggtcctacccgctgtaccggttcgtgcgcgaggaggtcggcacccagtacctgaccggcgagaagacgaggtcgcccggcgaggagctgaacaaggtgctggtggccatcaaccagcgcaagcacgtcgacccgctgctcgagtgcctcaaggagtggaacggcgagccactgccgctctgctgagctgcgcctggcagtgcgcaagagcagagaagatcaaggtatacagatcgaagaaaaaccaaagtacagcggctcaagacagagcgtttcaagatcattgtgaagtttttacacccagactagcagaagatactctctatatttaccgttgccttgtactactagtagctaaagttcatgtgaatgttgttgtgttcttcccgcagctgcgacgccatggcctgcaatgcgcatgtttttggctgttgcagctactgaaacttttgatggttttaacttgtaagttgggggataaagtaaattattttgttctcc

SEQ ID NO: 453749 - DNA, 569 bp, Sorghum bicolor
ttgggggaccacccactcctccgccggaaagcccaatgaatggggtggatcattcgccaccggccgcaactggcttgccggagcatctcgcctgtgactgcacatggcttgccatctggtccagacagccacgggaatggcacagatcatttgccactgcccacacgtgattggccacgtattcaagaaacccccatgagtggtgtgaacctccatggatcggacaacactgaagatcatgattacactcatcgagagcctgtgttctcattatccttcaaacaggacgaagataccgatccatttcagtgctgcaaagaagaagaagaaaaactagtccggatctgctctgctcatgcaagctcatttctgaccgcataactgagctgcctcacatagcacaggacactgtccacaagctcacctcccacgctgactcaccgccatggcctagcatccaggatgttatgacactggtccgggagtgcgcaccacggtgtgggagcaatgagcatttcattgcaactgaacttttgagtgaaaaccaggaagtggtcctgaccatgaac

SEQ ID NO: 453750 - DNA, 755 bp, Sorghum bicolor
cgtccgtggcaacattatttggggacagtaaagacgtggtgaagatggcgaagaataacctgactgactgggatgaatcaagtggacctgatctgaatctatcagagagggcgagcgtgtacttgtgacagctccaagcaatgcggcagtcgataaaatggttgaaagtttgtcgagaaccggattgaacattgtgcgagttgggaaccctgttcgactatcaccctttgttgcctcaaagtccttgggagagattgtgaattgcagacttcgacagttcacgaaggagcttgagagaaagagaacagatctaacaaaggacctgaggcagtgcatagaagacgattctttagctgctggcattcgccaactactgaagcaactcggaaaggatctagaaaataaagaaaaggaaacaatcagagaagtgctctctgatgcacaggttgggctatcgactaatacaggggcagctgatccactcgtcaggagaactggttcctttgatttagtaattatacgatgaagctgggcaagcgattgaaccagcctgctggatacctatattgcaggggaaacgctgtattcttgccggtgaccactgccagcttgcacccgttgtactatcgaggaaggccttggacggtgggcttggcaaatctttattggaaacagcctcgtcattgcatgatggattacttactacaagacttactgtccagtacagaatgcacgattcaatagccatgtgggca

SEQ ID NO: 453751 - DNA, 323 bp, Sorghum bicolor
  unsure (1)..(323): unsure at all n locations
gtcgaccagcgtccgctgatggaggagatctgagaagattgggcttgatcggaattgcagctcagaggttgagatcgtgccggaggacgaggcaaatcatggcaacgttgcagtgaacgaactgaaacagcaggagcctgcaaagggaaagccggcatcggtcagaacgaagtggggattttagcggcatccagatggcaacacaggagatggttttcttgattgattttgtcaggatatattggaaggtaatttttcactgatgcatgtagtttgatcttattgtatattttttattattattngtttttaaatattttttt

SEQ ID NO: 453752 - DNA, 652 bp, Sorghum bicolor
cgtccgaaaggtgcagtttgattaaaaatttagatctgagtccaggaaagaggagagttaaggaatacgctgggttcagtaaaacaatagctttcttctttaacactagtaatatggctataatggtgaaatcttcacaataagtgtgtgcacttctttcaatagtgctaacattacctaatcaattatttcatttgtttggaaagatgcaattctcctgctactctgctatagatttatgatattttgcaaacttctcagaaccttgttttatgtgattcgcagatgcaactgaagagggcgaggcagacaacagttcctaggtgggaagtggtagatttgttgtttcttatttgctatgttacccctgggtgagagtgatgttggtaattcttccctaacgggccttttgtctgctttattataagttgataatgttctcttaccaaagcgtatgtttacaaatacattatcaggtgtcaaccactgcatataaagcgttttcccatctatgctgcaactgcggacagcagtggacaattatcccggcaactgacagttatgtagctgatggttgaaactgctgacttgtgctgtgacagttttttgcaagttctgtataggctatctggataaattactgcattgtttt

SEQ ID NO: 453753 - DNA, 443 bp, Sorghum bicolor
  unsure (1)..(443): unsure at all n locations
acgcgtccgcagtcgtttctaagctttagcttgcatgcgcttccctactgctgctagcaaagacctttattactagtgttacaagttattacaaacaacaagaagaaaaagaaatcgaggccaagataaaagagggcttcgatttctctgctagtgtgatcttgtgtagtaatccagtgaggggggggggatcaagaagcagagagctgctctgtttttttttcttgcaagaaagggcggttcttgtcggacggagcacaggaagaagagaatggcttcctccagcgggagcgggagctcgggctctctgtcggcggcgacggcggcgctggccgcggcggcgggcacggaggaggagctgcgcgcgctcatggagcagcggcgcgccaagcggatgctgnccaaccgcgagtccgcgccggnggcgcgggtgcccaagcagc

SEQ ID NO: 453754 - DNA, 454 bp, Sorghum bicolor
cgtccgccagagactaaaaagccacgggtgaagatctatactgataaggaaaccggcaggaagaagggtgatgcgttggtgacatatttcaaggagccttctgtagctttagcggttcaattgttggatgggacatcattccgtcctggtgttaagattcctatgtctgtaagtccagccaaatttgagcagaaaggtgatgttttcatttcaaagaaaactgacaagcaaaagaaaaggaagatcaaaaaggtcgaagacaaaatgcttggatggggtgggcatgatgataagaagctgatgattcctactacagtaattttacggcacatgttcactcctgcagaattgagagctgatgaagagcttctttctgagcttgagactgatgttagagagggatgcctcaagttcggtccagtggataatgtcaaggtttgtgaaaatcatccac

SEQ ID NO: 453755 - DNA, 467 bp, Sorghum bicolor
gtcgacccgcgtccgctgattgtagggagcattggctgatattttcctgagaagcacagagctaatgaaagatgctcgagggattgcatccctgagtggtattgttcctcctttggttccatttgctcaaacgtttgcagcagtcatcactgcagccctcacaggaaccctctactatattgccacagctgccggagaccctacatatgttgtgacaccagcaatgcgttcgcgcacagggcgggagaacctcaagaaactatttgcagcttggtacgagaggaggcaaatgaggaagatatactccccgcttctagaaggaatcttggctttctaccttggcttcgaatggatccagaccgacaatatcctagcacctatgatcacccacggcatatactccaccgttgtccttggccatgggctctggaaaatccacgaccaccggagaaggctaccgccgccga

SEQ ID NO: 453756 - DNA, 683 bp, Sorghum bicolor
cgtccgcccacgcgtccgggtgccatcaatgtacaaatatacagattaatcaaggaatggacagcatgggatattgcaaggcgtgcggcgtttgcgttttttggcatatttgctggaacagaagagaatcctgaattcatacagagtgttgatgtgaaggttgggaaaaatgcgaagataattgtggcatgttctacaggagggacactgaagccaacgcaaaatttccctgatgggaagcaatctcggtccttgatagctgcgtacctgttggtcctgaatggatacagcaatgtgtaccatctggaaggagggctttacacatggttcaaagaagggctacctgctgttgaaggagaagaatgagaagggagacttattacgacatagtgttcacatgctggtgactggagttgcgaggagatttctcctgccaatgcgatgacctgccagtgtgatgatgtcctagatttctcgtggcgcctttgttgcccgaactgtcaagtgttttatacttgagtatgacaattcgatgactattagctttgaccaataaagtgagcagaagcatagtttcgtttggatctcgagcttaaactatcttcttctagtgatagagctgctgaatgagattttctttgggttttgtttgtcccacccaatgatgttttgctagtttgttg

SEQ ID NO: 453757 - DNA, 496 bp, Sorghum bicolor
  unsure (1)..(496): unsure at all n locations
cgtccgctacattgctctgttttctttatactcggctgtttggtatttgtctgctactttttggcaggtttggtggcatcaactgcacaagattgggggaaaaatgttgtagagatggacaagttctacttcttgctggatggaatggtaagtagctcaactcacaagtttccttctggacacagattagcaattgcggggtttctctctgatgggagatggtcgaatatcatgccttgcaacggcatggcaaaaaacaacaaagaagatttcgtggaagggcatggtcgaatatcatgtgtattgctggtgcactctagatcagcatggaccttcagtttttggtttttccttgttgagcagctggctcttgtgtatgaactgagctgcagcgggcttnccagagttgatttgtttgagtctgagatgcccctgccatgctgtaggtctagaatagaactagatgacatgatgtgttccctaaggcccgtttgta

SEQ ID NO: 453758 - DNA, 457 bp, Sorghum bicolor
cgtccgaaagttttgggcagttcatatccatggattgcaagaaaagttctcactgacagttcaccaaagcttcgatcaactttgcagactcttctttacaaggatggcactttccaaattgatcgcctggaatctttgttaactgagtcacttcgtgccagaacagagcaatcactggtcagaaatcaacaagaagatgttgacagtacgagatatgcaattaagcaagtcttgtcattcacactcgctgaccagggtgcctttgtgaaggatttacttcttcaggagattgctaagggaatagatgcacttggtgtagccacattaagctctgcaacgtctgcagcaccctccagattgccattcgctggtgtcccatccccattgacctcactagacgatgaggatgccaccaacttaagaaatctgtatcgcctgctcctactttaatctaagg

SEQ ID NO: 453759 - DNA, 599 bp, Sorghum bicolor
  unsure (1)..(599): unsure at all n locations
atgttgttgacgcgattgctaggctgtcctacttctacaagcatgagagttgtgggcagtgcacaccttgccgagagggcacaccctggctctggatgatcatggagaggctcaaggttggcaacgctaagctagaggaaattgacatgcttcaggaggtcacgaagcaaatcgaagggcatactatctgtgcccgtcgcgtggctgcggcatggcctgtgcagggacttatcaggcacttcaggccagagttggagaggaggatccgcgagcgagctgaaagggagctgttggcggcttctgcataatgtgccagccatgttgcccctgtactagttttctgatttcttcctatcgaaataatacaaactgatggagctcctttctgtgtaaggaaatgcagccttcctgatttctttaaaccatttatgtggatgtttatttgatgcactcaagcagctgtgaattttgatggactagataaacttttcaaagtagaaacaaacttgagggttgtcctgtgtatgctacatgatccatcataacattatttgnggatgtgtatgtntacctgcttggntctttaatgctgaactatg

SEQ ID NO: 453760 - DNA, 740 bp, Sorghum bicolor
cgtccgggtactaatgttctgtgacaatctgtcactcatttgttctctggataacagaaatcaacccctgagattttagggcccgtttctggaacatgcctttggatattacttatttcatttcgcatttgcagtcatacctgggaaatcacttcagatgactaccttgcatacattgggaaatatggggtgggccttggtccgtggaaagatactattgttccagcttcaggaaactacttgatgccacctagtgatcttgtcgcacgggcacatgcccataatctccaggtacatccatacacgtacaggaacgagaaccagttcctgcacttcaacttccatcaagatccctacactgaatacgatttctggataaacacagtgggggttgatggactgtttacatatttcactggaacccttcaccggtaccaagaattgacatccccgcacccgaaggatgaaactgcaaatagcctcctagtaaaaattagtcaaatgatctcagcatatgaaggtctctgaccactaaaatgttgctgaaaatttgttcgtactcttgttaattggtctgcaaaggttgaataaacgacttgtttttggtggggacttgttagcagtagcacgagtcatactctccattaaagcccttaatccccaggacaaattcctagagtgggacaagttgttttaaggtattgtgggaataaatgcctagtttacgatagaaaccgtag

SEQ ID NO: 453761 - DNA, 554 bp, Sorghum bicolor
cgtccgcacgtacttacctcatcctctgtgcctagatatctctctacttcgcatcacgcctgtggaagacgaggcagtcaagcacgggagctcgaccaagagccaagaatcgtgtccagtcggctgccatccatggcgggggaggccaagaagctcttcgccgcgtccgaggtcgcgctccacgcctccaggaaggactgctgggtcatcatcggcggcaaggtgtatgatgtgaccaagttcttggaggaccaccctgggggagaggatgtgctcctccatgcatcagcctctggggatgccacggaagcatttgaagaggtgggacacagcacttcagctgtcagcatgatggacagctatttgatcggaagcatcaagggctatgttcgtccggctgcatcaaaggctacagatccttggagcactgatgtgccaccaaattccaggacaatgcaagggaacaaaggccctcctaatccaaataccttcctggactttctactcccattgtttgtgcttggcctggcatttgcagcttggtattacctaac

SEQ ID NO: 453762 - DNA, 545 bp, Sorghum bicolor
cgtccgtgcctaaccccaaagctggcactgtttctccaaacattactcaggctatcgaggaggtcaagaaagggaaggttgaatacagagttgataaatcaggaattgtccatattccctttggcaaggttgactttccggaggaagatctcattgcaaacttcatggccgttgttcgctctgttgagaggaacaagccatctggtgctaaggggatatactggaaaacagcgtacttgtgctcatccatgggaccttctatcaagctaatcataaaagaaatgcttgattatggtttggactcatctgactagatgtgaccacaggcaccagttaagtcagattaactatctgccccttgcgacaaatgagcggagacatggttgtggggtatggcaaggaggtgcttaggtacagttttttcagttttacgggcacccatcatcagagcagctaaagtatgcccagatcgacaaagaggtggtcttgttggtcatgtatttatgagcaaattattcatggtttcatagatgtctgtctctgag

SEQ ID NO: 453763 - DNA, 810 bp, Sorghum bicolor
  unsure (1)..(810): unsure at all n locations
cgtccgcacaccaggctcatcacccccatctgcccacactatgctgagcacgtgtggcagaagatcgtgaagaaagaaggcatagtaataaaatctggctggccagacgcagacaccccccagatccgactctgaaaattgcaaatgaatacttgcagaattccagtgggtttcaatgaggaagctgcttcaggagcgagagtctggttccaagaagcctaagaaaggagctgcaccagacctccatccgaggaaaagaagatgagcattggccttatatatgtggacgagcaccactctggctggaaagagcagtgcttgagggtgctgcagtccaagtttgacagccaaagttgctatttcgcacctgataagaaaatagcacaagctctgaaggggtgtcctatcgggcaggaaatgaactagaagcaagttcagcagctgtgcatgcccttcatcaagatgaagaaggataaggctagggatgttggtactcaggcactatacttgaagcttccattcagtgagatggatgttttccgggagaacttggagccgatcaagaggcagctgggccttgagcatgttgaggtgctcccagcatctgacgaagctgctcgcgaaggcaggtgagcatgcttcgctgctagagaaaaaaccaccatcacctggtgaacccaccttcatcttcttcagcaaacggagctgaaagcgcttgcaccattgctaatagtccgagcatatggcccttttcttattcattttaacgcacatntaagagttgtaggttaaatattgagaacagagtat

SEQ ID NO: 453764 - DNA, 595 bp, Sorghum bicolor
cgtccggttatctatttgagctgcctcatacaattgaagctatcaggcaagcgtgtgaagatgctcacaagaatggtgcactcattgctgttactgcatcagatgtatcttgcatcaagcgttgctacaatgacttccgggatattgtaggaaactatgcagatatactgttcgccaacgccaatgaagcaagggccttctgcgagctaccctcaacagagagccccatgtcagccacaagatacttaagccactcagttcccctagtatccgtgactgacggcatgcatggctcctacattggggtgaaaggtgaagcaatatacatccctccaccatcctgcatacccgtggacacttgtggcgctggcgacgcatacgcttctgggattctgtacggcatcctccggggtgcttctgatctgaaaggcataggactactggcctcgcgggtagctgctgttgtcgtcgggcagcaaggcacacgcctgcgggttcaggatgccgacagactggctgaatcgtttgcgcatcacctggatagcttggagttctgctcagatgtttgaatagatcactttgcaaacacgtctga

SEQ ID NO: 453765 - DNA, 617 bp, Sorghum bicolor
cgtccggattcccggtgcgccgacgcgtgccgccacttgtaaaaactgatatcggtggcaatatcacaagactggaaacaaagtattcttcagatccatcaaagtatgaacacttgtacagcatggttcaggaagaagttcaaaacatgacagcaaaaggttcctcaagctgcacaaatgggctgctggggctcacgagggccatggatttccttgttgagttgtttcgtaaccttcttgagcatgcagactggaccatgactcaagcttgcactgattcatacaccaagactctgaagaaatttcatggctggcttgccagttctagttttacggtggccatgcggctcgctcctaatagagataaatttatggaggtcattagtggaactggtgacatcaatgcagatattgagaaattttgcacaaccttctctcctttcctcaaagaaaatcatgaatttctggcgagcgttggtcttgatgacatgaaggcttcatagagtaatctccgtggcgattacaacaaacaacaaaataaacatgtcttatcaatctcaagtgttgcagaggatatacctgttttccgtagccatctttcccttgaaaattataca

SEQ ID NO: 453766 - DNA, 615 bp, Sorghum bicolor
cgcgtccgggagtccgctgcggtcgccgccgcgatggtgtcgcggcacgagaagtggatggcggagcacgggcgaacgtacacggacgaggcggagaaggcgcggcggctggagatattccgggccaacgcggaggtcgttgactcgtttaacgatgcagggaagcacagccaccggctggccaccaacaggttcgccgacctcaccgacgaggagttccgggcggccaggaccgggttccggccgcgcccggcgccggcggcggctgccgggagcggcgggcggttcaggtacgagaacttcagcctggcggacgcggcgcagagcgtggactggcgggccatgggcgccgtcaccggcgtcaatgaccagggagagtgcggttgctgctgggcgttctcggcggtggcggcggtggaagggctgaacaagatccggacggggcgtctggtgtcgctgtcggagcaggagctagtggactgcgacgtcaacggcgaggaccagggctgcgagggcgggctcatggacgacgcgttccagttcatcgagcgccgcggcgggctgggcctcgagtcggggtacccgtaccagggcgacgacgggtcgtgccgctcg

SEQ ID NO: 453767 - DNA, 997 bp, Sorghum bicolor
attcggcacgagggtcctctcgttcgacaagttcctcttccactacctgaggcgccgctggttctccggcggcggcagcggcgccaccgtcccgagggcgcctgccaaatcgcggcggaccatggcggccgccaagtggagcgagacggccatgctcgtcatcgacatgcagaaggacttcgttgacccggcgatgcgcagcccgatgctggtggccggcggcgaggccgtcgtccctgccgttgccgaggccgtcgccgtcgcaagggagcgcggcattttcctcgtctgggttgtcagagagcatgatccttctggaagagatgttgaacttttccgcaggcagcattactctgggggaaagggtccaacagtgaaaggtctgaaaggagcggagctggctgatgggcttgttattaaagaaggggaatacaagttagtgaagactagatttagtgctttctttgcgacgcaccttgattctgtcctgaaaactgcaggaataaagaacttggttattgttggagttcaaacaccaaattgcattcggcagactgtctttgatgctgtagcattggactatgagaaagttacagttcttattgatgcaacagctgctgcaagaccagaaatccatttgtcaaatatcagggatatgaagaacatcggagtggatacgccaaccgtggaagaatggcgccgctagggtccgctgccacctcaccctgtctcttggcagcaccagcaaagagagatgacctgatgtatgagatgcatgcagcacctccctccctgcatctatttcctttttctaatctccgtctaattgcgtgactgcacgtacgtagctgtagtgttataccctgtgactgtgaggtagaacaatgccagatggtggtatatagtgctatatgcaaacttgtaattgtaatccctctgtgtagagttctgttcagcataccatgtgcttcgaatacggcactgaatcctgtgcgcg

SEQ ID NO: 453768 - DNA, 956 bp, Sorghum bicolor
cgtccgaatatttctttcatccttttgcattgaaataacaaatggaaatcaaaataatatgattcaacctcagacccttttaaatgtagcagataacagtggagctcgaaaattgatgtgtattcgagtcataggagccgctggtaatcagcgatatgctcgtattggtgatgttattattgctgtaatcaaagacgcagtgcccaaaatgcctctagaaagatccgaagtaattcgagctgtaattgtacgtacacgtaaagaattcaaaggcgacgacggtataataatacgctatgatgacaatgcagcagttatcattgatcaaaaaggaaatccaaaaggaactcgagtttttggcgcggttgccgaagaattaagagaattgaattttactaaaatagtttcattagctcctgaagtattataaatactagtagacgagatatagatcaaagaaaaaattagtagattgtgtctaacgtatatgctttaaaatccaaaatgaaaagaaaagggaaaacatgttgattatagaaaaattaggaggaacctagaattagagtcttatgggcaaggacactattgctgatttactaacctctataagaaacgcagacatgaataaaaaagggactgttcgagtagtatccacaaatattaccgaaaacattgttaaaatacttctacgagagggttttattgaaagtgttcggaaacatcaggaaagtaacagatatttcttggtttcaactttgcgacatcaaaggagaaagactagaaagggaatatatagaactagaacctttttaaagcgtatcagccgacctggcttacgaatttatgccaactatcaaggaattcctaaggttttgggcggaatgggaattgctattctttctacttctcgaggtataatgacagatcgagaagctcgactaaacagaattggggga

SEQ ID NO: 453769 - DNA, 857 bp, Sorghum bicolor
cgtccgattaaccagaagggtttccttaccattaacagccaacctgctgtaaatggagagaaatccgactcgcctactgtcggttggggtggtcctggaggctacgtttatcagaaggcctacctcgaattcttctgcgcaaaagagaagttggaccaactaattgagaagatcaaagcattcccttctctcacttacattgctgtgaacaaggatggagaatcattctccaatattgcaccgaacgccgtgaatgctgtcacatggggtgttttccctggcaaggagattatccagcctacagttgttgatccagcaagttttaatggtttggaaggacgaagcatttgaaatctggacacgggggtgggcttgcctgttccctgagggcgactcatctagggagctactagagaaggttcagaagagctactacctggtcagcctcgtcgacaacgactacgtccagggggatttgtttgctgccttcaagatctgatgatgctgttatgctctgtgttgttgtatggctgaatcacaatattcttgcttccccgactacaggtctgatcgcatgtgaaagcttctgttcatttgagctcgggggagtccgctagtcttacttttcctgatttcttttggcttactggaaccatccgatatatcaataagaaatgagttgtgttcactttacattttctccatgtgcaaatggcgcaatgggtagttttaagatgtaaaattcgtcctccaatacaggttggtattgtatcttagttagaaggatgcgctgcccgcgttgcgctgtatttgtgcttctgcttggtggaaataagattgatccaattctgatgttc

SEQ ID NO: 453770 - DNA, 577 bp, Sorghum bicolor
gaccttttcttcatctgcatgctgaggcctgtatcgagtgagatcaagattgacgagacagagattcaggcagcaaagtggatggcgctggaggagttcgtgaagcagcccttcatccaggaagaccacatgttccagaagatcatggacatctgcatccagcgcctccgcgaagtgctactgtggcctgacgccgcaccacgtcgtctccaagttcgacgacagaacgtccacgctctactacaatgtcgccgagcctgaggacgtcaactgcagcgccacctgatatatgatgggagattgggagggatagtctagcttttgctgcgcaaagtttcatgatgcagcaatggcgattgctgagagtgaaatgctagctagtacgtagcagattgcgcaaggcaataacagtgttgccaagcctgtacatatacgtgtagggcataacaagcgagagctgtatatcggtagctctgctctgtcgtgtgttctgataaacgatgggagccgtgtttgatcgtttgcgacttgcgaaacgaattctgcatcgaatcaaaaccggacctcgttcgccctc

SEQ ID NO: 453771 - DNA, 616 bp, Sorghum bicolor
  unsure (1)..(616): unsure at all n locations
cgcgtccgaaaatgagcacgaacctgggaggagccccttgttgctgcttccgcttgtcccagttgcagcccgccgccgttaggctccggttgccgcctgctcgcgccacagacacttcggcttcccagtcgccggcgcgcctgagggcggtgctggagcaggtggaccaggctctaagcaaggggaacgacgaggccgcgctcgctcttgtgcgcagttcgcagggggttgacggcggactccgggcctttggcgccgccaggcaggtacctcaacgactttatacattggatgagcttaaactgaatgggattgatacttctgctttcctatcgcccgtggatctgacactaggatcaattgagagaaatatccaaattgctgcaattcttggagggctttctgtatctgctgcattagagctttctcaactccaaatcctgtttctcatactaggtctactatctttgtggtccgtggactntgtatattttggtggtggggtgagaaacttggttcttgatacaattggtcactatctcagccagaagtatcacaacagagttgttcagcatgaagctggtcacttcttgatagcatacttgcttggagtgct

SEQ ID NO: 453772 - DNA, 521 bp, Sorghum bicolor
  unsure (1)..(521): unsure at all n locations
cgtccgcccacgcgtccgggcgagcgcacgtgccaccagctagcagcaatggccgccgccgccgccaccacctcctcccacctgctccttctctcccgccagcaccgatgccgcctctccttcctcggccagtccagaaggcccgcaggcagggtcacgtccccgcaggcgccggccgctaatggggtgcggtgcatggcggccgtggacactgcgtccgccgcggcgacggagacgacgagcccgaagtcgagcagctacgagatcgtgacgctcacgacgtggctgctgcagcaggagcgcaccggcgcgatcgacaacgagatgaccctcgggctggccagcatctccacggcgtgcaagcagatcgccgcgctggtgcagcgcgcgcccatcttcaacctcacgggcgtncagggcgccgtcaacgtccagggcgaggaccagaagaagctcgacgtcgtcttcaacgaggtgttctcgaactggctcaagtcgagcgggcgcaccggcgtgatcgc

SEQ ID NO: 453773 - DNA, 557 bp, Sorghum bicolor
cgtccgagatgaacacaccggtgtacgagggacgtgaggaactgctggagcaacacctcaaggacgaccttcacagtatcgtggacttcactggccatggtgccctctatttacaggaagaggatggtggtgtggtcagcgacgacggctgcagcttcgatctcccggatgccatgttcgctgccggggtcacccaccatggcgcgcgaggaggcgcagctggccaactggacatcctggttctggaactgatttccatcagtggagggatggctgcatcaagtgcaaagagcaaatcctctcctggcttcgacccttttctgcaccatataattactgggttaattatgtgccgtgatgccgtcagatgttttcaagttaatgaattgttactgatggtggaaggttaaggttttgaagattttatatggtcatatataaaatatatgctttgaacattagacttcaaaagtcgaaaattaatggacgtggataacctgtgggcactacagcacttgcagcccgcatgagtttttatgctgcttttaaacatgaaa

SEQ ID NO: 453774 - DNA, 510 bp, Sorghum bicolor
cgtccgtctgcaggcagcctgttgagcgtctcctcgagatcaaagtgaacaacaaatctgaagagcagcagcagacgccccaatcgccaccgctcccagccccggctccgcagcaggaagaggtgtagctgtgatcaaagtcagttctgagacattatatggctctagtttgcggcccttcaggcctttccctaaaggtttgttctctcatctgagcaacggggaatgtaaccggtactttacctttagcctatgtaagcttctggcatcgcatggctttgccgacctctgctgtacctgactatccggaggtcgggagaccaagatgccaaggagagtgtgtaccatatatatgcaccatgcatgcgtgtgccgtggctacctgaagaagtgtagcgaggaggtttcctcatgcctccaggggaaaaagggcaagagaaggtggtctcttgaatttgacaaaaatgactgtatttcaccttgattccataccttttctgtgatgccctg

SEQ ID NO: 453775 - DNA, 615 bp, Sorghum bicolor
gcgtccgggatagttgcgatgcgacatgggagacgtgttcctaaacttaacaggcctccggatcagaggaaagcattgctgcgcgggcttaccacacagctgctcaagcatggaaggataaagactacgaagccaagggcaaaggcaatgaggaagtatgttgagaagatgatcacgttggcaaaggatggatctcttcacaagaggagacaggctctggcatttatctatgagaagcatatcgtccatgcattgtttgctgaggttgcagacaggtacggggacagagaaggtggttacacaaggatcatcccgacatttccgaggcggggagataatgcacctatggcgtacattgagcttgtctaggatcttccatcagttgatgtggtttcatgggcgacttgcaggctgagtggtcatgtctgtgaattgccctttggatgtctgtttttccttattaagttcttctgtaacaaagtgtagatcacgcgtgaaattttgaactggtcaagcttcatcatcctgtaattgacaaagagctacgctataatctggaaaaaaagtttctggcagcgcatataaaaaattcagcatgtcgaatgccctctgtcc

SEQ ID NO: 453776 - DNA, 543 bp, Sorghum bicolor
cgtccgagcaacttcaccaccggagctggaggagctgcaccaaatggccaggataggagaagcacttctgcacctgtgggagaggaactggatccattgcacgtacggaggcgaagctggtttctggggctccagctctctggcagcagagcgctcatagaggagctgcaccaaatgtgcccttagtttgctttacggactgtgctatcagttcttgggaagcggcaaaaaatgatgatgcaaaagatggctgtagaatacaatgaaaggatagaaaatgtcaatcgtgagaggaagttccaccagcaaaatactggaggacagctgcatgccctgacaatggaatggcaggagctgtgtcaaaaaaatatagctattcaagctgcctgtgttgacctgcagaatcagattgatcagcttaaaattgaagcaaaagaactgggaatgcccatcgacgacaacaatggaaccaactcacaagcatcatgaggatttgagttaccattcggtaacgtcatctagttaagttaagacgccacgaga

SEQ ID NO: 453777 - DNA, 720 bp, Sorghum bicolor
actacagtgctgttgaggatgtccaactttgcaaatcctggattcatatcagcaatgatcctatcatagggaatgatcagtcaggaaaaacttactgggagaggattgctaatgatttccacatgaacagggactttgagtcgataggactcccaattcactcgagcatcggtttggaatcatactaaaaggagtgcatgaaattccatggcttcttcgaggaggtccagcgtcgtcatcgaagtggtgtcccgtaccaagaacatttgggggaagcccatggaaggtatgtcagaaaagaaagcgcaaagaaatttcaatttgaacaatgttggctcacgttgaggaatactcaaaagttcgaatcaacacttgaagtcagcaagaggccgaccaagtccagagagctcaacctctccgtaggaactcaacaagacagtgagacaaccgcccaaggtcaagagagctcctccattccttctaccaagacaacccgacctccgggtagaaagcaatccaaagacaagctgaaaaaaaatgaaggagatgacggctataaggatatgatgcaaaattttttggtaatgaagaccgaggaacaaatgatgaagaaagcaaggtgggagaaggatatgctgcttgaggagcggaagcttaaggtggaggagcagcggctgcagtgggagcaggaacagaaaatcaatgttttgtgatgtgacc

SEQ ID NO: 453778 - DNA, 415 bp, Sorghum bicolor
cgcctggaggtaccgggccggtagtagccgggcagacccatgcgttctgacgacgcgtgtaggcggcagggacgatggggtcggcttctacatggacgccggggcctacggggtcgtgccaagcttctagaacgttctttcctccagacaaactcacaagttgaagatagccttgaagattaggtcgtgtgccaagcttctggcaatggcgttcgcccagcttgaaacaagctaagagatgggcgcgcggcaatgtcgccatcgttcttgtttgtctcgtgtgtcatcgacattcatgtgggcagcattcgtggtgaaattccgccatcgctatttttaaatgatggcgcggaatttccatgggacatcatcaatttggtgaaggaacaactaggggaatttatatgtgtggtgg

SEQ ID NO: 453779 - DNA, 558 bp, Sorghum bicolor
cgtccgcagtgccccctgtttcatttgacttgttcatgagagccacatttcctgtttctaatgctcgggtgaaggctacggaaaggtttgaagcagcctacccaacaatcaaggagttggctcttgctggtcctcctggctctaaaactgtgaaacaagcatcacaacagctgttacctttgtgtgcaaaagcaatgcaagaaaacaatgcagagctcaccagggaggctactgatgtattcattgggtgcttgactcaaaatgcagagtcctacaagcagtgggaaagaatttatcctgaaaatattgaagccagtgctgctgtcctgtgcaaaattgtgattgattggatggatgcccctcctaagcccagttctgaagctctcaaggcaacagtgaacaactccaaggctaagaatgaggcagcgctggagtcagcaacagatgctggaaagcaggcatctatcaaagaagcagacaagcattgcaagggtgatccttggaaagctgactcgtggtgccacctgcctgaagagcagcctggtggtcattgggctc

SEQ ID NO: 453780 - DNA, 502 bp, Sorghum bicolor
  unsure (1)..(502): unsure at all n locations
agccgtccgcggacgcgtgggctggttcaggttgctgtcgccgtgccgggcggtgttcttggtgccgaatgatgaaaacacattggtcgattagtggttgtcgtccagagggcaactgcactctgatgtgaggaaatgaatgcatgttctggtgatgcatgtggcttggacattgtggagcgaacgcaatcaacgtgtcttctcagcgccgccgcccagcgggctctcaagctggcctctggtgtgggacaccacgccatttccgaaggggcttcctggatggaagcaggctacagcctacagtccgttgccggtctgcttgctgccgttcgaatactgacccttattgtcgcaaactagatttctgttaaggaaccaaaacgcctgtctctgcgtgttagtaaagctcaatgttgcgtgtcctcatgcctttactatagacattattatttgaaagactctgtcctataatgctatatatggcgtntcttacaatagaaaa

SEQ ID NO: 453781 - DNA, 582 bp, Sorghum bicolor
tcccggggcggacccacccgtccgaaaggttttgagaagttgggcaagggggcgtgtcacttggcgttccctgcacatcctggatgcctgcgaggcttatctatgggggggatcttgttggacatgcgcacgacaaagcatacatatcaggaggacggcagcaagaactgtgcaaccggtttcaagataatgcttggtaagcttctgccaaagctggttactgccttctatgaggctggtgtcaccagggacccgtaaaccagagcaggcctgccctctacatcaggaatgaaacggggacccttttatattgtgcgtgtatgtcgatgcttgtgtattccaaataaaatgttgcctggtttatgtgttacttatgcctgtcttgtaaatgtggaacagtatatacacatgattgttgaactgatatgcttgtcatgtaaatgcggaacggtatatacgcatgattggtgaactgatatgttgctaagctaaaggcagctagagactgaagtgtctgggtttgggttgtattctgcttttggtggaaaaaaattgatatatatggtcaatggtttttggact

SEQ ID NO: 453782 - DNA, 520 bp, Sorghum bicolor
caagcttacaggatcaattccaagggagtttgccaagctctccaacctgaaagtcatcgatttgtcgaacaatgatctctgcggaactattcctgttgatggacctttctcaacctttcctctccgaagctttgagaacaacagcaggctcaacggtccagagctacaaggattggttccctacgactttggatgttagatgccgacaccgatgcataacaatcaacaatgtatcccgtccctagttgaaaggaggaaaaacaagatagtagtagaaacctacgtagcttggagaatgccgtgactatataaatgtataatattcagacaagatttgacaagggtgtcatagcaggtcgtgatattctgtgtgcattcagcaacaacataaaaaagaatgtattcagacaagttctgcttggttgatattttgtcccgatggatagctgcttttatgcagccgtgttgatattttgcaaacccaaacaatccattgagaaatgagggtacatattgttca

SEQ ID NO: 453783 - DNA, 313 bp, Sorghum bicolor
  unsure (1)..(313): unsure at all n locations
cgcgtccgcccaccgcgtccgcagtgacggggacctccaagatagaatcactcggcggcgggctcgcgatcgggagcggagcggggcgcatgcgcgagtaccggtacggcgaggacgatgcagcatgagccccagccggggtgcggggaaggggcggggcaggcggcggcgaactgcgcggcggtgtgctgctgctgcccgctggcgctgctcgacgtcctgctgctcgtcaccgtccgcctccccgcgggcgtcatgcggcgggtgaggaggaggcgccnccgccnccgcggccggggaggggccggngccg

SEQ ID NO: 453784 - DNA, 419 bp, Sorghum bicolor
cgtccgcttcgagaccaatctccggccgcctcgccactgctggcgttcgcggcggcggtggccgtggagacgacgaacgggcagctcgctgttcaagaagctggacacgaatggagatcgaggaggcggcgggggtgtgcgtggcggtggtcgcctgcgccgcggcgttcgcgtgggcctccagcgcgcgcaacaggatcggtcagatgttcacgctgggctgcaacgccttcgtcgactccctcatcgacaacatcgtcgaggcgctcttctccgagggcgagctgcaggactggtccgacgacatataaacaagcacataggcgcacatatggagatgagccgattgccagatactgtaatagacagtacgtatatacatatagtcaagtatttaatagaattaagtaggtgaagct

SEQ ID NO: 453785 - DNA, 527 bp, Sorghum bicolor
cccggtcgaccccgcgtccgatcgcgggcggccgcgcgccggccacgcgctcgctcatgtcgcagcagtccaccaccggcgcgccgtccatgctctccgactggggatcgccggacggcaagctggactggggcgtccagggcgacgagctgcacaagttccgcaagtcggcgtctttcgcgttccgcgggcaatccccggcgcccgtgcccacccccgccgagccagacgtctcgtgggtgaactctcttgtcaaggacggccacgccggcgacatatttgcgcagtggccggagcaggagcagatggtggcctaatttgattcaccgatcatcactggctcatagcatctagctgaccaaagttctttccttcaattattttttcccctttgtttgcttaatttgattcatatgagatgttttttactagtacatatatataggctgttcacaataatatttgttcatcaacaagaagcatatatggatgcccaaagggagctctatattgatgaggaaggaaga

SEQ ID NO: 453786 - DNA, 1113 bp, Sorghum bicolor
ggcacgaggcactgcttcagccaagccggagacgtcagagacaccggagatggcggggaacctgcacctccccgtggtggacctggcgtcgccggacctccgcgccgccgccgaatccgtccgacaggcgtgcgtggagcacgggttcttctacgtgaccaaccacggagtggaccgcggcctgctccaggcggtgttcgcgcagagcaagggcttcttcgacctgcccatggaggagaagatggcgctgctgaggagcgccaaccaccgcgggtacacgccgccctacgccgagaagctcgacgcctcttcccagttcgtaggagacctcaaggagagtttctacattgggcctattgatgatggcgatatgcataatgatgtaaaccaatggccttctgaagagcgcttgccatcttggaaggagacaatgaagctatacattgcagctattctggatactggcacaaggatactctctctaattgctttgggtttggatttggatgctgagttctttcataaaattggtgcattgaactgcccgtcaacatttcttcggttattgcattacccaggtgaagtaaatgagtctgatagtggaaactatggtgcatcagctcactcggactatggtgtgataacccttttagtgacagatggcactcctggcctgcagatatgcagggagaaggataggaatccccagctatgggaagatgttcatcacattgatggggcccttattattaatattggtgatttgctagagaggtggacaaattgtgttttcagatctacgttgcatcgtgttgttgcagtcggtaaagaacggtattcggtggctttctttcttgacccaaatcctgacacactagtgcagtgtttggaaagttgttgcagtgaagcatgtccaccaaggtttccacctatcaagagtagcgactacatattcgggcgaataaattcaacatacaaataatcatccgtcacatttgtaatactgtatatgctcctttataacagcttgatataccatagtaatgtttgaacccaggatttaaagttatttttcaataaggcgcaacgaataaaaagggtgctatgtatgtg

SEQ ID NO: 453787 - DNA, 534 bp, Sorghum bicolor
tcaaggtggctgcatatgacacaaagcaaaagaaaatggatttctttgatccatcaaggaaagatgatttcctcttcatctctggcacaaagatgcgcactcttgccaagaaccgcgagaatcccccagatggttttatgtgcccgggtggctggaaagtactcgttgaatactatgacagcttggtgccatctgagggcagcagcaagctgcgagaaccagttgcagcctaaaatctgggaagtgcttcagataaggaatcctattatatcagcgcaagcggttctttgcgacatagaaccgatgttatatgattgtataccggctgtaagacttaaaaacactgggcttggttcggacgttaatgtgtgcttttgtgactggtgtgccctatctgctggcagtgctgcacatgcagtagagcacatcaaatgtttggtgttaataaggacaggctatgtatcgtctgccagattgtacatatacattgtggtgatataattaaaaccctgtcttctgccgttcaggctccgt

SEQ ID NO: 453788 - DNA, 686 bp, Sorghum bicolor
cgtccgcggacgcgtgggcgaccggatcgatcgacccagcgcgcgcatgaacgaacgaataacaagcgtaagcgatcgaacaccgacttgaatcgcaagctcgatcgcagtcgcagtcgcagcggcagcggcatggtgtcctggaagagaaagtgcggcggcggcggggagtcgcccgcccggggcgccggcgaggagaaggccgtcccgagagggcacgtcccgatgctgctcgccggcggcgcgaacggggaggaaggcgagcgggtgctggtgccggtgcggctgctcagcgacccttccgtcgcggagctgctggacatggcggcgcagcggtacgggtacggccagccgggggtgctgcgggtgccctgcgacgccggccacttccgccaggtcctcgacggcgccatgcacagatgcgggatcacctcagctgcctgaaatgaaatggctggggtctgagatggccatggcgaccaacgcgccgtcgcgcgccccatgaggcgacctagctatagcttgtacacacatagataatcctagagatgatttgttcgttcttcaatacattgattcatccattcaattctcttgatcttgatcaggatcggagtgactccttaacgtactgtaaacgcaacacaataccacaagtcaatctattagtagagctcgaacaggcc

SEQ ID NO: 453789 - DNA, 476 bp, Sorghum bicolor
ggtccggacattcccgtgttcgcccacgccgttccgcggcggggacattaccggcggcgggtcgggctccgggtccggggcctccggcggtggcgacggcaacaagatgctggaccggggcatcaacacggccatcgtgctcggggccagcacctacgcgctcaccaagctgctcaccgtcgaccaggactactggcatggatggacgatcttcgagatcctgcgatatatgccggagcacaactggtccgcatacgaggaggccctcaaagccaacccggttctagccaagatgatgatcagtggcgtcgtctactcccttggtgactggattgcacagtgctacgaaggcaagccaatctttgatttcgaccgtgctcggatgttccggtctggccttgttgggttcacgcctcatgggtcactttcacattactactaccatatcttggaggcactgttcccattcaaggact

SEQ ID NO: 453790 - DNA, 642 bp, Sorghum bicolor
  unsure (1)..(642): unsure at all n locations
cgtccgggatgcttggaagagatgctttgttgatccctgttcaattgcacacatggcacgctactgcattgttgatagccatacatgggatatgatgccactgtctctctacttcaattcaacaatggatcaatctgatcccagagatgagaatagaattcttctccaaaattcttgtggtggcagcttgtccaagtatctcatggtggcctccgggagaatgtcagtttttatcctcctagcacgagccgaaaaacaaatcaaggcttgggaccatgcagttggcggtaatttgtgttcaggaagctggagggcagacatgtgactggagaggggaacctttggattttgctgctgaccagacagggcgcagaatcatctaccccttgggggggtgttctggctacaaactgtgctcttcatgacgagcttgtagaaatgatcacagcaacttataattagcagtgtcgcattgctttggacccaaacacaggtatgattttttactaaaattttagctaggtgataccgctagaccatcagattgtattccttctccccgttgaaagaaaaaaccacaaacatgtctgattattacttncagggtcattacgaaaaagatatatacatgatggaaactga

SEQ ID NO: 453791 - DNA, 707 bp, Sorghum bicolor
cgtccggtgcgctgggaactgaaagacctgaacaagtacaacatccttgcaccctgttaccatcatcctgaaatccaagagctagagttcagcaagagcagcttaccacagagttttagaaggctaggagagacagataggccatttccagtgaggaagcgaatggcagggcgttcttggcccctccgccttgctctcaaggatggtcacgttccgatgtggccaggccttggtggtagatcacttccctgcacgagtgatgaagttgctactacatggctggatgatgaagatgttagagctgcgattcatgccaaaccaaaaagcttaattggatcatgggaactgtatactgcaagaatagacttcactcatgatactgggacaatgttgacctatcacaagaagcttacagggttgggatttcgtgtgctaatttacagcggtgaccacgacctgggtattccttaccctggtactgaagcatgggtgaaatcaataggctaccaagttgttgatagatggcgcccatggtactttggagaccaagttgcaggatatacagaaggatacggtcacaatctcaccttcctcaccataaagggagctggacatgctgtgcccgagtacaagcccaaggaggctctcgcattctacagtcgttggctagcaggagaaaagttctaagaaaaacaggaccattgcag

SEQ ID NO: 453792 - DNA, 643 bp, Sorghum bicolor
gaattcggcacgaggcaaaagcaccacactccactatccagcaaaagagatccagaggcagcagtcatggccaccgtcagcgccgccgcggcgaccaccgtcgttgcccgcgccgcgatcgccaggcccaacgctctagggctgccccagctgagggcgaggagcgagagggtgcggtgcagctacgccaaggacgcggccgccgtcagcgccaaggccgctggcgcgtcgctgctcgccgccgcgggcgcggtgaccgcgtcggcggggcccgcgctggcgctcgtggacgagcggatgtccacggagggcaccgggctcagccttgggctcagcaacaacctgctggggtggatcctcctgggggtcttcggcctcatctggtccctctacaccgtctacacctccgacctcgacgaggacgaggagtccggcctctcgctctagatccatccatccatccatccaccctctcctgctgttaaaggatctgcatgtaaacatggtggtggcggccaccggtgtaatttcagacatggctatttgtatctaagcttcacttttgcgagatgttagcagctggattataagtaataatattttgatccggccgtggagattacgcaaaaaaaaaaaaaaaaaa

SEQ ID NO: 453793 - DNA, 676 bp, Sorghum bicolor
cgtccgcatgaggaagagctcactcgcatcctccaggccatcctcaaggtgatttttgagcatgccaaggataggcctatacttttctctagttttcagcccgatgctgcacagctcatgcgtaaattgcaaggcacatatcctgtctacttcctgacaaacggagggacagagctatacaccgacgtgagaaggaactcgttggaggaggccgtcaatctttgcctcgcgagtggcatgcaaggaatagtttcagaagcccgcgggatattcaggcaccctgctgctgtaccaaagatcaaagaggctaacctctccctgctaacctatggaacattgaataatgtgccggaggcggtgtacatgcagcacctcatgggagtgaatggggtgatcgtcgacctggtgccggagatcaccgacgcagtctcggagctcattgccctgcccgagcctgacctggaagtggacaacttgagcaaccaggcagctagaggagccacaacaccgaatttctcgcagcgcgagatctcgttcttgctgaggctaattcctgagcttgtccaataatgcctagacttccaggatgtctatcatggatgaatcatctaatgtattactgatctagtgatatgcatgtatacaagaaaagaagcccttgtgcagggtatttgtt

SEQ ID NO: 453794 - DNA, 812 bp, Sorghum bicolor
cgtccgtgcctctactgttacaattgaacatgcccctgctatttccattgaatcccctccttcaaaacaaagcgttccagtttttaaggaatctcctcctttgaaacaaagcgttgcagtttttaaggaatctcctccactggaggaaactactcctaaagaagctgttatgctaagtgaccgaggacttttcaatgtgcaaaaccatcaattatctcatgtaacagaagatgttcagaatatgaaatcaaagctcaacaatcttgaattaaaattggaagaggctgaaaagatgataataaggctaagagaagagagcagaagtaccacccaggagcgggataagctacagcaagaaatggtattcctaagaaagaagggaaccccaaggagtcaagtgggtttccccttgctctttgtggggtatgtggcgcttcttggtacctcactcggttacctgctccgaatatgagttccgaactctaaaaaaagttcagcagctgggatgcttcttatgcggcaagagaattgaatggcagttgagctccaaaatgttggagaggtgaatttattattagcattattagttcagaacttcatatggttttgcacataacagcaatgccaaactaccagttgcctgtgtatagaacagtttcttttttttcgcgttgtatagaacccacccaaaagatgcctgctgccttgtagattaacatgggattcttccatctgcctgagcttttcttttacagtttgctggattcgcttgtcctgaatcagaattgatctatttacacctggtttcgttc

SEQ ID NO: 453795 - DNA, 451 bp, Sorghum bicolor
  unsure (1)..(451): unsure at all n locations
cgcgtccggtcgacctcgccgcgcaccgcgccaggggggttgcggcccgcgccttcgccgcgctgctcatgtcgtcgggcctcgtctgcaacccggacgtggcgtgggtcaccttctgctccgcctacgacttcgcctacctcgtcaaggtgctcatgggccggaagctgccgcgcgcgctcccggagttcctgcgctacgtcagggtctacttcggcgccgccgtgtacgacgtcaagcacatggctagggtcgccgttgactcctacggcgaggtcgcgctgctcggcgggctcgagcgcgtcgccggtgccctccgggtgcgccgcgccgccggacggngacaccaggccgcgtccgacagcgtgctcacgtgggacacgttccgggagatggctaggctctacttccccaaggaaggaagcctggacgtgtgcgccggcgtgatcta

SEQ ID NO: 453796 - DNA, 301 bp, Sorghum bicolor
cgtccggttagctggctgttttttttaaaccaaaattttgaatgtcagatcctttgattttgtattatttatgaacagagaacaaatatagtataatcagaatagattatagtgattcatatataaaggacataaatatattgtaatatatcgatatcatctgaggaaaatttttggctagtccctaactaaattattgattccaattattgtaattacttaacagcctattgtgctcctgatttgagtagcatcagaataccatgaccctaaattctgggagcttcctatcttcattatg

SEQ ID NO: 453797 - DNA, 725 bp, Sorghum bicolor
ccgtccggacgggcctggcctttgagagctcctgtaagagatgggcgtgttccatcatggcaggagctagctgcatcagttccccgtggaattccatgtatgagtgatgaagttgcaacggcatggctaaacaatgataacgtcagatctgcgattcatgctgaaccagtcagttcaattggaccctggcagttattcacagaattagattttgatcatgatgctgggagtatgataatttatcacaagaaccttacaagccagggttatcgtgctttgatttacagcggtgaccatgatatgtgcgtacctcacactgggactgaagcatggactgcatctttaggctacggcatcattgattcgtggcgacaatggattgttaatgaacaagttgctgggtacacccaaggatatgaaaatggccttactttcgccacgattaagggttctgggcacacagttcctgagtataaaccacaggaatcattggctttctatagccgttggcttaatggtactaagctgtgatactcatgaaggagctcctgacgatgggagacaatattttgtgcaagttcatgtagtactgaaccaaaaaaagtacaatgtgaagaaattggataaagcatacagcaatataaggcagctaaaggatcaaagtacctagcggcaactacaatgttgcaatgattcgtgcaaatattatatcaaagaaccttaca

SEQ ID NO: 453798 - DNA, 408 bp, Sorghum bicolor
gtgttcttgctttctctgagaatgttcctgggacctctgcaaaggatgtcatggacatggttctggtgacccagtacttcgacaccatgaaggagatcggggcctcatccaagtcctcgtcggtcttcatccctcatggaccaggtgctgtcagagacatcgcagcgcagataagggatggtcagctccaggccagtctgctgtgagcacgttgatgcatacttttgacattcccatcagtaaagaagtacatatacctcatgagacaagtaaaacttattagggataatgtgagtactttcatatcagtagtgcttgttcgttctatctatctggtacgtgtgattatttattatcgagataaatgttatataggtttgtagaacaagatgagggccacgttgctgt

SEQ ID NO: 453799 - DNA, 753 bp, Sorghum bicolor
  unsure (1)..(753): unsure at all n locations
ggtaccggatctcggaattccgaggctacgacgtcacgctgaactagaaaaattgtttgccaagtatgaaaagaaatatggtactgcaagagttgttagagagcgagccaccaagcattacacgcgtccggaaaaatgcaacatgggacagaatttttggtggtgcaggttctgtggtacaacctggtgttgtttgtaacagtgctatgtctgaactgtcatcttaccttgacagtgacagactaacagagtatgatgatagttttgatatactgctctggtggaaagaccacaaactaaccttcccagtcctatccatattggctagagatgttctgtctgttcctgcttccactgtttcttcagaatcttgttttagcttaactggaaggatactcgaggagcgtcgtcgacgattattgcctgaacatgtagagatgttggtttgcataaaggattgggaattaggagatgcaagggaacaacattctctggtcactgaccataaagaactggctgagcgctttgacaaaatttctattgttgatggtgcacaaggtacaactgcagatgctggaggagtaccagcaccagctggtgttgcttcacaaggagcaactccttcatctgttcaaggaagaggacctggtgcttctgctggtagaggtggaagaggagctgctgctgctgctggtaatagaggtggaagaggagttgctgctgctggaggagggnaannntgtgntggaagag

SEQ ID NO: 453800 - DNA, 418 bp, Sorghum bicolor
  unsure (1)..(418): unsure at all n locations
aggtcaaattatcnaattatttagcagtattttttttcaaataatcatatttcagtcatcgcttttccacatccatttctctatacaacaggtttacagaggcagatcacgaatgcgtcgtcgacctgaaaacctgaggggcgtagccttttgcatgggtaactacggctctgctgctcttcctacgacgaggcttccatgggcacgcacgacagcgcgatcgagcgtccggccgacgatgatccaacgaagcagcgcgctcgatcagctcacgccccagtcgcagatctccgcgcgcagaggaagaagttgcgagagccgaggtccagccccttttcctccagcctaaaaccggaaaagaactcaaaaaaatngaccgancggnaggtgggcataaaaggaggggggcaaggaaact

SEQ ID NO: 453801 - DNA, 446 bp, Sorghum bicolor
cttcgtctgaaaagattccgatgactacacctgtcttcactcaagcttctgacgacacactttcagatgtatccatccagatagttctgccaatgaacaaagacttggacagtttaccagctccaaatacagcagttactttgcggaaggtagaaggaggcattgctgcagtgaaaaaattcagtggacgaccaaaagaagaaattgtactgcagaaggagaaggatctacggtcccagttacttaatgatggattgaagcctcatccaggctgtttgcttgcacgctacaatgatcccaggacaaagagcttcttaatgaggaacgaggtgctcatacggctaattgacttcacactggagttgtaaacgacaatactggcaacagaaggatgtaatacgctggggttgggagcttcagtgcgtattagaaaggacaaatgatgt

SEQ ID NO: 453802 - DNA, 311 bp, Sorghum bicolor
cgtccgctgcacaagatgaaccagctctctcttctccaccgcgccctccacctacatcgcctccctcccggacgcggccatggcctcaccgccaccgccgtcgtccgagctcggctctcctcctctgaacccaccccacatcagcacgcaaagcgccacctcgccgtagcacgtcctcacgagagcatcgcggcagctacggatcaggagagccaccaccacccgcgtcaagagctcgcggcgggccgcggcggcagcaggaccaggacgtgcgcgctgtcgacgtgggcgctcatcggcggcattacggc

SEQ ID NO: 453803 - DNA, 577 bp, Sorghum bicolor
cgtccgcgacgtcgacggcatcttcgacccgccctactacgagtggttccagttcgacaagagttttatggagtacaggaatttcgacaagtgcctggcctacatcgaagagctgatgataagagatggccccttcgatggattgatgggtttctcccaggtaagcaagcagcaaagttcgacatcacttcccattcagttttctgtggtgatgaaccagttttgttcgattgacggttgcgggtcgtaatttgtaatgcactggcgttgctcccagggttcctacctatctgcggcgcttccggggctccaagaacaggtgagatcatggttcatagtactaaatacgtacagggcgtcaagactcgaagcacagcaggctcttcagctttgctgctgccagttctttactgtccctttgtgttttcatggcaggggcttgccctgactagagttcccaagatcaagtacctcatcatcatcggtggcggcaagttccagtccccgacggttgccgagaaggcgtacgccaacaaggtggcatgcccctcgcttcacttcattggtgacaacgact

SEQ ID NO: 453804 - DNA, 537 bp, Sorghum bicolor
cgtccgaagcagttaagaccaaagaagagacggagaaggttgctcaaaaggtggtatatgctcttatgacatcacttttcggtgatgttaaagttacagcggaagggaaatttgtcatatctgtagatggaaatgtggcacacttggatgggatgagtggcgatgttaaatgtgaaaatgctacactgtaggaacggatcaagactgcattccgtcgcatacagagcgccgtgggaccaatcccactttcagcctcttgattggagggcaatgtttaaacttgtttgacatttcccagtttttcaatgtaagattatctgtctggacttggatagcagttctttttcgaaaagaatgcccaattgcattgtaccgcaagctactcaagaggatcgttgatctgggattgccactgaaaccccagttgtaacattgtaacctgaactaactcattttcattatctggcctgtttccttttcatacccaaatttgaaatacttaggcatgatgttccaagttctgtttggacatgtttc

SEQ ID NO: 453805 - DNA, 923 bp, Sorghum bicolor
cacgcgtcgtgtcacctctcctcgcgcgatccgcgtcgcagcagccgtggccgacggcgaggtcgtgtacaggaacaagtggcctgaggacctgccagggttcagagaggcgctggaggagtacacgaacgctcttgaagagctggcgttgaagctgctggagctgctggcccggagtctgaagctgaggcccgaccggctgcacggcttcttcaaggagcacacgtcgttcttccggctgaaccactaccctccgtgcccggcgccggaggtggtgctgggcgtggggcggcacaaggaccccggagcgctgaccgtcctgtaccaggacgacgtcggcgggctcgacgtccggcggcgatccgacggcgagtgggtccgcgtcaagtgcgttcccaactcgttcgtcatcaacgtcggcgacaccgtgcaggtgtggagcgacgacaggtacgagagcgcggagcaccgggtgtcggtgaactcggagaaggagaggttctccatgccctacttcttcaacccggcgagcggcgccattgtggagccgctggaggaggtggtgagcgaggagaagaagccgcccaggtacagcgcctacagctggggcgacaacttcagcgccaagctcaacggcaacttcaagtggctggacgtggacaacctccagatcgcggatttcaggaagagctacagctccggagacgtgccgtgaccgtgaccctgagtgagtggtacaaaattgtgaccaccacaagtccacaagtgaagaagagccctttaggtgctagctgactagcggtgtgcacctacaacttcttcctctgtaaccttggaaataaacttgtcttcttgccctttgttctcggaacaaagacagatatatatattccctctatctataaaaagaaaatacaattttt

SEQ ID NO: 453806 - DNA, 375 bp, Sorghum bicolor
  unsure (1)..(375): unsure at all n locations
cgtccgatttactgcatgatttatcctaaatgtcatttgaaatgaaactaaaatatcgatcttatcagctatgcatatgtgggttccagattgactccacttatacactaagaatagacaaacccactgaattttttactactaatgatccatctactctggtagttttaattttgcctgtgtgaccaatatgcagggttcacatgcatggatcatgtggatatatacaggcaactcttgaacataaactaaactttcccggtacaagccttggctactagaaagaatggaagaagcgctcattgaactaagcttggaaatacanntgtnggttaatngtanaccttgtnnaacttggaagatactacatatata

SEQ ID NO: 453807 - DNA, 570 bp, Sorghum bicolor
cgtccgcagcctttaaccgttgccaaaatagcaaagatggggggccgcagaacgatcgtgttgagcctaatccttggcttactggcagctgccaatgcggtgccctttgatttcttttaccttatcctcatgtggcctggagcatactgcgaggacagcgacaatggctgctgcgtgcccaagtacggctacccggcggaggatttcttcgtcgagttcttccaaaccttcgacgtgtccattaacaagcctatagtccgttgcaggaacggcagccccttcgatgctaaaaagctggacaagatcgagaacaacatcaaccactactggaccaggctcaagtgcccgccaaccgacggcgtgaacgcgtggaagagcgcctgggacaactacggcgtctgctcaggcctcaagcagctggactacttcaaggcggcgctcagcctcaggaagcaggccgacatcctcggcgccctcgccgaccagggcatcctgccggactacaagctgtacaacacggcgaggatcaagggcggggggggccgggaagctgggcgtcgagccgggtct

SEQ ID NO: 453808 - DNA, 757 bp, Sorghum bicolor
  unsure (1)..(757): unsure at all n locations
ggcacgagggaatgctccaaaattttatatgaagaaattgattacattaatgaaggaaagaacgcagacaggtttcgacgggatttcagaaatataaagtgggttcgcgtgccacttatcatgtgggactacacaactgaaaaggtgttaaccctggagtatgtccctggtattaaaataaacaatttggatgttcttgacaaccggggctatagtcgctcactaattgcatcacgtgcaatagaatcttacctaattcagatattgaagactggcttcttccatgctgatcctcatcctggaaaccttgctgtagacaaggatggttctctaatatattacgattttggaatgatgggtgatataaagtcgttcactcgggagagattactttccctattttattctgtgtatgagaaggatgcaaacaaggttatgaaagctctgattgatttggaagctctccagccgacaggagatctctcaccggttaggaggtccatacaatttttcttggataatctgttgaaccagacaccagatcagcaacagactctggccgcaattggagaggacttatttgccatagcacaagatcaaccttttcggtttccatccacatttacatttgttataagggcattctctactcttgaaggcattggatacatattaaatccagaattttcctttggcaaagnngcannaccntatgcgcaggaactgtanactngaaaccnanacaacaacgggggcc

SEQ ID NO: 453809 - DNA, 1092 bp, Sorghum bicolor
cgtccgcccacgcgtccggagcgatgtgaagaagtccatgaaaatagcaatggacaacaaggaggcgatcctgggaagcattcctgcagagcataaagaagagggtgccaagctatatacttcactactcgaagagaagggtggtttccagactctcttgaaatatatcaaggagaatgatcctgacaaactttctatagcacttgcttcgtcacttgatattgttgctgaattggagctgttacaggcccctggtctgtccttcctcctgccccagcagtacttagaatatccaaggctaacaggaagaggagttgttgaattcacagttgaaaaaggtgacggttcaacattctttccaactggtggcggtgaaccgaaaagtgttgctacgattcaggtcattattgatgggtactctgccccactgactgctggaaactttgcaaaaatggtcttggatggggcatatgacggggtaacacttaaatgtgcaagccaggcaattattgccgataatgagactggaaaaaatgggtatactgttccattagaggtcaagccagcaggacaattcgaaccattgtacagaactccgctaagcattcaggatggagaattgccagtcctgccgatgtcggtgtatggtgctgttgccatggcacatagtgtggattcagatgaatactcctcaccaacacagttctttttctatctttatgacaagagaaactctggcttaggaggaatatcgtttgatgagggacagttttcagttttcgggtataccacggatggaagagatgttctatcgcagattaagaccggggataaaattcgttctgccaagcttgtacaaggcagggaacgccttgtgctgccatcaatagcccccgaagagagctgatattatcgaccccaagcatttgcagcattcttttacactgatcaggcaaccaacattttgtatatccaagccactaaacctgaccagacagtttatagtcaaatacgaccaagtatatagcgtatagtataagaatcgttgtacatgaaaccaattttcttgtgtaatcgatacatcggaatctg

SEQ ID NO: 453810 - DNA, 449 bp, Sorghum bicolor
cgtgcgggaatccgtaccaatggctaatcatgaggggaaacgttacaagtgctttctaccagttgaagaaactaaaaccatgaaggcggtgctcccacaaaatgcaactaatgttatagtagaaagtgaaaggagaattaagccaaaggagccagatgagttacttgaggttctcaaggatcagtgtttctacaggcacgaaggttggtggtcgtatgagttctgttatcatgggaaaatcagacaggtccatgtagacgatgaaaaggttatccaagaatttgttctaggtgaatacgatgatgacgcgactgctgcataccacgaaaatagcacctctgagttagctaatgatgacaatcatgtgaaagatatatctaagagggattatgttcacttgtataaaaatgggactggttgtgatctcacagatattccccgggagacag

SEQ ID NO: 453811 - DNA, 671 bp, Sorghum bicolor
cgcgtccgcgcgcggccacgcccacgtcagcacatccgagtcctcgccgccgccgccgccgccatgcttctcctttcctccgccctcttcaccaccgctcgcttcccactcgccgtctccgcccgcctcccaaaccctaccactaccacccgccgcctcctcttcgccggcctccctgcctcctccccactccgtgccttctgccccagggcgccgccttctccgtccctcgccacctgcgccgccttctcctcctcctcctctaccatggccgccgccgacaaccccctcctcgtcgccgacttcgacttcccgcccttcgaccgcgtcgagcccacccacgtccgacccggcatccgcgaactgctcacgcgactcgagggcgagctcgaggagctcgagaagggcgtccagcccacgtgggggaagcttgtcgagccgctcgagcgcatcaccgacaggctcgaggtcatctggggcatggtcgatcacctcaaggctgttaaggactccgccgatctccgcgccgccgtagaggaagtgcagcccgacaaagtcaagttccaactaaggctggggcagagcaagcctatctatgaagctttcaaggccatcaggaactcttccgactgggacagtctcagtgatgctcgcaagcgtatagttgaagc

SEQ ID NO: 453812 - DNA, 537 bp, Sorghum bicolor
cgtccgagtcccttcagcgagtgcgtccaccccgtgccatctacaagaaagtcacctccgggatcaagccggcggcgctgtacaaggtgaaagaccccgcggtgaggcggttcatcgacaagtgcctggcgccggcgtcgtggcggccgagcgcggcggagctgctcggcgacccgttcctgcggctggaagacgacggactctggtacggtgacgacgacgacggcgcggactacagcaccatgtacaactacctgcaccagccggcgtgcctggaccaccaccaccacaactccggcagcaatggctccacggcgagcaacggggtggtgtccaatggcgtcggcggcggcgacagatgggacgacgacgacgactctgaggacgacgacgacgatggcagcatgttccaaggcatcgaccagctgttcaacgagcacgaggacgacgacgacgagctgcacgtcgctggcgtcgacatcaccatcaagggcaagaggttggaggacggaagcatcttcctccggctgcgcatcg

SEQ ID NO: 453813 - DNA, 375 bp, Sorghum bicolor
cgtccgagccacttggttttaggacttaggagcaaggtgtagttaatctgtaatttccttttggtataaaacatcaactcttttcttgtattagatttaatggcggctcatgatgcctggagcgaacttgctgaaccataccttgccttacaaatgttctagcatagctgccctttgttatgaggagctaatcttagcccaaccaactattccactctatcacatagcctatgcccaggtactgcaccctatgggtggctcggaatatcttcagacagctaagaagtactatgcatcaacaatccagctgactggacgcaagaatacacgagccctctttggggtatgtctgtgtacgtcggcaatcaaatcagt

SEQ ID NO: 453814 - DNA, 542 bp, Sorghum bicolor
cgtccgtccgtctctctgaaaggcttagaagaacatcaaaagaacctgctaaggctcctccacgcgctgatgttgttaagagcctgaaaaatggcattgtgcttaatattctcgggatgggtgccgctgttctcggcatgcaagctactgttggtgccttggtagcaaaagctctcaccacctctgcagtaccctattatgctgctgctcccggccaaagccctgtcttggctttagatgttttcctagttcaggcttcagcgaacaccatcctgtcgcatttcctggggctggcgagcaccctggagctgctgcgctcggtgtcactgcctccagcggaagctgccccggcccctacccctgcacgggcctgagccatcatggcccgtggcaggtcaagaaagaaccctcatcccttcggctctactagacacttgctgttctttgattgtatgtacatcttgcatcaatcttactgaagcttagtgcttacagacacatcgcatgccttccagttcagctggaaaccaacatgttcgcgt

SEQ ID NO: 453815 - DNA, 567 bp, Sorghum bicolor
cgtccggccaaggcctcatcaaaataataggatgcagaattctgggtactggcccaatcaaccacattctaatcactttgctggacccccagcccagcggcctatgcagaacataagttttatacctcagcgacctttccaaactggaggattcccgcagcagagacctgtaaatggggttccaccaccattacctcccagtaactggattgggaagcaaccaaatggaggccacacgggtgtacctgcaaaacacgatccaaggacagctccagatagacagcctaagcaggataacccaagatcacaacaggataagagacagcaggctactaccaaggtataccgtgtcaaaactcaagctactaatggtaatggtttgtcagagtcaggtaaacaggaggaatctgcagcgtaactgggttgcttagttgctggaaatccacacgcaaagtttaatgtgcgtgggcatcctgctatcaggagagaatgcaggctcttggtgatagcagcagagggtttccatgtatccacactcaatttatattccgttattgaattgtttgt

SEQ ID NO: 453816 - DNA, 465 bp, Sorghum bicolor
  unsure (1)..(465): unsure at all n locations
cgtccgtgaagcactgcaccgaatgtacaaactagtagtaccatctcttaaacaaaaatccttttcttaatcatcatgtgtgctacctgaaatgaaacaggtatgtataattgctgaacttgcttaattttgagctgaacagtaatgcttcttcctcaaatcccaatgaccttgcaggatggagacattatcaacattgatgttactgtctatttgaatggctaccacggggacacctcaagaacatacctgtgtggagaagtcgatgatgctactaagcaacttgtgaaggtcactgaagagtgcatgatgcgcggcatatcggcctgcaagcatggtgctagtttcaaggaaattggcaagagaataagtgagcacgcagagaaatatggctatggcatcgactcctttgtggggcacgcgtcgggaggatattctatngcgaacccatcatatggcatacct

SEQ ID NO: 453817 - DNA, 438 bp, Sorghum bicolor
cgtccgcaagaatgtaagacagaagctctacgatagtttgtctgcgaaggaccagagtggcaaagactggtctttcattctgaggcagattggcatgttctcctacactggcttgaacaaagcacagagtgataacatgacagataaatggcatgtttacatgaccaaggatgggcggatctcattagctgggctgtccctagctaaatgcgattatcttgccgacgccatcatcgattccttccataacgtcaactaggttgaggtacaaatagttgagggtcaactaggctgggatttttgggtccttccagctatacagtttttcctgtgtattccatttggtgtaactttgattaaataaattttgtcaaaactcatgtgcttattttacttataaaatcagtacgtggctaacaggatcgtaacacttgaatg

SEQ ID NO: 453818 - DNA, 406 bp, Sorghum bicolor
cgtccgggagtggatagttgaccatatcaagaagaaagagcacggagctgcacttaagatgttcatcgataaagtttctattctatatgaggtggagggtgcatttattaatagaagtgatctgaaacttcaaatcaataggttgcacaaaattgccaatgccaaggctaaagccaaggctactccagttaaggccatccaagacagattgagtgactatatatacctgtactttgctgatttttatgggcctgagaaacaagctggctgtcatagtcacttatggcggtttgctaaaatgatagggaagccacctggtcaggaagatcccagctttaggtgtctcgcttgtagaaccactttcaggaactgcccaatttctaagatgagagatcacttagacacc

SEQ ID NO: 453819 - DNA, 550 bp, Sorghum bicolor
tctcgctattgttgttccccagatagtagtgtcactcggagcaggtccatgggatgctctatatgggggaggaaacatcccagcgttcgccttggcttcggtcttctccctggcggcaggtgtgctcgcagttctcaagctaccaaagctgtcgaactcgtaccaatctgccggtttccatggatttggctgatgctcatgcccaaagccgtctgccatgtaacatccagatacacaccaacacttagccccattttgccattcgtttacagagaaatgattctttgtcctcgtacccctacagaataatgatagtgaaagtagaaaacttaggttagagaggctagttaggttgatgtgcatacaagccaatgcaaaggtgtaaaagctgtatcttcgtttttttgacagtacgtgtatgtaagagctgcccatatggtggagaaattttacaggtggtgtaacatgttttgttcctaacctggccctctttgtacattgtactactaccactaccactgctgcatgcttacaagtgttggtcagattc

SEQ ID NO: 453820 - DNA, 462 bp, Sorghum bicolor
tcccgggtcgagccgcgcgtgcgtggacacccaagtgaagcttgctgatgtggtgaaggtgatgggcaggaccggcttcagaggtcatggtgacccaggtcagagtgaagttcttggatgaccagaaccggctcatcatgaggaacgtcaagggcccagttcgtgagggtgacatcctcaccctgctcgagtctgacagggaggccaggaggctgcgctgaggtggttgtgtgtcctggtggttcttgtatggagtcggatctcggcgaatttgagctatgcttattgaacttggtgtgagaacacctgccttatgattagtgagcctggtgataatgttgcaattcggttctatgatccaggttgaaagtgcacttgggctgagacatggatattctttgctgtattagctcaatcgatgcatggattgaatactcctctggaggacattgttcttgctac

SEQ ID NO: 453821 - DNA, 335 bp, Sorghum bicolor
cgtccgggaaaccagtttgggcagcttggcactggttctgatcaagctgagactgttccaaaattggtagatgctacaagcctggagaatgagagatgccagatctgtttcttgtggagctcgccatagtgctatcataacagatgaaggcgaagtattctgctggggatggaacaagtatggacagcttggtcttggcgactcaatggacaggaacgtgccttgcagagttcctgtggacgcttaccacccactaaacgtgtcctgtggttggtggcacaccttggtgctcgcggagtcgcctacttgaaacctgacaaagaaattaccttaga

SEQ ID NO: 453822 - DNA, 360 bp, Sorghum bicolor
cgtccgctccacaacttcacggcctcgtcccccgtcgtcaaggagttcatcctccccgtggactccgacgttctcgtcctcaccttcgtccccgactccggctccaccgccttcgtcaacgccatcgagctcgtctctgcgcctgaggagctcagtcggcgacatcggcaccttcgtcacgtccggcggcgccgcgcagatccacgggctgtcgtctcaggtggttgagacgctttacaggatcaacgtcgcccggcgcaaggtcacgccatttaatggcacactgtggcggacatgggttaacgatgagaaattcctcgtcgacaccgactcggccaactaacagggtgtggcattcag

SEQ ID NO: 453823 - DNA, 698 bp, Sorghum bicolor
gtcgacccacgcgtccgccctctccacccctcctcctccggcaactaaggagagagcgcgcggctgctgctacccggcggcccggcggcggtgaaagccgcgacgacccaacgcagaacaggcgccatggctgctcccgaggcgccctcatgctacgtcgggatcgcgcggcagtccgccgccttccgccttatgaagcaaatgggatgggaagaaggtgaaggccttggcaaagacaagcaaggcataaagggtcatgttagagtgaaaaacaagcaggacacactaggtgttggtgtagatagccctcataacaaatgggtatatgataccacccaatttgacaacatactgaagaaacttaaagtgcaatcagctaatcctattcaagaagaggttgcagctgtaaaaagtgattcgcctgacgtcactccaaaggaggacaaatcagcaaaagctgaagttactaaagttactcgacctcaaggaagatacaagaaaagagagagggggaaaagtgtgagctcttattcagcaacggatcttcaaggcatactcgtacgcaaaaacgaagataattctcaagtggatcagaaacttgaaccgacatgcttggatgaacctgatcccatcatctgtccggatgcagtatcccaagctgatgatgtgaactggtgggggcacaaatttggattcgt

SEQ ID NO: 453824 - DNA, 711 bp, Sorghum bicolor
gaattcagagaggatcaatcgcaaatcagagtcaatttagtccttacaatatcatgttgcatcaatgaatcatgaaaatcctctttgtaagaacaaaaagtcgaccacggcgggtaggaacacaaattttgtcgcaataccaacaccaacaccccatgtcagcagcagggaagaacagcacatctggggacctaactctaccttgaacggattggtactatcctattacctgcttggcacgctccagaaaagcatcaaaatttctggacctgttcttgttgattcacagattaagctccatccacctattctgcatcgccatcaacaccgtcgtcttcaacatcttcaattttttgaggtgccacactgtcttccacaactgtagggtcatcatctctagacacttcagggcctggtcctgcagacacttcagggcctggtcctgcagataccttaaccattgctgggcggagtaatctttccccgagtttgaaaccttttcgaaattcctggagaatgatcccctcttcgtactccgatgaatcttctctcataatagcctcatgaagcataagatcaaatggtttgccaacagtttcgacatcttcaacgcccaatgaattcaaaatctcaataaattgcttataaatgctctggtagctattatttaatttctcccctccctctggttccacctttatttggattttt

SEQ ID NO: 453825 - DNA, 514 bp, Sorghum bicolor
ttcctggtcgacccacgcgtcgcgcccacgcgtccggagagattctacgtaatggtgggaggccattggtctttgctacataaatttgcacaggcatcggaaaaaggggggggttttagaatacagcgatttaagggccatgtgatggatacaagctatacatatggaacctcagaggctaatagtctatgcttctattgccttgtaaggacatgatgcaggtatggttgttgggatgaggaggattggtcgggctcaaccaaacaattgagtggatgctggaaacatttatcctgtcgtaatccctactcataacatatagaattaaattgcttgatggcttcccctacttaagtgtccatgtccgtagcagttcagtacctcaactaattaagagcttccaccaagtgattagctaggttatttagctttatgcttgcccacgtttgctagaatgacttcaatacttgtgcggaacatgtggttctagatacaacattatcatttcgtaaga

SEQ ID NO: 453826 - DNA, 448 bp, Sorghum bicolor
tatcgatatccttctttggattctcctgcagacgggctatctctgctactgggttcacagtgcttggcatagtgaacaagctcctaactgttgtgattaatttgcttatttgggacaagcatgcctcttttgtgggtaccattgggctcttgatatgcatgtcaggtggtgtgctctaccagcaatccaccacgaaaccaaaggcacccaaggctgagccgaaggaagagaacgacgaggagcagcagaaattgctgcagatgcagggagtgcaagagagcaattcaactcaaaagtaaagctcttcataaaccttacaaggaagttcctttgatgcattatctcctttgcaacagcctcaccctgaacgtttttgtattggctaatatacttggaaaggagcatatggatgaaatgcagcctggactaggagctacaaaatcctatg

SEQ ID NO: 453827 - DNA, 815 bp, Sorghum bicolor
cgtccgcccacgcgtccggacgacatacttcaaaccatttgctggatattatttctcgggtgatggctgcagcagggataaagatggttaccactggctgactggaagagttgatgatgttatcaatgtgagtggacaccggattgggacagccgaagttgagtctgctctggtttcacatccaaaatgtgccgaggccgctgttgttggtattgatcacgaggttaaaggtcagggaatatatgctttcgtgactttggtagatggtgttccctacagtgacgatctacggaaaagcctcgttatgacggtccgcagtcagattggcgcgtttgctgctcctgacaagatccactgggcacctgggctcccaaagacgcgaagtgggaagatcatgcgaagaatcttacgaaaaatcgcatccaggcaactagatgagctcggagacacgagcacgcttgctgaccccggtgttgtggaccagctgattgtgctcagtgacagctaatctatcggctattgggggaagacatgatcactgcctgcactatatcacctgaaaaattcagcttgtattatgcgaggtctgttgggcccagctttcccttgattgcttcggtgtcatggggatggcaacaaaagagagatgcttcaaactttggggattgatgcggacatggacatgcggtgcgtctgtaaaattgtgggtcgcagtcacagatatatacagtatacactagtaaataacgttataaaatgtatgtgcgagttttggctaaaatgtttaatgataaatctcgcatttatggctgcac

SEQ ID NO: 453828 - DNA, 377 bp, Sorghum bicolor
gcagaggccaggccagccgggcggcgtagctacctgcctctgcttctccctctccccgcacagaggctcctagctgccgtgccgccgcgtgacagctccttctctctagtctctacctagctacctctcgtgtcatggcgcagcgcgacaagaaggtggaggagccgacggagctgcgggcgccggagctcacgctgtgcgccaacagctgcggcttcccggggaacccggccaccaacaacctctgccaggcctgcttccaggccgccacggcttcctccgcctcagcctccgtctcgccgccgtcgccttcctcctcgttgtctccgtccccggcggtgttcaagttcgacgagcagcagcacgcgaggccgtct

SEQ ID NO: 453829 - DNA, 384 bp, Sorghum bicolor
ttttgtcgagataaaagcatcgactcaatactttcaacgcactttattctttatactaatactttcaacgcactttattctttatatactgcaaaagatctggtacaggcagagctgaggtgtaaatagcatacaaatctcacgtggctatgaaacattttaattctctacattgctcatggggatataaaacacccgttacatgaacatctcagcccatggtgtaggatggtgacggcaggtttatgacagtgctcttcaccttggtcatcatgttaatgctgtttgttatcccctgggatccaatgccactgtctttcagaccctggaaggggaaatggtcaggtccgcgggctggtgcaagtgactgcacagtcagctcat

SEQ ID NO: 453830 - DNA, 862 bp, Sorghum bicolor
cggcacagcaagatcttcctcaagtttcccagcaagttctggcccgtgggcgaggggaagcattcttcgtgtacgccagcagccggcgcggctactacggatgtggcagtcgttcgagcggagatccgggcgccaacgtgctcctggtcaccgtcaccgacgacgagtcgcggcggatcgagcagcagagcgacaaccacaccaaggccgaggtggcggcggtgctgcgcgacatgttccccgacgccgacgtgccggcgccggaggagtacgactactacgtgccgcgctggtggtcaaccgattcttcaagggctcctactccaactggccatcggcgtcagcctacgagtacgaccagctcaggctcggttgggaggtctacttcactggtgagcacaccagcgagcgctacacgttatgtccatggagcatacctgcaggtatcgactctgcaacatcctcatcaaccacatcttcaagaggtccgtggcagtacgagcccgacgaccaaattgcaaaggctaaatgaacgacgacgaggcgtgcccatgccagatgccttacgccaagcggtcagctcgtctcgagagaacaataaattaaaactgccgagatttcgagcgcaattcagcaggctgccctgcaccgtgtctgctgctcatgccctgtgtttctgtgtgtgttttggcaggtcgtgtgatgtcctgtggaataattgtacaggccctcgaggcttgaggccagatgttctgttctgtttgcgcagcactgggatcatttatgcacgtttcacatgcaaatgcaaatataatgacacatagtgggagtacacagtaatacaaaaaaaaaaaaaaaaaaa

SEQ ID NO: 453831 - DNA, 812 bp, Sorghum bicolor
  unsure (1)..(812): unsure at all n locations
cgtgcgacaagctgaagtaccacatgctcgttccataagttgttctcgtagggctggatgaagatggatgtaatccattgcccggngaaactgaagaccctaaaagctntaccattgccagcgaacgctgcaagaaatgtatcaggactatgctcaagggccttgttatcaatgaagcgttgctaaatctgtttgaggatttcactgaagataatattgtacttactgaaacaggaaaagtgaaattcaagaatgtcaccattatcagttgtcttcgcagaggtccagaattcaagaggcgtctccatagaaacttcaactgtgctgctaacattattccagatctctgcgagcttattactccaactgggatacagtacaacattcctgaagatatcttgcacctgctcaatgtaattgagagggaattcgagtccaggtcaatgtttccagttcatgcctcgttggttcctttgacgcagtgctcatttttcttccaaaagatgtatgagaccatcagatctgtgttatcatttgaggagttagagcaattctggataaattaccatatgcggatggctggaagaaaaaagttatgaacaatgccttgctcagttaccctatcaatagaagacctgagagttatgagggtccacataacaaaccagatcagcggtacctgaataaattccagaaaggttgcttaaatgatttggggatcaatccacctaggaaccaaagtgtgttgagtaatgagcaggaagagatgatcaaacaacttgaggctgatcgattattggagaaatcgaact

SEQ ID NO: 453832 - DNA, 620 bp, Sorghum bicolor
  unsure (1)..(620): unsure at all n locations
ggatggtctgcgtgcgtgcaggaggtcaccgaggaccccaacattgagccctctgaggtgagcgtggacaggctgatgatgcggcagcaggtgcgcagcttcctggcggngatgctgagcccncgggagaaggagatcatcgagcaccgcttcggcatccacgacgggcagcccaagacccttcatgtcatcggcgacatgtacgggctgtccaaggagaggatccgtcaggtgcagaacaaggccctggacaagctgaaaaacaccatctcggcacagggcttccacgtctactttgatttgctaacttgagcagagcacacaattaagctgatgctgagtctcttcagcagatgcattgtcttggccatatatatatgtacaaattgattgaaaactgaacaaaaccagctcttagcatctagatttgtatacatcacacattcccttcccaaatcccaaagggcagaagcagctaatggaattgccgtgtatatcatatatagatagaggacaaatgcaagcagtatacacttcacaaaggcagatccattgccgcctgttcttcatgtaataagtatattttcctaggcaaaatcaacagcaaaaaaactgttgct

SEQ ID NO: 453833 - DNA, 738 bp, Sorghum bicolor
cgtccgctgctgatcaccatattcattactttgacttacgtaatccaagtgcgcctgtccatatttttggtggccacaagaaagcagtatcgtatgtgaaattcttatctaacaatgagcttgcatctgcatcaacagatagcacattacgcttatgggatgtcaaggataattgtccggtacggacgttcagagggcacaaaaatgaaaagaacttcgttgggttgtctgtgaacaatgagtatattgcttgtggaagtgaaacaaatgaggtttttgtttatcacaaggctatctcaaaaccggcagcaagccatagatttgtatcctctgacctggatgatgccgatgatgatcctggttcttatttcattagtgctgtctgctggaagagtgatagccctaccatgttaaccgctaacagtcagggaaccataaaagttcttgtacttgctccttgatgttatggaaggcgttcaagagatttacagccagcttgtatgtcttaatgtccagttgtttcctttcatgccattatatttccccaaaagtgggaacggaggcattgctgatctccggttagggcatgaagttttgcagatggtcagctgacgtagggttttgaggtatcagaatgtgcataatcatgttaatgtcgtataggtgtaaagcagccaagttatcggttacaagtgtaacacgagaaatacacattaataaaactccagccccgtttgt

SEQ ID NO: 453834 - DNA, 426 bp, Sorghum bicolor
cgtccgcggacgcgtgggcggacgcgtgggcggacgcgtggggtttgacgcgtcctactacgagcactgccgccacaaatacggggcggtgggcacgttcatgagcgtgtactacaagtcgaagaaggggcgcaagacggagaaggaggtgcaggaggcggaggcggccatcctggagccggcctacgcggacgaggcctaagctgggaccaaccgttcagcggcagcggcagagtttgtttacataagactttgtgatgatgcgaatctggacgagatgagatgtttctctcgttttgcttaattaattagaacttgattatgtagtgtgtgtgtctgtccgtagtactcttaagctcgtggtcagtcagtgacttgtcgttgatgcccactggtgaggtttatttatctttttctctaatggga

SEQ ID NO: 453835 - DNA, 632 bp, Sorghum bicolor
cgtccgggatgtgacctcagcccctgacaatcatatcaagcggactgaatggacttttaggcaaaaagctactcttgagctcacccacaactggggcacggaaaatgaccctgaattcaaaggttaccataatgggaactcagaccctcgtggttttggtcatataggagtaactgtggatgatgtccacaaggcatgtgaacgctttgaacgtcttggggttgagtttgtgaagaaacctgatgatggaaaaatcaaaggcatcgccttcatcaaagatcctgacggttactggatcgaaatctttgaccacaccattgggacggtgacttcttcagcatcatgaagtgctgttcttcacatatttaaggaggctttgtgtccagattctttatacctggcaattgtgaactacagtttccttgtttggggcacatgaacatactactctgggcatttcaggagcttcttttgatatgcgtgtctggagtctggacttcggataatgggctaggatctgcttcctccttgtatcttgttgcattaattatatactatgcactaactatgttgaggaatgaacagtagtttttcgaaataatataagttcattttaacatatcattatattt

SEQ ID NO: 453836 - DNA, 659 bp, Sorghum bicolor
  unsure (1)..(659): unsure at all n locations
cgtccgcccacgcgtncgcccacgcgtccgcgcagtctccatgacgccctctgtgtcataaggtgcttggtcaacaagaggtttttgattgctggtggtggtgctccagaaatagagatgtcaatgcagctggctgcttgggcaaaggaacttcgagggatggagagttactgcatcaaagagtttgctgatgcacttgaggtcattccttacacactggctgagaatgctgggctcaacccaatctccatcgtcactgaactcaggaatcgccatgccagaggtgagaagaacgctggcatcaatgtgaggaaagggcagatcacaaacatcctggaggagaatgtcgtgcagccctttgctggtgagcacaagtgccattacgctagcctgcgagtgtgtcagaatgatcttgaagattgatgacattgtcactgttaggtaaagagcgtgaagtcggtggtcatgtcagcctgctctgttctgtctggattgatattagttaggttactacttaatgtagaactttattgcgtgtttttggatgttttaaacacgtggttttgatgttagtacggagaggacagtaatgtaccctatccttgcatgaaactaccagggctgcacctgcgatatccattttcttttgattggccgtc

SEQ ID NO: 453837 - DNA, 447 bp, Sorghum bicolor
cgtccgtttggccattccagtctgatcagtctagtagcttatttctgaatgctgttgctgtaaaccactacggccctggtactttaggtgataaccaagcaaggtcacatggaaacataagtgccattgagatggctgctgctaaagctgctcatcatagattgatgcgtggagtatggactaatgtttggtttggtgatatgcgtcgtgctttagcagcctgtgagcggctgatactactgcatcatggtccgcatgaactgagggattatgcagcccttctgtaccactggggatactatgaagactgcctacactacttgtcattgtaccaaactgccacggctgggcaatccccgatgaatcgattagagatcttggaggaggaagctgtgaatactctcagagcacggctaacacttattttagcagaggatggctggagca

SEQ ID NO: 453838 - DNA, 868 bp, Sorghum bicolor
cgtccggtgcttatcacctaggtgatcgaatctaccctgctgaacttccaattaaatatgctgggtactctacatgcttccggaaggaagctggttctcatggaagggacacagctggcatcttcagagttcaccaatttgaaaaaattgaacaattctgcattacaagcccaaatggcaatgattcctgggagatgcatgaagagatgttaaaaaattcagaagacttctataaagagattggactaccataccaagttgtttccattgtctctggtgctcttaatgatgctgctgctaagaaatatgatttggaagcttggttccccgcatcaaagaccttccgagagttggtgtcctgttcaaactgcactgactttcagtcaaggagacttggaattgggtatggccagaaaaagaatgatgagcagtcccagcagtttgttcatatgctgaactccaccttgactgccactgagaggacactctgctgtattctggagaatttccaaaaggaggatggtgtcgaggtgccgaaggcactgcaaccttatatgggtggaatagagttccttcctttcaagcaacctttggatgtcaaacaagctgctgactccaaatcaaacaagtccaaatcaaagggaaaggcaccttgagctggatgaggaacatactggaaacgcaaatgcacgtgatggtggaactgttggatattgtgcatccttatgttaatttttgggcctgtcagtactcatagcatgactgtggagttgcaggttttggttttacccattttggtttcttggttaccacattatctgatgtacttgccatacttatattgcataggatttcttgatatttgccc

SEQ ID NO: 453839 - DNA, 500 bp, Sorghum bicolor
cgtccgccggctgcttctggggcgtggagctcgcgttccagcgcgtgccgggagtcacgcgcaccgaggtcggctacagccagggcaacctgcacgagccgacctacgaggacgtctgcaccggcgccacgaaccacatcgaggtcgtccgcgtgcagtacgaccccgccgcctgcaagttcgacgacctcctcgacaccttctgggcgcgccacgaccccaccacgcccaaccgacagggcagtgatgtcggaacccagtttaggtcagggatctacttctacaccccggagcaagagatggcggctagagaatcccatggagaagcagctgatgcttctgaaccggacattcgtcactgagattctaccggcgaacaggttctatagagcagaagagttccatcagcagtacctggtagatgggtggccgcttcggcttcaggcagtctgcatccaagggctgcaatgaccccatccgttgctacggatgatccaaat

SEQ ID NO: 453840 - DNA, 484 bp, Sorghum bicolor
cgtccgggaaaagtatagctcatcgtgcaggctgatcctatgctgtaacagcccctcaaaagtgacggaggctggaagatcccgttgcttaaatgtgccagtaaatgcacccagcgaagatcagattgtccaagttctagagttcattgggaagaaagaaaacctgcgtcttccagctggatttgcagctcgtatcgcagcacaatcaaaccgtaatcttagacgggcaatactggtttttgagacttgcaaagtgcaacaatatccatgtacatcaaatcaagcggcgcctcctcttgactgggagcaatatgtgtctgaaatagcaactgatatactgacagaacaaagccctaaaaggctatttgctgtacgtcagaaattctatgaattacttgtcaattgtatcccaccctgaaagtattttgaaagaaatggtggcagaattacctggagaagttagatgctgatctgaaacatgaaa

SEQ ID NO: 453841 - DNA, 545 bp, Sorghum bicolor
ggcacgagggttgaatcctgtattcctgcaggtgcttcaagcaatggttcaaatgggtgtccttgttcctactggagatatgactgctgtccgcgcgtccgctcaatttttccttaatagctttgaagagcgtctagcagcacaaaggaaggagagagagatggcaactgcagaactgggatttaaaaagcaattaactaaggaggagaagtttgaaaagaggaagcagagacttgctgcaatcggagaggatcttttggcgattgctgctgatcaaccatttcgcttccctgccacatttacatttgtggtcagagcattctcagttctagatggtattgggaaaggccttgatcctaggtttgatattacagagattgctaagccatatgccaaggaattgctaagatttaatgaagctggtgttgaagtagttgtgaaggatgcaaagaagagatgggaaaggcagtcccgtgccttttacaatttgttccgccaacccgacagagttgaaaagctggcacaaattattgaacgtttggagc

SEQ ID NO: 453842 - DNA, 527 bp, Sorghum bicolor
ggcacgaggcttttgcggtaaaaaatggcgaggccacacgttgtggttgtaccgtacccatgctccggcaacatcaacccagcgttgcagatcgccaagctgctgcaccgccacggcgtgtacgtcaccttcgtcaacaccgagcacaaccaccgccgcgtgcaggccaccgagggcgccggagctgtgcgcggccgggacggcttccgcttcgaggccatcccggacggcctgcccgacgccgaccgcggcaggcaggactacggccgcggcctggccgtgtccacgagcacccgctgcgcggcgccgctcagggacctcctcgcgcggctcaactgcacgcccggcgtgccgccggtcacctgcgtgctgcccaccatgctgatgagcttcgccctggacgtcgcgcgggagctccgtatcccgaccatgtcgttctggacggccagcgccggttcgctgatgacgcacatgaggctccgcgagctccatgaaaaaggatacgttccactcaaggatgagagttt

SEQ ID NO: 453843 - DNA, 588 bp, Sorghum bicolor
  unsure (1)..(588): unsure at all n locations
gcagcaaatgatatgctgaagagtacgggaacacaagctactacggatccagactctttttctcaggcgatgagcaagctccgtcagcggtacgatgaactgaaagagcgctatggagtttctgatattactgtttcagtacaaagtgtcgcttctcagcgtgggtacagcagcgttgactcggtgacacttgaggacatggtccttgaaatcgtgaggcaaatcgagaagctgatccgagcaaaggagatgatggaagctgcagggaggcccttctaaactagatagtagataccatgctgcatacacaatatttatgctccggcataccaattgcctgaactccaacgcttcgctgctcaagaaactgattgcaagcgtgtgaagtccaaggagctgaaggtcgttgttccactcgaacatgcttatattgtaattgcaagatcatttgccatttgatagggcaaatgcattacgtgttcatctgccatggctggatttactgtctattggaaatggcagttttgcccgtatacatgggcccagcagccaaaatttgggaattntggtgaaaggaaaatttcagat

SEQ ID NO: 453844 - DNA, 528 bp, Sorghum bicolor
cgtccgccgacggggtacctttcgtggcctcttctttacttttctacggtggtcgtccgtgcctgatgactgacgatgacacgcgggaactgtttccggcaggtgtgggacgtgctctccaacgacgaggccgtgcggatcgtggcggggacgccggaccgggagaaggcggccaagcggctggtggagtgcgcgcggccacgcctggaggcgcaggcggcgcgggttcgccgtcgacgactgctcggcgatctgcctcttcttccactcgccgtcgtcgtagacacgaaacttgaacgtgcctcgggccacgtcaagcggcagaggcgacaaaatgcacatctcaagactacgattattgtgcccgtcgcattcgtagtagagactagagagtgcattggcgccgtccaccattcagaacgtgcagtttgtcgcatgatcgtgacactccacgattagaactgcagctggtgaatggccaaacaaaaaaaaaatcttcgctttcacactctggcactcaaaatgtac

SEQ ID NO: 453845 - DNA, 562 bp, Sorghum bicolor
cgtccggtttgaaagggttcagaattgaaagcaacatagtgtttcttggctttttttattattattggagtgaataaaatgcagagaccagaaacattattgccgcagattggaccaagcagtttggattgatgggtgtgcacttctatttctgcccttcttcagttggaggtctgacctgggtgcataggttggttccaagcaatggtgtcttagaattggcaccatgattgcttcctgtgctccttaagtgaaggtgtagccccttactcagattcttggctaccggcgtgttatgttgtaccactggatcaacaagggacgtcctctctttggcgagcgaggtgtggtgtctcaccattgaacagcaaacggttgtcgattagaatttggaaactaccacagctacacaggatggcaaagacagtccacctgcagcgctatcacagtgcaaacccaagaggttcgattgaactgcaacgtgccaagggtgcaaccttggcagtgctatcaccaagattaatccagcagctcctgccgagtgaaacagcacaacaagata

SEQ ID NO: 453846 - DNA, 561 bp, Sorghum bicolor
cacagcgccatcagataacagcattgacatctccaagattgcttcacaacatgggttttcttgcagatggaccactgacgtgtgaaggagctgtctgcttttttgtcagttcactgattatgtcagtgttctgtgttgttggagctggcttaagcctcatggttatttacagaaccaaaagggtttatactcacctctacagttcaaaccgcacatgaaacttccatggatcggatatgtcgtttcctcttgttgttccatgtaccataaattttgcatatatgtgtcatatacacacaaaattaaactttgcctgtatattatctattcatttcagaggttttaccacatgaactgctgtccccaaatataaatttacatgcctcatgtgtcagatagccaggctgtagttcaagcttggaccatgaattctgtaataaaggctttgtactaagacatacatgtccattcagctccggctctactgtaatattcttttgtgtgcataatagaatcttctatgattctggcaaatctaaaagctctagtgtgtttctcttt

SEQ ID NO: 453847 - DNA, 372 bp, Sorghum bicolor
cgtccgccctgttacatggctaactaatgtgatttataattttattcacgggctgaatccattaatgtttgcctttgctggagtgggaaatgcagacatacgtacgaaggtaatccatgaactccaagttccataggcttattttcttcccagtagtatctttccaagctacagggtacaatgtctatagaataattttcttaacttaattccatctggttggatttttagaaaaggagttgtatgccattctgtctaagtgattttgtgagacattagcttatattattgtgttatgtaagttgcacaagttaacactggtctcacatgtcatttggatttactctaatggacaagcacgccatatttttt

SEQ ID NO: 453848 - DNA, 481 bp, Sorghum bicolor
accaaggacgatggatgcactctttgcacagatgaaggcgcaacgcatgaggaccgtaccacagcagcaggcaaaccctgcccctgggcgtcatttcatccagcagcgacgtgttcagcagcagcagaggcgaggtagaggatatggtggccggaatgttggcaaccaatgaattcaactaagcatatctgctgcatcgaagcccattctcttcactggtcttacggaccttggaagaaaagacgcccctgggaaaatctaacttggctttgtttttttagaggaaaggttgtggacagaatatgaagcgaagtttgtgtggagggttctagttacctgcttccgtttcaacatgtataatgacctatggaaattatttggtgctacattatgatgtcgtgtttcttgagttgattaggttcatctcttcttcaaaagaattaggagtaatttgccttttaccctatgatgtataaatttt

SEQ ID NO: 453849 - DNA, 518 bp, Sorghum bicolor
ttttaacagcatactgcacattgacaatgaaggtctgtcccaaaatacacaaaatggcacttattctaaagaatagacaagattttattctgtgtaccagacaatcacacctttatttgactacaaaacaaataatacatcgactccaggtctgcccttttttttcgtcggcatctaacaagagggaatgggcataataataagtcccaggtttataataggcaagcaattgtgccagcatcaaagcaggcattttgtacatatatagcggtgggggttctcagaagatgaacaccacactgtcatggacccgggacttctggttctgagcgacacattcagagatccacatcaggtttctgatctcttgctcacggagcctgatgtaagcaaagaacacagcatagtggaactgctgctcaaaggacaagcatagcctcttgacttcctcctcataaaatgccttatccaacatctggctttctccgtatgaaatcctggaaaatatagactggtat

SEQ ID NO: 453850 - DNA, 591 bp, Sorghum bicolor
  unsure (1)..(591): unsure at all n locations
gcgcgtccgaatccttcttaatttgaactgctttgctcagtatgccctgtgtggtctaaacctanggtccggcaggtctcaacggcctcctataggtgttggcctcactatttctgttgcaattggggctgcagcattcgctggtctgtacaatatcatcagccctcttgggaaggattatgatacagaacatgcagatatcgatcaagaagcacaaatcgatgttgcctcaactgagagcggcaggccaacttcacgggttaaatcatttgagaggagatactctgtcatccagagtgatgaacgccgttttgtagagagaaggcctcagtgggttggcggactaatggatttctgggaccagatatctattgcgtacttgtcacttttctgcagttgctgtgtctttggctggaatatgcagaggcttggatttggtaacatgtatgtccacatcgcaacgtttctgctcttttgcctggctccattttttatcttcgtcctggcagcttgcaatggttgccaatgattcccttcaagtggcattggtgctgactggacttttcctgtgcttttttggtttactgtatg

SEQ ID NO: 453851 - DNA, 466 bp, Sorghum bicolor
  unsure (1)..(466): unsure at all n locations
cgtccgcactactcgaacccgcagctattggacagtcgctgcccatggctgcggcgccggggaccggccccggttgcctggggtcgccggcgcagtctgcctcgagctcactcgccggggttgaaggcgccccgcggcggctgggcgtatcgaagccgtcgtggatcgtccgcactgagtcaaacgttaggagggagagaccaaaacgacccgatcctccttgcaccatctgcagaggcacagggagaatagactgccgaaactgctttggccgaggtagaacaaaccgcgccgatctggtcatgcttccaaagggcgaatggccacaatggtgtccaatttgcggtggtagaggtctggattactgcctncggtgccatggaacgggtgaatatcgagaacccatgggcttccacttcacttgccagagaaaacgaggttccgcctgtatgctacgatgtgaaaa

SEQ ID NO: 453852 - DNA, 526 bp, Sorghum bicolor
cgtccgagttcgggctggcaaaggacgggcctggagaagacgagacccacgtgtcgacccgagtgatgggcacgcagggctacgccgcgccggagtacatcatgacggggcatctgacgacgaagagcgacgtgtacagcttcggcgtggtgctgctggagctgctgacggggcgcatggcggtggacaagaaccggccgccgcgagagcagagcctggtggagtgggcgcgcccatgcctgcgcgacgctcgccggctggagcgcgtcatggaccggaggctgctgcacccgacgcccactcgagctgcccacaaggccgccggggtagcgcaccagtgcctcagtgtaagccccaaatcacggcctcagatgtccgccgtcgtagaggccctggagtcgctgctcgctctagacgatgccgttgggagccatttgtatacacggcgccggcggcaacagatgaccgcctgacctgacctgtgtggcatctgtattgatgatgctttccgccgtggtgggtattc

SEQ ID NO: 453853 - DNA, 477 bp, Sorghum bicolor
cgtccgcgaggttgatgtgaagcgcctacctaagaggccggcaccgcctcggtttggacggaagttgactgatgcacaaaaggagagagcagcgcacatgtgccttgattgtggattcatatacttcctacccaagccttttgaagaacagcctgatgaatatggatgcccacaatgcaatgcgccaaagaagcgatttgcaaagtatgatgctgccactgggaaggccatcggcggtgcgctgccgcctattgcggtgatcataagttttgtaatcggcatcgccggagtaggggctctgcttgtgtatggcctgcaataggctgctcattcttcagatccaaatttttgctgtgcacaagaagctcagctgactgctgctgtactccatctcacaaaacattctgagtgatatacataaaatcgaaaggaaatatacaatatttgagggtaaaaaaaaaaaaaaaaaaaggcggg

SEQ ID NO: 453854 - DNA, 944 bp, Sorghum bicolor
tccgaattcccggtcgccacgcgtccggaggattaagacactgctggatagaaccagaggacgtggcaaagcgcctgatggactacggatttcactcaccaaccatgtgagggcctgtgcctggcacactgatgattgaaccaactgaaagtgagagcaaggccgagctggacaggttctgtgatgctcttatcttcatcagggaagagatcgcagagatagaaaatggcaaagcagatgtgctcaacaatgtcctgaagggcgctcctcacccaccgcaactcttgatgggtgacacatggagcaagccgtattccagggagtacgctgcgttccccgcggcatggctccggggcgccaagttctggccaacaactggtcgtgtggacaacgtctacggcgaccgcaacctcatctgcacactgcagcaggcgtcccaggtgaccgaggaagccgccgcagctgcaactgcgtaatctcgtcgtgaaaccacgatcggcagtgtgcgaaacagcctcaagaagaaactgtaatgcatgcttcctctcggagggaagcagcatttgctcctcgtcctttctgcaatgtatatacttgctcatggaagctcctgattccccccataaagctgccaccttgtaattctgcacttcattgcttctccattcccatgtaaattaaagatagctttttattgactagaattgaatagcttctcttttccgaacagtcaagtagttgacacggaagtatgtcttgatatgttcatatcaaaactgggagaaatggaggtggttggaaatatgcctcagtcccaataaattggattcagtttggactcaaattagacttcagattgggcctcaaactgattgagacccaatttattgtgtacataaaatggtgggaaaagtctattttgcctctctaggctacctaccccg

SEQ ID NO: 453855 - DNA, 328 bp, Sorghum bicolor
cgtccgcaaggatgaagatacgctgcgtggcgcggtcgagaggatgaagacgaggctcaggaagaaatgaagggcggggaaaattccatgtggcttggtgattgctgaataatctgctactaggtttcaactgctcccggatgcgtgtactaccttttttctagcaatagttatccctgtcagtgacttcatgcctagtgtctttactatttgtctgtgtgtaagcagattgtgatggatcaggatagctgccggtacacttttgtaacctactgagcaatctgtggctgctatgtgttcacccttgtttttcacagccagtccaaaa

SEQ ID NO: 453856 - DNA, 512 bp, Sorghum bicolor
cgtccgagtgggctgaggcttgcaggtcgtttttgttactgtagtctataggtctcaagtctcaactcaacaaatcaactgctattgtacggatgcgggcacagaagtaaacttttccccactcagagacttgcaatccttaaagagattgtggtacttgcagcagttgagctcatatttttagaagttcatgaaaggggagagccacgggctaatgttgctatagcctgcctccttgtgggagccacggggtcatgtaagatgttcatcaagctctcttttggtgcaagactgataatacctgtcgcaaactctgcaattgaacattgttaacaattgtcttgtgcggaccttattaacataatatctggccactgcttagttttgcatcgttggatgttgagacaaactagctggtgtaatttttggctgcaatcttgtattcctcgacatgtattgatccatgaatgaatgaatgaatggaagaccagcgatccctgaaatatatttga

SEQ ID NO: 453857 - DNA, 975 bp, Sorghum bicolor
cgtccgatcgcggagaaccttccgaagcagaagtcagtccggttcgacgacggcgagggctccatctccgaccaggccaagaagctcttcggcggcgggcaggccggtaacaagaagtctatccaccatgtcctgggtggcgggaaatccgccgacgtgctgctgtggcggaacaagaagatctcgtccagcgtgctgggcgtggcgacgctggtgtgggtcttcttcgagtggctggactaccacttcctcaccatcgtctgcttcctgctcgcgctcggcatggccgtccagttcgcctggtccaccttcgccgccgtgctcaacagagggtccccttccagcgtgcctcgcgtgcagctgccggaggagctgttcgccaacgtgggcgcggccgtcggcgcccaggtgaacagggcgctgggcttcctccaggacgtgtcctgcggacgagacctcaagcagttgctcatcgtgatcgccgggttctttgcggcggcgatcgtcggcagcttctgcaacttcttgacagtcatctacatcgggttcgtgtgcgcgcacacgctgccggtgctgtacgagaggtaccaggaccaagtggacgacttcctgtacaacatgctgggcgtggtgcagagccagtaccagaagctggacaccaagggcatcctcaagggtggcgtctccaagttcaggaagaacgagtagctagccagtggcatcccatccattattattcccctcgctgcttcatcaatcatcagcaggagcagggcgagctagtagtgaggtttctctccttcctctgcctgctgcctgctgtgtaatcagtaatctaatctctatgattgcttcagatttcatctccgtctccaaaactaaaccgatcgaactgccatacattctgtacagagaataataaccgtgttgctgctgctatacatatatactacttgtgtaatgatatgacatttt

SEQ ID NO: 453858 - DNA, 529 bp, Sorghum bicolor
caagcactgaaatgtgacggctggtttgatgcagttgctatatctgctgaggttgccgcagaaaagccaaaccctacaatattcttgaaggcttgtgagctgttgggagtgaaacctgaagaagctgtgcatattggtgatgaccgtaggaacgacgtatggggagcaagggatgcaggctgcgatgcctggctttggggcagtgatgtgtactccttcaaggaggttgcagagaggatcggggttgaggtgtagtaagtgttctcctgagccgtaataggagtcatccgagcttgtacatagtgtcaacgccacttaccgggggcgtcttgtacatatttccaagggaaataacaagagcagtttctctctgtgtgcgactatgccaggcattttgtagcaaatactgatgtttatgtatacatttaaatgttcagttaaccacctgttagtttcctgtgttgcggctgtgagctgtagaatacactttgggagacccctacggcacctttcatatttcatctttcgt

SEQ ID NO: 453859 - DNA, 516 bp, Sorghum bicolor
cgtccgcaccgactgcatcctctgtaccatcatcagtggcttcgtgaagaggagaggcctgagaccagccatcagagcatatgacaagctggtctccatagggtgtgagcctgggcaggtcacctacgcatcagtcatcaacgtgtactgccggcttgggcgcagcgacagagcagaggccgtcttctcagagatgatcgagcgaggtttcgacaagtgtgtggtcgcctatggcaacatgatctccatgtatggcaagatcaggagggcgtcggaggccatgaggctgctggccctgatgaagcagaatgggtgcgagcccaatgtcttcgtgtacaacgccctgctcgacatgcacggcaggctggggaactcgaagcaggccgagaagatctggaaggagatgatgcggcgcaaggtcccgcctgaccggatcagttacacggccatcatcctggcgaacaaccgggcaggggagctgaaccggtgcgtggagctgtaccaggagtacaggga

SEQ ID NO: 453860 - DNA, 685 bp, Sorghum bicolor
cgtccgatcggaaaatagtttggtctgttgggatcgtggagaaagttatattgcgatggaggcgtagaggtgctgggttacgtgggtttcggtctacagaaggttcagttgagagcagtagtggtggaacaagtagcagttcaatccaagataagccttctggggatgattatgattttctgcaagaaggacgaaaacagactgaagaacggctccagaaagctcttgcgagagtgaagtccatggctcaatacccggaagcaagagatcagtaccagaggattttgactgtcgtgtcaaaaatgcaggagtctcaggctatgcaaagaaaagatgctggaggagtcagcagagatggacttcatgagtgaattcaaggaattgtgggatgacgatacacctatccctggttatttttagtgtttaaacctaatttgttggatttctctgtagattgcccccaaagtagcgttgctggagcatgacctgacatgcttcgatttggacttagatgtggtatttcttttgccttatgtacagtagaatgttatctacatttgaaggagccttgtatctactgtgtgaaatctgtgtaaagagttgacattagagatcttaccagaatgacttaacggttgtatgtgtacggtgcagtgcagcagttaggaatttgagatttattttt

SEQ ID NO: 453861 - DNA, 343 bp, Sorghum bicolor
gcgtccggccggcgccgcttcccggctcgtcgcggcgcgtgccgctgcctcgggggcgcgcggcgaaggcgacgccgcgactgtgttcttcgatggcggcgcccactacggcgacctggcggcgaacctgctcctgggcctgaccctgctgtggctgccgctgacgctggccgccgtgtcccgcgcgttcatcctgcggtaccgcttcacctcccggcgcgtgacggtggtgtcggggctctccggcgccgaccgcaccgacttcccctactcgtccgtgacgtccgcggtggtcgtgccaagattcatcggcgagtgtggcgacatcgtcatcacgctcaag

SEQ ID NO: 453862 - DNA, 379 bp, Sorghum bicolor
cgtccgcgctgagcgtgaagaggctagtctacaccaacgatcaaggggagatcgtcaaaggagtctgctcaaacttcctgtgtgacctgaagcccggctctgaggtgaagatcacagggccagtgggcaaggagatgctcatgcccaaagaccccaatgcagcagtcatcatgctcgcaacgggtactggtatcgctccgttccgctccttcttgtggaagatgttcttcgaggagcacgaggactacaagtacaccgcccttgcgtggctgttcctgggagtcccgacgagcgacaccctgctgtacatggaggagctggagaagatgaaggagatggcgcctgaaattcgctgacttcgcgtgagcggagcgacgac

SEQ ID NO: 453863 - DNA, 590 bp, Sorghum bicolor
cgtccgcccacgcgtccgtgagcttcttaatatatggaatgaaagagaaaaaagattggctgagacaaggccacagactcttacactgtgtgaagtgcggcaccagaggccccttgctcctttaccgacccctgacaactgcttacttgggaaggtccaggaagggactgctgaatggcacaaaatggcaaatgaagcagccagaactattcctggaagggagaatggtgggaattgtgacataaagaatctaagcagtggctccaaagtttatctaccagtatttgttgaaggagcaaaccttagcactggtgatatgcacttctcccagggcgatggtgaagtttcgttgtgtggagcaattgaaatgagtggattccttgagctcaagtgcgagatcataagaggggggatgaaggaatacttgcccccagttggtccgacaccactacatgtgaaccctatctttgagatcggtcctgttgagccacgtttcttcgaattgttaagtggttgagggcataagtgtcgatgaatctgggcggcagcatttccttgatgcatcagttgcttataagcgtgcagtcctg

SEQ ID NO: 453864 - DNA, 942 bp, Sorghum bicolor
  unsure (1)..(942): unsure at all n locations
acgcgtccaggagcatcaccaccgcaccgcggcagctgagctcggcccccaggattcagaatctccgaggcgcggcgacgggcggtcggcgacatggaggccgcggtgcccagccgtgttgcgctctccgcggcgagccgcctcccgaatcgccacgccgtggcaggagatagatcttttgtttacaagggaagatgccagagtcttgcaattcctatggcgctgtcagcagctgcaccaggcaaagggggtgtgcttgatcggccagtagagaaaactactcctggtcgtcagtctgaatttgatgtgaagaaatcccgcaaaatgtcgcctccataccgtgtcattctgcacaatgacaactacaacaggcgcgagtacgttgtccaggtcctgatgaaagtgatccctgngatgaccgtcgacaacgctgtaaacataatgcaggaggcgcatgtgaatgggctgtcagttgtgattgtctgttcccagtccgaggctgaggagcactgcacgtcgctcaggggcaacggcctccgaagctcaagcgagcctgcgagtggtggctgctgaggttcgagaaatgggtgtaccttgttttgccgcgtatagtttgtaaatacccagcatatcaaagataaactgaaacaggttggttacatgcagttatcgatacaacgaagctgagtatctcttgggtaggtgtaaatcatgcaagcgtaccaacctgtagaagaagaaacatagtattttcggttatgattacgatttactccaaccgttcaagaaagagtcactatgggagtcaagttagtcaaactttctgagtttgactatatttgtagaaaaatattagcattatatctttaaataagtttgttatgaaaatatttttagcgatccatactaagtatataccataaatattatatatatttggtt

SEQ ID NO: 453865 - DNA, 853 bp, Sorghum bicolor
cgtccgggtgcttatgggtggtctaaaacttgcgggcgtcggattcatttctagtattggggctggagttgcttcagatgtcttatatggtgcccgtcagattcttaaaccttctgcaagtatggaagttgcacgcaaaagaactccgatctggaaagcagcaactgtttatagttgcttccttggaacatcagcaaacctgcgatatcaggttatagctggtctgattgagcatcggctaggagaggatctgatgacctactataaccagccacttcttgctagcctggtgtcctttgtttcaaggacagttaactcatactggggaacacagcaatggattgatcttgcacgagctacaggcgtgcaaagtactaagaaagagctgccttctcctgaggtttcaagcgcaactgaaatgccactgctagaatgtggcacgaccgaagtacagaaggtggacgacagcagtaataaccaatcaaatgacttgacatagtcacctcacagtgtcctaatttgttgcggccatacaaacaaaacacagagcagcttccttccatgacacaccaaacatgatacaactgtacaggcatacagacgagatgtcctcttagagccagactgaagctttagccatcgcgtcatgtggagagacaaatctgaaattctgaagagcaaagctttgaagactttcacatcgttatgatcagaaagccattgttacacccctcatggggtgaatacagcttgtacattatcagacgagatcgatcgaagaatttttgaatcctggtacagcattttacacgcgaaatttgatccaaaaccattactggagattgtcatatgg

SEQ ID NO: 453866 - DNA, 640 bp, Sorghum bicolor
gcgcgtgcgcccacgcgtccgcccacgcgtccgtggttatacttctccttctccaacgattggaaaagtgtgaggggaatcacagatgttcgggatgctgtgggcaacacaactaaagctactacaaaaggatttgccatagggtcagcagcactggcttccttcctcctgttcagtgcatacatggatgaagtagcttcttttgctcaattgccattcaaggaggttgacatagcagtcccagagatcttcgttggtggtttattaggctcaatgcttatattcctgttcagtgcatgggcttgctcagcagttggcaaaactgcacaggaagttgttaatgaggtcaggagacaatttattgagaggcctggtattatggactacaaagagaagcctgattatggacgctgtgttgcaattgtggcatctgcatcgttgagagaaatgataaaacctggggctttagcaatcatatcacccatggcttgtggggttgtctttccggatttggggccactacaactgcttagcctcttcttggagctaaagttgtagcctccatgcttatgtttgcaacagttgctgggattctcatggcactcttcttgaacactgcttgtggcgcctgggataatgc

SEQ ID NO: 453867 - DNA, 561 bp, Sorghum bicolor
cgtccggtccctcttcagatggagcttgggggcaaagatgcttgcattgtgttggaggatgcagatctagacttggttgcaggaaatatagtaaagggtggtttctcttacagtggccagaggtgcactgctgtcaaagtagtgctaatcatggaatccatcgcagatgccgtagtacagaaggttaacgccaagttggcgaaactgaaagttggcccacctgaggacgactctgatatcaccccggttgtaacagaatcctcagccaacttcatcgagggtctggtgatggatgcaaaggagaaaggagcaaccttctgccaggaatacaggagagaaggcaaccttatatggccattgctgctggatcatgtccgccctgacatgaggatcgcatgggaggaaccttttgggcccgtcttgcctgtgatcaggatcaactcagttgaggagggcatccaccattgcgaacgctagcaaatttcggcctacagggatgcattttcacaagagacatcaacaaggcaatcctgatcagtgacgcaatggagactggaactg

SEQ ID NO: 453868 - DNA, 371 bp, Sorghum bicolor
gggcgtccgccggccccgtcgcggccaccgagtggtcctccggcctctgcgcctgcttcgacgactgcggcctctgctgcctgacgtgctggtgcccgtgcatcacgttcggtcggatcgcggagatcgtggaccgcggcgcgacgtcgtgcggcgccgcgggcgccatctacacggtgctggcctgcttcacggggtgccagtggatctactcctgcacgtaccgctccaagatgcgcgcgcagctcggcctccccgacgtcggctgctgcgactgctgcgtccacttctgctgcgagccctgcgcgctctgccagcagtacagggagctcaaggcccgcggcttccaccccgacctcggctgggacgtc

SEQ ID NO: 453869 - DNA, 556 bp, Sorghum bicolor
cgtcatcttcaaggtcgacgacctcttcatccggagcttcaagcgctaccgtgatctgccgtaccccggcgggaagcccatgtcggtgcacgccacgctgtgggacggcagctactgggcaacgcagcaggggaaggtgaaggtggactggtccaattcgccgttcgtcgtctcgtaccgaggctacaccgccgacgcctgtgtccccaccggcggcggcgacgtcggcgcgccgctgtcgtgccccgccgggacggaccggtggatgaaccgccagctcgacgccgccgagtggggcaccgtcgcgtgggcaaagaagaactacatgcactacaactactgcgacgatgggtggaggttcccgcagggattccccgccgagtgctcccgaaactgatctgctgctattattgttcttgcttcctgttctcctccttgattcgtgtttgttcttggtcacctctgttcttgattgatgaaccaggatagctccacatgttgccttcccatgtacattttggcaccccatactactagtgttcttgaatctttcgtt

SEQ ID NO: 453870 - DNA, 795 bp, Sorghum bicolor
ggcacgaggcgggaggaggcgcgcccgccgttcccggcggtgaggtggcacaggatcgacggaggaactagggttgcggccgaggacttggctccagcggagcttcggtggctgcgcaggtcgacgacagaccccggcggggcggaagcggcggcggcgcaggcacggtcacggcgacccggccggcggcggaggaaggcgaggcggacacattggtgggattggtcgtggatccgagcaacccctgcaccggaattgccatctacgtgcatcccggaattgccatctacgtgcatcccagcaggggaaggtgtgggctggtccaaatcgccgttcgtcgtctcctaccgagggtacaccgccgacgcctgtgtccccaccggcggcgacgtcggcaccccgctgtcgtgcctcgctgggacggaccggtggatgaaccgccagctcgacgccgccgagtggggcaccgtcgcgtgggccaagaagaactacatgcactacaactactgcgacgatgggtggaggttcccgcagggattccccgccgagtgctcccgaaactgatctgctattattgttcttgcttcctgttccttgattcgtgtttgttcttgaacaggatagctcagatgttgccttcccatgtacattttggcaccccaacggagcttcggtggctgcgcaggtcgacgacagaccccggcggggtggtagccgcggcggcgcaagcacggtcatggcgacccggccggcggcggaggaaggcgaggcgaacacattggtgggattggtcgc

SEQ ID NO: 453871 - DNA, 905 bp, Sorghum bicolor
cgtccgccagaatggagaagcagatcctaatggtacaatatggggagttccatacagatggggcaccatgggcattgcttacaagaaaaacaagttcaaaagacataatctgaagccaatacaggattgggaggatttgtggaggcctgagcttgccggcaggatttcaatggtcgattctcctagagagattattggtgcagttctgaagcatctggggtcatcatataacacagttgatatggaaatagatgtcaatggtggtagagaagcagtcctaaatagctttacacaactacagaagcaggtccaactattcgatagcatgaactatctgaaatcatttaatgttggagatgtatgggttgcagtgggttggagcaacgatgtcatcccttgttgaaaagcaatgtctaatgtcgcagtggttgttccaagtcaggcagcagcatatgggctgatctatgggcaataccatgcgcgacaagatttcagactgaccaaatcggtagccgaaccagaggcccatctccactgatccaccagtggttcgacttctgcctgcagagtgctaggagcctacccttccgccaagacgtcatccccggagcatccccgctgtacctcgagaaccctgtgccagaggtccctcaagataagaacaagaggaagccgaagctggagacgaaccttgtcaggggagtgcctccgcccgagatcctggagagatgcgagtttttggagcccctgtcaggtaaggcgctggaggattaccagtggctgatgtctaaggtgcagagacctcgacttggtttttttgggaacgtgttgcaaaagatgtcagctgtactagacttcaaaagaagattttagagccactgtactgtacttgaccaagggttttt

SEQ ID NO: 453872 - DNA, 491 bp, Sorghum bicolor
tttttggtaccaacgaacaaggcagagtgttcttgatctcatcgtctccctacgttttttcttttgtctgtacagtttttatcagcagcacatcacaaccacaccccaccctgacaagtgacaacgacgcatataccgaaaaattcgttcgcagacaagacacttgattacacacagacagcttcttccgttccacttgcgcgagttgcacggaggagcaacagcggcatccggagcggagctcgtccggatcccaatccaattgctcccgagcttatcgcattccatccgctggagctgtcaccgggatgcgcgcgcgcgcgcgcccccgtcgcattcgtgcaccgcgcaagtgccgcgcagctccttgtcccgtacgagccttggctggcgcatcatccgtcgcggcacgcctcattgcctcgccgcggtgcccggtggctggctggctggctctgaccgatcggcgcagggctagatgacgagctgct

SEQ ID NO: 453873 - DNA, 557 bp, Sorghum bicolor
cgtccgctcaaaagtctcactggattggcaagaactacttcaaaagaggacttgctggaagtgacagtcacagaacgaatgtaccacacatcagggttcaatttagagaaatgatctggagaaatgaaatgaaactagtttactctcgcagtgagatcttgataccagacgacctggatctctaagatgtcccgcctcatgtataacctgtagtggcaatgggaattatacttcatgttttgttgctggaagtcagcatgagaagcgatgtgatcaagagtgtctccaaaccctattgaggaaaacctccagaaatgccccaagcacgccaagggatgcaataatgtggcaaagtgaagcaccagacatttgtgctagagttgcattatagcattatagggtgtcccctgtcccccctcgtttgtaagcatgtactctaagtggttgtactctagttggatcctatatggtgagaataaagtgctgccggttgttttgctgcccacatgaaaatggaatcgaaccatatgaggaggcaattagataattaagtaaag

SEQ ID NO: 453874 - DNA, 502 bp, Sorghum bicolor
cgtccgccgctgcgtcgcgagctcgccgccatggctcttcccctcgcccgcctcgtccggacccggggtccccgcctgccagtgccagccacggccccccctgcgcttcccgaagcaccacgtctccttcgccgcccctgccagttctcgcgccgccttcgctgcctgcgcggcggctagtgcgccggcggccccagctgcccaagcgccggaggcggagacggtcgagcaagtgggcccgaggacacgcctcgtcgcgcagaacatcccgtgggactccacggccgacgaaatgcgcgcgctcttccagacccacggctcagtcgtcggcgtcgagctttcaatgtacagtgccagtaaaaacagaggattggcgtttgtaaccatgggttcagaagaggatgctcttgcagctctcacccatctcaattcaactattttaaatgatagaaaaattaaggtggactttgcaagacctagaaagaagcaacctaagcaacct

SEQ ID NO: 453875 - DNA, 542 bp, Sorghum bicolor
  unsure (1)..(542): unsure at all n locations
agcgagcgatggtggaggcaaagcgcggtgaggaggtcctgaaggccgaggagatggctgccaaataccgggccaccgggcacgctcctaagaagctcatcgggtgcttcgggcccggggaaacattccaagtcacacccgagcaggaagtgaaaaacgtcaaccagtgattgcttggtcctcgcgctctagcaagtgtgtagtgtgtcttcgaaagtgtgtaaagcctactgctgctctgtatataccagatgttgcttccaagacaggcgtttggtgggtgtacatgttgaatgcttgacgagaaacattcttatttgtagttaaggggtcacactgttgttgttgctgttgttgttgacatttaagcagacattttgttcttcgcctgctgttattgtttttgtccctgtctctttgttccttactgctgatttcagtttgtctnnnnnnnnnnnnnnnnnnnnnnnnnnnnnnnnnnnnnnnnnnnnnnnnnnnnnnnnnnnnnnnnnnnnnnnnnnnnnnnnnnnnnnnnnnnnnnn

SEQ ID NO: 453876 - DNA, 596 bp, Sorghum bicolor
cgtccgcggagagcctctagaaaccacgcgacgccaccgaccaccatggcagccgcgctcctcctctcgccgcggctcgtgtcgctccctcctgacccgagcctcgcccccggcttcaccttcatcaagagaccaacgtcttaccccctcggcccgcccgcggcgcgagggctccgggcccgtcggggaccggccccggcgcggggctgacctccgaccagaccacggtctacaacggcgcctacgggccctggaccgtggatgactccgacgtccgcgaggtgctgctgtaccggtcggggctggtgacggcggcggcgtccttcgtggccgcggcctccgcggcgctcctgctcggagggcaacctccgcctccggcgccggcgccgccgacctcctgtacgccgtcggcgcctcggggctgggcctgtccctgctcctcatccacatctacgtcaccccgatcaagcgcttcctccaggcgctgtgggcccgtcggggtgctcggctccctcgggacctacctcgtcgccgcccgcccgctggacgagggcctcgtgcagtacgtgttggaccaccccgccgcgctctggttc

SEQ ID NO: 453877 - DNA, 703 bp, Sorghum bicolor
aggattcaaataatcaaataaaataaagataggcgggtaataaccttatttatgacaagtttcaaattggtaaagtatacccctaggataaagaagaagaaggggctgagaaaactcgcaagaaaagttccaaccgatcgtctacttaaattcgaacgggttttcaaagcacaaaaacgcatacatatgtctgttttcaaagcacaaagagttctagatgagattcgctggcgttactacgaggaaaccgttatgatactgaatctcatgccttatcgagcatcgtatcccatcttaaagttggtttattcggcagcagcaaatgctactcattatagggatttcgacaaaacgaatttattcatcactaaagccgaagtccgcgcgtccgctattatgaaaaaattcagacctcgagctcgaggacgtagttattctataaaaaaaaccatgtgtaatataacaattgtactaaatatagtaaagaaatctaaataatctttagatcaatctaaaatttcgattcccagtaaaaaaaagaaatataatagaaaaatatgggacaaaaaataaatccactcggtttcagacttggtacaacccaaaatcaccattccttttggttcgcacaaccaaaaaattattctgaaggtctacaggaagataaaaaaatacggaattgtatcaagaactatatacaaaa

SEQ ID NO: 453878 - DNA, 407 bp, Sorghum bicolor
  unsure (1)..(407): unsure at all n locations
attccgggccgaccaggcgtccgattacatatcaagggaaaagagtggaatacggccaccaaggtgttggcgttgtgtcgcaggagctgtgcacttcactgacgagtcttcagatgggtcaaaccgaggactggatgggctggactgtgcaactgaattaattgcccgtggatcattaccaacagatgagttcgcaagatcctcatctaagacgatcccaatcatgtgtacctcttcagttacagttttgtagtgtctaatgcgatggcgtcctgctgtatatttcgtagatagtctatttataaaccataaaacagtcatcgtctgtacccttcagttttgtagcatctgccggagacgagtactagtttggttattttctttcttttctgnccccannanannaa

SEQ ID NO: 453879 - DNA, 482 bp, Sorghum bicolor
ccggaatcccggtcggcccggcgtccggcgagccatcggcgtgtgctacggcgtgataggcagcggcctcccttccaagagcgacgtggtgcggctctacaagtccaacggcatcaccagcatgcgcttctacttcgccgacaaggacctcctcaccgcgctgcgcggctcaagcatctccctcgccctcgacgtcggcaacgacaaggtcggcgagctcgcctccgactccgccgccgccgcgtcctgggtccgggacaacgtgcaggcctactacccggacgtggacatcaggtacgtcgtggtcgggaacgaggtccccggcgccgcgtcggtgctccaggccatgcagaacgtgcacgccgcgctcgcgtccgccggcctcgccggcaacgtccgggtgtccacggcggtgaagatggacgcgatcgagaattcctcgccgccgtccagcggcgtgttcaaggaccccgccgcgatgt

SEQ ID NO: 453880 - DNA, 533 bp, Sorghum bicolor
gcgcgtgcggaaacctcggcgaggtggcggcgaggatggacatcgaggtgaacgactaccctggatccggggccggcaacctccatgaacctaggagcccttggagaccatgaactttgcttgacgccccgtcatatatatcatccctgcgtacgtctcacagaagaacgaagagcatggcatggagtcttgagagttttataattaagctactaagtacgtagcatgcagcaggagtacattgttagctataaattctactagagcttattaacgagtcttgtcgtgtatacttaattacgtagcttagtacttgtatacgtcgatcgtatcgtggggtgtggtacggccggtggtgctgaggccgtctaagctagctgcatagtattttgttagggccttcaacaacgcactgtcagaagatcaagtgaacgagctggccgtgctagctgttccgtgtatagccagcggcagtcttgttcgtttgagcttatcagccgaatctgctagttatttagtagtatttttctctc

SEQ ID NO: 453881 - DNA, 487 bp, Sorghum bicolor
ggcacgaggcccgttcgcatcttctccctcttgccggtcccgaataaagagcagcagcgcaagaggttaatttatcgcccgaggagaaggaagcaatggcggctgagagcttcctcttcacctcggagtccgtgaacgaggggcaccccgacaagctgtgcgaccaggtgtcggacgccgtgctcgacgcctgcctcgcgcaggaccccgacagcaaggtggcgtgcgagacctgcaccaagaccaacatggtgatggtgttcggcgagatcaccaccaaggccaccgtggactacgagaagatcgtccgggacacctgccgcgagatcggcttcgtctccgacgacgtgggcctcgacgcggaccgctgcaaggtgctggtcaacatcgagcagcagtcccccgacatcgcgcagggcgtgcacgggcacttcaccaagcggcccgaggagatcggcgccggcgaccagggccacatgttcgggta

SEQ ID NO: 453882 - DNA, 910 bp, Sorghum bicolor
gcgcgtccgcccacgcgtccgaccttttcaagcttgcatctgtggctcaactaagttttaacagagtcttggacatactagaaaaaacatttggaaggcagaagagagtaggtgttccacaaggagctatgggttggcaaggacccccacaaagccctggttcttacattgtcaagaagattttgcggttggaagtaccgacagaaacataccctaatttcaattttatcggccgtcttcttggaccaagaggaaactctttaaagaggattgaagcctctacaggctgtcgtgttttcatcagagggaagggctcaattaaagattctggcaaggaggaacaactcaagggaagaactggctatgaacacttgagcgaacccctccatatcttgattgaagctgagttacccgctaatgtgattgatgcaagacttgcaaaggcccaggagatcctcgaagagttgttgaaaccagtggatgaatcacaagactactacaagagacagcaactccgagaacttgcaatgttgaattcgccactccgagaggagagtccacatccaggtggtgctcctcctagtcccttcagtaatggcggcatgaaaagagtgaaacaatgacaccgcggaggctcgttcctccatcttgactctccagcaaccccaatcgtccatgccttcacaccctatttttccatgagcaagctttcatgacggtgttgatagtgtgtgacatcctttactgtactagcaggtgaattttgatctctcatcccatgtgacattaaccttgagtgacagatgactatgcgtagtgtatcctctatggctgtataattagaacatttgatttatttgttactggtaatgctgagatatagtactgtgcagaattctgagtttcagtg

SEQ ID NO: 453883 - DNA, 809 bp, Sorghum bicolor
  unsure (1)..(809): unsure at all n locations
aattcccggtcggccgcgcgtccgcggacccctgggaatcatcaaagtggtcaaatatctgaacaaaagccagcaaatactatctggtctggcaattaccatgtgtgggttaantaacttttaccacnatnattgctttagttgctggggactattggattaagtggcacagcctgacctattgagcttgtcccatacctgcagcattcccgtagtattaaatttcttttgagaatggtgatctttgaagcatgacaaccgctgctgttaggtttgggagtgccaccatcttctgggctaaagtgtgagtggaagatgattgatctgtcggcagtttgatggggatgaattatgaggtctttaatgctgacacaaagggttaatgaaacaaactcgaatccagtgattgtaggcacactgcacggaccatatgattcatctctcattggacatatagctaccacaaaaatggggtgagtggatagttgctgccgcaactagaaggccaattcagtttggatgtcagttgtcagttcggctatgccatctaagaataaaagtttgaggaccaacgagcatgttgccaagtcatttctcaagtataaattactgcctctagttatcttgatacttcccttctggaaacagtgtcggttgctgttgcacttgtggctgttgcgctgttgcaagtcacgattaaattcttggaacagtttgtcatggtttgtttggctcctatatgttattaatctggaactgtatgaactatggaccaaccctcagtgttacatacaacgtctggtttgctg

SEQ ID NO: 453884 - DNA, 836 bp, Sorghum bicolor
cgtccgagacagcaggcctaatatctatagtcaaggatgtctgaataactttctagaagtctgctggagcaagacaaaaccttctaaacacaagtttcgggcatatgcacaagaggaagtgcgacctccaacagttagctttggtagggatgttgaagatgaaccagttggcggtcctcggtcgaaagttgaagatgatcttgaaattggtagtgatcttctgaagatctctcagcggcgcaattatgaggatgttaatgtagaagtgggaggtcctcacaggctcagcagtgagatggaaggcatagccaatgccaaacttgtggcatgttcagaatcacagatccctgcagttgggagcgacgtaagggtgcgacactcaagctgggatcggagaagtgggaactgggacatgtcatcagatgtacttacaagaagcgcatcagatgtaattgaacgtagcgtggttgccacggaggctgcacatccaatctctagcagagactcactagtggaattgtttgtgcattcagaacaatgtgtgtgcagtttggattgcaaggccatttaagttaactcatgttggctcacccagacagcaaggaagaaaacgcctgtcatgcattttgactttgactgccttgattgggttttctttccgacccttgtcaattggcatgtatgagcaactatttagtcaaagaattagccccattgtgccattatattcgtgtgtttgtgccatagtctcaatctgacgctgtgttgcgtatggtcctgtctgtaaattgcaagtgcaggattctcaatttctcatccacattgtaattcttctt

SEQ ID NO: 453885 - DNA, 520 bp, Sorghum bicolor
cgtccgatagagcctccctgtaccaggatctggtggcaaaacttgctcccagatatttgagggggctggttgtgatacaccagcaagtcctagctgtggggcttggtggggtggtcctcgtgatacatatgcacggatgaatgaacctatggtctgcgtgtccacttacgaacaggcaacttcccgggcagcgatggggcacaaggcaagggcagatctacctggcgtctccctacactgcagctgcctcagccctgacggggtatgttacggaccccagggacttcctcatgtaattttgaaacaacagagttcatgatgtaacagattgcctgtagcctctgtttttcgtgttgaaccttagtttaggcgtgtctttcgttgaggaataagctgcatgtcgggaggttggcatgtatgggtttgcattattacagtgtactaccaattaagaacatacttgagtgttacaagggaaatacattcttctgagtattgatggcaggtcctagactaaaaa

SEQ ID NO: 453886 - DNA, 611 bp, Sorghum bicolor
cgtccgcccacgcgtccggtcgtcgccgcgtcggtgtcgctcgctcgctcgccatatcccctgtccccccggctcctccctccggcccccgactccggtgatccgcccacctgaaccctactccacgtcgcctcgcctcgcctcgcctcgccggttgggttggggctgagcggatctgatccgatcggggcgggtccttgcgccgtcgctgcgtgagctcatctcggtcgtccgcctgctcggctcgatcggccggggacggcggcggccagatctgcgatggagggcaacaaggacgacgcggccaagtgcctgcgcatcggtaagggcgctctcgacgccggcgaccgcgcgcgcgctatcaagttcctgtccaaggcaaagcgcctcgacccctcgctgcccatcgacgacctgctcacctcccttctcagtcccgaagatgactccccggcttcctcgtcatcatctcagccggccgcctccggcaccggaaactgccacagcaggggcatcggaggcagctgagcctgatgggctgagagagaggaagcacaagggaaaaaagagggaggaggaggaggaggccactcctgctgccagggagtaca

SEQ ID NO: 453887 - DNA, 707 bp, Sorghum bicolor
cgtccgcccacgcgtccgcccacacttccgcccacgcgtgcgctacttgtaccattcttctgccgaggcaagtttggggtgggagcggacactcatgccatgcactatctaaatgctgcttttctacttatagacacagtgcttaacaatatgcctctggcctgatatcgaatgggtttctctgttttctggagctgcgcctatgtaacattccatggggtccttcatgctagtggagacttaacctgggggccggacccatttttcaacctttcataatgtagagctcctctatagtacctgaacatggtcatccctcatatccccggcttctttctgtattggcttattgtcaaggcgaagcacacttatttcccacggatgtttccacatgcttatgttaggacaatatagatccatttatctaaccacgggtcaggataagcctgtataaatatcggtagcatactatttcgacacctgctaggctcaagtgtgcacctgtatagtctcgtgaattcacagcccctttgagatgggtttgagccctgagcacacgccaggactgccatattgttcaatgaatcgcagaggttcactgtcaccctggaaacacggtcttgtgctctgtgtgttcttccttcgcttgaacttgaagtatatatatcatgcacattggaagcatgcccatggtttccctttccctt

SEQ ID NO: 453888 - DNA, 416 bp, Sorghum bicolor
ggaacgacatcgcggcggcggaggcggcgagctacatgttcatcgacggcttggcaggagccggtcccggtggtcatcccgcaaccgcagaggtgggcgcggagccgccttcgtcgccgacgtgggagtactgctcggattactcgctctggaggatcgacgacaacgagtactacaagaagatgctcgactcctcctgatttcatcaggagccatctatatatgcatatcgatcattagcttatttgttttctgctggttagtctagcagctatatgaattcaaaacgttcgcctttaatattttcgttgcatctgttcgtatgttatatgtaataatatactaagtacatatatgtatttgcatctgcatactgtaactacatagtatatatctacacgtagtgacgtactttg

SEQ ID NO: 453889 - DNA, 629 bp, Sorghum bicolor
  unsure (1)..(629): unsure at all n locations
cgtccggagacaggcatacagatgctggacatgggcttgtttcctgattacctggatagagctgctgtactgactgcactgcnnangaacatgcgaggaaggtggcaacctagaatcggactggaagctctcaagcaactatctaaagatctgattggaccttgtattgtgtatctctatgtccgcaaatttaaattgtggatggcgcacatgctttagagttctgatgaaccctttgtcatatatccatccactcatggcaggtacaaaatgtgggtggttcaaatgcttgtccctgatgaaagcctcatttccggtgaaccggttggtacatagtatggttccttgtatatttttgaccgaaatagagctctcgactggcttgttgttgtaagcaggactattggagtcctgctgaagagtccatatggtacatgtaaggtttctgtgttactgttaccatatgcagttgctgttgaaagctgtgggttactgcggcctgtaggggatcggcaaaatggaaacttgtaatgtacagttctattatataaatatgtccatacgctaagttcttctggaactgcacttgtaaagttgtaccgagattatatggtacatctctcttttcc

SEQ ID NO: 453890 - DNA, 554 bp, Sorghum bicolor
gcgcgtccggtgttttaagtctgtccaattctctagatagccaatgttatctgttacaatagtctgattagtttgatgtctttaaaatctcgtgcgttttaagttttatacaaggttaccagcaatactatctgttcccctactctgatgcacacttacctggctagccagtgtttgtatgtgtaatcctttagttgatttttagttactttaagttgatgctgagtggctgtagtttgattattatcgagctgctatcagttgatctctgtgctagctaatctgcatattcttttctaaatgttgactgtagtctgtatgcataccacttctccacacctgccctgtcaacctatttgtgaagattttgtatgtctgccaattgccttactgatagattcaaattaggcttcatctttgtgttatgactagtctttgcaggtgtggataacagttggcacaagcgctctataatagtgatattactcatatctttatggtgctgttcagttatcatttggtctgccaatttgtaaaggatatacctgttgatc

SEQ ID NO: 453891 - DNA, 984 bp, Sorghum bicolor
cgtccgccgacgcgtgcgactttgcgagacttctggctggaccagtggacttcggtggcaggcctctggttcttcgacactcggacaagagagcagttgtggtgcatgctactattgaagaaatcgaagcggacaaatccctcattgaagaccaagctaaagaaaagatggagaaggcaattgaaacagtccaaactaacttcaacactgtgaggacagggcgtgcaaacccagcgatgcttgaccgaattgaggttgagtactactgaactccagtgaacttgaagagcattgcgcagataagcactccagatgcaacttctcttcttatccaaccatatgacaagtcaagcctcaagcttattgagaaaacgatagttgctgcaaatcttggtgtgacaccaagcaatgacggagaagtgatacgagtgactgtcccacctttgacatctgatcgtagaaaggaattagcaaagacagtagctaaattatctgaagatggcaaggttgctttaaggaacataagaagagatgcaatcaaagcttatgataaactacagaaggaaaagaagctttctgaggataatgtgaaagatttatcagctgatctacaaaaagtcacagatgagtacatgaaaaagatcgattccatccagaagcagaaggaacaggaactgatgaaaatttagatctcaagctgactgtatgactgcttggcgctgtgccggggatgcacgttttgagtcaggtgctttgctgcaaccattggatgcacacaagttgagacaataccgctgtgtgtgcttctcgtttttgtaatgctcgtaaataggctctcgtcaccgtgttgtcggacttgctagtgctacattgtcaatgtttctcaccatctgaatcgaatgtctgaattgtttctgaacgtctgttgtcaaaactctgccgaggttcaaagcaattttgcaggtcaaaactctgctgaggctc

SEQ ID NO: 453892 - DNA, 757 bp, Sorghum bicolor
  unsure (1)..(757): unsure at all n locations
cgtccgctggtctatcactgagatcatcagatactctttctttggaatgaaggaggcatttggcttggcaccttcctggttattatggcttangtacagcacctttatgttgttgtatcctactggtatctctagtgaagttggtctgatctacattgccttgccttacatgaaggcatcggagaaatactgtcttaggatgcccaacaaatggaacttttcatacgattacttctattcgtctattcttgccctcctgatttatgttccaggaagcccgcacatgtaccgttacatgctctcacagaggaagaaggcactatcaaaggccaaagcggcttaatgctgctcaagggctctgtagatggtttgtgtgatgtcgaaatgtgcctcacggctcaagttttcgacatttccggtagaatctagtgattggggatattattagaatggagctcttcatatgaactgccccaatcatttcagctatcagccgttgcatggttaaattgtaatttgttccgaatcgccctcaattgggcgagtttccatgttgattatatggcaatgtgtttcacatccttctctcatctggtactgtgttctcttatttgtagcaaataatgtatgattgttgtgctggaatcatttcagctatcggctgttgcatggttaaattgtaatttgctccgaccgacccccaattgggtgaatttccatgttgattatatggcaatatgtttcgcatccttctctc

SEQ ID NO: 453893 - DNA, 725 bp, Sorghum bicolor
  unsure (1)..(725): unsure at all n locations
cgtccgcggacgcgtgggcggacgcgtgggttctgaagcagatgctgcagctcggattaanagggctgctgaaaaattgcacactgttgacaaagaaaaggaggagcttctagctctggtcagtgttctccaatcacaagtccagagagagcagagcagcacaaagcaagtatgtgaggagaggtctgaatcatgttcaggcgctgacaattcgcctcccttaacaaagcatgttgatgcatcggatgatgatgtggacaaagcctgcgtaagtgactctagatcagtgttggtttcgagcgatagcactgaggtccagctggctgtggatggggtggacatccgtcctgttggcgatgctgagtggggtggcttccagcagtcagaagctctgatcgctgatgttcgcgaggtctccccagaggcagatggtgccagctcggatatttcccgtggtcaaccccccaccagtcagtgatcatattcagggaggcgcaacccatccctgaatggcctgttgaggttgcttgctggcctgcccctaccttccgagattcatgtgattgatagagaaaccgatatagggatgtctaaatctggagagaattgccgttgagggtgtattgcatcaatgcggattgtatgtcctttgtatttaagtatacgactgaataaacagatagtagctgtgtttggctgtgggattgtaaattattcgcctcgtt

SEQ ID NO: 453894 - DNA, 900 bp, Sorghum bicolor
  unsure (1)..(900): unsure at all n locations
cgtgcgacacgatttgccgaattgcatgacacctctgctagaatggctgccaaaggtgtnatcctagggttgggggttgggaagagtctcgggccttcttctacaggagattgcgaaggagagttgctgaggatgccctggccaaggaagttaaagaagctgctggtgagcagctttcccacagatcagcactagactctatcaagaaatggtatctagtgtccaaaggaactgaaggtggtagtgaaatgtggaatgatgatgaatctttctttgcttggaaggatgattccaagaactatgaaaattatctcgaggagttgaaggctgaaagagtatcgaactggttctcgcatcttgctgaaagttccaacgtgaaagctctgccaaacggtctttcactcctccttaacaagatgaatcctctgaagagggagcaggtcattgatggcctcaggcagcttcttggttgatcgatggtggtatcgcattccaaccggaaaatgtcctcactttttgcacataaactatgtgttcttgcaagatcgaagtggagcatgaagccctgcttagttgggaacgaattgttgtttgtagtcatgtatttagctgtttatcctgtaattagttggatgtcgtttctcgatgtcatatgatacatcagcaatcctgatcaagtaattatttacttttcaatccaaataatacatgattttcatcagtacgctttgtgcttgtaatatactctctcatttcaaattataagacgtttgaggtttcctagatacattacctttactatgcttagacatagtagatatctaagttcatagtaaaaaaactatgtatttagaaaagctaaaatgtcttataatttaaaattattagaccatgtattgt

SEQ ID NO: 453895 - DNA, 481 bp, Sorghum bicolor
gcgacgcgtccgacaaatgaaagtattacgtcaagataggaacactgtttgctttattgaatttgaggatgtgggggctgctacatctgtacaccaaactctgcagggtgctgttattcctagttctggtcgtggtggaatgcgaattcagttttctaagaatccctttgggcgaaggaaggattcagctggtggccttgcgagcgttctgaatggagctcctgtgaactgattgcagcctgaggggggatgtatcttgaactttagcatgtcatcatggatttcatactaccacatctaatttatgatctgcatacttctgctgaatgcgctctctctcatgtgacatcttcatttgatggagcatctgggacatgatcatcatctatcatcatctttattaggtggaggttctggggcatgatcatcatctggtagacattgcattgtcaccaaaacatgctggtggtactttttttta

SEQ ID NO: 453896 - DNA, 198 bp, Sorghum bicolor
gccgacacgtaacaatatttgcagaaaaaataatagaaacatagtatacttgcttccattgagattattgcaatggtccaacacaacattcggaatcatccaatttctacaaaatgtccaacctaaacaattctgatgaaatacttgtatcgaaatggttgcattttttgtggcagttgttctcccaggatacagtgg

SEQ ID NO: 453897 - DNA, 537 bp, Sorghum bicolor
cgtccgcccacgcgtccgggaggagcgaacagcacgactcgatgggccactccaacttctgggactgggagcccaagaactacgggcccggctcccgcgtctgccgggtctgtgcgaatcctcatggtctgatcaggaagtacgggctcatgtgctgcaggcagtgcttccgcagcaacgccaaggacattggcttcatcaagtaccgttgaagaatctactctgtgtagtggagaacttcctggatcaaagaaatggatgcttcattagaaggcctaaattatgtgcttaagcattttgttcagaacttgagactcatgtgctagtaaacttgttaaaatttttgatgggtaccatgtgcctgttggaccatctgtaatcagaagattgaaatattttgttacgcttgatatttggtgttcttatcttgtccgtattggttcttacatgtgttattggtgtcaaagatgaatgatggctattacactcaaggatattgaagtgtgaatgtaataacttctggtttgtttggctggt

SEQ ID NO: 453898 - DNA, 626 bp, Sorghum bicolor
  unsure (1)..(626): unsure at all n locations
cgtgcgctaaatcataactctnatccaattcataacattagcaataaccttgaagctaaacttttgggggactgggaaatctaactagataaccaccacaatactgatcaaaggatcactgatgatggaaatatgactgaatcaggggacacaacaaactctgatgctaatcggagggctggtttgaaaagaagacacagattggttattgatgatgacgatgaggatgactaacttttcaggaccagagttattaccaaagaatgtgttaccaaatcaaatgtgggataaaaaaaagctgtttcaggatgatctgcttctatttccctcgcactgctgagctccaagcagggttcaggatgaccacctgtctgtttcacacttcccagtgccagatgttcttcacagaaacttcattctgacctgcagtttcatttgtactagttggttgggtcacaatcaaatggaattttgcatatgcaaagttcaggctgtagagctgtcatgtgtggcctcttgtacagagtccttttagggggtgttctgatgataatttcgagtactgttagttgtaattgaaactaccagcactgcaactctagcaaatgtaatccgtagttgagggc

SEQ ID NO: 453899 - DNA, 565 bp, Sorghum bicolor
  unsure (1)..(565): unsure at all n locations
cgtccggaaaccacccaaaatcacccctgtttccgcccagaaaccgcggcccgcaccgnatatgtccgttcctctcctttccccggctcttccatccgcacggcccaagcgaatcaactccaggcgagggaaaaagggagacaagagcagagatcgaggtcaggatcgaagctgagcttgacaagaggatgagcaccgtggcagccatggcgtcgtcgtcgctgaacccgaacgcgccgctcttcatcccggcggcgtacaggcaggtggaggacttctcgcccgagtggtgggagctcgtcaagaccaccgcttggttccgcgaccactggttccgccagcaccagctccacgaggccgcctacgacgccgcctttgccgccgacgcagcggacgacttcgacgtccccgcgcttctccccgatgactccgtcgacctcctcgacatggtcgacaccgacgacctcttctacgcgcccgacgtccaccaccaccaggccgccaagccggcgccggcgcccgggtacgacctcgacgtgctcagggcgctcagcgtcagctcccc

SEQ ID NO: 453900 - DNA, 671 bp, Sorghum bicolor
cgtccgcccacgcgtccgcagaaattcaaaggttggcagcacacaaggaggtaatatatcaaacactgagaggtggatactaccagctgcgatcaggtgtgcttgatttcttgaacacccttgtgggtttggacattccaatagcaattgcaactcctcactcaaggaagagtctcgaagaagggattaaaactgttggtctgcaaggctactttgatgctataattgcattggaggacttctgcctagggaaacctgatggtgagatgtttgaggtcccggcagagcaacttggtctggagccagatgtttgtgttgtgtttggtaactcaaacttgacgacggaatctgcacataacgctgggatgaggtgtgtggcagttgcaggccgacaccctgcctatgagccccaagcagcaaaccatgttgtgagatggcttgaccaactctctattgttgacttgcagaggcttgctaatggtgaagttattggtcgcaggggtagagaatctgacatggatatggaaattgtgattgaggaatgatgcttctgcaaacatgacgtaccaaatatatcgttgtacttataatctgatgtagcgtaagtactgcattacattttgtaaacaggccaagcagggcaagatcaggactaatgatagtcctaagtt

SEQ ID NO: 453901 - DNA, 519 bp, Sorghum bicolor
cgtccgctcagctacttgcaacattcaataactacaaggatcagtttggtcatgcaatcaagaggggggtgaaagctgaccccaaggatgagttcctttcaacactgcgagcgatcatccggtgcttcacctgccctgacagatacttcgagaaagtcattcgactggctcttggaggcgtgggcacagatgaggatgctctcaccagggtcataactactcgcgccgaggtcgacctgaagctaataggggaagcttaccagaagaggaacagtgtgccgctggaccgtgctgttgctaaagatacaactagagattatgaggatattctccttgccctcctaggggcggagtgaggaggcgtgcctcaactccatcccatctgctcctccttgtttgatgggaacaaaaaactgcatcgatgtggtatacacgtggttgtgtttttgaacaataataagtttgtaacctagcctgcattagcagcgcccgttaaataaaaaaaaaaaccctcttgat

SEQ ID NO: 453902 - DNA, 327 bp, Sorghum bicolor
ctcaaacacttgatgactttaacaatgacccttcacattgggatcggcagattaaggatgggatggctaggggttcgtcatgggacatgaagtgctataaccttcacggggatgcttattcctctataaggaagctgtgaactgggcatgctagagaagcacgccccaggttaagggtaccatttttttttttgcatataattagattaacatttaatttcttagatgaacatttaatcaagctaaaggtcagtaaataaacaaatggtatgtacagctgctttggatttcacaatattctccaatttactgtggtagttagtgtgc

SEQ ID NO: 453903 - DNA, 363 bp, Sorghum bicolor
ggcacgaggcggcaagctatcgccgagtcaccgacacagcatggaacccacgccagcggcgccgcgcgtccacctccagtcgccgcaaactgccgtgccgacgcgggcggtcgagccagggtgtacgcgccacatcgccgtggcctcgcccccgctcccggcggccgcgctgcagcggcgcactcgcgtggtgctctactaccgcgtggacggggcctcggcgtcggcgcggctgtgggaggaggcgatgtggacgaaggagtcgctgagcgaggccgtagccgaccacccggagatggccggtcggctccggcgccacgcggacgggtcgtgggaggtgaagctgaacgacgccggcgtgag

SEQ ID NO: 453904 - DNA, 446 bp, Sorghum bicolor
ggcacgaggagagaattcaagaagcagggtatgcaccaaacacaggctctgttcttcatgatttggatgtagaagagagagaatccatgttgcgcatccatagtgaaaagcttgctgttgcgtttgccctgatgaactctgtacaagggtcagtaatccatgtcataaagaatctccgggtctgcactgattgccatgcagcaataaagattattacaaagcttactggacgggagattattgttagagacataaagcgctttcatcatttcaaggatgggttatgctcatgtggggattattggtgacattatgcaaagaaacttagtttgtgattccatattggtaggcatcagaatatcacatattgagagactctcagtgcatctgtccagcacacaggccaatacatcagtgatataatttataacttttcatcctgatta

SEQ ID NO: 453905 - DNA, 475 bp, Sorghum bicolor
ggtttggaaggtaggcttattgtagtacttttggttttatttgacaattattatttaattatagactaactaggtttaaaaaattcatctcgcaaattacaggtaaattgtgcaattagttatcttttttatctatattcagtgtttcatgcatgtgccgcaagattcgatgtgacgaaaaatcttgaaaagatttggaaactaaacaacgccgtagttttccgctgcctccggttttccctgaaagccacttttccgctgcctccagtttgcgggaaatataatcaggaacaactgaacataaatcatacatacaacaatgctcgaaacaccatatcaatcactactcaccgtaatttggtcaagcctatttatttgagcttatcagccaaatctatcgtcattcaataatgtttttctctcacaacaatcattgatttttgtcatgacttatcagtcaaaaaaactgtggaga

SEQ ID NO: 453906 - DNA, 489 bp, Sorghum bicolor
ggcacgaggctttcccggcacggggagcgacctccgccgccgccgccatgccgaagcactaccgccctgcgggtaagaagaaggaggggaatgcggcaaagtacatcacgaggaccaaggcggtcaactacctgcaagttagcctcgcaatcttcaggaagctatgcattctaaagggtgtctttccgcggcagccaaagaagaaggtggaagggaaccacaagacctactaccacacgaaggatattgcattccttgctcatgaccctttgatcgagaagttcagggagattaaggtccatcgaaggaaggttaaaaaggctgttgctaagaaaaacagggatctcgcagacaggctgttgaatcggccaccaacttacaaacttgataggcttgtccttgaaaggtatccaacatttgttgatgctcttcgtgacttggatgactgccttacaatggtgcatctgtttgcggcattacctgctgttg

SEQ ID NO: 453907 - DNA, 448 bp, Sorghum bicolor
ggcacgaggtgcaattccggacaagacattcgtatttcacaagcagagccgtccttcttcttgttgtcttgtttgctggctgtatgatcattcaagcagccatatgtcgttggcacatcttcaactccttattcagcattagcctactggcgttgacactgccggctgcctcctctactacactcatatacgtgacgtcgtatgccggcacagtaacaaccctcaacctcaccacgtcggtatcaggcgacagtggcttacagacaacccttgcacaagtggctgtttcacacggctgtgcaggcaacacgtcgtggttaacactagacccaacaaatgatatcctctactgtttggatgagggtttcggattgcccaatggcacactcgttgcatttcggacatcggataacgggaccttgacacagctcggtgaagcgccgaccct

SEQ ID NO: 453908 - DNA, 414 bp, Sorghum bicolor
ggcacgaggacgccactgcggcgctaggagctcgcagaagcgccgccccgcgagagggaggccagagaaaggaggagatccggcggcagagcaggtcagtcggagatgggagtccccgcgttctaccggtggctggcggaccgctacccgctgacggtgtccgacgcggaggaggaggagcccgtggagctcgagcccggcgccttcgtccccgttgacctccgccgccccaaccccaacggcctcgagttcgacaacctctacctcgatatgaatggcatcatccacccctgcttccaccccgagggccggccggcgcccaccacctacgacgaggtgttcaagtcgattttttattacatcgaccacctcttcggcctcgtccgccccaggaagctcctctacatggccatt

SEQ ID NO: 453909 - DNA, 424 bp, Sorghum bicolor
ggcacgagggtccagtgcaacctctcacgatttttcccccaaaaccctcaatcgacttcgccctcgatctcgccctcgcccatctcccccggagttaccccctcaattgagccaccaccagccattcaaaatgctcattcaactctccagggcttcgcgcgctcgctccgctgttgcggctgtttctcgtgtcgccagacccaatgccgctcaggtgaggggcttcattgctcccactgtctcccggaaagccgactttgtccaggagctttatctcaaggagctcaaggcctacaagatccccgccgtcaaggagtccgatgctgagggcaacgtccagacattcaacgtccccaagacacctgcctctccagaggagaccgacctcgccggcaacctgaaggagtacgagagcatggccgtt

SEQ ID NO: 453910 - DNA, 417 bp, Sorghum bicolor
ggcacgaggctctcgagtcacctgcctctagcaatgaaggcgcctccatcttctcccttcctattgttgctactgctgttcttcccttcaagcggccttgccgcccccaaggatttcaactatgaagtgcaagttcttatgacgatcaagagcctcctcaaggacccccatggtgcgctgaaaaactgggacccatactctgttgatccctgtagctggtccttcatctcctgctcaccagagaatcttgtcactgcactggaagctccaagcaagtacctttccggcccgctctccccgagcatagggaacctgacaaaacttgagatacttctgctgcagaacaacaacataattgggccaatcccaacagagattggcaagttagcaaagctcaggacacttgttctgtccagt

SEQ ID NO: 453911 - DNA, 548 bp, Sorghum bicolor
ggcacgagggcggagcagaggtgggtaactgggcgagcggcgcaaccctttggccaggtcctcgtcggcccttcgccggcgacgagcatccagcgcatactccccctccttccccttcccctgtgcgaaaccgagccaccccatatccacactaagctattcctagtcacaactgacccaatttcgtgcacatatatgaatacccactaaatttcgattttttccacaattagtggatccgctcctgccctcatggcccaggtcgggtcggccactgcctcggagaggccgccgccgcaggacgcatgggtcgtcgagctccgcagtctcctcccgcagtgggagtcgctgcgggattcctccaaggtcattatcccgatttcaatatctagggtgaaccagtttgatgctgcaaggctagatgtcgagatgtcggcagtgttgaaagagcagctagtcaaagtgttctccttgatgaagccaggactcttattccaatatgagcctgaacttgatgctttcctcgagttcctcatctggaggttctc

SEQ ID NO: 453912 - DNA, 455 bp, Sorghum bicolor
ggcacgaggctctagctaaaagtttgttgcacagagagcaatggcttctcaggcttccaatgttgtccgccctagcgacgccgagctgctgcaggcacaagccgacctatggcgggtgagcctctcctacctgacgcccatgtcactgaggtgcgccgtcgagctcggcatccccacggcgatccaccgccacggcggggctgcctcagccgccgacctgatcaccgcgctgtccctcccttcgaccaagctgccgttcctccgtcgcctgctgcgtctcttggccgtggcgggcgtgttcaccgtcgacaagaccaccgccgaggataggtactgcatcaaccccgtgtcctacctcctggtggacggcatccctcatgaggtgcacatcaaccacacctccctggtgctcacctgcacctcgacgcgctacctcgacgcggcgctggggttgg

SEQ ID NO: 453913 - DNA, 857 bp, Sorghum bicolor
ggcacgagggggttggggaggacgatgacgtccgcgcgcctctgcctgtgaagagggagactctctacggcgagggcatcgtgtctgtcatgcgacctaatgcatcagctgcatttcgtaattttgaacaagaggcaagacaatctgctgtctgggactctgaccagaatgctacatctagttctggtgataatcttgcttctttgtaccgtccacctttttctttgatgttcaatggaccctttgacaaggcaaagttagaggcttcttccctggacaaatggctattaatcaatttgcagtcgacagaggaatttagctctcacatgcttaatcgagacacctggggaaatgaagcggtggctcagttgattcggtcaaattttattttctggcaggtttattatgacaccagtgaggggaggaaggtatgcacctactaccatttggtgtccatgcctgctattctcctaattgaccccgtcactgggcaaaaaatgcatgcttggaatggaatggttcaccccgaccgtttactcgaggtccgaaggagcaccatgcagctcaacctcagaagcgcccaaggaaagttgatcaggaagcttctacaggcaggcaaggcaaaatagctgtagaggatgaagatgaagaactagcacgggcagtagcagcttcgctagaggagggtaaagaaatcattgaagcatcagacgctagtgatgacatggctgaagctgaacctcaggtggacaatgagccaagcttaaacatcaagcctgattatcctcctctccctgaagaacctacaggaagcagggaccgtctctgcagggttgcgattcggctaccgaacaatc

SEQ ID NO: 453914 - DNA, 834 bp, Sorghum bicolor
ggcacgaggagtaacaagcttagcatcaagcacagatggacttctacttgtctctggatttgaggatggtaatgttcgggtctgggatactagatgtcagcaggtgacccgaaaattcaaacactcccaaggtccagtaaccaatgttctgatagtaacgccacaacgagtaaatctgccaccactacaaccattacgcaaagtttgctcagcaaatggggaggctgaatggcgggcagtagttcttcctcggcctgaaaatgatgttccaattcctggaaataaaacctccatctttatggagcgctacttggatgagcttcagaagcatggtggttcttccaggttatttgatttcgagctgaatgctcagaatggcactccaaaccaacagggaacagaatggagagatagatacttggagttgcaggatctctttgtacatgaggtcctccatcagatgccatcctcgaggaacccatgatgcgcatgctttggatatcataggttgctattgtcaattaagatcatttgcggtattgaaacagtgatggttgccattcgggccacaaacgatgtagatgagctctttggagtaattcaactggtggtggctgtggggtgtaattgagggtgcctgactgcctttggccgcgaggaacttttcagattcttagtaaaatcactagaatcgctgccaaagttcacttggaactgattctcatttttgtactagtctcgataaacacaaaaacctagtttctcttgattctattctagttctaattttaagaatccagcgagctaggtaaataaagtgattttgatttatta

SEQ ID NO: 453915 - DNA, 509 bp, Sorghum bicolor
gttctcatcccattcccatatcccatagagagaaaagcagagcaagctgagctcacacgcaagccgaaagatgatgcggagcccaaggggcgtcggcggcggctgctaccgcggcgccggcggccaagaccagcacgtcgacctgatcccgggtatccccgacgacgtggccgtggactgcctggcgcgcgtcccgcacgcctcccaccgcgccatgcgcggggtctgccgtggctggcggagcgccgcttccaccccagccttcgcctccgcccgcgcgcaggcggacgccaacgaggacctcgtctacctcatgcagttcggcaacccgtccgccgccgctgacgacgccgaacccaagggcgacgacggtcccgccaacaccccggcctacggcgtcgcggtctacaacgtgacgaccggcgagtggcgccgtgaccgcggcgccccgcctgtggtgcccgtcttcgcgcagtgcgccgcggtggggacgcgcctggccgtgctcg

SEQ ID NO: 453916 - DNA, 451 bp, Sorghum bicolor
ggcacgagggacacactgagcagattgagtcatgatgcagatgccgatgtgtcgatggctgcaattatctcattgggtttgattggtgctggcacaaacaatgccagaatagctggcatgcttcgcaatctttcaagttattactacaaagaagctgctcatctgttttgtgtaagaattgctcagggccttgttcaccttggaaagggcttgctgaccctttctccataccattctgaccgatttcttctttccccaatggctcttggagggcttgtaactgtcctgcatgcgtgtcttgatatgaagtccaccatcctagggaaataccactacatcctttacattattgtcctggcgatgcagcccaggatgcttttaactgtggatgaggatctgaagcctctctcagtacctgtccgcgttgggcaagctgtcgacgtggttggtc

SEQ ID NO: 453917 - DNA, 441 bp, Sorghum bicolor
ggcacgaggcgcatctctcaatagctactacaccagcaaacaacccttcacagaaattcatacatcaatcctccatttcaaactcgcacatcacaatggccaacactcagatccctagctggagcctcgagggcaaggttgccgtcgttactggctctggacgcggtattggcaaggagatggcccttgagctcgctcgccgtggcgccagtgttgctgtcaactacgccaacgccaaggaagctgccgaggatgttgtcaagcagattgaggcgatgaagactggcgcaaaggccgttgccatcaaggccaacgtcgccaatgtcaaggagacacaacatctcatggacgaggtcgttaagcacttcggcaagctcgacatttgctgctccaactctggtgtcgtttctttcggtcatttcaaggatgtagacgaggcgg

SEQ ID NO: 453918 - DNA, 457 bp, Sorghum bicolor
ggcacgaggggacaaggagctcgacgctggcatctccaccaccggccgccttcttcacaccgaccagctaaagttctttgacaaggcggctatagtgacggacggcgacgtgctaccgtcaggccagccgaacctatggcggctgtcgacggtgcaccgcgtcgaggagctcaagtcgatcatacgcatgctgccgatctgtgccgccggcatcatcctggtgacatcggcgtcgcacaatcacagcttcgccatccagcaggcccgtaccatggaccgggacatcacgccgcacttcaagatcccgccggcctccatgctcatcttcaccaacgtcggcatgctgctgaccctggccttctacgaccgcgtgctcgtccgcgtgctgcgccgcttcacgggcccccccaacggcatcacccacctccagcgcacgggcgtcgggctgacgatcgcc

SEQ ID NO: 453919 - DNA, 1037 bp, Sorghum bicolor
ggcacgagggaaagctatatatctcgagctagctagctggtgtgtagtaataaaataatgggcgttgccatggccatcaggacggtggtgttgctccccgccgtgctcacgctcctctccttcctcctcctacccttggcctccctggcgctgacgcaggacttctgcgtggccgacctgacctgcagcgacacgccggcggggtacccgtgcaagtccagcgtcaccgccaacgacttctactaccacggcctggccgggcagggcaagatcaacccgctgatcaaggcggccgtgacgccggcgttcgtcggccagttcccgggcgtcaacgggctcggcatctccgcggcgaggctcgacatcgaggtgggcggcgtggtgccgctgcacacccacccggcgggctccgagctcctcttcgtgacccagggcaccgtcgccgccggcttcatcagctccggctccaacaccgtctacaccaagacgctgtacgccggcgacgtcatggtgttcccgcagggactgctccactaccagtacaacgccggcaccggccccgccgtcggcctcgtcgccttcagcagctccaaccccggcctccagatcaccgactttgccctctttgccaacaacctcccgtccgccgtcgtggagaaggtcaccttcttggacgacgcgcaggtcaagaagctcaagagtgtgctcggcggcagcggttaaaacttgtttttttctcgatggaacgaagctgagcatatggtcgtcgatcgtcgccttggtctgtgtacgtcgtcatggaatggaacgtgtctgcatgcatgcgtcgtgcacctgtcgtcaatgtcaaagtagtcgtggtgtatttcatcttaccctttttattcatgtatgtacttttcattcaaggatgtatttgcagttccattgcagtttgctgcaagggaagagagtaaaatgtgcatctgattggttctaattatctgtgtggtccatgtcatttgtaaagctatataatgactgctcatttggttccc

SEQ ID NO: 453920 - DNA, 479 bp, Sorghum bicolor
gctcgccctcgcagaggacgccggcgaccgaggggatgtatcttgtttagccaccataccttctgatgtggaagccgaagccacatttattgctaaagcagatggtgtcattgctggaataagcctagcagatatgatatttaaccaggttgatccatctttgaaggttgaatggtttgaaagtgatggaaattatgtccataaaggattgcagtttggaaaagtatatgggtgtgcccggagcatcatcgttgcagaaagggttgtgctaaatttcatgcagcgaatgagtggcattgcgaccctaacaaaggctatgtctgatgctgcccgtccagcatgcatattggaaacaaggaaaaccgccccaggtttacgtctggttgacaagtgggcagtactgattggtggcggaaagaaccacaggcttggtttatttgatatggttatgataaaagataatcatatttctgttgccg

SEQ ID NO: 453921 - DNA, 628 bp, Sorghum bicolor
ggcacgaggctttttccgcatccacggggccaggccgccgccgccgccgccgccgccctactcccagctgcatccttcgccggcgacttgcgcccaccacggaaggatggcgacgctgaggaacctgaagatcaagacgtcgacgtgcaagaggatcgtgaaggagctgcgctcgtacgagaaggaggtggagaaggaggcggccaagaccgccgacatgaaggacaagggcgccgatccctacgatctcaaacaacaggaaaatgttttagctgagtcgaggatgatggtcccagactgccacaagcgacttgaaactgcactggctgacttgaaagcaacactggctgaactgaaggagtcaaatgagcaaggtgctgagattggagaagctgagagtacaatcgcagaggttgaagcagttgtcaagccaacagaagattaaatttaaaactctcagtttgctgaactgttagcacgcatcctgttttatcctgttgagcccttgtgagctcgttaccagatgtgtaaagtctgaactcctgtaccagtatcattacttcaagtcttcaaccttgaaaattgaaagatgctgtccggaagaccggaattggtgtttactgctctc

SEQ ID NO: 453922 - DNA, 484 bp, Sorghum bicolor
ggcacgaggctcatctcctcttaccagtctctcaaggacactgggcgtggtactcagattgtgagctcaatcatcagcactgcaaaacagtgcaaccttgacaaggatgtcccactgcccgaggaaggggaggagctcccaccaagtgaacgtgacctggtcgttggaaaggtgtactccaagatcatggagatagagtcacggctccttccctgtggtctacatgtgatcggtgagccaccgagcgccatcgaagctgtggccacactggtgaacatagctgctctcgaccgcccagaggatggcataatctcgctgcctggcatacttgctgccacagtgggcagggagattgaagatgtgtacaggggaagtgacaagggcatactggctgacgtcgagcttttgaggcagataactgaagcttcgcgtggcgccatcaccgcctttgtagagaagaccacaaacagcaaagggcaagtcg

SEQ ID NO: 453923 - DNA, 508 bp, Sorghum bicolor
ggcacgagggagtactcgtcgtcatgaaaaaccagtccacgccaacgccactgccagatacgccgacgccgacgacctcaggagacgcggggacaccaggaggaggaggaggaggaggacatgagcaggccacggcatcgccccgccggctcgccgcgctcctgccaagcaggggcagcagcagcagggggacgatggcgaagcggccgggcgttctgtgggcagccgcgttggcggtggtggtgcttgcggcgtgcacggccgccgccgccgccgtgaccatctcgcggaagcagcaccatcgcggcgggtcgtcggcgtcgtcggcggcgcggtcctgcgcccccttcgcggcgtcgggcgcgtgggtggtggacgagtcgtacccgctctacgactcggcgcggtgccccttcatccgcgacgagttcgcgtgcgcgcgcttcggccgccccgacaccatgtacctcaagtaccggtggcacctcgacgcgccgtgcgctcagcc

SEQ ID NO: 453924 - DNA, 521 bp, Sorghum bicolor
ggcacgaggcgcgactccgcctccttccctcgcgcgacggcacgcgagtacgtgacaccgagcgacaagtgacggcgccgacgcgccgccccctgccccagcccggtcggcgggctccccaggacctagatctccgcctccgcgcccccaagcagttcctgcgccgcccgccgccgtctcggcttgtccagccgcgccggcgcgcctcccagcccggcgccgccttctgtagccacgccggcgcgcccccagccccgcgccgtccgctctccagcccggccggcgacaagcctggccactgaaagccaaaacagactgattgaggtgccaccaccaaacaaaaccaagcttgcaatggaatcttcctcaagcaatgctagcaacgtgccactgcctgcatcccaacgccccctacatgcaacagatgcagatgaggaggacgacagtgtgaagcagcttaatgagtgtgccacagtatatctatctctccaggactgcctcatcgagtcaaaccgcaactg

SEQ ID NO: 453925 - DNA, 483 bp, Sorghum bicolor
ggcacgaggcaagaatgacctcaagaatcataacattccagtggttctccataacaaatatgtgggtaaagggatggctgacaatcccatgaactccatattcataccaacaagaagccctcctcggcagtctctcattgaaactgttggaataactgaagaaggtgtgttcattgagaccagcagcgggtttggtcagtcatcagagagtgtccactgccaccatggaatcatgtctgctgagattggacagctttctaccattcctccgaagcaaagaaccctggaagcagcccagaaatacgctcataacaaacttaatctacccaaagaggtattccacggtggttttatacttgagaagattgatggtccgctgtccacaggccatctggtcctcacagacactgatgtccggaacaatccagcagttaccttcaactacttcagtcatccacaggatctcaatcattgtgtctatgg

SEQ ID NO: 453926 - DNA, 435 bp, Sorghum bicolor
ggcacgaggccggctcggtaagtttgtggaagggacgcttgtttacagacagcagtttgtgatcagatcctacgagatcgggcctgaccggactgccaccatggagaccctcatgaacctcctgcaggagacagcactgaaccatgtgatgtgctctgggcttgctggagatggtttcggtgccacacttcagatgagcctcaggaagctcatatgggtcgtcacaagaatcaacatccaggtcgacaagtacagcagatggggagatgttgtggagatagacacctgggtggcgtcatcagggaagaacggcatgcgcagagactggatcatccgcgaccgcaacaccaagaacatgattgcaagagccacaagcaactgggtgatgatgaacagagagacccggaggctgtctaagatccccgacgaggtcag

SEQ ID NO: 453927 - DNA, 472 bp, Sorghum bicolor
  unsure (1)..(472): unsure at all n locations
gctccggtgcgctgcccgacacacggtgcctcctcaagccgtcgacgccgccctgcgacgtctgttccatgggcgtctccctccctccggagcggaaccccaactacaggctgaacacctccctcttgatagactattgccatgacgaaacccacaagtacatcctaatcgacattggcaagaccttcagagaacaagttctccggtggtttgtccaccacaaagttccttccgttgattcaatcattctgactcatgagcacgcagatgctgtcttaggccttgatgaagtctgggtggtacaaccaaggaatggaagaaatgacattgaacaaattcctatttttctcacacaattcaccatggacagtatctcgagaagattcccctacttgattgagcaaaagccagaggatggcgatgaagatgcccaagcagcgaanattgactggaagataattgaggatgatgt

SEQ ID NO: 453928 - DNA, 365 bp, Sorghum bicolor
ggcacgaggcatcctcccacatcatacacaatgcttaagagcggcttccagcggtcgctgcgagcggcaagcccggccctgcgccgagcagctttccagcccatcaggaagaacttcgcgccctcgttcgcggcccgctacgcttctacggatgctgccaaggacggaaagattcaccaggtcatcggtgccgtcgtcgacgtcaagttcgataccgagcagcttcctcctattctcaacgccttgacaaccgacaatggcggccaaaagctggttctcgaggttgcgcaacatttgggtgagaacgttgtcaggtgtattgctatggacggtaccgagggtctcgttcgtggctccaaggccac

SEQ ID NO: 453929 - DNA, 510 bp, Sorghum bicolor
ggcacgaggcttgaacaaggaaccccttctctctactgcccattctaccacgcttggcaggcatcaccttgccattagcacaacaccagcctcagctcactgctttggttcgtgaactgcacaccatctacacatcctgacttcgcaaactcatcgccacccgcctcattctccaagtaattaccatctctaataatccaccatgtcacgttcatccgtctactcagatgacagccgctcatcggcatggacgactacttatacccggatacccaagaaacagcccaaggctctccgctttctctcatgggtagctggagcaccacctggagctacagctgtcaagaagagaacaagagactaccgtgatgaccgttcagtcagttccagtggctcgacgttctctaactgggatcagtccgacacacaactctactgggttgttcaccccaacagctactactacagcggtagcagtaggggaagcaccagcagtgggcatagtaagcg

SEQ ID NO: 453930 - DNA, 457 bp, Sorghum bicolor
ggcacgaggctaagacatagtagagctgcatatctattatattaagaacagataatgtgttctctactatgttaaaaaccatttagcctataatcagaagacactggtaggaattctgtaaccctatttagacaaattgatattagattcacttgttaaaatgtttacccagtataccatgagttttacatactggctatttattacgaaatctgaatggcatacttgaacatagatgatagttactgtctatgttccaaattataagtcgttttcacttttctcaatacatggattttactttgtatctaggcatagtgtatatttaggtccatagctacgcaagatgtatctagaaaagtcaaaacgacttagaatttggaacggaggtagtatttcttatagcttagctcttttttctggttttcacccatagttctgctctttgacccgcatt

SEQ ID NO: 453931 - DNA, 486 bp, Sorghum bicolor
  unsure (1)..(486): unsure at all n locations
ggcacgagggtttaatcattttgaaatgttagcaacacagaaaataattttttctttcattttatatatggtactctgggatgtcagtgtctactatttcgtttggaatggactttctgtagttgcctcaaactccatatgtttgacatctatgtgcagaattttgatattttttctttgaacaattgaccactcaggaatatacgaggccttggagttgagggatggcagacctgataatcttggcagggtgttcttaagataagcttggaacttgctctgtacttgtggttcaggatgaattatgatatttcaccattgcccttgaccattacttcaagtatattagtaactgggtctctgacagattagtcaaatagtcataccataaccattgcgtcttggctagcctaaatcaccttcgctctaccaatatggttntgagaaagtagtgcctacaaccataacaccatcatggaactttgt

SEQ ID NO: 453932 - DNA, 140 bp, Sorghum bicolor
ggcacgaggtataaacagacacgctaatcttcttgtggcgcaagcctggagacgaggccgagagggaaagcagaggtcgaccgacggaggcgggctcactcgaacaggagaggcatgccaggctcccagcgcgtcggcgc

SEQ ID NO: 453933 - DNA, 676 bp, Sorghum bicolor
taccgggcccccctcgacgagctcctcctcaacgacgacgacgagttcgagggcgtcggcgcccgcccctccgttccctccccgccggcggccccggcgatctcctcctcccgccgcagatccgcggacgcgccgttgcccggggcaggcgagtccaacgcagtgcagttcacgctcgagcacgaccttggcgacggcaagggcttcgtcccagctggaaccttctcggcccgcctcaagaccttcgcccacggcacgcagaccctcactaagcttcgctttacaaggaatgatttaaatgaggatgataaagtggctttcaagaaactgcttcaggaagatggcttttatacaattaggctgccatctaatgtgttggacactacaaagaaacataatgttgcttcttcaatcaaagctagatgcattccacgtgacagtttggatgaacacattgttatccacatggatggtgtaaatattttggcagtcaattatggctctgttggtggatgccaataccctaggccaatgaaattgccatcaaaatggacattcagctcttacactatcctgaagactgctgaacaggcaccaagaaccccatcatttgcagatcagttaatagaagctgacaatggtcttggcgaagtaatgaaaccacctgagaaatctt

SEQ ID NO: 453934 - DNA, 473 bp, Sorghum bicolor
ggcacgaggccggccacaaagactcccaagcatcgacactcgacatcctctccgtcacgtcaccatctcaattccagcttatctaccgaaccatctctcagggaacgcgaccccgtagcaaccatggctgaccgaggcctctcccagattctctcccagctaaagcagtctccccagatgagctatcccgaggccagcgccctcctctccaaggccaaactcagtctcctcagcctcaacgctctgactccgaccccctcaacaccatcgaacctcctcgcccttgccagagagacctatgagcaaggtgctctgttctccattcgcgccaaaaacgccgatgccttcacgcgctacgttcagcagctgcagcccttttacgagctgccgtcagctaccctgccgccaaacctccctgaacgcaacagggtcacaggtctgagcctgttgctgctcctcactcagggtcgcta

SEQ ID NO: 453935 - DNA, 300 bp, Sorghum bicolor
gcaacgatgagaccgcgcgggaggtggccaaggctgagaattccagcgtgcaagaagaagtgccagtgactgatgtctgtcaagacttagagaagcagggcgctgtggggtctgattcgtccaatgatgctgatagggtgagggaagagcaagcggcagtgaaggcacaagctgccttccgtggttatctggcacgcagagcattccgtgccctcaaagggatcataagactacaggcgctgattcggggacatcttgtaaggaggcaagctgtttcaactctccgtgcaacatggttga

SEQ ID NO: 453936 - DNA, 634 bp, Sorghum bicolor
gcagaagatgtcccatcgcgggaggaccgtcggagccggagggcccacagcagtaacgcagacagcgagtctaaggcaagctcaagtgaattcgagataagcagtgatcgaagagagttgggaccgtccgcgaggtttcagtcctaacccctgatgagagcacagcagatcctgatggccaagaactcggttttggactagcggtgagcattggaggaacgcggtgtgggtggggctggtcggtagagataggaaggacattgcatttctggagggcattgcattttgtactgtagagattggaaggtcattgcatttctggaggaggtaggtattatccttggtagtggccagcttagaatgcagagtgagatggatcccctgagagaaaagattcagacttgctgcgaatcttactcggtattctgctggtgcggcggcagcagcagcttgtacagacatttcttttctgtctttcgttaggacttgctggctagcagaaaatatggtctccttcctaatgtgatgagtgttgagtgacttgaaccatcaaaaaaaaaaaaaaaaaactcgatctctctctctctctctctctctctctctctctctctctctctctctctctctctctctt

SEQ ID NO: 453937 - DNA, 430 bp, Sorghum bicolor
ggcacgaggccaagccagtgctagctagcctcctttccccttgcttgtgagagagacagtacagtagaactgccatggctcagggaaggggcagtgctcgtggcagcaacgccgtcgtgctggcgctggtcctcctctgcgtgctcctccacggcgagttcgccgagtcggcggtgtacaccgtcggcgaccgcagcgggtggagcttcaacaccgccaactggcccaagggcaagcgcttccgcgccggcgacgtgctcgtgttcaagtacaacgccaaggcgcacaacgtggtgcccgtgagcgcggcggggtacaggtcgtgcagcgcgccgaggggcgtgagggcgctcaccacaggcaacgaccgcgtcacgcttaagcgcggcgccaactacttcatctgcagcttcccaggccactgccaggg

SEQ ID NO: 453938 - DNA, 448 bp, Sorghum bicolor
ggcacgaggctttacctgggcattttccctaagggccatcagattaaaagcaagagcctagtgagaagattaaaggctgaaggattagtcaatgaaggctgtaaatgttttgatgagttgattgaccggtgtattgtcgagccagtgcagatctgcaacaattcggtagttgccaaaaggtgtcaagttcacagtgtagtgctagagtacatcattcaaaagtcagtagctaaaaatgtggtcactcttattcaagaccttgagcccgtacttaaaggaagcactgaggcctgtgtccgccgactctctattcagtccagcaccaaagaaagatttgatgaactggatgatgacaagtctgctttaaggtcgttaacaatgttcaacaccgagccttgtgatttacagaagtgcaagatgctgcggatccttgatcttgaaggttgca

SEQ ID NO: 453939 - DNA, 524 bp, Sorghum bicolor
  unsure (1)..(524): unsure at all n locations
ggcacgagggggagagagaggaggctagagagagaaacaaaggtggtggtacggtagtagatgtgagccaccctctttgtatccctcgccaacttcttctcctaccaacttcttttcgtcccctcccaccccttccttaccgtctcgcgcccgctcccgcagcctcgctccacccgccgccgccggccggccggcaccgccggtggcatttcaagtatggttagcttgaggcgacgtcgactattgggtctttgttctgcttttgtttcagggaaagactcattgccagttgatcttcctaagcccattgaaaatgaaaaaactgtggaagttgtgcactccaatgtgaagccattcagtgtgcatcctctgcccttggcaaagacttctgatgtgctcacaaaatcctcaaatggttctgatgattcaaaggaagagaaaacccagtactatccaggcaaggaaatcaagcgcagaanacgacatagaagaaagcagtacgtggatcaagagccctgcattat

SEQ ID NO: 453940 - DNA, 480 bp, Sorghum bicolor
attcggcacgaggcccacctcctcctcctcctgtgcatttggcagcgcagatcccgccgctcccgtccagctagccgatcctcctcttctctgttctccccttgcgctactactaggccttgactgttctcgactcccctaatcaccagcggctcggtcggtctccctcttcctcgccgcgttcccttcggtctccgctccaacacgccatctgctgccgcgcaaacaccgggaaataccttggcctttctggtgtaaccgtgtaagcgagtttcgactccccaagtttgctgcttttggccaatcttttctgggctttcaggtctcagcatcacctgccccgcttttaccgcgatctttctgtccgatcactgcaattttcagcttcgagtacctcctttttcgggaaattcagtctctgctgataaagctgttgagtgagcggctcatgcaccacaccaccagtagcttcagctaaga

SEQ ID NO: 453941 - DNA, 561 bp, Sorghum bicolor
  unsure (1)..(561): unsure at all n locations
ggcacgaggcatgaattattgtcaatatcatcaaccaatgcttaccctaaaatatccatttgcattcagttttgttggtgtaatgcttactctaaaacatccatttgcatttactgcaccttaatctcagcaaactcagggcagttagtgtcatcccaaattcagaccacatagtgttatcccaaattcagttacagtcgttggtattatccagaatttaggctgtttacagattcagctataaaatacccttatttcccttgtgatctaaacttagttacaatctatagtatttttatgttttatttctctcaggtgaaccagaagatgatgctaactctgacagcaagcatcatgtactggtatttgaaaaggccaacatcacattcattggactctgaaaatgggagttcatgtgagacaacctccatcacaacttcagatgattctgcatctgaatcatcgattgatgacaatacaaccagataaaagtgcaggatcatgaagataaatgatatgacctgtgtttttgaaaacttgngatactcataccagtgcagc

SEQ ID NO: 453942 - DNA, 476 bp, Sorghum bicolor
  unsure (1)..(476): unsure at all n locations
ggcacgaggcaagaagtcagttcaagatgagagcgaagtggagaaagaagcgcgttcgtcgtctcaagcgcaagagaagaaagatgagggcgagatccaaataaacgcatcgcatcaactcggcctctatcggatctgaatgtcacttcatacccaccatgacaacatagaccaacacactacgcaactcccccgcatcaatacccagaatcacacacctcatcaccgttgacggaacacattatgtatcgttgcaaggacggttggaagtcgttcgggagcccctatttgatggcgcgctgtgtggcagttggtggaagcattggcaaaagaaggaactggtagcctgtcaagatagtcgagtcgacttcggcatgtgtttacggaatccgtcacaggaagctttactgcctcgcctgngatgcaaattcagtcacagagacagtttgctgagagagaaatcaattgcagtattg

SEQ ID NO: 453943 - DNA, 425 bp, Sorghum bicolor
  unsure (1)..(425): unsure at all n locations
ggcacgaggagaaaagaaaaaggagagtttctttcgggtcgtccttctctcggattgtcgaaaggccgctcctttaggagatttgcgcgcttctcgtcgagattagtcgtccggtgttcggatcgagctgtttggggtggaggaattttgaggccaagacaagaagagagtcggaatcggatcgggagttcttgtggtccgaggttgcgggaaaaaaagcgagggatttttgggaggatttcttgtttgaggggaaaaaaatcggtttgttgagcggattagaggcggagatgggagccggggctgaggtcatgcatcaggtcgtgccgctgctggagccgccgttccaccggtgcgtcgttaagagcgtcgatgtcatggaggaggtggtcaccgtggcgcctgngcaggtgcagccggcgacg

SEQ ID NO: 453944 - DNA, 437 bp, Sorghum bicolor
ggcacgaggaagataacgcaggtgtcctaagatgagcccaagaaatcgccacatccctcgtaaccgccttcaacacagccctcaagaacaaggacctcacagctctcgcccgtctattctccgaagacggtttctggcgcgatcatctcgccctatcctggaacttccgcaccgtccaaggcccctccaacatcctctcattcctgaagtcctgctctgaatcaaaggacggtctgcgcctgaccaagattgaggtcgatagctcagctcctgtgcgaaagccccagtttctgcctatcgatggcgctggtgaagtccagggcgtacagttctttttcgagattgagactgtgcgcggtaagggacttggtcttgcaaggctgattgaggagaatggcgagtggaagattttcacgttttatacgagaattcaggag

SEQ ID NO: 453945 - DNA, 528 bp, Sorghum bicolor
ggcacgaggcagacctacaagaagcagtgggcggagccgacggcggagcagcgcgccgaccccaggagctacgccgactgcacgcactggtgtcttcccggcgtgccggatacgtggaacgagctgctgtactggaagctcttcttccctagcaacgatcagttcctctgatgatgcgtgcctgcgtgcctctgcctgcatacatacagacacttggacacggccggactgctaggggctagcccaaagtaacatcctttgtgccggcatgcacagcgtcgatcgaaacagaacaaagaaatgtagatgaagaactgaacctcgtgtaagtgtaagtggtgtacatggatgcgtgccccatgctcaacgttagttcgtggttcatggagcagaaactttccgttgatgtaatcagtttttctttcttttttgggggtcgctgtaagatcgaggctcttttttgtgtcaatttcaaagaatccaggggaaaaaaaatcttcttctgcgtaaaaaaaaaaaaaaaaaaac

SEQ ID NO: 453946 - DNA, 779 bp, Sorghum bicolor
ggcacgaggcctcagcatcgtgtgcacgggccacagcctcggcgcgtcgctggccacgctctgcgcgttcgacatcgcggtgaacggcgtgtccagggtgggcggcgccgacatccccgtcacggccatcgtgttcgggagcccgcagatcgggaacccggagttcaagaagaggttcgaggagctgcccaacctgcgggcgctgcacgtcaggaacacgcccgacctgatcccgctgtacccgagcggcctcctgggctacgccaacgccggcgacgtcctggccgtggactccaagaagtcgccgtacgtgaaagacgactccaccaacctcggggactaccacaacctgcagggcatcctgcacacggtggcgggctggaacggcaaggacggcgagttcaagctgcaggtgcagcgcagcgtggcgctggtgaacaagtcgtccgccttcctcaaggacgacaacctcgtgccggagtcatggtgggtggagcggaacaaggggatggtcatcggagaaaccgggctgtgggagctcgagcctcctgccgaggagaaccttcccgtaccgccagtcgtgaccgggaacgggaaggtcatcggtgacgatgacgctgctgccaccactaccactaccactgctacggcggctagtatggagacaaagacaccggcgaaggataagaaggggcctgggaccaagcttttctcagcatgctttagagttagaggggtcaattaatctgttcgtaattgaatggttgaatgtttggagc

SEQ ID NO: 453947 - DNA, 452 bp, Sorghum bicolor
ggcacgaggctccctcggtgcagctctcctctcctctcctttcacgaactcccccctcctccgctagccgccgacactccattactgctccacccatatccagccagagctcggcggccggcgatggacctgcggcggcggcggctggcgctggctgtgttggcggcggtggccatgtgcgccgccacactgacggcggtggtggaggggttcgacatcctggagatcctggggaagcacgacgagttctcgcagttctgcaagctgctcaacgagacgcacctcgccggggacatcaaccgcgaccggaccatcaccgtgctcgccgtcgccaacggcgacatgggccacctcaccggcggccactactcgctcggcacgctccgtcacatcctcgagctccacgtcgtcgccgactactacgacgataagaagctcaagcagctgtcgca

SEQ ID NO: 453948 - DNA, 535 bp, Sorghum bicolor
ggcacgaggcttgaattgaattgcattgcattgcattgcatctgtctaattgttgactttataactcaaagttagctctctcgctttcactccatcatttattagttacagtacaaagatcattcacacaccaccactaactaccacacatccaagatgaaggctactttcttcctcgctgctgctggcctcgttgccgctcaggactttggtggtcaacccgagtgtgctctcaaatgtctccaggagaacatccccaaggccggctgcaagctcgaggacaccgcctgccaatgcgccaccgatttccaggagaagctcctccccattatcaccccttgcttgaccaaggcctgcgaggcccaagacctcctcaaggctcagtccgctgccgccgaggtctgcaaggagttcgctaagaccgccggctccggctctggcaagcctaccgctacttcagctgctgccacctccggcgccgtcaccgtcagcatcgacacctccgtcacaggctccgccagcgtccccgccatct

SEQ ID NO: 453949 - DNA, 375 bp, Sorghum bicolor
ggcacgagggtaagcactcacccacctacagtcccatctcttctccacaaacatgtccgccaaatccatcctcgaggccgacggcaaggccatcatcaactaccacctcacccgtgcccccgtcatcaagcccaccccgctccctccctccgccacacacaacccgccctccaagcttgcatcgctgcactttgcccagggtgccgatgtcaagggcgtgctcgaccaggccgaggccacctacccgtggttgttggcttcgggagccaagtttgtcgcaaagcccgatcagttgatcaagaggcgaggcaagagcggtctgctggcgctgaacaagacatggcaggaggcccgcgagtggatcgaggcgagggc

SEQ ID NO: 453950 - DNA, 426 bp, Sorghum bicolor
gcagcaccctatcctcgagcacaacacctgctacaggatgcagtggggcgccgcgcagcgctgtgatggcacaccacccggcgacaacgacgacaaagttgatggattccccaaatgtgagaaatggatacgcaatgacattgttgacaccaaggagtcgaagacaacttcatggttgaagagattcatagggcgtgcaaagaaacctgcaataacatggccattcccctttgtagaggagaggctatttgttttgactatacaagctggagttgaaggtttccacatttacgttggtggtcgacatgtgacatcttttccttatcgaccagggttcactcttgaagatgcaacgggattatttgttaagggtgatgtagatgtacattcagtttacgccactgctcttcctatgtcccatcctag

SEQ ID NO: 453951 - DNA, 416 bp, Sorghum bicolor
ggcacgaggcacctgcagtaagcttctcgtctaccactactactcaacccaacccatcgcttctccccgcacctgcttctacccaacccacgattcagttctatgttcgttctagattcttcagtttggccaggcaggcgcttgctattacgtgatcccaccatcgtgttctagtccatgaatcagaggcatttgcagtgaatccagtagatcagtaggccctggttcgtgtcaagatgcttagcgattcagtgctagtagtactatttaattgaaatccagtgctactactatttactaattgagattagtgctagtagaaccactaatttaatcagcacgttgacttgtaatactccaattggcttattggttgggaagcttatcatatacaccaaccaacaacttgtttgggc

SEQ ID NO: 453952 - DNA, 482 bp, Sorghum bicolor
gtcttgctcttctcttcttggcagtttggcacagcagagcaggcagctaggcatggccatggcgctctccggctacccagcgacgaccccgctgcagctcgtgctcttctcgctgctgctgctcgcgagctcagccgcggccttgccggtgccggagcgcccggccatggaccgcgtccggtggcaggtggacagggtcaaccggcgaggctcttccctcggcctcgtcatgtcgtacgtcgacgaggccaccgcgttgcaggcctccggctacttcacgccttggcatgtcctccccttcgttgacctctatggacggcggtatcacatcggcagcattcggggagtgaacgttatatatgcattgacagggcaacgcaggttgaatgctgctgtcactgtacagactctcatcgatgtcttcagcgtctctggtattgttcactacggcacggcagggagttctaatgactccatgtctt

SEQ ID NO: 453953 - DNA, 494 bp, Sorghum bicolor
ggcacgaggcgaacaaccagtatcctgactgtcttgctcagtctacacaccacttcaacacttgccaaaccctctaagcccgttgaaataagcagagatgtcgccatcattggaggcggcgcatcaggtacctacgccgcggttcgcctccgcgaagacctgaacaaaaccgttgtcgttatagaaactagaccaaacctaggcggccacacaagcacctaccatatcccagatagcaacttgactgtcgactatggcgtacaatcctatcttccctacggcccggcgacatctttctttgcacgctttggcattgcgactgagatatttgctccagagagactaacaccactcaatgtcgacgtcgagacaggcaaggtgctaggagactatcgggcaccgagcaccaacggcacaaatgaagctcttgcgcgctggttggctatcacgtcgaaatacagtgactatctagagcctgggtactggaactttcc

SEQ ID NO: 453954 - DNA, 425 bp, Sorghum bicolor
ggcacgagggcccagtaaagagagtttagctgctgcaacagagttcagtgaggtggggagcatctcaagaacaagcgaggtggatgccaccttgcggaaacccaccgtgtatcagagtgaggatgatgatttgaagtcgaagcttaaaatcaagccaaatattaacctgaaaatgaggaaagatatgaacgaggacttaacgaatatttctctccttcaaaagccagatgttgcaaaagatacttctaatccagagcaggacaatgcctctgctagccctgccacagtttctgctacagaggataacagtgaacttgagccagaatcaaatggtcttgatgaaaaattagtaactgaaaatgtttatgaatcatctgggcttgatgatgattctactgcaggactacagccatcaggtcaaactt

SEQ ID NO: 453955 - DNA, 395 bp, Sorghum bicolor
ggacagtcagtccatcacactggtaaagctctgcttagctcggagcttcagtgctttgttcagtccagctcgatcggcagtcacaaccacagcaccctagctgcaccaatggccaccgccgaggtccaggtcccgactgccgtgcccgtcgaggaggctccggtggtagtggaggaggctgtccagccggccgccgttgaggaaacacccaaggaggaggcctctgctccggttgtcgaagagagcccggccgccgacgagccagctccggcggcggagaccgaggtcgctaaggagccggaggcggaagctgttcctgccgagactgagaccaaggaggtcgaggtcgaggccgtggctgagccggccgaggcagagacagagaccaaggaagc

SEQ ID NO: 453956 - DNA, 498 bp, Sorghum bicolor
ggcacgaggctcacccacgactttactttcgctcaagatcggcgataacaaagaccttctctcatccgattaccatctatccacatcactttcacgacagatcaccgcaatcatgcagatcttcgtcaagaccctgaccggcaagaccatcaccctggaggttgagtcttccgacactatcgacaacgtcaagtccaagattcaggacaaggagggtatcccccccgaccagcaacgcttgattttcgccggcaagcagcttgaggacggccgcactctatctgattacaacattcagaaggagtccacccttcatcttgttctccgcctccgtggtggtatgcaaattttcgtcaagacactcactggcaagaccatcacccttgaggtcgagtcatccgataccatcgacaatgttaagtcgaagattcaggacaaggagggtattcctcctgaccagcagcgcttgatctttgctggaaaacaactcgaagacgg

SEQ ID NO: 453957 - DNA, 461 bp, Sorghum bicolor
attcggcacgaggggccgacgagctccagccgttcccgcccaaggagcagctgcccggcgtcgccttctgcatcaccagcccgccgccatggcccgaggccattttactaggattccagcatttcatcgtcatgctgggcaccactgtcattatacccagctcgctcgttcctcagatgggaggcggaaatgaagagaaagcccgggtggttcagacgatattgttcgtggctggcataaacaccctgttccaaacattcttcgggacacgccttccggttgtgatgggtggctcatacatcttcgtcggacccaccatctccatcatcttggctggacggtacagcaatgaagcagaccctcacgagaaattcttgcggacgatgaggggaacgcaaggtgctctcctaattgcgtcgacaattcagatcatacttgggttcagtgggctctggcgcaat

SEQ ID NO: 453958 - DNA, 394 bp, Sorghum bicolor
ggcacgaggcacgttcgctgtgtgaggcccggccggccacgactcccgtccccttctctcaggctctgcgcgaaagcgaaacgagtccacacgagccgcgcggcgtcgccgtccgtggtccgccgccgctcgccggagtagcagccgtagcagggggcaggctagaggcggcggatggggatcctgggcaaaggctcggggtggtgcttctgctcccgcggggccaagctggagcggatcaagtccagcctcctcgccgcaaagggcgccgccgtagccgccgtatccttccccagcggcggcggcggaggaggagctggagggaaaggtgggagtgggttcctcatccaccgcggcctcctgctcaccacgcacggcaccattccctcggccg

SEQ ID NO: 453959 - DNA, 908 bp, Sorghum bicolor
ggcacgaggttatctcattacacactcaagcacagtatcacatcatggcggtcaaagcggcattcatcggagcgtgcggcgctactttgcggcatgtgctagcttggacattacttgatggtcataaagcagccgctcttgttcgtaatcactcgaaactgaaaaagattctcttggatctcggtgtatccgaaaagatccaacagtcacaactcatcgttgtcgaagggtcatcccgcgatgtctccacagtccgcaatcttcttctcaatgaccctgagattattttcagtggcatcacaagcacttggaaactccgatttaatccgtttcacccgattgctatggatgatgccagtatcaccggtgactctgctgctgcggtgatgcaagctttaaaagatcttgtttctacaaacagtatcacaaatttacccatctacgctccaatctcatcgactggacatggctctcatcgggatcaaccacgtagcctcatgccgctctactggtggttgttgaaagaggctcaggccgacactgcggttctcgagcgtgttactcgtgaggcggcgacgcagaagcaatcttgtcttggtggatatgtgatgcttcgacctccactgctgacagatggggagatgaaagggacgaaagaagtgcgcgttgggtggatttgggaagacgatatctttcggaagagtgatgagcaagaaactggcgtcaaggtaggatatactatcagcaggatggatctggcaagatggatgtttgaagagctcatccaaggagatttccggagttggaatggaaagtacgtaaacgttacatactagaacatctcgttttgtctttcagttgtgttaattattacccgtatctaattttaatatccataacttgactcg

SEQ ID NO: 453960 - DNA, 407 bp, Sorghum bicolor
ggcacgagggttcgacaacccaagtgtgccttgtcttcacccacccgtgtggataagcacgcttaagctcttcgaatcctctctcacttttccccccgaaaggtctgcgagtttcgagagtttccagagctcccaactttccatgaacgttgcgtcacactaacctgtccactctttacgagaccctcgtcgctcgctccgtcgctcgcttcagcatgttcggaaaacgctctttcgctagttcgaaggacaaggaccgttcaggcaagatcaccaagcagccaaagagatcgatgcgcgaagcatccaagcaaaaggccatggccgagaagctggatgcccgcagggacagccccatgatggacggagcgtcgccccagctgacctctgccatcgtaacagtcgtc

SEQ ID NO: 453961 - DNA, 572 bp, Sorghum bicolor
gcgctgcttgaccaaggcgctgaggttaacgcgcagggtggagtgtacagcaacgcactacaggcagcttcgcttagaggctacgagcaggtagtcaagacgctgcttgataagggcgctgaggtcaacgcgcagggtggacgccacggtaacgcactgcaggcagcgtcagctgggggccacgagcaggtggtcaagacgctgcttgatcagggcgctgaggtcaacgcgcagggtggagactatagtaacgcactgcaggcagcgtcagctggaggccacgagcaggtggttaagacgctgcttaaccagggcgctgaggttaacgcgcagggtggacgctacggcaacgcattgcaggcagcgtcacctaggggccacgagcaggtggtcaagacgctgcttgaccagggcgctgaggtcaacgcgcagggtggacactatggcaacgcactgcaggcagcgtcacttatgggccacaagcaggtggtcaagattttgcttgatgcaggtgctcatcaacccaagggagacgagatagtagaggatctcaaatcaccagcattgtcata

SEQ ID NO: 453962 - DNA, 460 bp, Sorghum bicolor
  unsure (1)..(460): unsure at all n locations
gttctaactgtttcttccttcttgtttgaagggaacagacgccgagatgtacctggtgaaggacattagcggcgccatcgggctgatggcggtggcgttggtgctcctgggcacctggccggttgtcctggcggtgctagagcggcggggccggctgccgcagcacacgttccttgacttctccgtcaccaacttcctggccgccgtgctcgtcgcgctcaccttcggccagatcggccccgacacgccggagacgcccaacttcctcacccagctcgctcaggttcagaacaactggccttcggtgttgttcgcgatggcgggcggcgtcaccctcagcctgnggacacttgccacgcagtacggctgggcgttcgtcggcctttccgtcactgaagtcatggcctcaagcctcaaggtcgttatagggacgacgctcaactatttcctcgacggccgg

SEQ ID NO: 453963 - DNA, 591 bp, Sorghum bicolor
ggcacgaggatgttgcgctccggcggtggttgggtgctgctgctgctgcttcatcatcatcgtccgtagaccgtagctgctggcctcttctcatcttgcctaggaggaggagagggagaggaggaggaggcgtgtcgtcgtctgtgtgatggaggtggtggacgaggtggtgcgggcgctcggcgccggcttcgacctcacgtccgacttccgcctgcggttcgccaaggccagcgagggccggcgcctggtggagctcggcgacgagacgagggacgtgccgctcccgggcggcgccggggccacgctccgcggggtgccccgcgacgtcggcgtcgacaagggcgaccgcatccgcttccgctccgacgtcctcgagttcaaccagatgtcagaattgcttaatcagaaatcttcagtccaagggaaagttccgtcaggctattttaacgctctctttgaattaagtggagcttggttgactgatgccaaagagaccaagcatctagcattcgatggatatttcatttctttgtacaacttgcacctaaaggcttctccattagttcttcgagatgaagtaaaaaaggc

SEQ ID NO: 453964 - DNA, 453 bp, Sorghum bicolor
ggcacgagggcggcatcccgcgccgtctcggccgcaacggacggctccagctggtcgacctctcgtccaacaggctcaccggcaccctcccgccggagctctgcgccgggggcaagctggagacgctcatcgcgctcggcaacttcctcttcggctcaattccggaatctctggggaaatgcgaggcactctcccgcatccgcctcggcgagaactacctcaatggctccatcccggaaggcctcttcgaactgccgaatctgacacaggttgagctgcaggacaacctcctgtccggtggcttcccggcggtggccggcaccggcgcgccaaatctgggggccatcactctctccaataaccagctcaccggcgcgctgccagcgtccattgggaatttctcaggtttgcaaaaattgcttctcgaccagaatgcattcaccggcgcagtgc

SEQ ID NO: 453965 - DNA, 428 bp, Sorghum bicolor
ggcacgagggccccatccgccgccggcaccaccatgccccttcttcgccgagtgggaggcgacagatccgtctcctagctcttgcggcaccgtgcgaggagccggccggcgaggagcgcggctccggtggccccacgcgtggaaggagcgcgggctccggcggcccgacgtgtggaaggcgagcccgtctccggactgaggacaccgaaggccgagcgcaccggaggccagtaacctgcagcggcgtgcggagctcttatctcggcacaatccacccctcctgacgggatagaatccgtgggataagaggagcaatacccttttgtttgtctgctaaatttgagtacacaagtacttaagctgctggatttggagtggcgaacacggcccttctcagtgtggggagattaggggtgtggggagatgta

SEQ ID NO: 453966 - DNA, 417 bp, Sorghum bicolor
acagacgccgtgttccccaacaatttcgttcgttctacggtaatcgtgagtgttcgtgacccatgatgatgatcatgcatgtatatatatggcgacaaagataatagcaacggcggtgaaggtttggacgtctccacgagcacctttttttactgcaatccactgatgacgacatggagagcagcctccggcaaggcgctcctcctaggtgtgcaaaacgtaggcctccctacgatatagccaattgattttttttccctatatatacattgtcaattcgtacctttttagttgtaaattaacttcggatgatgatgtcttttcgttcaaattggatgctgttgttagtctgtccattctctgaaactagtgctggcatatctaatgctagaagcatattcagaaagaatttgttcc

SEQ ID NO: 453967 - DNA, 533 bp, Sorghum bicolor
aggtcgccgagattgacggcgccccgaggatggtgagaggaattaattaatactcttgggctcttggggcgcattaattgcgtgttagaaccactcgctgaacgatcgaggaactgataatctttttgttgcagggcccgacgttcggcgccatgatgatctccgggcagaaggcggcgcacctggcgctgaaggcgctggggaggcccaacgccgtggacgggaccatcaaggtggtgtcgccggcgttgcgtcaggagttcgtgattgcgtccaaggacgatgaggtcgtggacgcgtgagcgcggggaggagcttagcgcgcgctctggcttcgttttttggactttgccttgttgatgactttgtccgaatgaattccctttcagttagcgtacatctcgctagcgtcgtgttaataccccagcacatcatgccacccgcatgttaaaagcgtcgtgttatttgttggaataataaaaccttgttgcctagcatgcaagtgcatctcaattaattccccaagggtttcc

SEQ ID NO: 453968 - DNA, 773 bp, Sorghum bicolor
tcgtcgtgtccgagagcggctggccgtccgccggcggcgacgccgccacgccggggaacgcgcagacctacaaccagaacctcatcaaccatgtcgggaagggcacgcccaagcgccccggcgccatcgagacctacatcttcgccatgttcaacgaggacaagaagacgggagccgagacggagaggcacttcggactcttcaacccggacaaatcgccggcgtactccatcaatttctcctaaaaaccaaccaagtgggacgctcgcgcggcccggtccatatatacacgatcgaacaagacataaaatttaactatacgagataccatacagatacacatatataccttatatactacataccaaaacattgaataaactgcctgtaaaatgcaaagtgcatccatgtaaggcaagtgcttcgattattacataaaaatgaataacaagaagtacattcttgatttatttcttctttgcccatgtagttatatgctttctcctaatttcgtctcgacattatgtgcatcgatcattattaaatgggagtaatatctcattataatcaattaaaattcggttcaaaattagaacatatcatcttgcaaattgggagagtgttagtagtatgttcaaagattttgggcggcttggtaccaaatttgagagatttaaagaagtgtctgttagccttgtggagtaagttaagtagccatgttgtattgttgttgactataaatacaatactgctagcacgagtgcatgacttca

SEQ ID NO: 453969 - DNA, 511 bp, Sorghum bicolor
ccgacacccacatacgggtctccgactccgatctaccaccctccggttgtgaaagaaatatcgtttgacaagaagcacttccttgatcacttccacaaggaccatgactatcacaagttctttgaccacttccacaagaaacctgtgccaccgaagcctaagcctgagcccaaaccaaagcctgagcctgagtaccaccccccagcgccaacgtacgcatcaccaactcccatctaccatcctccggccaaaaactgatcggttgaatcgagaacattggtcaatgatcaacgttgctagctatgagttgcatgtgtggtctagctagcgtggtttgcagtcctgttttgttttttttgtttctacagaataaagtacagcttcatttgggtgtgtatacttattttgtgtattgcgatagtgtcatatatatacatgtaagattccagtgagccttgtttttaatatgcattctatgatgtactttattcctttttaattattattattt

SEQ ID NO: 453970 - DNA, 547 bp, Sorghum bicolor
gctgagctacttcatgtgatggtgagagcttaaaatctgaaggatcacaactgtgccataaaactaatcagaaggatcagagttgtgccatattgtacagccgccatagtacacccccatggcatgtgcgtctgcgcgacttggccggccccaaatccagtcgggtttttcctcctcccccttcagtagccgtggccggccggctgtcgtcccctccccctggtgtaattaaaactgtaccgagtcagagttcgtttaccagctgtttgaggttccagagttaagatttaaactaaaatggcgccattgccctcctccaacctccctttcttcctccccaaatttaactttgttgcggccattgtccttggactatggctataggtctttatgtacccctgtacatgcgaaatgaagggatatgaaataagaacatcttcatcctgttgttgacagtatggtacagattatttttttcatagttgactggcgatgaattggatcggtgccaacataagaattatggaaggtgcctttcctgccgccg

SEQ ID NO: 453971 - DNA, 982 bp, Sorghum bicolor
ggcacgaggctgacgagttggaggagaacgaggaggtggaagatggggatgacttcgacgccgacgaagaagaagaaggcgatataatggacgatgatgaagagtttgaagacgactataactttgaagatgattttgagagtgatgatgaacaggatctttatgctggagatggaggtgctggtggcggaatatcccttgctggcacatggtgggacaaggaagcattagctttggcagaacaggtctcagcatcattcgatgatgacttgaaaatctatgctttcaagacagctgcaaatttgaccattagagtacgcattgagaagatgtccaccaggtacggttctccaactatagatgacattgaagcttacacaattgcataccgtgcaaagttggacgatgcagagtcaacaggaaagataccaaagaacatatcgttggaggtgtcatcccctggcttggagagagttatccgtatccctgaagagcttgagcgcttcaaagaacgggcaatgtatgtcagatacactacaacaagcgatgaggcagctacgcctcaggaaggcgatggcgtgctgaggctaatctcctatgacatggacctgcgagagtgcatctggggcatagctgacgtgaagataaaccggcagcagtctggcaagggcaggcccctgagcaagaagcagagggaatggaggctgcagacaccgtttgagtcgctgaagttggtcaggctgtactctgaatgttgagatgccaggttttttgagtaaattttgagtttccttttgttgcactccattcagaagtttatccatttttctgaactccggtaggtcgctggatgcgcagtttatactagttagaatgttgttgtgctatctctgtcacaatcaatgataattttttttctactgctaacagataacaagttaagaacagaggtttagcccacaaaaccagtgttgtttgcctc

SEQ ID NO: 453972 - DNA, 426 bp, Sorghum bicolor
aaccaaaggccaaggatatgaagggtagccaagagaaaaagccgcagcagaaagtggctccttcggtcagcgcatgaagcttgctgctgcgaaaatggttactgatcatgtaagatacatcttgtgaagttctctcgtgtttatcactcatacttgtatgtcttcgcttttgtgtttacggtgatatgggaccaggagtgtccaatctagaatgtgcttggtttgagcggttgcgcacatacaacatatctgatgagaaatgttttggttaggactttaggatctctgttattcattgttgtgctgttgtaataagacttgcctggctatctgcttgaatggaaggtcttgttggaacaaaatgtaagctcgttctctgtccataacattaggatcaaatggcaaatcagtccatgtatgtttcat

SEQ ID NO: 453973 - DNA, 658 bp, Sorghum bicolor
tccaccatccaggccaccgtcagggacgacgacccacttgccgtctatgctgtgtccaagttcctgcagcctaaggagctgttcaaggcgaagacggcagaccttgcgcctgcgcctgctccggaagggccaaagaagaagaagaagaagaagcccgccagcggctctgcagccgctgcgccttcggacgatgactctgcagatggcccgtctgccgacgactcatccgatgacgccgccgacaaggccgccgctgcgccggcgtccctgtttgcccggtgggtgacgatcgccgtggcgctggcgctggcgttggcagcctaagtaaggtgtgcgctcatgtgctatgtttttgttttgtttagcttattttggaccctatcttcttttctttgtccaattcgtgtcccttccttgttggtgcagaaaataagaagggctatttttaattttatatttatttattaccgcattccataaaaaaaagagagaaaaggtgagaggtgtgtgtgagtgatgtaactcttttgattttgttcattgggtttgtggtgatcattttgtaatgatagtggccaattggagagtgggttaagttttcacatatgagtcatcatatggagtttagaaaaccagcaagtgtttgttgcttgctttc

SEQ ID NO: 453974 - DNA, 528 bp, Sorghum bicolor
taacacctctactattatgcattacttattttgtgttgtagcatgtggaaaaccgtatatctttactgttgttttgcaagacatcttatatgaattgttttcctttaacaatgtgttctaccatttgtagagttagtaaatttaattatatgcacatgtttcgtttatcactgcagattgtaagagctagaaaactatcggagcattccagtactcaatgaaacaataaaggcaagcacttcagtacttcaaagccatgcacacagttaagaatgtatgtatccttcaccatgtcgctcgctggatccatcttgcccgccccgacacaccaggaatatgtgaaaagtccactatatgtagctggatccaagaagcataggaagatgaaagggattgatgaagtcatacaattgagtttgtgagcatgcgacgccatgctcttcatgactatgttaattttataaattttgttttttgaattaaatgtcacttgaacgttggtatttaattttatagtattgttatttt

SEQ ID NO: 453975 - DNA, 511 bp, Sorghum bicolor
ttgcttccagaaaacattttattttatgcatttctgagattaaaaacttaagaagaaatcgcagtcgagattttagtgttcagaattctaaattcatttttaacgtctttgagttcaacatttcagagtttatgcatctcgatgtgtatatcactcaatgcgtctctctattgtcgtcgcaattgtatatatgcaattgctcactcattggttcttcaacaacttccttgagcttcgaaattctttttaatttcatatgaaatttgaattgaaaagaaatttgacctcacaacagctgacatgaaaatggtttacattgtattgggattaactgtgggtaaaatggtgtatatacgatacgacgaccaatatggtgaaaatcttgttgttcaatatatcagattagtgaagtggatgttaaataaattttcgttttctcgtattattcacactgaaacattgtatgaaatgcataaatatatttaaagagaattaaataaagctatttaat

SEQ ID NO: 453976 - DNA, 487 bp, Sorghum bicolor
tgacaggattgatgcaagtcaaactagacagcccaagccatacatcccaaacaaactacctactacagtagatggccggaatggtcattggtaggtttacctgcaatctaccagcaaacttaacaaaaatatctgcagatctctgagacatcctgacgcagttaaagatgacattctgtacagagtgaacatttttcagggacacagtcagagctgaactgtaatagaagcaggcttgatgggctgcttggttccacgtagatttggccttcgctagctgattgatgattcagattaatcatgtacggtgtatagtaaaaatattgtggtaggcagcaagaggctgctagcctgctactgacgtagaaactatacacgctgtctgatcgtttttgtaactatacacgtagaaactatatactgtttcttgtagctgtccattcaaatgtagcaacaatcagctatttagttttacaatggaatctta

SEQ ID NO: 453977 - DNA, 554 bp, Sorghum bicolor
cacgacactgagctcccctttcacgcagcgtgacacccatcagcaggcgaagcatgagccggtgcagctgaactcaggtgtctacccggatggaccgcccgtcccgctccggtccaggaagctcctcaagttcgtcgacatttcggaggtggtaaaagggccacacgacgtcccgggccactggctggtgatcgcggcgaagcttgtgaaggagggagggaagatcgggatccatgtgaagtttgcactgctaggctacgaagggcaatcgcagggtgacagtttcatgagctgagtctctgtacataacaacagctggctcatctttgtagatttcaggattttggaagaagcataggacgaggatttgttattgctttttttttttttggggaggtcgacaggaagtgtatagagggcagtcacaataaaccaatcatcgctctgttgaggatgctccgtgaattcccgtgcagtataattagagcccgtagttgtaattactccttttttacaaggtatatatttatttcagtatagcaaagacttcggtt

SEQ ID NO: 453978 - DNA, 513 bp, Sorghum bicolor
accccccagaaagccaacctaagccggctcatgccaacggtatctctgcgagcgattctaagaagcccaccagtgcattcgagctgttttgcttagaaacacggcctggtctcgagagcaaggaaaaggacaatgaaatccctgtgaacattgaggatgagcttactcgtatctggaagggtctctctgatggtgagaaagatgaatacgaggcaaaattcgaacttgcaatggccaagagcgatgaatcgaagaaaagccccgcatctgacaagaaggatgataagcctgctgagtcaaagcaactcgttcaggacgaggacatagagatgggtgatgacactgaggatcaagatacacaggctggcgagaaagtagaggaatgaggacatccattcaatgtctccaggggcgttttggcgggtatacaatttcgcatgtcatgacatcaacccatgtactagtaattagatgcttttcacaacaaagaaccaagttccgagaaaggattca

SEQ ID NO: 453979 - DNA, 531 bp, Sorghum bicolor
gcagctcgaagggcatgcccgcctggtgagaagctctctagcgaggctgtcaagtccgtacttgcaagctatgctcaagagcgcgcgcagccagctacaacagccctggagagatctcaaatggttggaaaagcactgttgtgcacgcctggaccagcaactactcttgtcaaggacatgttgaagctcagtaacgaagactggcttttgcgtgcgtttatggcactctgtgctgcgccgtacctggaggatattgagcttacggctagaggacacctgtacaacaaggctgttgatgaagcgagggcggagatggccaaacggcagaaagtggcgaaggaggtcaaggaggtggaagagaaggagagtcagaagtctgtgagtatgagtgagactgagcagcggaatgactttgtgggacttcggaacccggtgcaggtagctactggagtcgttgaggttggttcttagaatagcctctcgacagacttattcgatcacaatctaagctatctattactcagactattc

SEQ ID NO: 453980 - DNA, 560 bp, Sorghum bicolor
cgtgcagcgccattaccaggcactgtgggcgagctacgggagcgtcatagactacgtcaactaccagttctacgcgtacggcgccagcacgacggaggcgcagtacgtggactacttcgaccagcagctcgtcaactaccccggaggcaacatcctggccagcttcacgacggcggccaccacgacgtcggtgtccatcaacacgtcgctcagcgcttgccagacgctgcagtcgcagggcaagctctacgggatcttcatctgggccgccgatcattccaggagccaaggattcaagtacgacacacaagcacaagcgctgctcgccaacgcccctgctggctactagctagataggactagctagctagtagatacctaccataccttcaatgcatttcagttcagttcagtgcagttggatttcgatttcttttccagctgcactaatattatgtatggaataagaccgcctttgcaacgcgggattttttcttgtgaaaaaatgaactgattttctataaaatcctatataatataattactgtgaaattcttttc

SEQ ID NO: 453981 - DNA, 484 bp, Sorghum bicolor
ccatttcgatgtttaacatctgcgaggactctctccttgcttctcccctgatcatcgacctggtcatcatcgctgagatgatgtctcgtatccagtggaaggctgcgtctactgacggagctgccaccactgagtacaagagcttccacagcgtcctgagtgtgctcagctacatgctcaaggctcctctgactcctcccggcaccccggttgtcaacgctcttgccaagcagcgcgcggctttgaccaacatcttccgcgcctgtgtcggtcttgagcctgagtctgacatgacccttgagcacaagctcttctaagcgttgcgtgctcaattgatgcaactgcttttacatagaatgaaagaggaggaattaggacagtcattactgaaagagacaacgtaaaagaacccaaaaaaaaggaggagagacaagtatcaactacatattcataggctccaaaattgaacatgtccattcttctc

SEQ ID NO: 453982 - DNA, 251 bp, Sorghum bicolor
gtctctttaaccatcaatttccaatcaagcgcatccacctgtgcaagatttaggacaaacaactatccaatatatcccaaggtatatactgttacaagctgtaaatataagccatctatcatgtctatcctatgtatatgaccatcagctgttgtacgccataaaccaccaacatcactgttgtatgcctcaaactctatgtttcccccaagattgtatatatatatatggatcaaggcatttttttgtgc

SEQ ID NO: 453983 - DNA, 419 bp, Sorghum bicolor
accaatctggtgtaaaggaattttcaacgtttcattccttcgacaaccctaaaggtcgtgcaatccaaaaggcccctgttggcactaaaagcatgctagcggctctcttcatcaaacacaaatcatcgaagatgaaaaagatcgcagttcgttgacaagctcacgtttgattggggtgacatcactgtaaattgcatttcgtgcaggaacggaagcctgttattgtacatctggcctatcgctatgtgttgggtatgctgatggtttagattctgagtattctgtagtcgtatttcatttcagaatatatcatcttgcagatgaccgaaatgtaatgatttcacataagctcatacaacatcctcgtcgtgtaatgctgcctgaagctttggcatttagcataaataaatgcattttgg

SEQ ID NO: 453984 - DNA, 665 bp, Sorghum bicolor
ggcacgaggccatccagtttccattagcaatcgcattcatcctcttttcgcagcagcagcagcacccagcaatcaaccaaacaaagcggcgatggacggcggcaagaagagccggaacccgcacaaggtccccgcggactaccgcagcgaccgcaagtcggcctccgggatgagcggcgaccccaagaagggcggccgcggcggcaagttcacctgggagggcgccgacggctacgccgacgaggacgtcggcctcgtctcctccaagaacgccaacaccaaccgcgccaccaagggtggaggcgccgccggcgccaagaaggacgacgacgacgacgagtaggccggcctctcgccgcctcggcccgccctccccccgtcgatcgccagcaagaaccaacaagtccttcctacctagtttgattccagtctcagttcgattctcgtgttgaataaatcatgatcgtgtgggtttaggtgtcgtgctcgcgagtaacactgagcacagagccactgggcgatccacgggccgtgcagggtctgtagatatcatctcatctgttcttcgctagtactttgctgatttgctcatgttcaggggcctggcctcgattcggttcttggatgaactgatttattagtttccggaatcgatgctttcattc

SEQ ID NO: 453985 - DNA, 683 bp, Sorghum bicolor
ggcacgaggcacattccaagatgcctgcctaccactcagtcttcctcgatgagcccaaccagcaattgattggcaactttgcactcctcccccttcgtacacgcactcgtgggcccgccatccaattgcccgccctgcccgcagatgtcaccgagctgaccattgatgcctcgcacgaatcctacgaccctttagacgagatcctggccctgttccgcgccaacacattcttccgtaacttcgagatcaagggcccagctgaccgtgtgctcatctatggcattctctatgtgagcgacgtactgggcaagatcaagccgggcatgacacggagagaggctgagaaggccgtcatgaactccgccctcgacaccaactttgcgatccccggtgatgctggattcccattgaaccaggctttcgaagcccccccagacaggaactcggccgaagtgctacgacagtacatcatgcagatgcgccaggagctggcaacacggttactgaacagggtgtatgcggatgagaccaacactcccagcaagtggtggctaagctatacgaagagaaagtttatgggtaaggctttgtagagttgcagtgtgaaattagcgggctctgcagccatagaatcaaaaatcggatgaaagctgtacagacatcctgattcctagctcttaccg

SEQ ID NO: 453986 - DNA, 389 bp, Sorghum bicolor
gctgtgggcagggcagtcagcatggttggttcatgcttgtttctgtaaaatagttcattgtctacaagcatgatggatacatatattggtcaaggtaattagagagggttgctgtaaaatagttaccctggtataggattgttggatgtagaaattgttgatgggctttgtatttttttcccccttttcatgccaaggaattcttttttttttagagggcggggttctgtcaaggatttgttaaggctattagtagttagccatgtagtagaaaactagagaatggtatacgtgggagtgggacctgaagttttttcaggtacactgtagtactattgtaattttgtcttgaagatggaattggatgtacagagtaaaaacttctcttt

SEQ ID NO: 453987 - DNA, 381 bp, Sorghum bicolor
aacgccttcctgttgagtcccagcccagcagccgcaaagaatgcaattacctggatcaacatcggcagcatggccggtgacggaggtgatatttcggcgatggggctgcgtcggagggatgttacggtgcggggctccgggccggggtcgtgggatcccaaaaagcttggggctgaaactgttggtatgttaagggtgcttgttggtgttgggagtgaaggtttgaaaaagtatcggtttgatgatgttgaaaaggggtgggaggataagggtagggataaagttgtttttgtgtttggggaggaaagtgaaaagttgaaatagtggtatagggttggtacaagcggatgagtatggatagaatatgagacgtgtttatga

SEQ ID NO: 453988 - DNA, 567 bp, Sorghum bicolor
gtttctaggatgtactagttctagttgcattggccatctccaaaatcctcagttgagttgaagtaataacatggcgaagggtggaaagatttaggtaccaaagagctgccatattggctctgagccaaagatacaaagctggagtatgatctcggatcaaggacgacgtgtgacatcagattgaaaacgctattgggcaacagtcatggttctgtccattggatctagcttttcggaaagcaatgccttcaccccgcggaaacggtaaaataaaaggagaaaaagggcagtgccgtcagttgattgctgcttataagaagcaaagggggcagagacgatttttacatggaaaattatgtactttgcaagaaaggaaacatgtgggaataaaaatagtgagcctacgtttagctctgtatataaagtcacttgattttatatgtattattacggctggtgaaacccgcttctttaattcaaagctgtagaattttggcctatgtttagctctgtaataccataggcagttcagattgattcagcccgttggtttattttgccctcttt

SEQ ID NO: 453989 - DNA, 563 bp, Sorghum bicolor
gaggatgttgatgtgcatactacagaggtggcgcgtggacctgcagtggcagcttcagtgcagcgggcaacatgctggaattgctgcggcctttttgatgcatttactggttcagggagatagatgaagggttggaatttgaagtcaagaagttcagttcaaagctgataagcagttgtaactagactctgtttgaatagtcacatgaatgatgaagcagaaggatttgggataacatcgagctgatgtctctactttcttcctccctgtgtctctgcatctgtgcaaagttacacggggtcgtggttaatattcttaatttccttagcatccccaacacctagccccctttgtctagtgtcgtctaggtactgctgtccttgtagcataagagttgaagtgggtcgaccgtaaagaaattttgctgtttctgcctttatacttattttttctggggcatcgtctgctatgcccctttctctcatggttgtgacttgtaaggagtatatttgttcgaacaatttgagatggttctttgaaatagctacaatccgagattgctg

SEQ ID NO: 453990 - DNA, 480 bp, Sorghum bicolor
cccagagtgcattgacatttgacaggttggccggtccatcgtcgagctccgcaaggaaggccgtgtgtcatcaggaataagagaggaaggagatgcctactgtagggcatccgacaatgggagtgcgcgatggcagatgcgggcgcccgcgccggcgcctcgtctcggctgcgtcgccggctccatcccttcgtcttgcctgctgtactgcaacagctgggggcgctggcgttaggggaagagcgacctggaagctgcactgcactgaggtaggccgtagggagtggtgggtggtgatgctgaagctgtacctgccggctcctgattcctgatgatccgagggccaattcgagatgggggaaaaaatgtcaaatgtctttctctttttctctcatagatattgctgatttatggtttgagagaaatattagtgaacgaatgccagattgggcttatcagtgctttctctcgtgccaacct

SEQ ID NO: 453991 - DNA, 433 bp, Sorghum bicolor
tcgataagaagcttcagttagtgggtgtcgggtatcgtgcagcggtggagggcaacgatctcgtgatgaacctgggattctcccaccctgttcggatggccattcctgaaggcctggcggtcaaggtggaagagaacacgaggatccccgtgagtggctacgacaagagcgcgatcggtcagtttgctgccactatcaagaagtggaggccccctgagccatacaagggaaagggtatcagatatatggatgaggttgtcagaaggaaggaaggaaaagctgggaagaagaaatagaaagtgtttgttatttttggcccgtttcatacttcatttcatttttccccactgtaatgatcttcgtctgctaaggctgaacctaagaaaaatcttgttctgtgctgatcatggcttatagatgtcccctttgagcc

SEQ ID NO: 453992 - DNA, 361 bp, Sorghum bicolor
gctgcagctctgcccgtacccatggtgatactgagagcgcaagatgtgtaatttgcctggaggattacaaattcaaggactctatcggaaagctgaaatgcggtcacgacgaccacgcagcctgcatcaacaagtggctgcaggtgaagaacgcttgcccagtctgcaaagcttctgcggcaggcgacagcggaggcaccgaatgaagcgccctcctgccccgccacattcagcccatctcaggcgaaactgtatctattggctgatctggtcctgctgtgtaaataatggtcctggaacggattatttgtgagctgaatttgaactcgacatctaaaatataatcctcaagctagttgct

SEQ ID NO: 453993 - DNA, 475 bp, Sorghum bicolor
gcattgcagagattggctcaagatcccaattatgctgtagctagggctgcatcaagcgccattgatgaactcaagaagcagtgggaacttgaagaaggtgacagtctgaggtttgtaatgaatcagaatttggcttctgaggatactgatggtgacgacaattcagcagcagatgacgacacatgaggtgtaaacaagttgaaagattccaatttcaatgacaatgggccaatgcataagaaatcatcatggacagcacataaagcattcctgtttaacttttaggactgaagatcagatagatataggtgttccatatatatctagttgaaggaaaaaaaatgtgttgtggaacttggtaaatgggggctaaaaagcagagttccctttggatattgttcatacgtgaagctgtatgttgtatttgaaaagcacgtaaaagtgaacaaattcccttgtgggaatatatatagtc

SEQ ID NO: 453994 - DNA, 524 bp, Sorghum bicolor
gaaggtctttctcaaacttccctgccaaagcatcagtcaatagaatggaatcatcctgcttctcactagctttccatatcttcaaactaggagggaagtacccattgctgttccatttccgcagctgtatgactgagaaaggaccttggattttattagaaggatccatgtacagccagatcttctcagagtcgttaatgactgattcagatgcagcttttgcccctgaacctatgttagtagctaaaattccagatgaggcaccaggtgactcttgtggagcactgcgcgtggtgccttccagtttaactgtttgtgcaccaatgttcgggctctctgatttacttgtataaccagcaatttcgccttgagaagaaaatgtcgacctccgtgaaaggggtgattccatatgagaactcgattcagcccatgtgtttcgattagattcccagttagtttttggatctcgctgtacagcatttctaccatctcctttacctggagacacaagattaccatctttc

SEQ ID NO: 453995 - DNA, 492 bp, Sorghum bicolor
ctaacatcgcaactagcgttcaacttcgatttcgggatgatgctcatgtacggcgccaaaggtaaggagagaacagagaaagagttgtcggagctcgccagagaggccggcttctctggagactgcacggctacatacatcttcgccagcatctgggcccttgaattcacaaagtaattaaactagctacgtagctcttatataattaataaccatgcatgtgcttcgtcgcggtgtatgaatgtcgtcgcacatccaggcatatatatatatacacatgccgccatctaaacatatatgtcttgtatgccatcaaaataccgtattgtaatagctcgccaaactgttcgcttgagcttatgagctgaatctaccatttattcagcagtattttttcataataaatcagtcaacagtactttttgccatatgtatttgtgataagtcaaactatatcaactttcacaaaaagaaattatgagtctagtgtgc

SEQ ID NO: 453996 - DNA, 554 bp, Sorghum bicolor
aaggacaaagactatccgattggccagtcgctctcaaccttgggtctctctctgatgaagtggcgccgggaccttgctctgggcgcaaacttgcagtcccagttctcaatcggaagggggtcgaagatggcagttcgacttggtctgaacaacaagctgagtgggcagatcactgtcaggacaagcacctcagaacaggtccagatcgcactcctgggtctcataccggttgcagcctccatctacaggagcttccggcccagtgaaccgtcctttgcttattagcttgtctggaggagtcccagttttattatttcataaccatatcgtttctcttagcaattttccttttcatatgaaccatgtttccttatgttttagttcgctctgtaattcctatcataattttggctgaagagggttgtgagatttatctggaactatagctgaataaataatgtcgcgggatgtacggtccttgtggttaccaatctgttatagcgtttttaagtctgttctgattattcttgtgattatcaatctattagtgtttc

SEQ ID NO: 453997 - DNA, 567 bp, Sorghum bicolor
aacattgctaaagacgcgattcagcaactccgggaaggtcggtcttctctgtcagcatgagtggaggccaaagtcccttgtgactctttcagcagagtatgatccaaaggtggtaagtgcgccttcaagaatcggagtggccatatctctcaagccttgagatgagtcaaatcatcttctgtaaaacagtacaagcgttacatactgatactgtctccaagaacataagctttggagcgatacctagaacaaccctccattttagcctttttttggtaagagtcctgtggcaaaggagtattgtctgggagttggacttgttttgtggaatgtttccattagagtcaactccacaccgagcattgaaaatacagaggtttgtattagagcagaagcttcagtctgcgatataattttcccccccatgttttcctagtcgtcgcaaaatgattttggaggtgattgaacacctaacatcttgagttgatggtagttttaacagctctggagataaaaggggcatttgtacccagcaacagcagaattagctcttgaaattggttgttt

SEQ ID NO: 453998 - DNA, 476 bp, Sorghum bicolor
ccttcaaagcgtagttcacatggatatcgggcaaagtcaggagatcgctcccacctcttcgaatagctacaacggttcactgcaaacagtccacatgaaaatggagctttgacatagacgaaattcagtccaaagctcgacgcccctgtatatacagaagagagcacagcttgcagcggaagcactctgagattcaacctaacaacgttgggccctagcagtgttttagcttctaattttccccctggtgtaatgattctttgaacaagatgtgaagatcaccacgctggcggttggtcgcctgttttagctgcaagatcgcccgcaaggaatgaaatgcggtgcattgcatcccagtatattctcaatcagacccttatgctcccctcaagcgagagggaagaagacctgtaatatcatttgtattgccattatatttgtagctgatatatatatttaagatccctattcctgtc

SEQ ID NO: 453999 - DNA, 513 bp, Sorghum bicolor
tacatacaggtggatggggagaaagttatctttctagtgaaactgaggaatatgtggatgctagtagacctcatgctgtgaacactgcttgggcaatgttagccttagtttatggtgggcaggtggaacgtgatccaacaccattatataaagctgcaaaagtgttgatcaatatgcaactagaatctggtgactttccacaacaagaacatgttgggtgctttaatagttctttgtacttcaactacgggaactaccgcaacttgtatcctatatgggctcttggggaatttcgtcaacggctccttgcaagaaagaagtgaaaccaaaatccatgaaatctaggctattttactttattacaaagaatatacaaaatgttcagaattactgttatatgttagtaattgtgcttacggtccggttatgatagtggaaaactaatggctgtcgtacataatatattgatgtgaccttccgaatctaaggacagagctgtcgctctttcttgtt

SEQ ID NO: 454000 - DNA, 441 bp, Sorghum bicolor
aactcacctcttaatggacattggcatgatgaccatgacaaaaggacgccaacgggatgaaaatgaatttcgtgagatcttcatgaaagcagggttcagcgactataagattttaaagaaatttggagctcgtgttgccttcgaagtgtatccgtaagattgcacctggactttttatatattgtgggttttgtggcttggatatcctaaataaagagggtctgccttagagtattcatggatcaccgtggacctaagcagataatcttggttgctttcttaagattctcgtggatctttcatttggaagagtatggcaaataatatcccccatctagagttggcgttgaattctatgtactttggccctgctttgttattttaagcgccataatatccggtatcaaataaaaaatttttggttaaaaagcctgttcattt

SEQ ID NO: 454001 - DNA, 522 bp, Sorghum bicolor
gaccgtctctgcagggttgcgattcggctaccgaacaatcggaggatccaaagaaacttccttcacacagatcctatcaagctcttgtggtcattctgcgctcctcaggttgaggacggtgagaagagggcgttccacttcgtacaggccattcctggagcatcccagaagctggagttcagaagcgaccaaacattcaaggaagccgggctggccaactcgatgatcaacctcttgtgggactgagccgctcccatctcgttcgggtcgtgtttggggatggacttgaagatggcttactagttattatctttcctggaggatcaactcttttatctttttgctccacttgagcttgagccgaggacaaaaatctgctgtgccctgggctgtgtgtggaaatgctccttttgccgttcgttcttgtgtccatatacatccccgtccctggtagggcttagctctatttaatgcacatatttatcacggattcaagtctggtgcattgcatgcattgcctgc

SEQ ID NO: 454002 - DNA, 569 bp, Sorghum bicolor
cttgggcctagcattgccggggttttcacgccaagcgatgagctagccaaggaggttaccgctgcttctgaggtatcaggtgagaagttttggagactgccactggaggagagctactgggaatctatgaagtccggtgtggctgatatggtcaacactggcggtaggcagggaggttctattaccgctgccctgttcctgaaacagttcgttgacgagaaggtccagtggatgcacatcgacatggccgggccagtgtggaacgacaagaagcgggctgccaccggcttcggcgtttcgaccctggtggagtgggtcctcaagaactcctcgtcatgaacaaaaccccttcggcccttccccacatgttacatgcttttccaagctgccagcggtgaagaaaggtggagagggtttaccatggtttttttccccccttttgtgctaccattccattccacagttgcagccttgcaaactgcagacccgcctcttggcatgccaagtgggcgtgtgtgataccgttgtgatagaataatcatcataaagggtttggacttttagaacgc

SEQ ID NO: 454003 - DNA, 418 bp, Sorghum bicolor
ctcttccgatctcaagggcaacaccaactcctccatcttcgatgccaaggccggtatctctctcaacgacaacttcgtcaagctggtctcctggtacgacaacgagtggggttactcccgccgtgtcctcgacctcctggcccacgttgccaaggtcgatgcctccaagtaagcgtagagcgctcatgaggctggaagcaaaaccaaacctaatcaggcgcgacatgatgacgatgccaatctgccgcgtgttttaatgaagcaaggaaatgaaaggaagtaaaaataccaaaattaggggagattgtcggaggggatgacaacggctttgttctcatcggctccagttccctactagacaattgatcttagtatagccgtggacagaaaaaacaaataaatagatccatccctcttg

SEQ ID NO: 454004 - DNA, 559 bp, Sorghum bicolor
cagaatgatcggtacagatatctccttccaggcaactgcattagagagagtggctaggcagctgctactgtctgcatcatgaccctgaggcgcacagacgtcgctcgcggatgtcccccgcactggaggagcgccctgccgtggtggggttgtatttctcatccgattggctgacttagttgagtgatcgcttggctgatggtggagttcatatgagattttgtaccgtgtaatggaaaccatggaaggcctgacagcagcataggggcatgctttgatcgcagctgcgttcttgttttgcagaggagctcagcagtgtgtgtgtgcttttataccacctgagtttttattcattgcttccatgattgatatatgaactcaaactatttgtagatctcataccgagcgacattcagattctttcctctttttttttctttgctctcgccttgtgatgtacattgccattcacttaccctagttacctcttacctgagtcatgtcatgtgtatgctttcattccaatttctgattattgattgacagcggctctatatca

SEQ ID NO: 454005 - DNA, 399 bp, Sorghum bicolor
ggtggaggccaaggtcgggctggagaaggagcgaatgcgcgctacgcgacatgttctctctgagtacggcaacatgtccagcgcctgcgtcctcttcatcctcgacgagatgcgtaagcgctccgccgaggatggccgggccacctccggcgaaggcttcgactggggcgtcctcttcggcttcggccccgggctcaccgtcgagaccgtcgtgctccacagcgttcccatcaccaccggagcggccatcgccgcctgaagtgctccaaacatggtggacagatccacaattattattttttgagcgtcaacggggagggagagtttccccaccttaaatttgtattaagtgatcttggctgaaaatgccaccccagataataaaggtttacatcagga

SEQ ID NO: 454006 - DNA, 552 bp, Sorghum bicolor
aagattcaaggaattggagctggttttatccctggagtcttggatgttgacctccttgatgaaactctacaggtttcaagtgatgaagctattgaaactgccaagtctcttgctttgaaagaagggttattggttggaatctcttctggtgcagctgcggctgcggcagttaggcttgccaagagacctgaaaatgccggaaagctatttgttgtcgtgttcccaagctttggtgagcgctacctctcatcagtgctgttccagtcgatcaagaaggaagcagagagcatggtggtcgagccctagagcatgcaattctggcgaccattttcaggatgttcaccattttcatcacagaaataaagcttcggtgcccttctgcttctgttgacttcgacatacatctgtctgccgacgatgtccagtccattgtggtcgttgttttacatcgtttatagacttgtgatgtttttttactacaatttgacactcgttctattctgtatatcgcgtcagccagtgtgaaataaaagcagtacagtgttttattgc

SEQ ID NO: 454007 - DNA, 528 bp, Sorghum bicolor
gggatgctgcgggacgggcaccgtcgagaccacggtgctcctctgcaaccccaagtcggtcgggacgtgccccaacgccacgtcctacgtcttctgggacgccgtccacccgtccgaggcggccaaccaggtcatcgccgactcgctcatcaccgagggtctcatcctcgtcacataattaaaccacgcacgctggatcgatcggagagacggagactgcttgtggggccagccagcgtctgacctaccacgacgagctgaggctgagcatcctgaaatgaaaggaaataacgtcgtcgttgtggttggtttttggtttgcttcaaatcgatcgaaatacacaaaagtcgttaggtgcctactggatcgggctctaaacatatatctgtaaaattgttacttttttcttgtttttcttttaattaatgttttcggaagtacttataaggcacatgagtgaactcctattattgtcaaatttaagttcgatgtttgtgtagacacaagagaagaggcagattttatctc

SEQ ID NO: 454008 - DNA, 421 bp, Sorghum bicolor
caagccagtctacctgctcgacttcacctacctgtcgcagctccgcaaggacgcgcaccccaccaagtacgacggcggcatcttcggcggcgactgcacgcactggtgcgtcgccgggctcccggacacctggaacgtcctcttctacgccgcgctcaccgggcaggactgattgatgactcattactagtagtacattttttacagacagacagacagacagtgttactttattactggtataagctagcttagggtggagtagctcaataagtaaaggaaaagatagcagattggtttcttatagttatagcgggggtcaaaagattttcaacccaaatgagttgatagaagaatgtcaaaagaaaaagattgtaattccttcctgaattcaatggcaattttttttggggggtggttt

SEQ ID NO: 454009 - DNA, 463 bp, Sorghum bicolor
caatcgggttgtactgcaataagctaagagtgctgcatgtgaaccgctgccgacacatctgtgaccagagcttgctggccctcggcaatggctgtccacgcctcgaagttctgcatataaatggctgtgccaagatcaccaataacggcctggctttatttaccatttccaggccccatgtgaacctaagggtggatgaagttttgtccattggcccttccattgagaatttgttccagatgcattgagaagaaattgtagttagattttgagtttggggttaaaagtttgatagcccatcccattacagggtgattggttcttcagccattatgtggattgtgtttgctctggtgcatatttattgtaagataacaatagtgaaccataaatatacagatgggttgaacttatgtaggtttacttttgttagtaatatgctctggctctggtttactggtgc

SEQ ID NO: 454010 - DNA, 684 bp, Sorghum bicolor
tggatttagcagtgatgagaggataaaggtgatagctgcaacaaatcgtgctgatattcttgatcctgctctgatgagatctggtcgtctggatcgtaagattgagttccctcatccatcggaggaagcaagagccaggatcttgcagattcactcgaggaaaatgaatgtgaatccagacgtcaacttcgaagagttggcacgttcaactgatgatttcaatggtgctcagctaaaggctgtttgcgtagaagctggcatgcttgctctacgccgagatgctacagaggttacacacgaggatttcaacgaggggatcatccaagtgcaggcaaagaagaagtccagcttgaattactacgcataaggggagcacccagtccttcgtgatcgttcagttgtttgtgacactgccattgtctggataggctaacttatgatttgtattaagcaagcactgtcctgctttgcttttgtatcttactccgtacgagagtatcatattttatctattatattaatcaagtggcatccagatgttttttttctttgcctgccgtttttggtttgtttcttctcctggagagtactcgggccagcatgtttactctggtccagattgttgatgcatctgcatctctgttgcatactccgctctcactgaataattgggatgatttacta

SEQ ID NO: 454011 - DNA, 548 bp, Sorghum bicolor
atttcaatccatttcttaacatgttatcagtatcgactacttatgctaagcgctacattattctgacaaaattcagaaatgtagttctgtacagatttatattctttgtcaggatacctgaatacccaaagactgtagaactgtactctttattgctgatttctactccttgttgctattcaatcacaaaaagatacgtgcctggtggagaggatttgccagactgaagtatagtgggaactcactggcagcagtgggatctcagtgcagagttcttgcctgacgttgtcatggacttgttcttcaatctggtagccctgaagagtaactaaatagctagtatttcctgttaatcatctacagtcaggcgcggaatgttttgggagttaggagctgctaggtctgaatatgaagtaattgctgtaatctgcacgtttctgagctcctaacttctgagcatgctactactgtattatgtaatttaatcaactgtactattcaataccatgtttacatttataacatgttgcgaagaaactattatgtgg

SEQ ID NO: 454012 - DNA, 779 bp, Sorghum bicolor
ggcacgaggcacatttgtagaagataactcattgccatcattttcaaaagctgttaatcagcgtgatgctgatcttgtctacttctggcagaagtaccggaaattggctgatgactcatctaagaaaaatgaagctcggaaggaattgcttgaagtgatggcccaccggtctcatgttgacaacagtgttgagctcattggaagccttctctttggctctgaggacggtccaagggttctgaaagccgtccgtgcagctggtgaacctctggttgatgattggagttgtctcaagtccatggttcgtacttttgaggcacaatgtgggtcattggcgcagtatgggatgaagcacatgcgatccttcgcaaacatctgcaatgctggcatccttcctgaagcagtgtcaaaggtcgccgctcaggcttgcaccagcattccttccaacccctggagctctatcgacaagggttttagcgcctaaaagccacaggtgaggcgaaatattacagcagctccaccacaccgaactccattacattacggtactcagggggtcttagttcttgaaacataggtgaagcagacttataccattattatagctgttccaccgtaccagattacgtagccatgcccaatttccggtgtacatacatatacatagtcggaaagttatttggcaattgtattggccgttggtgtatatattccctatagtttgttagcagatgtgtagtttgtaattccataaatgaagagcattgctgctatttcta

SEQ ID NO: 454013 - DNA, 896 bp, Sorghum bicolor
aggccacggacgacgccgagttcggggagctgtacgtgttcaagtggacgacggtgctgatcccgcccaccatcgtggtgctctggtccgtcctcctcgcctccgtcttctccctcctctgggtcaagatcgacccattcgtcggaggaaccgagaccgtcaactccaacaactgcaacacagtcatctgctgattcaccatcggtaagctggtcccgtcccccggccgatgtgtttctggtgcggatttcctctgtccatctcgcatctgggcttttgccccaggatctgggaggggtggtgtagattagttctattttgcatccaagtgttgattggtgtcgtctgtattatgaaaagttttggtgctgaagtgttaaactcgcctcaattgtgaaaaaggcactgtttaagtgtgtgtaaatcataggaacgtgggggaaaaaaggaactgagatacacttgcctaccaaaaggcgagatcatttacatcagtggagcttgaaattgcagttgtgttaagcatgaccgcacgagtgatgattatgggtacgcaaacgcaactgaattttatgcactggcctgctgtggaaaggagatgacatttcctcatgaagaccatgattaacgtacattgtacactaaacaagacgtgcgctcagtctttagaaatcctccagggtaccaagtgctcaagcccccaagctgtctgtcatcatccagtagcacgaactttttccacaccaaggccttgtttagatacgaaaactttttggatttcgctactgtagcacttttgtttgtttgtggtaaatattctccaatcatagactaattagggttaaaagattcatctcgcgatttacaagcaaactgtgtaattagttttattttcg

SEQ ID NO: 454014 - DNA, 450 bp, Sorghum bicolor
tcaaaggagaagataagaagcataggcattgagttaattccagtggagacgagcgtcaaggagactatcgaaagcttgaaagagaagggatttgttagttttgactcgagcaacctgtgaaacagaagtattactattagtacctgatactgcattagagacatgcatcagacttcgccattcacaagttgctagtagctttgatctgtaaggttacctaaaataaactgtggcacgtcgccacgttgtagcttttttttcggatatgttatgttttggtcggcttgggaaaacgtcacatatatggctagtctcgatagggattttatgtcccagctttcaacgcatctatattttagaaatagtcatctctctttataaatatggtgttataatagcatatttaatacccgtaaaactttaatgaaattcgattgagattggcagctg

SEQ ID NO: 454015 - DNA, 444 bp, Sorghum bicolor
atctcaactctgccgatatccaggcgaccagacgcactccgagcacactacatgacacattttggcacactcctctccgaggaccttcaggccttgattcaggtcctctttatcaacccaggtcctcttatccggtatcaccgccatgtgaagatcagtataacataacagaattacaagcaatgccgcaaacgatacatcttgattctcttgggtcacggtctccataccaacgtcgcggaatgtcttcatttcctcagtatttcaacgcaacttgccaagaaaatgctttaacgtccagcttttcagggaacgaaatagagagtttatctcctccggtattacaaactcaactactgggtcctccaaggctccctccaaggggatctccggaaggataaagataagaggggttaatcttaatataaagtttaatatatattt

SEQ ID NO: 454016 - DNA, 327 bp, Sorghum bicolor
agacgccggagcaggtgttcatgcaggaagaggaagccatcagaagagtcatggactccttcagggtcatcaagacggcgtagctaaatattgcaatggtttgtctattgtagagtgcacatgttttttgtatagctgatgcaatacctctgtccataaccttttgtatcggcagagatgttcatattcaatgtaccttgtttccaaatgttgcaaagtctaatcagtttccattcatgtctagtgggaaaagccagttccaaatgaaatgtatgtgctgaattcatatcaaggtatcccaaataaaatatagaaccaatcagttgc

SEQ ID NO: 454017 - DNA, 515 bp, Sorghum bicolor
gatctttgcaagttgggttcactgacgttcaaagctcctgacaatgtaaaatacccatcaatggacctagcgtatgcagctgggcgggctgggggcaccatgacaggagttctgagtgctgctaatgagaaggccgtgcagttgttcattgatgaaaagatcagctacctggacatattcaaggtggtggaacttacatgtgacgcgcatcggaacgagctggtaagaagtccttcactcgaggagatcatccattatgatctgtgggcgaggagatatgcagctagcctacaaccatcttctggcctgagccctgtccctgcataataatatgtagatatactcctacatattgtcatgacctcgtgtacaggagttctaagatatcaagtgtgtggctcctgtttccatgttcgatttccaggagctagatgaagcattaggggacatctaggtcgccctcctgaatgtaaatcatgcctccacagtccacacgaataaaatgcatctgttcc

SEQ ID NO: 454018 - DNA, 200 bp, Sorghum bicolor
ctgaacaagttcctcctcagcttcagcatcaaggtgtgatccatgcatcaacgaaagcaggaggggtgttcttggggttccgccccgccccccaataaaattgcattggttaattcttcgattggcaaagtgtaattcgtcgtgagtttgagtcgattcgagtcggttgctttgttattcagctgctctgtttccaagtt

SEQ ID NO: 454019 - DNA, 522 bp, Sorghum bicolor
taactttatcttcttttgctcttagtacccagaccttagtcgcattgttttagtggtgttatccctacctttacagatgagtgcaacacctttctttttttatggaactggaggggcctcggcccctacaggtgattttattaacacattaagaaaagtttacaaacagacacgcacgcacacacccaagggcgagaaggaagaggaggaacaagaagttcaagaggaacagtagcctaagaataagactaagactaaggctcagactaactaaggaacaaaggagacaaagaaaaccaacagcagaagccaattgccacagggcttatccaagaaatgaaaaggttccacgaagcaaattccggacctttcattctattgcatatctattcagtggtaaacgtatgtaattgctatatatatatatatatatatacataggaggatgggtatatatatatgtgttctggcacatgtaaaaataaataaagtattttgattcctttgtatgatatatctcta

SEQ ID NO: 454020 - DNA, 376 bp, Sorghum bicolor
gtggggaacttagagctctgtcattgttcaatgggctaagaaaactctttaaataaatggatcggctatcttatcttggcagatcttactggatccagtaacatggcgctttgaccttactgccgaagcctcatatgtttgtttgccaaatcagactgcagtccaggatctggaccgcaaatttcatcctcggagaaacatctggatgctagaaactagtaattcttcaatgaaggatagctgtgcgttgacattgaacagcccagagcttatatgtaaagagtaatcggtgtaatgttgattcaattcaaccatggtgacctgcaactattaagaaagtcgtgagcggtaaacccacatgttcgcttctgtgtgc

SEQ ID NO: 454021 - DNA, 553 bp, Sorghum bicolor
atggtggcgatgagattgaagtgaaggatatagttgagaggctaatgactgacaccacaaaggctgacaaagatagactgccaaaaactggttgtgatcccaactgggagcatggtctgagctccatcttcatcgaggtgcaaactgaccaaggcctctacgggacacggagcacagctgttttatcagtgaactatgatggtgaagctagcttgtacgagaagtaccttgagagtggtatatggaaggatcacacagtgaattaccagatagagtagtaggcaatgcacaggaaaagctggcaaccaaaaataaatagagacacaattgtgaatttcattctttccctgatcctgagtcacctttcagaactatctaagatcccatcatgatgccaattacattatttactgtaagcagatttgtcacttgacaataaaatgtcaagcagaagtgtaagtttaaatatatacaccaaatatataaatttacagactttgtgtaagatcagtttttcttgccttcttggacatgtttactcgagaaaaaaaaa

SEQ ID NO: 454022 - DNA, 430 bp, Sorghum bicolor
gcccctttgtgatcaagtaatggcatggccccttgcaggtggcgaaccaaactgctgatgctgaacttgcaatgggagccttggacattatgaggattttgcttgcacaagtcaggccttttgtctcagtacgtgactctacttaaaaagagactttagaagatatgatctctgactaacagaggcgggccatctatagacggcagctatcatagagctcgagcgatctacatctatgcagtagacaagtttttgtttcaaaaattcattttaagttcccagttttaaaatctaaattttagaactgtggaacaacattggatgttggcatggtctgtagtaaagttgtacttctctatgtgatatatgagtctgtggtttgaagctatccgagtcccaaaatatgagtttggagttcttagattttgag

SEQ ID NO: 454023 - DNA, 373 bp, Sorghum bicolor
aacaagtgctggtcaaacaaatggccacctcattgctgaaagcgctgcacatcaatacagtattgtgattttagtgggttatgtgttttcctctcaagttgtatatgtttgccctagaggaaaatgtgtcttttttctttttgcctacttttctgctgtggtgaattcgcatgagcaccagactcccttgttgtacctgatccctcttttttccgggagaaaggttcaacgtttaggtgcaggataaactgggctttctatccttcagggttgtttatatttagcgtatgttagtgaaaaaattgtaaattagacatctaattaaaaatacaaaacccaacttgacattttgttgcatgttagtaaattttgc

SEQ ID NO: 454024 - DNA, 461 bp, Sorghum bicolor
tccgagccagagcttgctcctggtgctactcacaaggccgccatcgccgagatgcttgttgaagacgagaagtccggtctcatggttgatgaggaggctcctccccagtacgagccacgcaattagatttcggtttctgagactctgtacttgcccgcattttagccgtagttgataagaaaaggggaacgcacactaccaacacagccttctacggcaggcgtgttattgataccaaagattgtatgtttttaaaggattcgggctcgggataggcgttatgagtatggtggatgggattatgtcttatgaactggatggctacgtacacgtcagactcggcgtgactttctttggtaacgatttgaaatcattactgtcctttctttaaagattcggcggtgtctatcaggttatggatggtctaggcactgttggctaaactttaaataaatatatcg

SEQ ID NO: 454025 - DNA, 515 bp, Sorghum bicolor
ggcagcactagtgaagctgactgcttacatgcagcgccttctattttgcatgcgatcttttggcgcttgctgtcttggtctattccttctatctgtttctgaaattgtctttagtttatcacctaacccatctctcgtattccagggattcgacaaattgaaagatgtggtgaacaagtgggcagagtcaccatcagccgcatgaagatctcacttccatcagataaaatcccaggctcccagcacaattttggccacgggattaattaattatatgatgaaggctctccagataaaacgagaaaagaagttgtcaactccgttgacaacagaaaaggaaaggctcgcgttgcaattgctatgtttgttgggtcgagtgatcgaaatttgttgtgtgtactgtcaaggaaacctctgtgaacttgaataaattcttcgcagggttgtgcctgagaataaattggaccgaggcgtctgtgaactttgaatcagttcctcacgagtgttgtgcctga

SEQ ID NO: 454026 - DNA, 431 bp, Sorghum bicolor
ggagcgtcgacacaacgttattgaacccagcagcaaagagcgagcggctgtcggacacatggtcaaccatgttcatgggtggcagatcaacaaggacacctgggaacctcagtgctgcaggcatcgcagggttgcatgacagtaaccatccgatggatcctgctccatcacctcgtccatatgagtggcctactttctgcaggggaggatcttcctagtttcccctaccctgtaggtaagaggccattgaataaaaaaaaagtaaaagctgtcatttgtttcttttcttgttttggtctcagttgcagttggttgaaaaagttttactttgtgtatcgaaccgtgcttgtgtaccttgactgttggccgagataagtcatctttctgtgaaatcgttgtgcatgaaaaatgaagggagaaaattgaatcta

SEQ ID NO: 454027 - DNA, 488 bp, Sorghum bicolor
cgacacgcagctactcactgcatcgagtggagcacgttggataaagccagggcatcaccactttcttttggtatttcagatctgttgaaccgatacacgtggcaggaagtgattcgggggatgaggtatgagttccctcattatccccaggctgtggcacgatctttcgagaacaacaagttgtggtacacactgagtatgcataggaggctcccagttcccagcatctatggatatgttgcaccccgcgttagtaaataaggcgttttcctgtgaatacaatatctataagttatcaggacggttcaacatctagtgatttagatgcttagcccatatctttaatacattggttacgctgctgtaagcctgtacccttaagaggaggctaaactgatatactgctgtaaagtatatgtcttccggaagtagcaggggataaaatcccagtgcgccggcttgagaatagcctatttatactcttcccc

SEQ ID NO: 454028 - DNA, 732 bp, Sorghum bicolor
ccatccaccgctacccggtgcagctcccggaaatcgtcaaggacacatctgatgactcctaaagcatgcacgcgcgcagcgcaactggcggtttcagggcgtatatttgtacgtacctggtatacgtatacatattgattcagttcgctagtgaacaaaagtatgcgtatattcctcgcaaaaaaggaaaagtatgcgtaaatatcggcggatatatgacatgtcgacgtctcagatagggcctcggccttctataatagctggatcatcgatgccattgattgtatgtagcccaaagcaaagggacttgatctgtttggtgcctaaccttcgtacaaaaacacgtcatgtgctgttaggatgggaacagacaatattatagcttaacatactatatatgtatctcttccatataattgcaaatcaatgctacttctattataaacaaatattttcctattttagtaataactagcaaaacttgcccatgtatttgaagagaaaactattatatatttagccgatcaacaaggagcaaagaaaataagttacctgtgtggtgccactatatatgctagcagttgtctctgcacccgcttccatagcgttctgatatgagatttgggttttcattttaggccttctttagttcgcgaaaaattttgggtttcgctactgtaacactttcggctttatttggcaattattattcaattatagactattaggttc

SEQ ID NO: 454029 - DNA, 563 bp, Sorghum bicolor
ctcacaagcacagggacagggccagcagagcggcgggctcagcgtcacgctctgcagccctgaaaggaatgtgatcggaggtgttttgggcggcccactggtagctgcaagcaccgtgcaggtggtgctggggacttttcaccagggagggtcgagatccaagtccaagaaagccgggaagctgcagcagcagcagcaggcggccacggcgacagcggcggccttcagctccgactcgctcaccggcggccaggaggcgtcgcccagctccgggcacaaccaaaatctaacgccgccgccctccgtgacgggagggtggcccacctccgggatatttgacacgagaagttccagcattgatatcaactcatctagaggctagctcatttgtcgataattccagctctcgagaaattttctattttcgcacaagaatacccgaaaccatacttcgaaatagcttattcggttcttttttttgagtataagtaaattcttatagaattcactaggcatcgctcaatgttgcgacctgtgttattatttttagcatattcgattcc

SEQ ID NO: 454030 - DNA, 470 bp, Sorghum bicolor
ccccgttgtcaagacccactaccctgctcctcctgctccccctgccaacaacggcactgctcccaaccctcccgtctacacccaccctgctcagcctcctgttgttcctactcagcccgctggccagcctcccgtctacggccagcccacccctactcccgtccccgtctctggtgctgcccgcttcggcgctcccattgccgttgttgctggtctcgtcatggccgctttcgctctgtaagcgaggccgcgcactggatctaatctttggttcctgcgtggcgtcatgacttcatgactgcattttagagggtttctcgtttcttcaggtatggagcagtctgggtatatcaggcctttgttgcgcacatacgttgcttcttgtgttggtatctacgagttggaaggttttctggattgttaatgtattgagccaaaactataaaacccacttgggttatttgtcttcc

SEQ ID NO: 454031 - DNA, 553 bp, Sorghum bicolor
aaccaagttgctcccccaccatcagttcaaatggctgccatgtctcagcagcatccgcagatcccaacgatgatgcaaccaaatccctttggaccacctatgcagccacagatgagcatgggtcctgcaacaaacaatccctttctggattctggcttcggggcattcccagtagcgaacaatggccatcaacaacacaacccatttggcagtgcccaacttctgtaggctacatagttaaacaagagcaaatttgtgccccagcaaatgcgatttttgtgtgattatatcatgcattgtgcttggccattcttgtatgcaacgcatgtattatgtattggcttcaccacacggggagctatggcgtgacccaacccttgttgtaaagaaattagtgacctgtgtaacatcagatatatgtcaataaacagtaggcaatgttattataattaaaaacaaaagagcggtggtatgtaggaattttcaatattgtatattccattgctttttttggtaagccattccgtggctgtttgattgccacctttttttt

SEQ ID NO: 454032 - DNA, 542 bp, Sorghum bicolor
cttcaccaagatcaactccatgccccgcgtcggcagcgccaccaactgggccgccgcctgggaggatgccatctagcggtgtccactgctctgctctgctcaccaaccaaaccatcatgtcccatgtctgcaagtctgcacggcaacctcccctgcccctgcccgtggtcttcctatctactaatagatccaagcactgcgtcaaaacttccatccaaacattattttctgaaaggctccatcattctgattgggctagtgctacgggaaacaggatggaatagtatgccatgttactagaactttgttttctttttcccttttttttttccttatcctggcatttgtacattagtttctgcagtgcttgtggcttgtggacttgggttgttcaacatcatgaataagaaagaagagtttgcttcaaaactttgctaagctcctcctggactttggagcatcgctgctctgttagttggctgattagaggcctctttggttcatatgtatctaacattgccacctcggaacacgtcacattt

SEQ ID NO: 454033 - DNA, 562 bp, Sorghum bicolor
ctccgtgcctggcctccaggttttctacaaaggtgactggatcatggtcaagcccatacgccattccttcgtcatcaactttggcctgcatctcgaggttgtgaccaatgggatcataaagagcgttgagcaccgcgtgataaccaactcggtgcaagcaaggacgtctgtggtgataaccataaacggcaccgaagattgccttattggacctgccggcgagctccttggtgaaaacaagcccccacgctaccgcactgtcacgctccgcgatttcatgcgcatctataacaaatccctcgagaaccctgatgccgctatcaaagaacgcatgaagcccttcatgatatgatgattttatatgtatatgcctgctggttgccttgttctcccacccagacataggcaaggaataatatcagttttgtttatcttgttgctcgtgatccatatgtactagcacacaaaccgtcctccggatggtcatcatgtgtatgtgctatgaagaaccaaaagactcaaatatgttctgaataaaatatacgatctcattgttcttata

SEQ ID NO: 454034 - DNA, 559 bp, Sorghum bicolor
aagcacccccgactccagcagctgaaaattatatgccaccaccaccaccaccatcttatgatgaagttaatggagcatttgcatccacttctgttaatgagtcagtccaatctgtcgatttcttcctaggagaggcccttgattccttcaaagctgaaagtgagtttgagcttaccttgtcagctggtgacattgtaattgtccgaaagatctcaagcaatggttgggcagaaggtgaatgcaagggcaaagcaggatggtttcctcatgcttatatcgaaaggcaagagcgtgttctagcaagcaaagttccacatatcttttaggagttttgggctgtcacataacacggttttcatttctattattgggagctggaatagaatcatgttttcatttcctcttagtttccgtgatctatttaccggctgtcatgtacatagattagattttacttcctttttttagtctggagaggattttggatgtaacatatttttgagagaccaattggacactggttgccttaatattgtgaaatagttaaagtacctgtttt

SEQ ID NO: 454035 - DNA, 485 bp, Sorghum bicolor
gtgccagagctggccgtggcagtgccctcctcaccagcagtgccagtgctgccagaagcctccttcgccgccgccggcaccgccgcagcggccaccgtgcacctgttcgagccacggtagctgtggctgcggccagacactgccggtctggccaccgcagccgccggtctggcctccaccgtgggcaggctgcaatgttgtcgccgacgagaactcgtgctctgtcatgtgatccatggctacctgcttaacgtcacctgtcgctgttgctgtgctgtgatgggtactggacctccgatatctgaataatccgacactatgttctgtatagtgaagttactgtgcgtgtgcagatgtgtttgcgtcctgcagtgtgttatacgaacgtgttatgccagaatgcccttgttttatagtactggtgtactaccttccaaaactaaactgtaatttgcactattgtaatgtgatattcatgtctttgt

SEQ ID NO: 454036 - DNA, 446 bp, Sorghum bicolor
acaaaggttctcaacaagggtgacgtgtttgtgttcccccaaggactcatacacttccaattcaacccagtccatgacaagccagctgtcgcgatcgctgcactaagcagccagaaccctggggctattactattgccaacgcggtctttggatcaaaaccacccatctcagatgatgtcttggccaaagctttccaggtgcaaaagggaacaattgattggctccaagctcaattctgggagaacaaccacaactaagtaaattgagactcacttcattgttcgaagataggcttatacatgtattttgcatactcccgtgtgtattcaattacgacattctaagctgatatgatagaataaatgggaagtttatgtaaccaatcactgtttttgtgtatctgctacaagatataccaccatgttctttttgaatatttgaattg

SEQ ID NO: 454037 - DNA, 420 bp, Sorghum bicolor
caataaattagtagcaataattggtgggtggcctggttagcaatcatgcgtgacgtggcttcgtcctaatcctaatcctaatcctaatccccgcccgtggtttacattatccatccatccatccatccatccacatcaatgaatgaatgagtccatgtctatccggacggcgcgcggcatccatcggagttgctaccggccggagcccgcgcgcccatggtttcctctagttggtttgctattgctaccggagacgacgacgatccatccagcgctcaccagcttgtatttccatcagagacttctgttcaatttgttgccttccatttcttctgtgtaacagtatcacctagcttgtaatacttgtaccattccatcttattattgattgaatggtcacgatgttgacgacaattattt

SEQ ID NO: 454038 - DNA, 464 bp, Sorghum bicolor
ggcaccgcctgagaggaaatacagtgtctggataggaggatccatcctcgcctccctgagcaccttccaacagatgtggatctcaaaggctgagtacgatgagtcaggacccgcgattgttcaccggaagtgcttctaagcttaaggcccatccccacttcggctccatttatgtattcctttccagcgagtgcttttcatgtaagctactatgtttgagattgccagcctattgaggaggcaatgttgttggatttatattttgtggctcactacaatgccatgcattgctccagctcctttccatgccaagtttgttgctagtggtgaaaacatcaaccacaaaaaaagaggtcggaaattattaaggtacctaggatcatattgtaattgtacttgtgcgagtaacattattggttctctttgtacatccatctctgagacatgcaatgcaatttgtttga

SEQ ID NO: 454039 - DNA, 518 bp, Sorghum bicolor
gttaccaggcactcccctgggttagatatatcacaatggctggcgaatatgagctgagacttatatgagttttctcctttctggctgctggaagacatttatgaagctgcaagatacatatttgctctgagacacagcaaccagttggcatttgtatgctagcctggaagtcttctgccgaccatacaaggttttcccccttggggcttgttcatcttgttaggctcaccttaccttggttattgtaagttacccatcaagtatagttttggaaaaaagagaggataattttaattttcagttcacttgtattattattgatttatttttgtgggtaccaaacttggatttgtttcattctgtatttacacgggcagatttgagttcaacaaaacactgccataactgggtgatgattctgaactgcaggttgaaacgattttgcccttctttactgtaaatgtcgttgtcatgtatccaggcaaaagaaagaaaacctaccgaaagggggggcccgg

SEQ ID NO: 454040 - DNA, 362 bp, Sorghum bicolor
acctggaatttacgatgatctttatggggattctgttccagcaaaagtgggctcatcttgggcatacaaatcagatgacctgtcagataaagcccaacctgttgaggagaagacacatagcatgaattcagccgatgacagtgatgacttgtttggtgactcgtgattcagaatcgtcagtggatacaaacaaatatattcttcagaatttcgtggcagagctgtttcatttgttagaggctttttttgggggggcttagttatacatgattgtacccttctgcaaatcaaggtgtgttctttttggctgatgtgagcaacttaaggacacgctttcatatagtgatgctcattgtgagttt

SEQ ID NO: 454041 - DNA, 589 bp, Sorghum bicolor
tgatgatgagagtgatgaagatgatgacgacgacgacgacactgaagctctaatggcagagcttgagaggattaagaaagaaagagctgaggagaagcttagaaaggagcggcaacaagcagaagaggaggccaagatgaaggaggctgaactgatgcggggaaaccctttgattaatatcaacaatcctggctccttcagtgttaagagaaggtgggacgatgatgtggttttcaagaaccaagcacgtggagagaccaagacaccgaaacggttcatcaatgataccatcaggagtgatttccaccgtaaatttcttcagaggtacatgaagtgatggtaccgctgtgtacaacttacatgtctccgctccttgtatgggagagcattggttcagttgggagctcttatcgttgttatgtttgtgtacgagtgaaagaccagcatagcattggttcagttgagagctctcatcgtgttaagtttgtgtacgagtgaaaggccattattgtgttgctgtatgaaacaaaagtataaacatctgtcggcatcttaacaaagctgtactgagcaatacatatcttatctg

SEQ ID NO: 454042 - DNA, 167 bp, Sorghum bicolor
atggattttcagtgtgtcctccaatggttagtttgtaagaactaatatgtgtgggcttttgaactcttagattccctgtattgctcctgtttgaggcccagacaagtaaactcttggggtgtagtcctgttgtggtttgcaagaataagaataaatggttgatcccc

SEQ ID NO: 454043 - DNA, 486 bp, Sorghum bicolor
gccgtgaccatctgcttgagcatccaggaggagcatggcaagcttctcagggacttcaaaaagggcttggtgggaaacaaggacatagagaacctgagggcggaggtcgagaagttcgccacttcgtttgagatgcctggcttcagggtgtctgacatgaagtacacagattagattgttgacctcggtgcaaaccctcctgttacagaacattggcacaaactctttctgttacagtaacattggtgcctctgaaatgtcacgtgaatggtggtacctgaacttcacacaactagagaggtagtagctttcagtttagtgacgccattctgttggtctgctatttgaaaggtctattttgctggaactgttaatgatatgtatgtttagagaataatggttgggaaaatggcattacattgcagataattctgcttagctcggtcttccacaatgttctgtaataaagcttcccctttgtttgtt

SEQ ID NO: 454044 - DNA, 608 bp, Sorghum bicolor
cctctgagtatgctcgaaatcagtcttcgcggaattgactttgtaaatgcaacagacttttcatagaccagatctgaatcaacaagctcatcttcactcagaacaagtgccctgccactgtcaatggcctgctccagaagacataacaatccctctatataggatggaactttagaaccactaccttttataccatcgtttcttttcctctttgtctccaaattataatcatccggacaatgttctgacttctctaccagacctctattttcactgttgcttgttgggatactttggcacttcagggatggatccataatatcacatactggctttaatggtgaatattccaatggagtgtctgctgagggttcagttctagatatacctgtagaatggaacaatgcaggaacttcctttgcagaattcagtaccgtatcactggcaatggaatctttaaatttttcttgaccttcacccaagttgcagttcttgtgagatgttgcaacactgaccaactcaatctgggtcagaacatttcctgaatgtgtaaccttttcattagattctttgccacttaaactttcctagtcacgagggggggcccg

SEQ ID NO: 454045 - DNA, 481 bp, Sorghum bicolor
gaaggaaggcggatactgaaggagattgcttcagttctgtcccaagatgaccattttgtggatgcttcttctcacaagggttgccaaataaggagggaaagtgctcatggcgaaagtgtttgctgctacaacgtgagagcattgttcgatgagcttccaactcctcacctgcttttggagattacaccttttcctgctggacaacttaccgacaacgactaccgtaaggcagagaggcttgagatggtgctgaggctcagcgcttctatttaaaaaactagggactgatttttttctcaatttcctctaatactttctttgcccaagttgtaaataatcgtcctatgggcctgtaaattgatgcagctggctaagaactacttgtaaaacacgagttctgcttgattaatttgagcttaagaacctgatatacacttgggcgtttctctgaaatttattgaacagttttctttccttgggt

SEQ ID NO: 454046 - DNA, 582 bp, Sorghum bicolor
ggaacctcagaagcccaagcggcagcggcggttaccagatccctcgtggcttcttgttcaacatcgtgacatgcgccaattacaccactgagatctaccagtgggtcgggttcaacattgctacgcagactgtggcaggttacatcttccttatcgttgcagcagctatcatgaccaactgggcgcttggcaagcacagccgtctgaagaagctttttgatggcaaggatggaaggcctaagtatcctcgccgctgggtgattctccctccattcctgtgaacaggtggtggctgttggtcggcccattgggattcaatgtctacagcatccccagcacacagaagttccaattcttgaatgtcatgcgaacaattgtactaatcacgcctttttaggggttgaacttcgactctgttgtccaaaatttctaatccgaaagatggattttattttattgccttggtatttgtttcacaacgttacgtggtcctgtcttaatatgatcgaaggttcatgtgatgttatcatctttctcgccccatttgtccaagcagaagtgaatgcagacataatttcgttg

SEQ ID NO: 454047 - DNA, 407 bp, Sorghum bicolor
cttctgaagcagcatcagctggcgctgaatccaccaaacaaatgcaagcaaaggctggacggtcatcatacatcgcaccagatctcctggcttcaatccctgatcctggagcaatggctgcagctgcatggtacagagccgctgctcttgcagtgaagaacaaactgcacggttcaaagagctagtgcatatggctatgcttcattgctagacccaaaatagactgacaggaaaaatcaccggggcattttctcactccccttagatttggtttccgcttgtgcttttgcatgggccgagaaaaacgacttccattctgtttcccccttctcacatcataccaagagatgttcaaagagtttgtagacggtacaagttaagggaagctatgcttttgcactcccgtg

SEQ ID NO: 454048 - DNA, 448 bp, Sorghum bicolor
gaggaggagcgcgcggccttcctcctcatggcgctctcctccggcgtcgtgtacgcctgacttcacccccacctagcaccgcacccgaaggcgggtgagaggaggaggccgccgctggtgctgcaagccgccgatttggtagacgggcggcatgatctgagcccagagagatccgcatctctctttaccccctttttccccctctggatctatgctaagttttcccggctaagtagtagttcgtcagttcgaacaaagcgagttaataatccgtgtccgtgctaggctagtagcagctctgttcctcccccgtcccgttccttgctgttcttgccccccacctcctctagttgtaatcctaccgctagtagtgtgctagtagctgtcttgtaaccttctcttgcaatgtaaggagagattatgatcattcttgcaagcgagtagttga

SEQ ID NO: 454049 - DNA, 394 bp, Sorghum bicolor
aacactacccggggagcggcagtgcttttctctgcttgtccaacttcgcactattcccccaacatcgcggcgctatttctgcaactcacgtcgcctgcgatcattgtttgtatttcttgagccggtctgctgcatgcatgattcgataagccgcgtcgaatgtggagtaacgaaagaaataatatcgttgaggatttattgagaatcgcccaacccacatgcatattttattacaggctgtatgcccaaacttaggtagcctcagggagcaagaaaacatcggcccttgacataaggtgttaaaaataacctaagtaaagagtcccctaagcttagtctagagttacctaaatattttcatcgcctagagacaaggtcctgggttttctttcct

SEQ ID NO: 454050 - DNA, 634 bp, Sorghum bicolor
aagaacaagtgtccgctgaatctgttctgcatgggatcccaaggtttgctcctgaaaatttggagaagaacaagcaaatttatctgcgaatggaagaactggccaataagcaccagtgcagccctactcagctagctttagcatgggttctgcatcaaggaaatgatgtggttcctataccagggacaaccaaaatcaagaatctagattccaacattgactccttgaaggtgaaactgacagacgaagatctgaaagaaatgggcagccagatacgtgaagaagatgtggctggtgggagacaattcgcttcctttgaacatgccacctggaagtatgctgatacacccaagaagcagagctaaaaaatacgtcaaagcatcaatgctgatgcgattggcgtggcactctccctgcagatttcctcaggaacattgtcgatgtgtctttgttaatacctgttctaagtaatgtacagagaagaacaatgaagggcccagtgttgatggaagtacgagcaggaatttgattttgggtgtacttatgtgaagctaagactaatgagtgtagagtttgctcatggttatatgttgtcgcatgaattgtggttgtgtgaccctcccatatagttcgc

SEQ ID NO: 454051 - DNA, 606 bp, Sorghum bicolor
ctacgactacaacatcgtcgagctggcgtcgcctgtgacggcgtacgcgccagtcaagctgctgacggccgacccactcacgtacgccggctccacggccacggtcatgggctggggtaccacgtcgtcgggtggctcgcagtccagcgtgctgcttcgcgtcaacgtgccaatcctcacggacgccgtgtgcaaggcttcgggtctcagcggcaccatctcttcgaccatgttctgtgccggcggtgcgaccaacaaggactcgtgccagggcgactcgggcggtccgatcatcctcgagcagtcgggtggtgatgtgctcatcggtgccgtgagctggggtgacggatgcggtgtggcgggcaagccaggcgtgtacgccaaggtgtcgtcggtcaagagctggatcctgagcctcgcgccgaacgccaccttcgtctaagcgttgaggcgtcttagcggcgacggatagtaccagaaagtggtgttgtgtcctagcgctggggtcgtcgtatccgatatcggatggcccttgttttgagactcgtagctaggaggcagtcatagtgcagtgtaaaaccaatctcgatgtcctatttttttctc

SEQ ID NO: 454052 - DNA, 552 bp, Sorghum bicolor
acacttcgatcaatattctcctccagatttctacacacgggttgggatcgctggggtcccagcagactcggtgatgaagaagaccaaggctatcgaggacaactggatgccggtgtgggaggaggagttcagcttcccgctgacggtcccggagatcgctctgctgcgggtggaagtgcacgagtacgacatgtcggagaaggacgacttcggtggacagacggtgctgccggtgtcggagctgcggccggggatccgggcggtggcgctcttcgaccgcaaagggaacaagtacaacaacgtgaagcttctcatgcgtttcgagtttgcctagcctgatgtcttaccgtgagtgagacgacgattgcattgattgatatatacattccatattattatgtatcttgtgtgaacattgcaacctgagcgtgctttgtacatagatagattgcttggattggatgatatgtgcaacacttgatcagcaaacaattccttccgttccgttgttatgatcaaataataataaggcagcgtccttatgaataaatt

SEQ ID NO: 454053 - DNA, 579 bp, Sorghum bicolor
acggcagaatactaggatcccttgtggagaggtatggggagggaaccctgccaaatttctgaggaagctcacagatgacgagatagcttttattgcggaatcagctgccaactattccagtctgtccaaggtgcatgctattgagaacgccaagcctcttgaaaagattgagtttgagaaggtgttgcgcaagaagtttgctcaccaggatgaggagtatgattcctcgatcggcgtcactcgagaggccccaccggagctgacgtccccaaatccagcccaataaacctctgtttttgtttctgttttctctttggcgccttaatcattttctattggacagtgctggatcgttgatcggggcattgttccatgactttggtgtttatgtttacttttcctccccaataatcttgggtcgagcgatgttataaagctggccatgcacttcttccagattctgtattcggtatgcttaagatgtgctccctggaaagacagacccactaaattgacagaaatgcattgttttgacaggtaacatgcactgaattaaatatttcattacctttgaaggct

SEQ ID NO: 454054 - DNA, 371 bp, Sorghum bicolor
accgctctatgctgttatggcttgactcctataataacgttccagctgcttttgccccatggtagatggttttggtaaagacaagtctggtacaatttttcccttagcttacttgccaattgttatgttgcaataatcaaattatttgttgttggcggaaatttttggggggcgggctttgttggctggatgcacccacgaggacagggggtaatacatagttatgccattgaatggaattggcccatattttatacagatttttttttgcagtcaggcttcactccttttgaactcattgcatttgggacattatttttttgtaatgaaaattgatgtttatgaatcggctgggagattatgggcgcgtt

SEQ ID NO: 454055 - DNA, 455 bp, Sorghum bicolor
gtcgtcgtcttcgtggtccctgccgctgccgccgcaggagtcggtgcggtggcggtcgcggcgtcactggacctcagcctggcgctgccggctgatgcggcggcggccgtgaagccctaccagctgttcatggacccgacggctgcgctggcgctgcgtcagttgttgccgccgaggagcgaggaagagcggaggagccgctccgcacggtggtcatcgtcgtcgtcgtcgtctgcggggcaggtggtgggcttggggcttcttgacctcaacctgcctccgcccgtcgagatggtcatgtagtagcgaccgaaatgagcatcaccaatttcgaaggtgtcatcagccaggcagctaccgtgtgtaacaccaatgtaaataggcagctgttactgttagctagcgtgcttttgtagatcactcttttccccgatcatgcaaggcaagaacttcca

SEQ ID NO: 454056 - DNA, 601 bp, Sorghum bicolor
cgagatcgagaagctgtctgatgaagaatccgtcaactttgttatgtcccagctcaggaaaatgctaccgcaggcaactgaaccggttcagtatttggtttcacgttggggcagtgacccaaactcacttggctcctactcgtgcgacctggtggggaaaccggctgacctgtatgaaagattctgtgctccggttggcaacctgttcttcgctggggaggccgcctgcattgaccactccgggtcggtgcatggagcttattcgtcaggcattgccgctgcagaggactgccgaaggcgtctgtcgacgcagctaggcatctccgacctgttccaggtcgcgaaggttgtcatgagggaggagatgaatgaagtcatggttccctttcagatatcgaggctgtaagagagaacaccaacaccgtgttgtgtagtgatgattgtgccatcctgaagctgacgcggcagacaaggttaacgcggaacaatatagctgccttcaattcacggcatatattgccttcaaaactgttgtattgtcgcatgcagtttgttgttcgacgtaactctatctaaaataatgtaagacctttgttgttgg

SEQ ID NO: 454057 - DNA, 446 bp, Sorghum bicolor
cttcgacggtcgcaacattgtcgaccccgagaagctgagggagatcggcttcatcgtctactccatcggcaagcccctcgacgcctggcttaaggacatgcccgcggtcgcttaattccccctccctcatccgaggattgaattcggggaaggaagaggaactggttgaccattctttattacagtttgtttttgcaggctcccctacgattttctcttgtgtcaggcataaaagtaagttggtcggcgctgctagtattccgtgtttggttggtgtatttcatgttggaggacgtctgtagatgtaaaattcctcaggcccttgtgctctgcttgaggaaatttccttgtacggttgtaccctggacctgctatagccggttgattcttcaattgtattcctaaaagttaaagttactatacgatcgatatgtttttttttgcag

SEQ ID NO: 454058 - DNA, 349 bp, Sorghum bicolor
agaagacctgattgtccaagctcgcgaaaattggcggcgaccagattggcgtggaaatctcgccgctgctcaattcggaggccttttctcgtttctcggtacacagccagtctcagttggtaatttcgttcgaaaccgtctgcccgatggagcctacgaacaagcattccaactgaggacctacggacgactttggtcgttgtatcccctcattgctgcttgtgatatcagatacaacagattttctgttgacaccgcccgtgctttccatcagtttctcaccaacaatccgatggaaagagcattctgggtcaatatcgtgattgaatagaaagtgtcagtaaaagag

SEQ ID NO: 454059 - DNA, 526 bp, Sorghum bicolor
cctttcaacagctaccccgtgacgcacccgtactatttcttcgggcaggccgctgctgccgcggcggcagggtgccacatgctcaagctggcaccgacggtgaccgtggcggccgtggcgcagagcgactccgactcctcgtcggtcgtggatctgtcgccatcgccgccggccgccgtgtcgacgcagaaggccgccgccgcgttcgatcttgacctgaactgcccaccgccggcggagatggaggcctagccgccggagtttttagctgaaaaaatgactgcctgtagtttctttctttcgtcgccttttgcccgtagaggaaagcttagaagagaaccctcatgttcgacagagggcggaggacatttttgtaaatagtttttccgctggggacctagctttagctgatgataaaagcttgtattgtcacccaagacaggtcctgccggcgttgttatggaccggattattatattattattatgtattttgatagtcaagagaaacgcctcagaaaaattcc

SEQ ID NO: 454060 - DNA, 565 bp, Sorghum bicolor
ctacactgtgtacgccaccgcggctgacccgaagaagggctccctcggcaccatcgctcccatcgccatcggcttcatcgtcggcgccaacatcctcgtagccgggcccttctccggcgggtccatgaacccggctcgctccttcggccccgccgtggccagcggcgacttcaccaacatctggatctactgggtcggcccgctcgtcggcggcggcctcgctggcatcgtgtaccggtacatctacatgtgcggcgaccacgcccccgtcgccagcagcggcttctaagtgccctgcctctgcctcagccgtcgccgtccccggttcctcttcctcaatcatagtgttgagacagcatgaagtgacggttaggctgcgatgaactcgcagcatttgtttggttcaggtgaaaggccccaaggcagtgtgcgcttggatgattggtccatggttctcaattatttgttccttcttttgtatcgtggtgagtgtgaagttagttggttttaagaaccagtgacttcgttgaataatttcaaataatttaattcagcttgttccttc

SEQ ID NO: 454061 - DNA, 448 bp, Sorghum bicolor
gggttcctcgacttctgcgagtaactcaatcacaccatcagactccgggagaatccaggccaatgcctaattgaccttatctccctcaaaatctagaacaataaagtcgccaagtgtgcgcacaggttagctcctcgctaacccgcgcgtatcttgtccgacagagtcgctttagtgaattcagctcgtgttagctcctcgctaaccgtcagatcatatggctttgctttgtggaagtgggtgagatttcgtcgtgtcatgcatgtgttagctcctggctaacctgcaaatgcatttgttggtgtgcaggtttttgtcacgtctgcgtcagctcctggctgaccagcaagtatttgtcgttcattcttgcgctagctcgcctgcaaaagtgcaaatatttgtcgcatggaacattgtaaatatcagtcaatttcaattctgtttgtgg

SEQ ID NO: 454062 - DNA, 554 bp, Sorghum bicolor
agccatgactgctggaattcacacgctcaagcgtctaacagagcccggcacctatgagtacttggacaagatcactggtgaactcgttcgtgggatattggatgtgggtgcgaaaacggggcacgagatgtgtggaggacacatcagaggaatgtttggctttttcttcactggtggacctgtccacaactttggggacgctaagaagagcgacactgagaagtttggaaggttctaccgtggcatgctggaagaaggtgtatacctggctccctcgcagttcgaggcgggtttcaccagcttggcgcacacctcccaggacatcgagaagaccatcgaggctgctgagaaggttctgaagcggatataggggttctgctacggctatgcagagagcatttccttctctttaccttcttgtactcttagttctatatgtcactgaggttttgtattgtgcagcagcaggacagcttttgtagctcctctttctgaattagtgcgtcttgtttttttgcagtgctaataaatctctggtccacgattacggttgt

SEQ ID NO: 454063 - DNA, 520 bp, Sorghum bicolor
ctgatagcgagtgtgatcatcgacaccccttcgccgggctcaagtacgggctgaaggtctgctgcggcgccggtgggcagggcaagtacaactacaacaacaaggcgcggtgtggcatgtccggggccagtgcctgcgccgacccgggcaactacctcatctgggacggcatccacctcacggaggcggcctaccgctccatcgccgatggctggctcaagggcacctactgcaaccctcccattcagcactgatggagctagctagctagcagcattcatgcgtgagttgatcgtgtgttgtttgtttagggctaattgccatgtgcatcatcatcctctaggttcgtatacacagtgatgagtagtgatgggtttgttatttggttgtcaattattcatgggaggtaggtggtttcggtgtgctggggacaatgaataaatgtgtaatggacagctgtttgcaattttcttaacgcaaaaatactgtaggggagatccccaccagtgatttatattga

SEQ ID NO: 454064 - DNA, 812 bp, Sorghum bicolor
ggcacgagggtgagatatatcagcaagaacaagatttagagaaggctacagattacctggaaagggcagctgacctttttgacagtgagggacagtcatctcaatcaaacaccatcaaacagaaagtagcagaaattgctgctcagttggaacagtacccaaaagcaactgagatatttgaagcgattgctcgtcagtcaatcaacaataatcttcttaagtatagtgtcaggggaattctccttaatgctggcatctgccaactatgtagaggtgatcctgttgccatcacaaattctctggagcgataccaggaaattgatccaactttctctgggacacgtgaatacaagcttttagctgatcttgctgcgtctatggatgaaggcgatgttgccaaatttactgatgccataaaagaatttgatagcatgacacgtctggatccttggaaaaccaccctgctgctcagggcgaagaatgagctgaagaaaagggaggacgatgaggacgaccttacataagtattgttgtaaaaaatggcacgatatgttttcgtttgtggctccattgcattggaggcatcgtgttccttacaaacgagcatgatgataaaattaatcgctggtctgtggttgtacagaacgtcaatttgggttgtcctgttgatgtgactgccagtttcattgacttcatgatttgctgtcattgaaaattagtaccgaatgctttttctgcggttcctgctcttttccatttgctattgtagttctataccttattaataatctaagcggtttccgctggattgt

SEQ ID NO: 454065 - DNA, 524 bp, Sorghum bicolor
acctttggtggcttgctgcggtggagaaggaccctatggtgtgtccctttctacagcctgtggatatggagactacaaggtgtgtgataatccagacaagtatggctcgtgggatggtttccatccatcggaagctgcatacaaaggcattgcaatgggccttttgcgagggacatacacacaaccatctattgcttccaccaccagttcctgtccacagctcactgagctcggctcttctgttgaatacaaggtcctctacgatttatagttttgcagctacatttagttgttagtgttaattttataaaaacacacgtggttagagattaatctatttttttttggatgcgtacagtatggttaaagatgtaatgatttggacatttttgcctgattacagagccgcggtactgtactgcacttctcggcagtggcccacgtgattggttgggttttgttttaccttctctttttcagttacaggttttattcgtcattatttacggtttctctgtagtttc

SEQ ID NO: 454066 - DNA, 610 bp, Sorghum bicolor
tgcgagggagtgggcaagtggtgaacggtgacaaggatattgcatacacccataagaaccttcctttgcaatgaggcagggcatttttgtgcttaatcaggattcgtgtcgatccagtgatgtatgatagtttcatcagataggagcagagaatggtgaatcttttcgattgaggactgtgaatccatggactgcaatgttcagtcagtgtgtagaccatcattctggtggttcattctgtatgagcttggaggccaccctccctaataaagcagtgctgggagtcagggcactgatgtaccgtgtaccgagggtgtctaggttaaacaagataaaccggttatattcttatatttattttctttttttggtgcgatcgaacccatatgtcacaggttttttgtgccgacttgtttcttatgagctatcctaaccgggttgtgattacacgacatcttgataccgggtgtgttagatgctgtagctgtggctttacgccatcttcagatcactgtattgagtattgacagcagaagccagctgcggtagacgcagctttactgctgccgaagtagtagctactaatatatctatcacatattcatactgt

SEQ ID NO: 454067 - DNA, 671 bp, Sorghum bicolor
agcaggagatgcagactgccgcccagtcctcggccctcgagaagtcgtacgagcttcccgacggtcaggtgatcaccatcggtaacgagcgcttccgctgccccgaggcgctgttccagccgtcgttcctcggcatggaggccgccggtgtccacgagaccacctacaactcgatcatgaagtgcgacgtcgacatccgtaaggacctgtacggcaacgtcgtcctgtcgggcggtacctcgatgttcccgggcatcgccgaccgcatgcagaaggagctgaccgccctggccccgtcgaccatgaagatcaagatcatcgctccccccgagcgcaagtactctgtctggatcggcggctccatcctggcctcgctctccaccttccagcagatgtggatctccaaggaggagtacgacgagtccggtccctcgattgtccaccgcaagtgcttctaacaagttcgccccttgagctcacgccgcgtgtctcccgtccccctaaaaatgtaccgatacagttgttgctttgttccggcaagctgaagtgtagcttctcttcctattctttacccgcacccttcaagtggggaggcgtgatgagcatagtgtatgctctccgccccgtccttcttgttggggctgtacaaagttaccccttataaatgcacc

SEQ ID NO: 454068 - DNA, 485 bp, Sorghum bicolor
ctctggtaacagatgtccaaaagtccacatctggggctggagatgatggcagcagcaatacctcatcctccacccctgtggacaagaagacggacggcgaagatggtcccaaagaagatgtggatgtgtccactaaaataatgaacaaggcaatgagtgaagatgaagtcgttccagagtgataaggagatctctcttctcagcttctggtgtaacctgtaagtttgtaggacttggtttatctcctagacttggagatgcaatgcaagcaggctatcttgttgcgaccatttttttgtataagtttgataggtgtctgctttgtattgcctaattagtaagtagcccatcataatgatctgggtcaagtgaagaacaagaagcatgtacccacaaagaaatatagcgattctgcagctctgaagctttgctgctggaatcaaatgccaactaggcagctatgaatgaaatgtccatcgcagtcc

SEQ ID NO: 454069 - DNA, 444 bp, Sorghum bicolor
aacaacaactggtcaggcgctgacgcctcttgccttgtctccgccgccaagaacctcaacatccccggtctccgagtctgcgactctgagaacacttgctctatcatctaccccggtggcactggcaagaacgcctacctcgctggcatggaggctgaagacggcattggtatcaacactcctctcaagcaggtccgcctcaccgttgacattgactactccgcttaagctatatcatagcctgtggtttagttcatttgagagctaggcctctgcgtaaaacttgattttatagaattgggcttattctatctatacctggtgtttacggtgctcggaatttagctatccagggcgatcctggatcttggctttgggatctatctattataccttctaacatacatatattcatagtgttatgacatatattcatttctcctg

SEQ ID NO: 454070 - DNA, 588 bp, Sorghum bicolor
tcaaagttcagacatttctcaagattttgatacaatgagaaagcagctagcatcagatgctagaatatttaggtcaaaagttccggagtcactgatagacaatctcatcaaacgtctgagatcatactttgagggcaaatattcaccaaatgcctagtttttcatgcggcagttcttcagaagctactaggtgtcaattggatcttggtggtcaactccccaactcctcgcgcggcttatttttgaggacagttttgttttctttgctgagattgagacgaggagttctaagttgcatgtacaatatcttttttgttgttatccctgatgttataggcaccacgccaccatccccactgcttatctgtctagaatgtaggagatacctctttttctccctttgtaagataatatagctggcagattaaagcacgagtttatgttgtttttgaccctttacaaatgtattttcgccctgaccagtctcagttttggtcaatgttctgttatgggggtcgattcgacagctaacatttttagattttgacagtctccggaagcaaattgacttgagaatataattattta

SEQ ID NO: 454071 - DNA, 456 bp, Sorghum bicolor
aacacaaagataaggaactgcatcattgacataaatgctaggattgggaagaacgtggtgatcacaaacagtaagggcatccaagaggctgatcaccctgaggaagggtactacataaagtctggaattgtggtgatcttgaagaatgcaaccatcaaggatgggtctgtcatataaaccgggtgcctgtgcgcctgcaaaacaagaacctacaatggtatcacatcgatggatcgtgtaaccttggtagggaagagccgcttgccagaaagtccagcgttcgggcgcaagatgcatagcctggcatgctgttccttgaaccttggtacaatgtactaataacctgccctggaagttgcagcaaacaaacctttctatgaacctttgtatttccgttacctggtttggattaactctatctttcatcctgtgctactaaaatttccgtgtttttct

SEQ ID NO: 454072 - DNA, 455 bp, Sorghum bicolor
ccgacccccgagagggtatagtgttctgggcaatgaggtgcagatggaggggatgccgattatgtcacagttcacactggattcggatgaggagaaggaagacgaagcgatcacctctacagtagctccagtggcaaatggcgcagagtctcatgacgagatcccgctgcacgaacctgattccaagtggcggagatgaaatttgggctgttcttctgtcgattagccaagtggaggaggatgtcaacagagctgcagtacactggggctccatgcttgtgtgttttggtacatcattttaatatggttttcactttctgatatttggttaatatgtggaaagaaatcttgcttttgatctgcatagattagagttaatatctgtaaaatattgtaatttgttgggttcacatagatctttcagaaataaagttaacacgtgttcatctttgaga

SEQ ID NO: 454073 - DNA, 619 bp, Sorghum bicolor
cccgcccattccgatcatcggaggaagcccgacgaagaagggacaccggaaggcgtgcccgccgcctccgtctcccccgacgccgacgccgacgccgacaccgtcctcggacaagtgccccatcgacgcgctgaagctgggcgcgtgcgtggacgttctcgggaacgaggtgcacatcggcgacgccaacgtcaagtgctgcccactcgtgaagggcatcgccgggctctccgcggcggcgtgcctgtgcaccgccatcaaggccaaggtgctggacatctccgtctacgtgcccatcgcgctggaggtgctcgtcaactgcggctgcgccgtcccgccaggctacaaatgcacttaaacgagtccattcccttccatttccatccatcacgcgtgcacagcaacgtctccttttgccttcccaaatgcaaagtttgaaaggctcgtcgacggatttgggtggaagccgctcgcctccgggctgttcagctagtgcattcttctttatttcatttcatttgctgttcttgttgcatgactggtatatgcatctaagtgtctcctccaaacgtcacttgtacctttgtgtgatcttgtatcaaactatttttttttcgga

SEQ ID NO: 454074 - DNA, 558 bp, Sorghum bicolor
gatttcagagctagccacaatctataacaaagcagtgcaagattttccacaaatgatacttcctggagtgtgcatggccacggggatggttgaaatcagagtttgcagcacagactggaatgaatcttcctaccatggatccgttgtctgcatgttgagaaaggggagagaaaaaagagcatgtttggtgggaggtgcaaatcgcgggagcaatgattgagcttttgtttggttcagggggatggattactggatgctgacacagatacatgaacgagcctttctgttgtaacttattttagtgcaaaatgatgttgtcttctcccacatctgcttcaccagtcaccacctccttgcttgttgttttcctgcctccttcctaccttccctgtatgattgccccgctagtagtactttctctcaaatagaaaagagtaatgtgaggctttgtcccctgtctcctcgtgtaagcacaatttgtacttgtctgtaaggatgcatatttgtatgtactccatctgtttaactattactacgaaagagtacaattgtttgtgc

SEQ ID NO: 454075 - DNA, 547 bp, Sorghum bicolor
acaacaggagaatggagaacatagtactctcgaaggggaagtagaaaacttacggcatgacaatgccgtgctgaaggctgaggttgagcgattacaaagggagaacgcagagctaagagcaaagttggtaagatcaggcgagacttcaaccttgtgatttgtgacacaataaaaggacgagccgcagcttgttgtaaactgtaactgtttagaaaatggctcaaaaggtatctcgtataggaaaagtgaattctggcaaaaagaaatggaaaagaaatgccaattagcattgctcatctagtgatgagccttgttgtataattatttatattctttacacaagagcctctgtatttgctccgtttatgtaatcttgttcctgtaaatgttgtgtaaatggttaccaaaatccagagtatccggctttgtaattttgtcgaaacaatagtttctgtttccaagtttcccttggaaaaaaccttcggggtgagattgaagcattctttacccttcttaattgaaaggcagagctcctgccattaagttc

SEQ ID NO: 454076 - DNA, 445 bp, Sorghum bicolor
gaactggccggtatcatatgacaagctcgggatccggtatcgattgtggagggacgccgttgagcggggctctgaccggttgccattcagtatccaagccgagagtggatcatagccggtagtctctttcttcctcgtcgcattttttcgcgagacgacggacggccagaattagttaccatggcgtgcgtctctgcgcggccagatgctgctgtgccttgaaggattctctatctggaaggtgaaagctgatggagaggatgatgggaaacatcatggtctcttctctggtgtagcaatgtacactagcgacggcatcgtgggatgcaattgtgatctgagattgatgtcttttttttttctctctctctcttcttttttttcacccttttgtgtaaagattcagcaaatgttactctgtcaaagcatgtataatcatactacc

SEQ ID NO: 454077 - DNA, 557 bp, Sorghum bicolor
ccttcaactccgattggcagctgctgacggagaaggaggcgctgggacatgtcaaggagtacgccgagaatggcacgctgtgggacgaggacttctctgacgcgctcgtcaagctcagcaagctgcccatgccgccgcacagcaagggggagatcaggaagagctgccgctgggtgaactgatgatgacctgatgatgatgagccatatccaatccattacttgcagctagtgtgtctgatctcctggactgcatctcgatctggatgcatgcgtgcacaccggaaattgtgattacttactggtatacaggatggatcgtcatcatgttgatcggttcatttgattcttggttctttttggttttattgttgtatgtttgtttgattatttatttccctgcttttcatgtgtttttcatcatttctgaattttacatacatcatatgcgtgttttccccgagtagggtgggtgttgggatcgatgtgcatggttgatctgttgttgtatcttgtccttgtatggagtttggccaaactaataaaccagattaaatt

SEQ ID NO: 454078 - DNA, 413 bp, Sorghum bicolor
aggcccgggggatcgaattgattatagaaacatgagtttaattaatcgatttattagtgaacaaggaaaaatattatccagacgaataaatagattaaccttgaaacaacaacgattaattactgttgctataaaacaggctcgtattttatctttcttaccatttcgtaactatgagaatgagaagcaatttcaagcccaggcaatttcaataattactggtcctagacacagaaaaaatagacatattcctcaattaacacaaaagttcaattccaatcgaaacttaagaaactccaaccagaatttaagaaacaacaatcggaacttaagttccgattgttgatgttttattcgaaaggctcagactcatatataaagaaagtaatccaattttgattcttgtgtttgtt

SEQ ID NO: 454079 - DNA, 610 bp, Sorghum bicolor
aatggagaagctttacattcttattgatgagatctacaaattatgtcgatgatgttgtggaaggacgcgtggcacctgataacagaattggaaggttcatctctgattctgttgcttcaatgccaaagttgtccccagctgctttcgataagcttttcaatgacaagattcaggataaccttgcgctggtatacctgtcaagcatcacaaggacacaaatcaccatcgcggagaagttgaacactgctgctcaagtgctgtaattttggtggttgtggcatttggttggacgtcgatgagttgggtgcaatctgtgatgtttggcatacgtgtccaatttggtggcaggaatgcatttttgtacttgttattattattactaaatgatagacctgatgaaacgggttagtcaacaatgagatcccataatcatgttgcccgtagaagtggtggagggcgagatgtttctgtttggatagtattctgtgcttcaggttcaatatttgtaatgctcgtttgttttgtgtaatgacacagttaatgacattgccgagctaacgccaatgtggaacaatgaagagatttgctccacattaacgccatttggagg

SEQ ID NO: 454080 - DNA, 507 bp, Sorghum bicolor
caacggctggtgcttttgtgccaaatccagcaaatgcatctttcaatgctacagctcaatcctctcatgcgcagttcccaggcttgtaccatcctcaacagcctccctctattgtaagtccgcaccccatggtgcatcaacaggtgccatcggccattggtcccaatgttggggtcggggtggcagctccaggcccgcaagttggggcttatcagcaaccacagcttggtcatatgaattggagacccagcttttgaagaaggtttcttaattatctgtaattaggggggccacaagagcctttatgtaacaacagtaggctccttttaacaggaagcccctttgtttttagtgcagctctttctgatctatttaagctataacaaggtttttgttagcttttccttcccccaggtgaattcggtatcccatctgaactggtatgatgtagatttgtgagttaaacattgggcaagatctagcgcgagcaccaaggttgagtgcctt

SEQ ID NO: 454081 - DNA, 540 bp, Sorghum bicolor
gtgcctgggacaatgccaagaagtacattgaggctggagcttcagagcatgccaggacccttggcccaaaaggttctgaccctcacaaggcagctgtcattggtgacaccattggagatcctctcaaggacacgtctggcccctccctcaacatcctcatcaagcttatggcggttgaatcccttgtctttgcccccttcttcgccgcccatggtggcattctcttcaaatggctctaagccagcgagagtcgcaggataaaggccgtagttttgcaaggggagtagagcagtatgtcagctatacagcatatatggcatgtgctttgctccaccagttgatgagccccgttgtgtattttggttttcgttttcttgagtttttagttccagggtccgaccatgttttgatcccataaattctcctccggccttcgagcaactgagactatcttcgtaagtcatcagacccagccaatcactgaagcattggaaaactaaacagtttctagcgatatggtgatgattatgatgatgatga

SEQ ID NO: 454082 - DNA, 574 bp, Sorghum bicolor
tcgtcttctacgtcgacggcgtccccatccgcgagttccgccgccgaaacgacggcgcggtgccgttcccgacgtcgcagccgatgcgggtgtacgccagcgtgtgggacgccgaggagtgggccacgcagggcgggcgtgtcaagacggactggtccaaggcgcccttcgtcgcgtcgtaccaggggtacgccgccgccggctgcaccgcgcccgacgccgccgcgtgcgccaggtccaacggcgcctggatgtcgcaggagctcgacagcgccgcgcaggggcagctccgccgggcgcaggccagctacatgatctacaactactgcaccgataagtaccgcttcccgcagggaccgccgcccgagtgctcgtcgccggccaagtagagtatagctagaatcgcgcgtatacaattcgatcgatcggttggttacattgttatacgacgtacggcataagttcggcggatatacatatatacgtagacgccgtgtgcatgatgacttgtcatgtaatgtattgtatgtacgtgcagtgtacatgtacgtaaatatatatatagtttaacggg

SEQ ID NO: 454083 - DNA, 516 bp, Sorghum bicolor
aaatggcaacctcacggacaaaaccctagagctgatctctggcctgaccgcgctggtgtcgttgaacgtgtccaactcccgggtgtccaactcaggcctccaccacctgaaaccgctgctgaacctgcgctccctatccctggagtcctgcagggtgacggcaagcgagatcgataagctccggctggtcgccctccccaacctgatcagtgtccggccggagtgataggaccagcacttccacagcgacctgtaactgtaaagcaactgctgcttgactagagcaggtcgccttgtacatacttttgcaagaacgagatgtctgtacatattgttctttgtgtcgcgtcggtgtgcctgatggcaacggatacctccgtgtcaccgtgtgcacggtatcccacggatcctgtgataggaaggaacaattgtaaatatgtcgtgcttcctccatgtggggtgctcctgtgtaaatagattggtgcattgctaaatacctctccttggctgctgtgt

SEQ ID NO: 454084 - DNA, 577 bp, Sorghum bicolor
gctcgcaaacatttttatcacgtttgcactacctctttggaacctctttgctggattcctcatcgttagaccggcaataccaatttggtggagatggtactactgggcgaaccctgtctcgtggaccatctacggtgttgttgcatctcagtttggcgagaacgaaggtgagctttcagttcccggtggcagtgggaaacccgtggtggtgaagcagttcttgaaggataatctcggcatccagcatgacttcctcggctatgttgtgctcgtccatttcgcctacatcattgcattcttcttcgtattcggttattccatcaagttcttcaacttccaaaaacgttagctccacctctacgggccgtcggaatctgtaatcggttgccgtaagttctagttctagtcaaaataagtgcagtcgaaatgtgtcattaagaggatttttttaggagttaccatatatatatagcgctattctacaccttaggtgtagaatattattctacaccgcaagtcaaaactgggtagaaaaaatactgagcagtactgaacaacattcagtatcatcttgtct

SEQ ID NO: 454085 - DNA, 518 bp, Sorghum bicolor
gagaacgcgacggccaatgggaggtacatttgcagcagataccacccgaccctcgtcgagctcgcgactttcctggcacaaaagtacccgcagtacggcgtgaaaccaacagatttcgacgatgaggagaggccgagagtgaccatgtcgttggagaagctgatccgggaagggtttgagtacaagcacaacaccctggaagagatctacgacaacgtggtcgagtacggcaaggcattaggaattctgccctactgatatatagatgcccgatttagcttaaataaatgggcagtatgtcagtcggacgtatgagtcttggaaagtactttaaataagttatatggacattttctattgggaaaatgttcaaggaacgcttaacctttgcgttctcgctattcatttttcaacacaataattagccaccatagaatgtgatgtctgtttggttgtaattgattgatttatcatctcatctctatctatattttttgtcgctttcatggcgcctctcc

SEQ ID NO: 454086 - DNA, 477 bp, Sorghum bicolor
tggctcgcccgcaagcttgtcggaaaccctcagcttgagttcgttgctgctcccgctctggctccccccactgcccaggtcgacgagaagctcctggaggagtaccgcaaggagatggacgaggccgccgccatgcctctgcctggtgagctttcccacgacgatctgtaaatgactcgtgtggttacggaatacttttgttgaggaggatgctgccaaacatccaaggatcgatgcatgggcagtatttgaggatggcacataggcagccgaaacgaccatttatgagatacagggcgaaagtcctggagtttacagtagcgtgattatggggcggcacaaaagacaggccgtcatgcctttctttggggctcaagggacggtaccactgcaaagagcagtgtcttatttagtttagctagacttcctccaccaaaaacaacgaatagggccaagtttgcgtggcttggctaagtc

SEQ ID NO: 454087 - DNA, 459 bp, Sorghum bicolor
tataagctgctcgaaaggagcttcctctacgaaggaggcttggatggtcgagactggttcaagcatgttgtgtttgcgcctggtatttggacagggtattctggagctgttttccctggttgggttgagagcattgacgccaaggactcagtcaacggtctcaagtggtccgccattatcggacgctctatcaaaaacgccattgatagcctttcggattaggctgctttggttcaggaactaggatgtattatctatttatgctcaaatgtgaaattgattagcgagtcttcgtgccatcacattaagagcttgcgatagaacaatgctgtgttttctataggccacatgacgggacatagttgtctgtccgtctaccgggaatttacctgcctttttaaatatctaagtatggcatcataggtttagggctcttgtcataatattagtggtttagcc

SEQ ID NO: 454088 - DNA, 482 bp, Sorghum bicolor
caactacgaccagacagcgatgatgctcgacccaatcgtcgtgaacgatcctgccatgcccgattggaacgcaccaaatgatttggatttcagcaacttcatacataatcaagtgggcgcgtgatgtggtccaggctctacgttcaattttccgttggcttctgtcgagcgttctagcgtccaagggaagacccgaattgggtttccacgtctttttggtgggtgggtctcggcgttaacggagtaacatggtcaaaattattcatgaggtcaattccaggcgaaaggatcggtagcgcacagctggcctccgatggcattgtaaggttcaccatgacgtgggcgactttggccgatctgggcctcggcggctcggaccttgcagacatgtgcgcgaccctgcaagatgggagcactggtcagaatgtcggattgtaaatagttgaatacgtcgaatgacgatgaattaatatgtaccatcc

SEQ ID NO: 454089 - DNA, 496 bp, Sorghum bicolor
cctttactgcacggagcatcagggggatcgcctgaccaattccataacacggacacggcaactcccaggcaaatttattccctcagaatcatccaatgttacgggcctgacgaaatgtcatggaagaagaacattctacatcggcaatatgacagggccgacgtcgtcggcagcgctaacggccataggccaagtgcgatacccggctagagttctcttctgttgtaccacaagtgtcctggtccgaacaaatagaagcggagcccttgagagcaggggagtacgtagcggtgtccagcgcaacgcgacgcatcacttccaggtcaaggtggagaacgcgtacggaagaaggtttggaggagatgaaaggctcttcggtgtcataggactctgttttgctgtttgacctgtcccgattcggaggaggagtgatctccaacggaagatccttgtaattattccctgttgttgcaccccccagcgtgtatatcgttgt

SEQ ID NO: 454090 - DNA, 450 bp, Sorghum bicolor
caggatgcacggcgtacaggaccatgattgtttctggtgtgttcgtctttgtcactgctgcagaactgcccaatttcctgattcttgttttccctgacaagcaattccaaacgactaacaaaaggttcatgtcgcagacacacaaccacctctgctccttcacacaatagtcaacgtcgaaccccgcagttgatgaaacgcagcaacaacatagtacaactagcaaagactacttcaataggagcctgttgactatgtaatatttaggctaatatacctacaatcatccgtagtgacttagaaccaatagcgtctatctcagaccaacaacgtgtatgtaatattttaggccaacaatgtcggatcaatggtcacaaccaccccaacaatctaattatgtgtgctgtaatataagagccgacaaccaccctatattgctcctatatgttc

SEQ ID NO: 454091 - DNA, 473 bp, Sorghum bicolor
gcgccgctgggtgccccctcagcctccaggtgtcgtgatgccagaagcagctgctgccatacgtcaaccaaagacccctccaaagcaaccctccagcaatgcctctgaggcagctggtgaggtgcaggtgaatggtgcctcaagtgcatcagatgctgtgactgaggttcctgttaatggtgctacggcaagtgatgctggacacagcgagatcgaagaacaatgagtggccgtctaagtgaaaccaagaccagccaataactgggaagcaatctaagagagattctggatttctggtacatctggggattagtcatacatttctgaataacttctgtatcagaacagcgggacaacccgcaagatggatgccagtaataatgtaataagtagcagatagtttatgtatttaggttaatgctacacacaggagaacatatcagtaatatttctatggttgtttgatggtgctt

SEQ ID NO: 454092 - DNA, 572 bp, Sorghum bicolor
caagcccgagattgctctcatgtggcgtggtggttgcattatccgatcggtcttcttgaaggacatcaccaaggcctaccgcgccaatcctgaactcgagaacttgctcttcgacgacttcttcaacaaggctatccacaacgctcaagccggatggagagacgttgtttccaagggtgccctctggggtattcccactcccgctttcagcaccgctctgagcttctacgacggttaccgcaccaaggacttgcccgccaacttgctccaggctcagcgtgactacttcggtgcccacaccttccgcgttaagcccgaattcgccagcgaggactaccccgaaggcaaggacatccacgttaactggaccggtaggggaggaaacgtctcggcttcgacctacaacgcataagctgtgaatacaatcatcttcattagagtaggggctaaagcgcggtcgcacatgtacatggtcgccagatgtcaaaacccatgcatatagggatcaatgacattctaggtcgctgagtggagacatggctcatgacattcgaataaaaatttaaacgttc

SEQ ID NO: 454093 - DNA, 503 bp, Sorghum bicolor
acaacttttgacttgcggaacctgaacaagcggatgagcccgaagaagaacgggaatctatgcagcattggcgcccacaacaggagggttcgctcaagtgcaacaaacaaggacaagagtgtctggggtggttctctgaaacgacctaggtctctttgttggagcacgggtgagaggtggtacccccatggctttgatgcattgacctgaaagcttttggcttgcggggatggtgctgctctagcgtgagacaagggggtgctgcaacttatcctggagagcgatagccaagagtttgtgtaagttatggaaggaggacgccaaccaacaatcatggattgcgacagtcatcagggaaactcagagaggttagctcatgttttgtaggtttttctatgatgtatacaagtcgcttttgtaactgagttgctcatgtgtaatgtgttagctaagcaagtcttgtaactgagttgctcatgtgttagctaagcaagtttcaaggc

SEQ ID NO: 454094 - DNA, 516 bp, Sorghum bicolor
agggtattcctcccgatcaacagcgactcatctttgctggcaagcaactggaggatgggcgaactctttccgactacaacatccagaaggaatctactctccacttggttcttcgccttcgtggtggtatgcagattttcgtgaagactctcactggcaagaccatcactcttgaggtcgaatccagcgacactatcgacaacgtgaagagcaagattcaggataaggagggtatccccccttatcagcagcgtcttattttcgctggtaagcagctggaagatggtcgccccttgagcgactacaacatccagaaggagtcaacttttcccctcgttttccgacttcgcggtggccagtaagcgattccaacgaacggtgatggattttacgacggcgttagggactggcattgaattcgagatcaggcaacttttaggcctgtcatgattattatgtagtttttgcccttgcgaatattctgcaaggtgctaatagactctattgatgtccttg

SEQ ID NO: 454095 - DNA, 886 bp, Sorghum bicolor
acctgctcaagctgtgatgctcaagcttgtactccacttctggagcgatgaggattgtgtgaagatcctggagcaatgcaggaaggcaattccttctagagaagagggagggaaggtgatcatcatagaaatacttcttgggccttatatggggcccataatgtatgaagcacagctgctgatggacatgctcatgatggtgaataccagaggcaggcagcgtactgaaaatgactggcgccagatctttactaaagctggtttctctgactataagattgttaagaaaataggagctcgtggtgtcatcgaagtctacccataaggctgcacacctctaaataaatatcgaccattatgctaataaatatgtgcttcagtatttgctggacgatgtgatgtcacgataatgtaaaataaatggagtgcgcctcgttttcgtatgcatagtctcatggatatgcagagaaggtgagctgtatgttcaactttattacttcgagatccatgttttttttgttttgaaagtgtactggagcactcttgtgtgcttccaatggtggtatttttgatttggatgtctttgtggtacatctaataattaagaacatacttgatgtgtgttgcttgctgatgtttaagagatacacaaacacaacatgtatgcaacgtatttatcatgctatagcattgtatagcaccactataccattgatactacatctttattctgagggggaaaaaaggacacgaagagcttggccaccgtgttataagaacaatgtgaaattaccctaccccctctatttatagtgactactcttttgtacaaggcaagaaagcaggaaatgcaatcaaaattgatgaacttgtgacattttatttc

SEQ ID NO: 454096 - DNA, 902 bp, Sorghum bicolor
ggcacgaggccagagcccatgctgcatctcctgccagcattctcggcctaagcttcgtgtggagcaaagtagatatacaagttactacacaatattttatttaaaaatgagattcccaaaagtcgactgcagaaacttgtaacctctcattggatgaatgcaacactgacatgtagtggcataaggatatagcatattcagagaacaaatcatctgtctaaacagaatacaaaaacaaatacttacagttggtcagtgtccacgatgctatagagtctagaacaaaaccacatatgtgaaccaaattcagaagccatctgtcgacgaaagctggtcggcaatctaccttagggtatacccatggtagtagattgtcggcagacaggtgcgcaagctacgaacttgatggtgacgcaagacacagacaaggattttatccagattcggccgtcgtgaaggcgtaatacctacgctcagcgtcttattgtattgatatgagttgtgttgagatgagtttccctgagggggtcctttgcccctccttatatagtccgggggcagggttataaatctagaaactaatcctagtcggttacaattgccatagatagttcgatatcaattcctattctagccgatcaggatcttgcttgatctccacgtcttgtttccttacgtagaactccaagtagatggatcaagctacgaatcgtcttgtagtgggccaaatctctcggcctaagtctagccataagggtataggggtttatacccacacagttagtccccgagcacgatgtgttgtgaagcgacacgccatctggaacttcttcaaccagcaaagacgacagtcctccaccattattgccgaagaagtatgttgtccgaacaatgcatggtgc

SEQ ID NO: 454097 - DNA, 536 bp, Sorghum bicolor
tatgatgaccaagcaaagcaatccaggcattattatacaggctatctggggattacaatcctttgcattcagaccctgatattgcacagcttgctgggttcactcgtccaatcctgcacggtctctgcaccctaggattcgctgctcgggctgtcataaaatctttctgcaacggtgaaccgacggcagtgaagagcatcttcggccggttccttctgcacgtctaccccggggaaacgttatccactgaaatgtggcttgacggccagaaggtgcactaccaaacgaaggtcaaggagcggaaccgtgccgtgctctctggatatgtgttgctccaacacatcccgtcatcattgtaagtaaaaagaaattgtttcttatttggtgcccgctgaaaaaagcaattggctgcgatggattgagagttgcttcacgacgtgggctgccactgtaatgatagccagaagtcatgtacaggtctgcacataacacattcgtactgtacttgataaaaagtacgcaccacttaaatacgc

SEQ ID NO: 454098 - DNA, 529 bp, Sorghum bicolor
ccttcatgtcgctacccaagcagatcttcctcgtgtacgtgggcgtgttgctcgtgcagcagaaaaactccaacgtgatccaaaacgtcgtcttcgccctcgtcttcgtcgtcagcgccgccatgggcggctgggtttggtggcgcatgaggagcgtcaaggccgttctgctcgaggagcaggcgcagcggagggcgaacaggctgagagcggaaatggcgggcttagacaaggagaggagcagggatggcgacgagggtgtgccgctgacggccggtggcatgggaggaagggaggatgatggcgcgccgcggccgtttcgggagcggtcgaattcgctgtggaatacgcaccgggagacggagccggtgcggcaggggtggcaggcgcagcagcagcaactgcagagagagcagcagagaccgccgccaccggggtcgccgtttggcgccgcgttttagatgatttttgcgtttgccgtgcgttaggtaggcttggtgaaagtaatgcttaatgtcttttcctcttc

SEQ ID NO: 454099 - DNA, 544 bp, Sorghum bicolor
tgaccactggatcttctgggtgggcccattcgtgggcgctgccatcgcggcgttctaccaccagtacatcctccgggcgggcgccatcaaggcactcggctccttcaggagcaacgcgtgagcgcaggagccacccgtgtgtcccgtcgtccaaggctttcaatctgcaaagggctttgcttctgctggagcaatggcgatcgatcttagggggggagaggctggagaataaagttgcatcaacttgtagtgccggtggtttggtcgctcttgtttcagcagctgcgttgcgcgtgcgtggaatttggtttcgtttccctgtaatgatcaaccatcatcatcatcatgtgtcgtaatctgctgtccaagggattccgtctcctcctttcctctcctgctcttctagcctctactatttttctatttaattattgttattattatgtagcgacaagcatcatcaatcatcatcagtgagaacctcttgcttctgtttaaatcaaccgcacatgtggagtggatgggattattcagtcttgattga

SEQ ID NO: 454100 - DNA, 562 bp, Sorghum bicolor
aatgagacgctgaatgacaaggtgattggtgccatgctgtcatcctgccggaatctcattgagatcagactcagagggtgccggggcttgacgggcggctcgctgatctcattgctcaggcactgtgggcagtcactggagatccttgacatctcccgttgtcctggcattgctgtaggtaatgttgaactctttgcccagcgcgccactcggttgaatcatatgatcatcgaggagagcgcgatgtcggaggaattgaaggcaatcgctcagaggaaaggcatgaaggttggctcattgccctgcgaaggtccattttgaagtaaggttatttcgttcagaatgcaactcatgttttttatacacgatttgaatgtaatcttactggaatgttaataaagtattgctgcttagtactttgtgtatgcagctttatatttgccttgtaagtttattattatgacaagcctcttggtgcttgcctgacatgtaaattgagcgccaaggatgtgctgttgtatttgttcaacaattgccccggaataataatccagtaaattcc

SEQ ID NO: 454101 - DNA, 511 bp, Sorghum bicolor
tgagggagctgaagggggagcatcaccacaaggttgtggagatcagtgaaaacgctgggaaatgccttgaggaagagtatctggtggatgaaccctcgtgttcgacgccaaggagaaggcagatcgacctgccaagtgtggagtcaatagaggagttgcgaaccccagactatgacgagcttctcaagtcgttccgggagtcgagggggagctggaagcaggcaaatggagacacaagacatttgtcagagacagctcaggaaccaacagtcatggattcaagaattcctctcataggaagaaattagatttaccaaaagcttgtaaaaagaaaaagaggaagaagaaaggcatgtgtttagattacctttttccatattggtgttgatagtggtatcggttaactgctatttgtttggttgatgtttgtttgttcttagggtggtctacttgtatagtgactagtgagtcaatatatacctgctatcgcatgcatcattgaatctgttgt

SEQ ID NO: 454102 - DNA, 861 bp, Sorghum bicolor
aaaagaatatgaaaaatgcacggagctatgatccactgaatccaatcgaatgtctcgagcttcatctcaaaaaagttgtcatcaataattatcatggcatgaggcctgacgtcgactttgccaagttctttgttttgaatgcaaaaatgttaagggaaatgatttttggagtcaccaaccactgcagtgataagtggatgtctaatcaacgcagacgtcttcaactagacaacaaagcttcacaaggcgctcaatttgcattcggacgtgattacagcatgtctatcaccaggtctcctaaacctgatgatccctttgagtgtatggaaccaggaaaatttccttagtcagccagcgggtgaattagcttgtgatattttgtgatgcaatagggtgtgcatagcagcatatacaggagttgctcatggcgctgtagtgaagcagccccatgtccaaagactgctcgtttcaacataattattttatctttgcttattcaagaagctaatgacactaatgaattgctatgcttatttatcactgaaacagatcataggtgaaaacctaaggctagtctcaatgcatgtttcatgagagtgtcatgcacattaaatagagtgccacataagtaaaattgctgacttggcagggtcattaaataaaggagtttcatcagatgagagaggagtttcaaccccatgaaactcatgtggctcggttacctagtttatagtcttggtaactgtgtcatgaaactatgcattgagactggcctaatagcacgacccataaattaatgttatgttccatatacatgcttcagtctgatgcaatgtaatgtgttggatcctccactccatg

SEQ ID NO: 454103 - DNA, 636 bp, Sorghum bicolor
tcatagattgcacgtgtgagctgccaaaaagctcgactatatctaacaatgcatatctgtgtgttgctacctgggatacgagggctcctcagccatcacaaattgagtctgccgtgcgatgggctgtgagaaagcggtcacagaacaagcctgtctatgtccactgtgcctatggtcatggcagaagtgtctgtgtgatgtgcgcgcttcttgttgcattaggattggctgaagattggaaagctgctgagcaaatgatccgtgagaagcgaccttatattagcatgaacactcttcaccgcaaaagcttggaggaatggtcaaaacatttgctctcctctaaaagaagtggggaatcggatgtgagttctgttatccattcggattataaccagaaataaaattgaaccagcaagagacacgcgtgttcagtaactgtgatatttaagatgcattgtacattcggtagtattgtttgctgctgtcctagtgaatgcctatggttcattctaagctatccttttgtggtaattgttttgtaaaaactatatgtttcaaattatgtcgatactgtagctttacactgctagttctttaaggaagatttagtgtccttgcctccttttttttttctcc

SEQ ID NO: 454104 - DNA, 482 bp, Sorghum bicolor
gtggagtggaggcatatcctttatttgcacaatatagtttaaataaattatgagctttcaggtgtataggaaacactcatgcagttgtctccatgtaatcctttgagatacttgctatgcatggatattctttccagcagtctagagacacagtaaccctacctcttttagcatgtcaagtttcagataagttttctgagactgaacttccacctgattgatcattttattttgcaggatactgctttgatgaccggaagcctgacagccctcgtcttaagatccaattcgcaaggttccctttcgctttgcctgccgcccaggatcatcataagaaacgctagcagtgtagcctgtgcaatgggcgccgtagatggtctatgatcagcctgtatgtaaaactgttttagtgagcagttaaaactgtcaggaatttcgtgtgacaccaacacatggaatgataggaatgtgccttctttttc

SEQ ID NO: 454105 - DNA, 477 bp, Sorghum bicolor
tacttattcaaaaaagatgggcgaaggccttttgaacttttctaccatggacagttcgacgattcaagacccagtaacaatgtgccagtaactggaagggatctaagccgtgcaattgactgtgcgctcagtggccaagaactgccctttgtacaaaagccaagcgtcggctgcaacatcaaatggcacccatgaggtgctcgtaactcatagtgtcgcgctgtggcgagaaacaaagccatgtttcacttctcggtacaatacaaagatggaacacctgattgaggtgcactgagggctgaatttgaagtcagtgttggctgcctttgggaacagagttgtgggggcagaggcctgggagcttttcttgtgtaacaggggcaatagtgtagtgtagcgctagcgcagcaaccagcaaaaggcccgtgtaaagaattgtttacacagaagtgctttacttaccttttctgaggtcgc

SEQ ID NO: 454106 - DNA, 734 bp, Sorghum bicolor
tgtcaaatgtcaatgcactctggggtttcggcgccgctgatcgatgccgccaatggatgtccacgcactcgatgcacctggtcgtgtgccacagctatccatgattctttcagggacgaggctgctggcgtcgtggcggtaggttcctccagcgatgcgatgcctctgtcagtagcacgacgtcaggcaggcatttggcctgagtgaagctgctcagcaatcgcaagatgctccttgtcattagccatgctgacaacaagcgctggaagcctgttatggtctgatggtttctttcacttctgataaggcctttgcagatgccctcatatatgctccatcgatgagtacagtggatgcgccccgatcgagtactgatgcttcctctgctgtcagaaactggctcctcccgcctaggaagttgagtctttctcgcgagggtggttgctctggcgatgccatggcgatgctcgcctccgtcggtagcacgttgtcaggcgttcaacctgagacaagctgctcagcaaacacaaaagatgctccttgtcattagccattccgacaacaagcgctagaggcccttctggtctgtctcacagtttgtatcacgtctgataatgccttggaagatgccttagtgctagttagtatgggctgggacatagttcaagcatcagcgactgactggcactaagtggatgtgccatccaacccgggctctgctgtcacctcgtgcc

SEQ ID NO: 454107 - DNA, 566 bp, Sorghum bicolor
tgtcatccttgcaaagttcattgaatcagtgaaaagttgccctgatgaaaaaacacgcgaagcattgaagctggtatgtgacctttatgcgctcgacaggatctggaaagatattggaacatatcggaatgtagactatgttgccccaaacaaagctaaggctattcataagctgacagactacctcagttaccaagtgaggcttgtggcacgagaactcattgatgcatttgaccttccagatctcatcatccgtgccccgattggcatgcaatcggaggcctatgcacagtacacccagtatgttggcttttagagtatatacgtacaaacaatatagattggataagttcatatattattaggttgcaattaaggtatatagatagatgagcaaataagtttcagttctagtatatgtaaacagcagctgtgaagcactggctccttgtgaataaattgtcagattttttttggccgaattgtttctaatgaagatttttatcagttctagtacatgtaaacagcaactgtgaagcactagctccttgattttcacttggttc

SEQ ID NO: 454108 - DNA, 720 bp, Sorghum bicolor
cgcagacgcacggcgccgtctcggcgggcaactccccgcgcgccaacccgcccaccgtgttcgggttcgggatgcagcgcgtccggagctcgcccaacctcagcaccctggacgcggcggcgcagcgcctgcaccagcacggcgtcgacggcagcataccgggctacgtgagcggctcgccaaggcacgcaggcgcggggccggggccggggcccatgctgttgcagaacaacttccaccactaccagcagtacccgccggcgcccgtgcccgtgcccgttcccgtgcagcaccacggcggcgggcggtacgacgcgcgcgggtacgtcagggttgggaactacatggcgccgatggtgcccgctaccaggccgctctcgaggggtggaccgccgccgccgcacagcgagatggtgacgcccaagaagtctgcgattgtatgggactgacccggccgccggggccggccgtacgccggagggagcctgttgtaatgaattttgctatcagtatacgaggggcagtgagttgagtgctatgagttcttgagattgagatgtgtaacgtgtaaatagacggtcggatgtatggatgcacgcggccttgttttagctgttgcgagtgtgtccacgctaatatgtttgtgcgtttttcactcgtcacaccagcatgttcgccggccgaaacagtaaagcatagactgtttaacacttgtgtctc

SEQ ID NO: 454109 - DNA, 561 bp, Sorghum bicolor
gacaaaagcaaagactgcaagaagtccgtgaatcacagagaaagaatgaagaagctatacagcttaaggagcagtatcggggtgtagtcagaaaggaactggaagatttggaaaggagacattgggatatgacttcaatattgcatgcgctaggcatctctgttgaaggtggtgaggttaaagccttcaagcaagctcttctgaaattccatcccgacagggtatcaagaaatgatatttatcaacaagtaaaagcagaggagacatttaagttcatttcgcggctgaaggagaagctacctcggctatcctaatacccatccccaactcagtctctgtttttacacatgccttagtcgcatcctccttttaacctgtagggtcaaggtacagagttgagaggatgtttattggcgttcttagaagtaactagggcttagctctttcgcttgggttcggtttggtaggcattcgtgtacctggatggcgaaacggttgtacatgaccgatggcagaaagaacattcttttatagggccatctttattaatttatcctacaa

SEQ ID NO: 454110 - DNA, 343 bp, Sorghum bicolor
aggagttcatcgacgctgttgctgatgagctcagatcaaggctggcggccaactcaaacctatgaaatccttgctgaagttctgatgcttccttgcacgacgattcgagtcatttttcttatgtcgccattttctatccttgtgccaccaccctgaaaggctgaactaggcgaatatctgcaggctgcagcagtatgccagatcattaccaatgagagattgtgctagattccgcgattatggaactcatataccttattatctgatacattttacgttttttaaaaaaatatctgatacatttcaataaagtccattcagaatgcttttctggttgtctctt

SEQ ID NO: 454111 - DNA, 557 bp, Sorghum bicolor
ttccggacggctttcacatccagcttcataagaaaacatgaaggctccatttggaacgtgtaattttttttgttcctgtgttgtttctacaaaaaataaaataaatcctaaaaaaactatggaattccagtgaaattcctacgttccaaacgggtccaaatattgttagaaaagataactagcatgtggtattaaaagtatgctcattagtagctgtgatcaaataattaaagaccattcaatataagtaagttatggtcagtatatataaacaaatgtactatgaaacctcattagaaaagcaaacagaataaaactcttcaggatctcatcaacctattccaattgtaagctgctcggagcataagctataagttacaatgttgaagcgtcactgccaaatatgaagaaggggaataggaaagaagttcaaaactagaaaatgttgtagtatgtttttccatattttccaagattgtatacctttatactgaatgttgtacggtcatatgtgtaattgtttgcgcttttatattataataagtaaaatttcagct

SEQ ID NO: 454112 - DNA, 550 bp, Sorghum bicolor
ggagcggtacgctgagcacttgggcttctatgtttccagccaggtctaccaggccttatcggcttagccatagggcaagctgcattttttggacgggtgcacaaaccagtgctctacagagttgttgcttctctgcatcatcgttgtccacctctcggcggtgtctaggcggccttcctggtggtgtggctcatccgtgcactcaacctaagaaaagttaatattggaacaaccctgtgctacatcagctctgaaggggtcaatatcactaaatcgggaagcaagcatggattttcaatttctactttgattatccaaaatattcaggcaagcaggtgcaaaggaagaacttcaacaaagttagctaaagtacaagtgttgtaggtaaggcctggtattatgcctaattcgctaggcatgtcatttcctacgcaaccagctcatggtgtaccacctcaaatgtatattctctatttcatcctgtctacttgcaccaatttaattatgttccccattctattccttatatacaagttattgatttgtatgc

SEQ ID NO: 454113 - DNA, 563 bp, Sorghum bicolor
tttgatttttagtaatgtcaatcaaaccaagcatccataagtatgcaaacatcgtttgaaaggatgtttatgcttcctcagatgattgctgctcacttatttcatgagcgtcacgtgcaccttttgagacaacaaggtattggtgctagttgcggtgctcttatatcaacattgttgacttgggactaccagatccatgttccttgcaccagtgaaaaaaagtgtggaccgagtttgaacacattggtggcagccaaggccaatcatgcagaatttctatgcctagtgaggtcctgctatggttctgacccgttcctttattcagcccctgcttttctgttgtgttaatttatgaataattggacttgtattaatccttcattgtttgccctagttccgtacccacaattgggaaaatcccagtagagaaaatgactgagctagattgtaagcttttatttatttatttttatttttattacttttctacttcggagttatttcagttcatgttgttgtatggaggtaacatcacgaattcagataaaaagcgcttttaactt

SEQ ID NO: 454114 - DNA, 627 bp, Sorghum bicolor
actcgctgctgcagagcaaggtgtcgagcctgcaggccaagtacccaggcgcgcggatcatgtacgccgacttctacagccacgtctacgacatggtcaagagccctggcagctacggcttcagcaccaacctcagggcatgctgcggcgccggcggcggcaagtacaactaccagaacggcgcgcgctgcggcatgtccggcgcgtacgcctgctccaacccgtcgtcgtcgctcagctgggacggcatccacctcacggaggcggcgtacaagaagatcgccgacgggtgggtcagcggcgcctactgccacccggccatctcggcctagagcgagctccgggaatcggggggctggttggttggtgctggtggtggtggttcgttaatttgctggccgggcctctcaagttaggggaaggggaatcagattaattgtatttgtttagatggaatcgaagcgggcaagaagatgatggaggtgatcagcaagaaataatcaatggaagcatagtaattctctcgtgttcatcatgtgacaccaatgctaataccactcgtgtagcatgcgattttataaggctatttatgcgttgaatttgaatatattcggggggcagggtggc

SEQ ID NO: 454115 - DNA, 683 bp, Sorghum bicolor
ccggacacgagcgctccctcgtgagctcggctctggagtgcatagccaacgatgaccggagtatagcctccttgctggatccaacactgtgcgatcacattcacagggaagatgagctagcagtcatcggcgaggtgatccgtgcctgcatccagagcgatcccagaaacagaccgagcatgagggaggtcgctgccaggctgagagaagccatcggtatctcgccggtcgctgcgacgccgaggctgtctccgctctggtgggccgagctggaggtgctttcgaccgcggaaggaagctaacttggcaagacgggatgcccctgcaggctgtgtcgctgtgcatactgctgctatgcaacctttgtgcatcgcccagcatcgtcaacgtaactggacaactgcatatatatatatatatctcctgctgtaaatgtgaaactgcaggaatagtactagtaatcctcgtgaaccgacgatttctaccacccgttgcattgcaccatcatgtgtctgaaactctgaaggtgctggtgttctggcaagatatacacgtatcctccgcttttgaggttcctgggacaggaacgagacacgcgaggacgaaacaaagattctactaatgacacgcgccggccgatcgccatggccggcagccaggcaaataaaacctccattattgat

SEQ ID NO: 454116 - DNA, 552 bp, Sorghum bicolor
aaagttcgtcgtgctggcttgaatgtggactttgctccggatccaattgcatatcagcttaatgttcgcaacggagctcttatacttaaggtacctgggggcagtgctgcagccaaagcaggtcttgctccaaccggcaggggttttgctggtaatattgttctgggtgatatcatcgttgcagtggacggcaaacctgttaagggcaaatctgacctgctgagggttctggatgactatggcgtcggagatcaggtgaccttgacaatccggcgaggctcagaaacccttgaggcaaccttgcctttggaagaggcaaacgtctgatcatccaatttctgagaagtagaaccccgcttatccaaggtgtggcggtgtaagtttattgcactgcatcggccaagctgcacttcccgtgcttgttattactatcaccgtataagattattggtgagccagcgccagcctgatgcatgttagagaactcgctggaagtccgacccctgttgggttgaagaaacccattgttgtcgtctggtttccatcagctca

SEQ ID NO: 454117 - DNA, 598 bp, Sorghum bicolor
cgattagcgtgcaagtgcaaatatgaagtcaacatgacttttacacttactgtagaacttcaaaagctagagagatgtactctaatgaattcacggaaaattacttagagcaaaaaatattttggactgcagtgccatgttcttaccatcataactaacaatagggattcagttgtagtgatttctgcaatttaatttggttttggttggtccactgatggcctcaacattgtgattctggcctctggtgtctggtactacagcgacgtcttccgcggttctgcctcaagttctcaaaaaaaatggtttgtttggattctctacatatgatgcctggtgggagcacatggtctgcgcacgctggtggactgggtcacagtggtgggcttggttggcctaccttggtttggtcagttaagaggtttttgtggtcaggtctcacgtctatccacgtgtattcacaaatgtatagtactataaatgcagatgattgtaaaccactaatgagaactttagccatccacaaaattcaatttgtaatcattattgttttttaactatacaacatatttatagttaaattattagagcattattt

SEQ ID NO: 454118 - DNA, 471 bp, Sorghum bicolor
ttttttaacggtcagagatgccagatgtgcctccgatctgatcctttgctaaaggtgatggagcgactggctaatcctggggtgaggcgggtgttcattgtggaagctgggagcaaacgagtggagggcattatatcactgagtgatattttcaagttcttgctgagcttgtgagaagagagaagaggagcatggacatttgtttgtgacaaagtgactggagggagttttaacagtagcaaacagcagtgtatgtgaagcaagccgccatgctaactctggcactctccctctctttggcctttgggcaagtaagacaggattgaaggtggcgggcttgtctttgcggataatggctgtccgggttcatggtctgtaaagttccttttttttttggtttcaagttttaaccattttgtgcctcccgttgttaccaaaatatctggtgatttttatttattggattgtttc

SEQ ID NO: 454119 - DNA, 324 bp, Sorghum bicolor
cgcagagtagttgtctgggcttgcctggcagtgcatatgactcttccaggccagcaagctcaattgctgtaagcatccccgagtatatcagaccagcacagactgccagggtctggtgatggttctgttcccagagtacaaaaaccaagtatgatatgtgacatatgactgggtggaaatcttcgttaggcgttcttgggcaggcgttatatgcaatatcagagtgtaaatctggctagggttatccaggtgaaacccaaatggcttctgaccacaagcgcgacagcgcacacttaactccgaaataaaccacgttctcttttg

SEQ ID NO: 454120 - DNA, 534 bp, Sorghum bicolor
gcctttgcatgggcatttgacagtcctcccaagggccagaagcttcatatctcctgcaaaaacaacagcaaatttggaaagaaatcatttggtaaagtgacgatccagattgacagggttgttatgctggggtcggtcgcgggagagtacaccctgctacccgagagcaaaagcggccccaataggaacctcgaaatcgagttccagtggtcaaacaaataactgtatacctacataatttaggtgttctctgtaagttaaagatctataagaggttgagtggtttcttgttttgcactctgctaaaggtataccctgtttgtgcatcattgtaaatagcaggcagagaaagttgtcgtttgctgtacctcctgtgagatataaacagatgagttttcagatgttttgtactgattgtaacaggcttcattcgtttattttttttaccctggaattttgtctttgtaaaggggtgtaaacagaacaagtatatgctgttattaggttctctcatccggaatggactttgcggtc

SEQ ID NO: 454121 - DNA, 511 bp, Sorghum bicolor
gaggaagagagaatcatcaatgctacttccggagtcgactcggtccgattcgcggaaattggctatttctagtcaatattgtcagcacattgggtccagtcgattttttgatcaacaaatatttcgatgagaaaaagaccgctaaaaaaagggaaggagtcgcgaacgcaggaagcttcgtccttagctctaaaaaagggtttctacgactagtgcgaaggcagaagtggtttcaagaattcgtctttttgtttcgtctgatgggtatctagtcataggcggaaatgacgcccaacaaaacgaaatgatctatcgaaaatacctctgaaagggcgatgttcatgtccacgcagacttgaaagcagccacgcctatggatgaattatggaaggtgttctcgaaaagaacaactgaggctatctcccattcgatccttctactaaatcagattcttcactagctataaaaataattgattatcttcgcgagcgcaatgtatttgtctacagta

SEQ ID NO: 454122 - DNA, 483 bp, Sorghum bicolor
agacagtgatgccagtttatgcctcgttaattgccaagttgaagtcttctcctgaaaccgggcgtgatttgtacatcaaatacactccagaggatgttgtagcccatatccagcacttgtttgaaggagcagcaaagtgccaaatgatatgcacccttgtagcctgttatactgcaggttctgcccttctgaacttgtgaagatgctatcatggattctccattcgtggttaatgtcttgtactcacatatggtgatgctgttgtctcgaattacaactgtgcatcactgtttttgtcctccatgagaaagttattcagtttggcaaatgttgtatatgtgtgtaggtgtgtctgtatcaatgagtagcatgattattttgtaacaatattagggttctatttctgtttcgagcactactttaatttaaccccattaagtattatgtgtggatttcaatatttgattcagtaagtttgtgctc

SEQ ID NO: 454123 - DNA, 522 bp, Sorghum bicolor
ttcaccgcgtcagcccgtgtcgccctacggcgacgttggctttcagctccaatctcagggccagcagagccatcgcagctccgtatcacattcgcactctgcccatccgccagaggcccgacgctcgacctcgatctcgtcgacagcgggtagtcgatttgaagagacagcacaacaccgtgcagagcttgaatctgtcagaagggagaatgagatgcttcggcgacgggtacgtgaattagagcagaacctcagagcttatcgcgactcgcatccacagtccccggatgagtcatctacccatggcatagtgactggcatgcgggatacctcattgtcagagtcgtgatacgttactacaattggaatttctcttttgtctgcttgggtagaagattgcaaaactgaatggcgtttacaaggatggacgcagtcttttcaattcttttctttttttcaaattttcttctcctctcttccatcttactttgaagcctaataatagctacaattgattgctgc

SEQ ID NO: 454124 - DNA, 461 bp, Sorghum bicolor
gccgtcatggctgccgccatcctcggagaccagctctacacgggagggatcattggagctgtgctgatcgtcatcggcctctacttcgtgctgtggggcaagagcgcggagaagaaggccgccaggaacctgcaggatcagctggcgcgtcatcagggaggagacgtgacgaggcacctgctcggcggagaagcttcggtgaaagacgaagaagctccggccatgctggcgtgaagcgtgatgatcgtttagtcgtcgaccaaggatggacatccgtagtcgttttgcatttgggaacgtatatgagttgtgtgatttcagctgttccaatcaggcaaccaagaacaagtgtgcatgggttgccagtgtggaacagtagccatgctgctgtgactctgtgagtctactctgctgctgtagtgttacactgtgcagcgtataagtataaaatcacttcatcc

SEQ ID NO: 454125 - DNA, 491 bp, Sorghum bicolor
attggcggtgctctcggtaactctgcagtgtttgcagtaagtatgcttgctttcttgcagctgcatcaaattacatttggaagtcaagcaccagccatggaatacaggaagagaatcgagtacaatttccaatcaggaagctcacaacctaccgggaaaggaaaacttctgcaggtttacctagctagaggctgaagaattattagatcatgctgtttggatgtacagaaagttttgtccaaagttcaattttgtgggttttgttagggcactgatcgttctttatgacggactgaaccctgttccatgcaactagggaactggctgtccgattcttttggatggatttgaaggataccacgtattgtatctcaaactgtaaatggctttatgcttagagatggattgtttgtaaaccatgttcaagctaacttgaactgccgttttcatccagcctctacgttcttgccagttttgatcatattcattct

SEQ ID NO: 454126 - DNA, 160 bp, Sorghum bicolor
atcgaggagctccgcctccttttccgcgactgaagagagtctcactcatgctctgtgagtcgtgccgaggcaagggcaccgagcgcttcccgacggctgatggctgcctccaccccctctttttataggccttccctttccctcttcttctcctgtcctg

SEQ ID NO: 454127 - DNA, 445 bp, Sorghum bicolor
tgatctcaactttgcagttttcgacctcgtcatgctcatcctcgctattctcaccgttggtcgattcctccaggatcagaagagcaactacctggaaggctttctgctcatcattctttacgttgctattgctgttgcggccttctactatccaaacccaactggccatggatccgagggggctgctgaaggtagttccgagggcggacattgataggatcctcaccgattcgcttcgagtctaccggttctttttttaacctattacgatgttatgaccaggagtcactttccagtttgatattgctcagggatagcatgcctgtataaatacacagagttgggtcgttggagcatgtatagcatactgttgtttatacgtacgttactcgaactctgattttatagagttgccaaagaatcccaaaaaaataatctatcctct

SEQ ID NO: 454128 - DNA, 445 bp, Sorghum bicolor
cctcaactccttttccttgacttttgtgcggccttccttaccaagcttagggtattatagtgctctgtttctcttcggattggtgaaaaaactaaacatagggctctaccatgtgcagtttttcactgaggtgatgaataaacgaaagcatgtaaataggaccctttttctcgtctttggacagcaaacatgtttgagtgactggtcttgtgttaagcgcctgaatgttgcctgttaacttatcctagatgtatacttaggtttagtatattgctgtctgcatggacattgctgtttctgcaatcagtggccccgcagatggcgatgcagcagtgcaagctattatggattttttttttttgcaagatccggcttttgttcgccttactgtacatagctatggtgtgttgcacttgaaaattttgcagttgctgatattttcttg

SEQ ID NO: 454129 - DNA, 685 bp, Sorghum bicolor
tacaaaccacttactccatatgggggtggcataaatgatacggcaatgttctggggtgtaaaattctacaatgatttgctgatgcaagccggcaaacttggaaatgtgcaatcggaactgcttctccgcaaggactcccggactttcaccttcgataaggggtgggccttcccacgccgggtgtacttcaatggtgataattgtgtcatgccatctcctgaaaattatccatggctgccgaatgcaagccctctaacaagacaaccattgacactcccactcttggtattctgggttgccttggctgctctgttggcttatgcatgatgagtgggatcaagaggtttagcaagcttcaagttgatgtcagattccatgaggtgcactgcaacaggtcatttattcattcaattccatggttgcacagaagagatgaggcgatgccaagaaaaaagttgatatgtgtgtgtgtgtttttgtaagttaaagggccaaaatgtatttcttgtttggtatatagcagccctacagcactttggtgaacttagttactgcaaattaggtaattacagttgcaccttttgtattttatagcaaacccagaatttttcattggattatatgactgctccacttcttgtagtaaatgcaaggcttcccctgataatgttttaaagattggtcg

SEQ ID NO: 454130 - DNA, 473 bp, Sorghum bicolor
aatgagtaggatttgcctgcctgcagcaagcaattttagataactaggttgtgtgaaggaagccgacgatgcatgatgaactcatcgtgccaggtgcctgggtcccaaccaagtaactcctgaaatcttttgcttgtccgtagcgaggttttagttgtgaacgtagtagaactgtctccatttgcttctccgcagtttgctcttggcagcaagtttaagggccaagtcttattactattgttattgctgatttgctcttctgccttctgatgtaaatatttatgtactcagtcccagcctgtagtaagtagtaagtagcaagcagtggcagtacctttggtattaaccagcagctattcgcggcattttaatcccctgtaagtgtagctctgtagcgcgagataaatggcaaacactggtatatgtatgtctgatcttctcactgaatgtattataagagttatagaggccct

SEQ ID NO: 454131 - DNA, 469 bp, Sorghum bicolor
ccctgtgaagtatgatgtcaaataccaggcaagcgcacagccgttcttcgtgttcggcctactggtgacagccctggcaaccagccattgatgaaagcatccaacttaaacagaacacgcaaccgttctgctaccgaagaggcaaaataagctagctgcttgtgtgcagggtaggaagagaacgtccttttacttctagaacacagatcgattttgtaagggttatgtggtgggaggaaaagttagcaatatcgctggatgttgtagtagggtcagtaggtgcacggtaagattgttgttgtgccatttttagcggctgaactggcaatgctttgaacaagcagttttgcgtgacggccgtattgttgtatgatcaatcctgaaagagtgttgctgattgttccatccacaatggaacgagttcacaacattcaggtttcatgaagagcataaatcggcggtgtgctcc

SEQ ID NO: 454132 - DNA, 457 bp, Sorghum bicolor
aggatcctttgaaccatgaagctgcagttgtccttcgtgacaacccaaagatgtttgaggcaaatgtgaaaagagccatggctggaggctacgtaggccaacactatttccaaagatgtgcttgacttgatgtgatggcttcaaaacgatttcagtggcgccttatgccatcgggcccctgtatcagcaccagggcgcccagctttgctggatttgtgtggttttagtgcgcggaaaagtgcttctggaagcaaagtccaaatagttcatggtgtgatactgtgacgtatctgtttgcccgtctttgtgatgtgtttaaaaccggtaaagtaaatttggtgatatggtagtggcacatatgacaagcaaatgcttctcaaaactgtatcactcgataaatcctaaacggggaatgggaagtggattatataaagaagaattgcttcttttccagccg

SEQ ID NO: 454133 - DNA, 440 bp, Sorghum bicolor
cagcctcacggagcaatatccgagggaccatgagatcttcaagaatcctattgctttccataagaacgggtttgacttcatcaggcaaaccttcatggacaagcaaaacgtgaagctggattgcaagaggttcaggcctattctattggaggcactggataacctcaacccataaaggccataaagattgtgatcagttggttgttgagcatagcaatatggattactgtatacaattcattttcccccattcaccattcgttccttttagtgctcttgttcgttctgtccctgcctgagaaggcccgcattgtggaaattttagggaaaaaaagctgtgtttactgtgtacactgtataaattgctgccggtgcaatggtggaacgaaatattactattattaattaggggctctaagtctctaacacagttccccggt

SEQ ID NO: 454134 - DNA, 409 bp, Sorghum bicolor
gtggcggttggtctctgggctggcctagtcattggatttgttaccgagtactacacaagcaatgcctacagccctgtacaagatgttgctgattcctgcagaactggagctgccactaatgtcatttttgggcttgctttgggttacaaatcagtcattatcccaagttttgctattgcgtttagtatcttcctcagcttcagccttgctgccatgtatggtgttgctgtggctgctcttggaatgctgagtaccattgccacaggccttgccattgatgcctatggccctatcagtgataatgctggaggaatagctgaaatggctgggatgagccataggattcgtgagagaaccgatgctctagattctggaggaaacaccactgctgcaattggaaagggctttg

SEQ ID NO: 454135 - DNA, 797 bp, Sorghum bicolor
ggcacgaggcagctacgtctactaatggagctcattgggacaccgaatgaggctgatcttgattttgtaaatgagaatgcaagaagatatatccgccaacttccccggcatgctagacagtcctttcctgaaaaatttccacatgttcaacctttagcaattgacctggtggaaaagatgctgacttttgatcctagacagagaataactgttgaaggcgcacttgcacacccttacttggcatcacttcatgacataagtgatgagccagtctgctcaatgcccttcagctttgactttgagcagcatgcattgtctgaagaacaaatgaaggatctgatctaccaagaggctcttgcattcaaccctgattaccagtagccgaagttcaatttcagccggtgattggcttcattgacatggagattttttttccccacctgatgtcagtgcaaaaagtcaccaactccgattgctagctgtaaataattgccttaccagaagatcctccattcctccttgattaaaaaagctggagacgtgtcattcaagggtagaaaagagcgagcatgtgaaagtcaaatttctgcgtagctatggattcttgtgcttacaatatgttgtttttaatcagactttacttttcttcttaaaaacttttcgatgttgtctgtaagagaggcagttcatgaacgatggctgcctgaattcagtggctgtcgtcaaagttaacatttctggtcgacttaagaattcttgtttatcgacttaattgtttaaaaaagacctgtaattcc

SEQ ID NO: 454136 - DNA, 828 bp, Sorghum bicolor
ggcacgaggccaccatcagctaagcaaagcaggccatctgccaaagtctacctgtgtccatctaacaaagccagccgggtggtccgtgttcttgattaagctgtctgcaatcatcatggctgccgccatcatggcaggtctgctgatactcctcgctgccgtcgccgctccggcgcacgccaaggattacaccgtcggcgactcgtccgggtggaccagcggcgtcgactacaccacctgggcgagcggcaaaaccttcgctgttggcgacaacctagtgttccagtacagcatgatgcacacggtggcggaggtgagctccgcggacttcaacgcgtgctcggccagcaacgccatccagtcctacagcgaccagaacaccaagatcgcgctcacggcgcccggcacgcgctacttcatctgcggcacggcgggccactgcggcaacggcatgaagctcgccgtcacggtccccgctgcggccgccaccaccccgccggcgtcgtcatccccgcccaccacgccggcggcgcccggcgccgacacgcctccggagacgaccacgccgtccacgtccacgcccaccgcgacgtcgccgcccaccgcgaccaagcccacatcgagcagcgctgccgctgcctgcggtggggaggcccggctcgctatgggcatgttggccggcgccgcgggcctcgctgggctcgccctgatgggctaggcaagaggcagtgctgtttccatgcttttcccgttggttgttggaggcttgtgggcttctggcccattgtgtttatttactatttattacgcactctgaatttcacgttt

SEQ ID NO: 454137 - DNA, 513 bp, Sorghum bicolor
gtatcttagaagcaacctatcctgctgttgcaaagagacttcatggggactggatactggatccagcgatacctgttgttactggattccttgggaagggctggaaatcgggtgctgtaactactttaggccgaggtggtagtgacttgactgctacaaccattggtaaagccttgggactgagagaaattcaggtatggaaagatgttgatggtgtactgacttgtgatccaaatatctacccacatgcaaagactgttccatacttaacatttgaagaggctacagaacttgcttattttggtgcccaggttttgcatccacaatcaatgagacctgctagagaaggtgatattccagttagggttaagaattcatacaaccctaaagctccaggcacccttattaccaaacaaagagacatggataaggttgtactaactagcatagtgctcaagtcaaatgtcactatgttggatatcgtgagcactcggatgcttggtcagtatggtt

SEQ ID NO: 454138 - DNA, 685 bp, Sorghum bicolor
agaaaaagaggagaaccccagcctggtgtgatagaatactatggcatggagatggtattgcacagttatcgtacttccggggggagtctcaattctctgaccatcgtcctgtttgtggaacatttattgttgatgctgaaaggctagatggcaaatcaaagaggcgctcatcaaacactaacattagaatcggtgctgaagagctgttaccgacaagcaacaagcataactaaggtgctggggcctaaatcaccgattaaaactaggtttttgtgtgactcgggaacacaacactgcagaaccttcgcaaggacgcctaggtatctgttcctcagggaaattttatgtgaccaaagaagtatgattagatatcatatgattattattatgttgttgtacaacatgtaatcgcgtacagtttcgaaaggagtagctagtcattagtttatattgtatacctgtaaaatttccctcacaaggttgttttggttcatttctgtacttctttcttttgtacttttcaaagttgaacagagtaaccaaaggatgttttcctttcttttctgtactgtacaaagtttgtattttgacctttgtttgtagggtcaagttttgagtttgtctaggacagactacagagtctcactggaaggagacattattttaattgtatatcatttattcc

SEQ ID NO: 454139 - DNA, 409 bp, Sorghum bicolor
ggcacgaggcgcggatggtggtgacgcgcgcggcggcgtccagcccgaagctgccgaacgggcggcggctgcgggtggcggtggtgggaggcggccccgcgggcggcgcggcggcggaggccctggcgaagggcggcgtggagacggtgctgatcgagcggaagatggacaactgcaagccctgtggcggcgccatcccgctgtgcatggtgtcggagttcgacctgccgctcgacctcgtcgaccgcaaggtgaggaagatgaagatgatttcgccgtccaacgtcgcagtcgacatcggccgcacgctcgcgccccacgagtacatcgggatggtcaggcgcgaggtgctcgacgcctacctccgctcacgggcacagtccgccggcgcggaggtcgtcaacggcct

SEQ ID NO: 454140 - DNA, 480 bp, Sorghum bicolor
ggcacgaggaaaaagagggacaggaaaaaaaaatcattctcgtttcgctctccggcagacccccgcccgaatcgatggagattagggctcagccaacgagcctgaggctcgcgccgccgcccgcctccgccagcttccgccggacccctctgaggacctccttccttaagggaaacgtgtcacttaaagttgtgcaagtacgacaatcaaatgtcaacagatttaagtgcaatagcatacgaagtaacctctttgaaagactaacaagggttgtcaggtcctacgcaaattcagttctaagttcgtttgaagatcctgagaagattctagagcaggcagttctggagatgaatgatgacttgacaaagatgaggcaggccactgcacaggtcttggcgtctcaaaagcggcttgagaataaatacaaagctgcagaacaagcttctgctgattggtatcggagggctcagcttgctcttc

SEQ ID NO: 454141 - DNA, 506 bp, Sorghum bicolor
ggcacgagggacaagtccctttgcgctgtaagccacacgtctcttcttcattcgccctgaacgtagagaaaaagaagcagaaggcagaaatgcgccgccggaacaggacatcttaatgacaatgtcaggccttcaaaacggcatttccaatagcgaacaccctgtcgtcgaaacaccagtcgctgtctctacttcgtcccttgacaatgccaacaccgagtccgagattcgtgaagcgctcgcctccctgcatgcccacgaggcttctataacgtcccgcctcgatgctctcgtggcttcgcaggctgatctatcccgcgatctggggcggctggatctgctgcgggctggactcggagcgcaggtcatcgccgcacgttccattgggaatgatatgctagcaacggcagcagatacggctggtcgactgagtgacagagtcaaagagttggaccttgaaaagagtagagtcgaggaaacgctgggtgtggtggaacaggtcgcgg

SEQ ID NO: 454142 - DNA, 493 bp, Sorghum bicolor
  unsure (1)..(493): unsure at all n locations
ggcacgagggcaattcctccgctctctggagggcggttgcgtcctcgcgcgaagaaagccggagcccggagcgccctcccgctccgatcggtcggggagcgccgattcgagcagccgatcggccgtccgcgaaggtggatgctcgtggattttagggggggagttgcaggatcggtgcgctaggttgcggttctccctgtccctgctgggtcgcggtcaaagtaatggatggggatttggggtcgctgttcggtcgtcgccgtcttaattacctggattagtgcgatttcagcggcacggtgcatcgattctgcctgcggaagcgtggcggttgctgtgacctggagacagcttctacagacaggtcatgggtctgacttggttaggctggcttgggttatgtcatttaggccgacaaacactgcctctntaaacgggggatgctgctgatcattgtgaacggcagtacagaaacatgtgctacggtcatggt

SEQ ID NO: 454143 - DNA, 515 bp, Sorghum bicolor
ggcacgaggcacacagagggggtgtagccgagtagcagagcagcgagcgccatgtccctgtccgtcgccggcgcgcggacctccacctctcccctcccctcttcgttcgccgcctcttcatcccgcccgcgcctcctcgcgcttcctctccaccgccgctcgcacggctccctcgcctcgccgccggccgcgggcaggcggcggctgcggcggctgctcagggtgcgcatggcccggacggagtccaccggcgtaggtatcggcttccgcgcgccggagttcgagctccctgagccactgaccgggaagctctggacgttggatgacttcgagggcaactctgcactgcttgttatgttcatatgcaatcactgcccatttgtgaaacatctgaaaaaggacattgccaagctcacctctttctatgtggagaaaggacttggtgctgttgccatatcgtccaactcagttaggacgcatccccaggatggcccagaacacatggctgaagaagc

SEQ ID NO: 454144 - DNA, 438 bp, Sorghum bicolor
ggcacgagggttcaccccgtccatttgatttgcgttcgttcactgcgttgcgttgcgtttcttggagttgttgttctcctctcctctttggattggaggctccttcttcttctccctctcggaggaaggcttgaggacccaagaagagactagcaatgggggaagctgccggtgaccgtgttctgagccgcctccacagcgtcagggagcgcattggcgattcactctctgcccaccccaatgagcttgtcgccgtcttcaccaggctgaaaaaccttggaaagggtatgctgcagccccaccagatcattgccgagtacaacagtgctatccctgaggctgaacgtgagaagctgaaggatggtgcctttgaggatgtcctgagggcagctcaggaagcaattgttatccccccatgggttgcacttgccatccgcc

SEQ ID NO: 454145 - DNA, 497 bp, Sorghum bicolor
ggcacgagggcggcctcttctccaccttcgactgcgccatggtgtacgctcgccagaaggaggacccctggaactccatcgttgcgggcgccgccacgggcgggttcctctccatgcgccagggcatgggggccgcgggccggtcggcgctcatgggcgggatcctcctggccctcatcgagggcgctggcctcatgctcaatcgcgtcctcgccaacccgcccctgcccgccgacgatcccaaccttacggcggccatgggcggcaaccctttcccgggtctgccgcaggcgccgccggtcgtggcacctccggaagcggcgagctccagcggcgcgggtgggtggttcgggggactgtttggcaagaaggaggaggagaagaaacccagcgcgggcggtggcaagtcggagatcttggagagcttcgacacgcccagcagtccgataccatcgttcgagtacaagtgaggaaaaggttggctgatgccttggtct

SEQ ID NO: 454146 - DNA, 497 bp, Sorghum bicolor
ggcacgaggcctcccctccctcgtggcctcgtgtccgtcggagcctccgcctccgcctcggcttgtccccaccaatccacagctcgctcgctctctcccaccaaaccccccacacgcgcacaatggcgtcggcgtccaaggaggaggtgatcgggaagctcaacgtccgcgtggtgcggggcaacaacctggccatcgccgacccgctcacccacaccagcgacccctacgtcgtcctccagtacggcgcccagaaggtgaagactagtgtccagaagaagaatcccaatccagtatggaacgaagtactgcagctatcagtgacaaatcctacaaagccaattcaccttgaagtttttgatgaagacaagttcacggcagatgacaccatgggtgttgctgagatcaacattactgacatctatgatgcagcaaagctggatctgaagcatgccactgatgggactaggatcaagacaatctacccagtcggtgta

SEQ ID NO: 454147 - DNA, 446 bp, Sorghum bicolor
gtttttctggtgctgtcaccttgtattatgctactcatactagaccatcccctcaaaagtatgacagaatggaagttttacctgctggtgaacaaatcatcaacatgatgctccctggagaagttcattcttattatttctctgttggtggtatttctgccgctgattacacaattactatttccacaagtcaagttccagctactttgagagatggtgtatccatgtattggacttatgttccacaatattactacagacaattctactttgaagctgatgattttgaccaaagtgatgtttccattactgttgacccaagacttggtgatgttgacctttatgtcagcactgaagactatttcccaaccaagactaactatacttggagcagtgatagatacagcaaggatacagttctcattaagtcaaatgatcctcttgct

SEQ ID NO: 454148 - DNA, 429 bp, Sorghum bicolor
ggcacgaggcccaaacgcactctttgctagtcgccttctatccccaggctgtgcctactttcgtcgctttaattaatccatcgtgctgtgcacgtatcgcaaatcagacaattaaaaacaaagacatctttccaacaacagtaattcaaaaccgacaacatgcgttccacattcatccttgccacattggccatctcgacccttgccgccccagtcccgcagtctgaggtccgatcagctgcgcccatcgagtccaactttgaggctcggtcggcagagccttggaccaggaaaaagggtgttcgttctgcttcaccagacccatacatccggggcaaccagagccgatcaccatacatccggggcaagcaaaaccgtgatgccgaccctgagccttacatccggggcaagcagaatcgcgatgttgag

SEQ ID NO: 454149 - DNA, 505 bp, Sorghum bicolor
ggcacgaggagcccagttagaagcaacgctccctccctcagtccccgacaccctaccccgacttccgcacgcacgcatcaccagttcaccaccgtcttctccgccgccaccgtcttcgtcgccccagttcgaaccatgtgcatgcgcctctgcagttaaaatggcttacatttttaaggttgcccagaaagtgaagacaggcctgagaggaatctcaacttgtgttattagggggaagtatgaagatattacttttcctcaacacatgtttgagcctatcgttgaatatgcaactcggtgcccattggtctcaaaagtacctactggaaggttgtttcatgtagcttctgataaaccaaatcagatggaagagcattggcgaaggctattcttctctggattagttcactcagtcaactgcaaggccaactctgattgtatttacaaggcttttgacctggacatgttggagtgctgagggatcttaatgttcttgcttttagaa

SEQ ID NO: 454150 - DNA, 382 bp, Sorghum bicolor
ggcacgaggaaaaagcggccgctcgctacccacaggcacgccttgctctgtaccgcacgtacgctgccagttgagtatcctgctcgtgtacccgccccccagccatccgctacatcatctttgcccaaacgggtaatccacaccgccagtcccgcggctacaccgggactttgctacaagagtccgccatggaccactcgtactccagctcgcaaaaccacatggactttcaccacaccccgctcgacaggaagccctctgccttttcctttgacgacaacgccaccctagactctgccattctcgacacgcccgtcctcatgtcgccctcgacgagcaaccagggcatcttctccccagacacatccatctgggaggactt

SEQ ID NO: 454151 - DNA, 488 bp, Sorghum bicolor
ggcacgaggctcacttatccactgcaaataattagaacagcacacaggatatatggcctcctcgtcttcctccttgctcctccttgcagcggccctccttgcgctagtagcctcttggcagcaggccatcgcctacgatcctagccctctccaggacttctgtgttgcagacaagaactcgcctgttcgtgtcaatgggtttccttgcaaggacccaatggccgtgaccccggacgacttcttcaacccagccatgatcatcgacaagcgcagggacaccaacaacaaggtgggatccaacgtcaccaacatcaacgtggagagcttcccgggcctcaacaccctgggcatctcgctagcgcgcatcgactacgcgcccctaggcgtgaacccaccccacatacacccccgcgccaccgagcttctcaccgtgctcgagggaaccctttaccttggcttcgtcacgtccaaccccaataggctcttct

SEQ ID NO: 454152 - DNA, 359 bp, Sorghum bicolor
ggcacgagggagcaatcaccagcagaagaatcctccggcgaagcagagcccaagcctccctccccactcactcgatggcccgcacgaagcagacggcgaggaagtccaccggcggcaaggcgccgaggaagcagctggcgacgaaggcggcgcgcaagtctgccccggcgaccggcggggtgaagaagccccaccgcttccgccccggcaccgtcgcgctccgtgagatccgcaagtaccagaagagcacggagctgctgatccgcaagctgccgttccagcgcctggtgcgggagatcgctcaagacttcaagactgacctccgcttccagagctccgccgtcgccgcgctgcaggag

SEQ ID NO: 454153 - DNA, 746 bp, Sorghum bicolor
ggcacgaggcgagccagaagggggagcacgcaaggtgtttttgaagctgaaagaccaggctgcagatttacagtccagcaaagaatcggaacatacttttacaagggtgtgttgtatggttcagttggatttgtctgtggcataattggtcaaggaattgctaatatgataatgactgccaaaaggagtgtcagaaaatcagatgaagatattcctgttccacctcttgttaaaagtgctgctatgtggggaagctgctaagttatcagctgagactgagacagttgggagatgtagtggtggtgctgcctgaggtccaccatgctctcttgaaggtttttttcactgatcttgtatatggagttgaaacttttgatgatccaatagttgattcaaagctaatagtgcttatggatgctcttggttggatgaatgtgccatcggaacatggcctcagcatacaagttttcactcacgatgttgctttcagcctcagaggattcaacgctatgtgctgaagtcctatagcaattgtgtatagttattctaaatttcttttagaaagaatatatagctgcatcatatatttaatatagctgcatccaacgttactcggacataatacttgctcccatggtactatactggttatgtcactctaatattggtatttcattttataatattgttatcttaacatgttgtcactctaatatcggtatttaattctataatattgttatctt

SEQ ID NO: 454154 - DNA, 470 bp, Sorghum bicolor
ggcacgaggatttcaccatcctacgaaggatgaggttgttattcatagcatcaggcttccaaaaaatagcaccattgctgatgtaataaatgacttgaaaactaaggttgaactgtccagtcctaatgctgaactacgtgtgctagaagtcttttaccacaagatctataagatctttccactacaagagaagatagagaatataaatgatcaatattggacactacgtgccgaggagattccagaagaggagaaaaatataggtccaaatgatcggctaattcatgtttatcacttcatgaaagatattaatcagactcagcaaattcagaacttcggagaccctttctttctgcttattcatgaaggtgagactttagcagaagtcaagaagcgcatacagagtaaactgcaagtctctgctgatgaattttccaagtggaaatttgcgtttatatcgatgaatcggc

SEQ ID NO: 454155 - DNA, 442 bp, Sorghum bicolor
ggcacgaggccgtcgtgtactcgtgtgtgccatctgccaagaagacccaagagtaggaggaggaggaggagcaaagtagagatggcgtgccctgcgcagtccatgctctccctctccgccagcggcggcatcttcctgaggagcaagcctcaggcggccgcggcctgccatgtgcgtgggggcatcatcatcggcggtggcagcagcaggccgttcctgctcacctgcaacgcttcctcgccgccggcgccgacgcaggaggaccccgactgcaacgaggaggagtgcgccccggagaaggaggtcgggagcctgagcgccgagtggctggccgaggagaggacccaggtcgtcggcactttccctcccaagaagagaaagtggggctacgtcgagaaggacaccgcaggccagaccaacatctactccgtcgagccgatgg

SEQ ID NO: 454156 - DNA, 441 bp, Sorghum bicolor
  unsure (1)..(441): unsure at all n locations
ggcacgagggctgggcgctcaccgcgccagcaggcaactctcgttcgtctccactctccggcgagcgccacacccgcgaatcctccaccagatcctcctctcctcctcctgctgctgttcgtccccgatccatctgcaatcggatggtcttgctccggtgcgccgttgatctctgcggcagcgctcaggtggtttagatcggcgcggggcgcgacgccngggccgagtcgaagcacgggatccatggagagagccaggctcacgccgttcccgccgagggaacaggccacgaccaggatatgcaaggtgtcgaggtactagtactgccgcaacttattacactacacggacggacgacactacactggtgtttgagctgaggaatttctgaatctggatgcttatgtataagatgttctttagtcctactaagactatctc

SEQ ID NO: 454157 - DNA, 821 bp, Sorghum bicolor
ggcacgaggcccactcttccttctgcggttccacgcccatccctgcacacgaagcctggaatagccctccccctgctctgccacctcctcggatcccgatcgcccccccgcagacaacaacagatcgatggaggccaagatggaacgcttcttcgagtccgtgggcaatttcttcaccggaggcgacaacatcccctggtgcgaccgcgacctcatcgccggcattgaaagagagcttgccgacgctgcaaatgatgaacagaggaatgctagccttatgaggttatcatgggcccttgtgcactccaagcagacagacgatgtaaaccgtggaatcagcatgcttcaagcttctttggataattctggcagtcctctggagactaaggaaaagatgtacctgttggcagttgggctcttcaggattggcgactactcaaaaagtaggcaacttgcagatcgctgtttggagattcaacctgactggaggcaggccatgtctctgaagaaagcaatagaagataaaattgccaaagatggtgtgattggcataggaatcgcagcaactgccgtgggacttctggttggtggaatagctgctcttgccaggaagaagtgaggcgaatatattggaccagctcattgaactaggagaggtcccgtctataattacatatcttctgttgttgccttggtgatattacagtcgaatcgcaacagtctttatgtgtacaaacacaaaaaaaaaagcttggatgataatagtactcttgagacaccatagcttttgttaattaattggttttcccatcgatctggcg

SEQ ID NO: 454158 - DNA, 481 bp, Sorghum bicolor
attcggcacgaggcaccacgccgccacgccaaccctagggtctacgctacgctacgaggaaggaggagcaagagggaagcggcaggtcgatggtgtccatgagcacgacgccgcacccgctggatccgtcggtcccggccgtcgccgggggcggcaaggaggaggaggaggaggcggggcgggcgcgggaggaggccgccgccgccgccgccgcccccgcggcggtgcccgtgccgacggttgggaacgacgacgacgacgacgggccccggagggtgcgcaagccctacaccatcaccaagtcgcgcgagagctggaccgaccccgagcacgacaagttcctcgaggcgctgcagctctttgaccgtgactggaaaaagatcgaagcatatgttggctccaagacagtaatacagatcaggagtcatgcacaaaagtactttttgaaggttcaaaagaatggaacaggtgaacatttgcc

SEQ ID NO: 454159 - DNA, 500 bp, Sorghum bicolor
gttgcgtgtcatgtttgagtaacttttctgtatgaatatatttaatccatgtttttgctaaacttggaaaatgcatagtaaataaaatatggttcggaaaaatgtgaaacatgatttgttggctctgcatgtatgtttactcgctgggaaaatattggtacatattatttggtgtataaatgaatttatagtaatttaaatgcttgcatggaagtgatttatgatttttaataattaattggatcatgcaataaatctggaaaattttgtgggtgtttcttatgatattagacaaattgtaaaaatatgaaatctgttgtttgacacttatatcacagtagagtgattatacttaccttattaattaatcttgtgatttttgtagctcaaaataagtatccaaaaattatgaaaaatttacagtagactttatgcttggctggtagcctccagtaatttttgtggaatttattgatgaacagaactgcatgtaattttta

SEQ ID NO: 454160 - DNA, 485 bp, Sorghum bicolor
ggccaaacatccacacagatgggtagtggacactttcctgaggaagggttcagcaaggccagttacgtcaagaacatccaattggtagattcgaccaacaatctcaaatcgcctagtgctgtgagcttggtagctaagtggcccaagtgctacaacgtgcagaatggtactagtgctgattggggtacttacatcttctatggaggacccgggaagaaccctaactgccaatagcaaaaagtgaactggttgcagcccaaacatctcattgacaaaagaacaatataattccccataagaaatgcaatatgcagtactcgacgccgagtaagtattattaggatgtatatcattgggtgtaatagtatgctttcccagttgtcgcattgcaagggtaaactgctacatatttgtctacgttgtagccataaacataaggaatggaagtttgaagcatatataaattcagagcatgttttacaata

SEQ ID NO: 454161 - DNA, 442 bp, Sorghum bicolor
aaaaataccctactatggtgcctcgaatgacttgatgactatgggctatagaacgatagaaagagttggcgtttctggcatgggattggaaatggaaacagtcattccccacaggatttgacacatggttttattttactttccttttttattgatttcacctgttctttgtgttcgatttgggtttcttttcaaagcaggactggatgggatcctacacggataggatggccaaaggatattatagacatcacccctttcccaggcggataaaaattttgttccgtttctcagcttttgtttttttattgtttcacatttggggggttcaataaagtggaggcttactatgaaatactataattggatttgacgggtgcatgctgcatcagcagcagcacaggggcagacctgaaaaaaatcggaaaagatatttattact

SEQ ID NO: 454162 - DNA, 368 bp, Sorghum bicolor
ccgagtatcgacttcaaattaatggacagtatgcaagcaaaattggcctggcatgaagggctcagcgacacgtccagtgactttggctccgtcgccgatattatcaagccggattggagcatcccagaccacgccgcagatcctctagcattgcacggcgatccggagagaatggagcatgaatggctggcgttcgagaagtggaggcaagggaatgtatgacgcaatatcaatcaaggacttcaagctgtacgcatttcattctcatggctgttgttccagtgtgggtcatcctccgagtgtcacccatatcgagattttgcttgtgattatctttcgttactgtgaatccccccttcccttctttc

SEQ ID NO: 454163 - DNA, 506 bp, Sorghum bicolor
accactgatgatgccaggcacggtgtcccagtccagcgtgccggcaatgtatgcaaataacatgcaggggcatcctcagatggctctgctgcaacagcggcaacagatgctctcatttggacctcgcttgcctctctcggccatcaaccctggctcgtcctcgtcggcacccaacatgatgttcaaccctggcatgcccaactcggcagctcctaatcatcaccctttgttgagatcaccctcagggaacaattcaaatgtaggttagtgagatgagtttttcttttttgggtcttagatgcctgagttgtagcccctgattcgtgatcgttaaccatcaattgcacaatcacatatagagatagttgttatcagcgataggttctcattttctctaggctgtggaccgtgtggtgtgtgttttgataagactggtgttgctagtggctcaggcaatgcatagaggatgtagagtttcaccctgattaattattattactgcccca

SEQ ID NO: 454164 - DNA, 475 bp, Sorghum bicolor
ttggagaagtttagtttgcagtactgcatgttctactcattttctgattcggactgggagatagaaaggaaaaacatcaccctaccccgtcacgatggaaagattctccattgtcaaaagctgaagctgatagaagtcatctatgatcatgatcacgatcaccaactaattgaactagtgtggagtcttggaaggagattaccagatgccaatatcaaacttaacaaaattgatagtgttccatgaggccttcaagtctgaaacctctacctctagcatattgagtggatgtgtatgtgaagttggcgtgcatagggcgtatggtcttcatttctgtgttactattgtgatgatgcataagttgatacgccaggaccaatttaccgttgcagtcatggtttgggtcaattttatatcatttggggaacataagtcatttgaccttatatatgtaagtgttcgaaattttattttc

SEQ ID NO: 454165 - DNA, 527 bp, Sorghum bicolor
aggtgatgctattgcacagtatgttcagcaagggaagcgtatcccacgacgtggtgaagttggtctgtctgcagaagaaattcagaagtttgaggatttggggtatgtgatgagtggcagtaggcaccaaaggatgaatgctatccgtatcaggaaggaaaaccaggtttacagtgctgaggataagagggcgttggccatgtttaactacgaggagaagtcgaagcgggagcacaaggttatggctgatttgcagcgcttggtgcagagaaccattggccacgatgtgggaccttcgcatgatccatttgctactacggatggttgagtaatgatttctggatcaactaatcaactatatcgttctggatcaactaatcaactatatcgtgtgtgctttacctgtttgtgtttccttctctctgttgtaattagtgatgttgaacttgcctagttatgctgcaaatttcttatgagatattgcatgagaaccaaatttaaaaggagcgtactgttagcttgtatct

SEQ ID NO: 454166 - DNA, 546 bp, Sorghum bicolor
tgcagcttcagtttccccaaaaggagaatggatatattgtgttggtgaagacatgtgaggatatcactatatatatttctttcattgtctaatgctttgatttgtgtttgttatcttggtctatagtggcatctaaacgggagttattgttttgcaggaacatgtattgctttagctaccaatctggtaaactggagcatctgatgaaggtccatgagaaggatgtcataggcattacgcaccatcctcacaggaacttggtagctaccattgctgaggattgtatgatgaagatatggaagccttgattttctttataaacaaaaacttttcttttgtatcagtcctgtacgtttaggtagtatgcttatccacatttgtctttgaaccgctgattaaataggctgtattttgctttacaatttagataactgataggtgctaaatagttatggactccttggtgcttatgttgccccatgtcttactaccattgtatcctgtactagttttagggatctttcaatggtgtaaacacaaagctta

SEQ ID NO: 454167 - DNA, 449 bp, Sorghum bicolor
gagcgcgtccacgtcaggatctacgacgacgccgactgcgaggcgtactggcacctggcctgggacaggtggacggcggcgtacccggccaccaggttctacgtcgggatgacggcgtcggagacgacgcacgggtgggtgcaccccaagaacgtctactacgacgtcgcgccgtcggtgcagaaggcggacaactacggcgggttcatgatctgggaacgctacgcggacacgctctccaactacaccagcatggtcaagtactatgcgtgattgatttctgatcgattcagttcagacatgaatgctgcgtcagcagcatcactagtggtgtctctgtttgtctggtacagtagtatgtataactgtataataatacagtcatcactgtggtggtgtgtagtgtgtttgcattttgcaagaaggaataaagtgacgaataaaagaga

SEQ ID NO: 454168 - DNA, 466 bp, Sorghum bicolor
cgaacgaagggaaacttggtgcggagcaggaactgaggaaatggagagctgaccatgagcagcgccgcagagctcatgaatccacgaaacgcgcggtgaatcctttgaatggtccgtctagagtatttgttgaacagaaggatccacatcacaaggagcaggaatccaaggtacatatgtcgggaagtagctacgagggctttgttccaaaccaaaagttgcagaggaagaaatcgctgttccctctgatgggctcggttctatccaggaagacccgggcacagacgtgagataaacgagatcctagacacctgggactttgtcattcacattgctgtacattggtgtaataagctgtttttttgcctggtcttctttggaaagagcttttttttttgtttaaagcttgccagctggtgaaagtgtaatttaatttgtcagtataaaaacccagtgggcacattgg

SEQ ID NO: 454169 - DNA, 415 bp, Sorghum bicolor
ctcgctgccgtttcgtctctgctcatggagaacacacctccccctgtcacggccaagtctggaggtacctccaagggtaaccccaacgccggcaatgtcggagacggcaagattgataggacctacaagcctttgaccactgcagacagggctggtgctggtatcatcactttcttggttctgtcatttgcatgcggcatctttggctggatgagcatgggcaaatagaggatctttctcgatttctgaatatgccgaaaaacgaagtccggcatgcacaattgtgcttcttttgcacccttgtatttggaatctgaagaaatgatctctggggcgttggatggagtataacttgccctaaatagcctggtaggctggatatctattctctaaatgttataatgttttccccttt

SEQ ID NO: 454170 - DNA, 495 bp, Sorghum bicolor
ttagaaattattcagtgttgtcttgaaaatttatgatgagcctctctttttctgagttgatctatccaatgtgtcttcagggatatgcatttcaatgcagcatcaaacctcctcttgcatccacggaggacataattggcattaatggatggactatgaaggcatggcacaagagaacatacgtttgaagcacacgaagagcatccgtccgtgtgacaaaaatagaaacggcaagactcaagtggaataggagggatgcactaatgctgtattagactcaacttgcaaccagtcatatcatctattagatgacaccaactctgctagaaacaagattggggtaaaacgggctcagcgaagctcctacacgttccaatcactgttagatggcggtgtgcagctagcttttggttcttattggcctgtacgtagttctacggacatttcagtaactaaactttgtttttcagcaaccatatagtcagctaccaagta

SEQ ID NO: 454171 - DNA, 397 bp, Sorghum bicolor
tagaaggcctcctagaggaagaagcatctctagtgacagccgaagcagcagttcaccttcccctagacgcggcaggtagaaggaacccgtggcattgtgtatccggcaggtaaagccttttatcccttgactctatctgtatcgtttgcctgtgcttgtgacttgctgtgagctcaagtgttggttcgaggagaggatacgagaaccctacggcaatgcttccagtggatctgctttaacatgcccggtggactctctggcttgtgatttgtactcgagacaaagttacctgctatgtgggcttatgtacttgattgtactgaagtattttgaagttcttaacttgtttccgcacaggagtctggttctaaaaaattatgtggtaaaccattgtgct

SEQ ID NO: 454172 - DNA, 693 bp, Sorghum bicolor
ccgcgcccggacgcccgtgcagctgtcggcgacgccgcggtgcgcgttcccggaccgccaggtgcagcgggtgctcgccacggggctcgtcaccagaatcaacgtcaggttctacggcgacgcgcactgcgccgcgtactggcagcaggagtgggacaagtggacggcggcgttcccggaagactccatctacgtcggcctgccggcgtcggagcagacggtcgggtacgtccaccccaagaacctctactacggcgtcgtccccgtggtgcagaaggcggccaactacggcgggttcatgatctgggaccgatacgccgacaagaagaccaattacagtagctacgccattgaatgggcttgatcgatgatcagagctccatctccatccatgccgtctactctgtcagtctgtctctgtgtgtatctactgtagtgttgtccatctcctcactagtgtgcttgtgtgcaagaataaagtgaggcaagtgcatcaataaaccgttgataatatcgtcgctagttttgtacacgatcctctggaaatattcagcatctggcatggatacgaatttaagttcagaggatcacaccgagaccacaactgctgaattgtggagagcaaaaaaaatcaagaacaaagtgtaaatgtcacgtggccatttttttttttctgaagagagccggacagcc

SEQ ID NO: 454173 - DNA, 382 bp, Sorghum bicolor
agcttacggagaaatctcttgttgcagttgttgatagatctcgtttctagagtaccgcgctggaagggcggcaggccttcccatacgcgctgccgccggtccggaaggtgaaccccggggaggaggtcagaacttcgacttggccgcatggcaaaaggcttcggggcagtcctttgcgcccttaatacctttggggggtgcatcgggggctaccaaaagtaatgcaacggttttttttaaaacctgctttttgtctctgttatttagggtgtcgttatcatgatgaatgcttttctttttatatttcaagattttgaccagattctgcgtgactacaaatgccgcgtgactggataggatatccttgaattgtgatctataa

SEQ ID NO: 454174 - DNA, 555 bp, Sorghum bicolor
acacaagttcttgctcctctgccggaagacagattcctgtgcagctttagccatatttttgcagggggctatgctgctggatactacagttacaagtgggctgaagtactgtcagctgatgcattctcagcttttgaagacgctggtttggataatgagaaggcaattgaggaaactggcagacggttcagagacactgttcttgcgcttggaggtggaaagtccccgcttgaggtgtttgtttcattccgaggacgggagccttcacccgaaccacttcttaggcacaacggcttgcttcctgttgctgcgtagtgctcagtgctcagcagcattcaaagatttctcggcccggggcgtcgaccgaaaagattgccgtgccaattaggctgttatttatgcttaaacagggatcgtttgtggtggttacaagtataataatcttataacgcattttcatagcagttgattgtatatcgactagtggcacaaccacaaacaaagccggccaatcgcagtattttcctagaaaaaaaagaatagttgtttggcccc

SEQ ID NO: 454175 - DNA, 542 bp, Sorghum bicolor
atgacggtgaggtcggtggatggactcaagggtataagggactcaattttgtgaccgtgaggggagcaggtcatgaagttcctcttcatcgacccaaacaggctctcacactaatcaaatcattcttggctgggagcccaatgcctgtgcaatccagtacacatagcgacatgtaatctgtactatcacaactgattcaagagatgaacatcccaaagcacccaaatcaaccattgttcaacccggcttgttcttccacttgctatagccatttatgtatcagagctactggtgccggttactgtagccgtttatttattggccctgttggtgcttggttctgattctcccctaaaacaggggacagaactacagaatagtttttgttgccatggaactgataccatgtgttaccgacttaccgtgagcctaagaataaatttgcatcagcgtcacagcactgtattctaaacatcgcaccatagtcttttctatgcacaaggtgtgatttctgatgtccgcaataaatgatctggacttgg

SEQ ID NO: 454176 - DNA, 394 bp, Sorghum bicolor
tcacgaccatatcaccgattggggtgatgcaaccatctcaaagatcagcccctgttcccacccaaacaggaataacagctgacgatctgagcaacaccacctcgaaacttacttttaatcattgcattagagcataacaacaaaagacaccaaaacaaaagcagtgcgcattggctgtctttctcaccgtcttctcctgacgacggtgtttcgggcatcgaaggaaaaccgcatgaaatgatttgaaacgccacgacatgtgtggtttggaatatagcatattgaatttagcgactgtcttgaggagttttgcatatcattttggtcgtgcactggggcaaatagaccaagaggcgttggattgaatagaccaataaaagtctacttgttttac

SEQ ID NO: 454177 - DNA, 701 bp, Sorghum bicolor
ggcacgaggccgaggcgccccccgtcgccaagtgggagccctctgtcgagggctacctccgattccttgtcgacagcaagctcgtcttccagacgctcgaagacatcgtcgaacgcgccgccgtcccgtggtatgcagagttccggaacactgggctggagagatcagaggcactcaaaaaggatctggaatggttcaggcaacagggccacacaattccagaaccatcgccccctggcactacatatgcttctctactggaagagctgtctgagaaggatccccaggcatttatctgccatttctataacgtgtactttgctcatactgctggaggccgaatgattggcaaaaaggtttctgagaagattctgaacaagaaagagctggagttctacaagtgggagggcaatctctcccagctgctgcagaacgtccgcaacaagcttaacgaagtcgcttcaagctggtctcgggaggagaaggaccactgcctggaggagacggagaagtcgttcgcctactcaggaggcctcctccgccatatattcacctgatctgacattgttccctgatcctgtctcaaacgctgtaaatacataatccttcgactgttaaaactttattactggtgagggggagctcctcccccaaggtacgatttacctgcaatcaagttgccaagtgttatataaatctcc

SEQ ID NO: 454178 - DNA, 581 bp, Sorghum bicolor
tgtatcaatgaatgggtggggccttgctttccgagcgtgcggtgaccgcttgattgtcatcggaggtccaaggacctatactggtggtactattgagctcaactcatggatcccagatgagcggccgcctgtgtggaatttgattgccaggcggccatctgggaacttcgtgtataactgtgccgtgatgggttgctgagtccactgaataaaagataagtgcagtggatatttatgaaggatgctatgcacagaggcagcctgtccaattgcttcagcccttattcttcgtagcgatttctgccgtctgcccagttccggaattaactggacatcagctgattgtcagcagtctcatgtaacccttgagttctaatactcctgtttccctgctaatccatttctacatttgcatttgaatcaactgctcgtgatttcaaagatacgagattatggaaaacaaagtgtcatattaataatctagaaaccaacttcgagatgttttttatctattgatgaggaagctgttaagaaatacttgattcgcctgtagctgcaagaaatgctaattcttttcgttc

SEQ ID NO: 454179 - DNA, 496 bp, Sorghum bicolor
ccaggcactacagttggtggttcccacataagaggaagcatggttagagcatcggaagctggttatgaagaagttgatcttgttttaccaggcactggacggtttcgtgtgcagttaggggtgaatatgccagctcgagcccggaaagtgcatgagtacatgaacacggaacttgaaaacccaaataccattgaggagtacgatgttgttctttaccttggtattatagacatattacaggagtacaatatgtcaaaaagggtcgagcatgcagtcaaatcactcaagttcgatcccctttcaatatcagctgttgatccgaattcgtactcaaaacgatttgtaaagttccttgagagtgttttccctgaacaagactgagtagacataataaataatacattgtagcacttctgccctcattttttcttgtaaaaagctaacatgttctcaattattcacgctggcttctacgcacctgtaagtgttatttgtt

SEQ ID NO: 454180 - DNA, 526 bp, Sorghum bicolor
cgttcagcttctcttgatggggttcgctgaaaccaagaggtacatggacttcaaaaatccaggatcacaagcagaggaaggaacgttcatagggttagaggctgcacttgcaggtcaacagccaggctaccctggaggccctctgtttaatccactaggacttgcgaaggatatagagaatgctcatgaagagaagctcaaagaaatcaagaatgggaggttggcaatggtagccatgcttggcttcatggtgcaagcatccgtaactcatgccggccccatcgacaatcttttgacacacctttcggacccgttcaacaaaaatatcattcacgcattctcctcttcctaagtactcgtcccaactcccaaaacctttctttttcactgtccagggctatggcacaaaaatgtcacaatgtttgctaacaggaggtggcctttgttagctttgctctttgcaaagttttctctcatgaaaattgaataaaagcttcaatagctgagaaaaaaaaaaaaaaaaaaa

SEQ ID NO: 454181 - DNA, 445 bp, Sorghum bicolor
aggaagattctgctacaaggtagaaggtgcaagtttcttctaaagttgaaatgaagccatcagcaaatgtagcttcagtgtgccatctgtttattcagatcatgtagtgtatcagttgtgtatcattattgttgttgtgcttcgtgatctcaatttatcggtttgtggcacctagggtttgtcaaataatgataaccaacatgttatctaaatatctgataataattatgtaattgtgatttgggatgcatcactgttgtaaagtgtaaacccttgtctctttacaatatcgagttatcaacaatttgagtaagatctgaatgttctttcttttttgtgtataacaagagttgtaactgaaaatagatggaaggcatattaaacctcctttgtgccgtttgttgttgtctaaagttcaaactacgagaaagtctttcattttatt

SEQ ID NO: 454182 - DNA, 505 bp, Sorghum bicolor
catttgaagaaagtcggttaaatgaagcagatgtcggtgacaagcaaaaatggctgaaagaggggatggactgcaatttgttgtactggaatgggaagatcattgattttgagctcccaatcactgtgaggctgactgtaactgatactgacccaggggcaagtgatagtgcacaaggaggaacaaagcctgcaaccctggaaactggagctgttgtcactgtgccctcttttgtgaacgtaggtgatgatattctggttgattcaagaactgggcagtatatgaatcgagcatagcgaattgaagaggatttcagatttgaggagtactggttttttgtttgaccattttagtcccattcacttgtacgaatgctctgcgtctttggccccaggaaatttacatttcctctgcatgtgaatcctcactctgatctcaaactctgattatagccatgtacatctttggcttccagataaaaggaaaattgtgttcagaattttgt

SEQ ID NO: 454183 - DNA, 445 bp, Sorghum bicolor
aggagtacaagtccctccaggatatcattgccattctgggtatggacgagttgtcggaagctgacaagctcaccgtcgagcgtgcccgtaagatccagcgtttcttgagccagcctttcactgtcgctcaggtcttcactggtattgagggtaagctcgtcgatcttaaggacaccatccggtcattcaaggctatcctcagcggtgagggcgacgaccttcccgagggtgctttctacatggtcggtgacctggagtcggcgcgcgccaagggcgagaagattcttgcggagcttgagaagtcatagacggctcgtggacgtgggtaaaatgagggtggactattgtgtctaaggctcgtcggtgatggctctcctcaatctgtacaaaatgtataccattgcgcaatcaaggggcgaacattaatccccacgggtctccggtg

SEQ ID NO: 454184 - DNA, 476 bp, Sorghum bicolor
ctaggataccccgtccgcctggagaggtggcttatggagggaagctatgatcgagtatggaaggcaatgaagagcagcgaagtcccctgcgacgagtacagtgtcttctctgagattctcaagaaccaaatccgatccgaaatcgccagcagcagcgagcgggcctaccccagccttccgataagctccaccaaatcgctattattcctaaactcagaaggagatgttattcagtttgccaagcaccgcggatggctggttaaggagggccacatctatttccccaacaatgcggcagaaggcagcgaagatggagtttacgtcaaggatatgagccaaatgatcatggaaaatacactgggctatgctcgcgagctggaaaccattgtgtagagagcgtcaaacaaggcatggtttggtttagtcacattagatgcaacatctcacaatgctcagcaggcataattaattattta

SEQ ID NO: 454185 - DNA, 492 bp, Sorghum bicolor
aactctctgctgatggtgctgggttatcaatggaaagggtgctcaatatgagtgtgcaggctaatgtgaacctgatacccaagcatacaaatgacacagaatccctggagcagttttgcaaggacactgtgatcaccatctggcattatcatggtgggtgccatgtagggaaggtggttgaccagcattacagggtgcttggagtttcaggtctccgggtggtcgatggctcaatattttctagatcaccagggaccaaccctcaagctacagtcatgatgatgggcagatatatgggagtgaagatcctaagggaaaggctgggacgagcagctggagtgtagtcgattcctggacattagctttttattatgtgtggcctaggaaagaaattactaattttttgtgggatccagaatgattcgctgaagaaaaacaagctatgtgtttcatctgtacccagtaatgatttgtctaatatgatattgcaga

SEQ ID NO: 454186 - DNA, 129 bp, Sorghum bicolor
ttctgttcatgttaatgattgtatttggacatgtattgctaacaaacttgggatggcgaacatggcgttatgggaatcagttatgagccaactgaagggttatgaatgaaatcatgattgcttcccccc

SEQ ID NO: 454187 - DNA, 518 bp, Sorghum bicolor
acatatcatggtccctacaaatgatagaactgcgggatctcaaatcaattgctttcagttttctcatatttccaatttgtgtttttcgtcatggtcaccctaccaatctgtttttttattcctttagaaactatcaagatcaccgggcaggaaggcaaggagaacgcaagctcaattaggtttttttatccatactcaatcagggttgtcatctcctgtacaccatcctacatcgtggaaccggcagatcttgttgtaggtgcatatcgtgttttaggtacaaatgtgcaagagtctagacttctgatcgattatgtttggtctaaattcaaaatggttcctgattaattaggccagttttatcattaaccaaaactcaaatctgaatcgtgtcagtgcaatgctgattttctgattattcattggattcagtttgagttgcttgcctgcaaaagcatttggattgaatttgaattgctgtcctgcaaaagcatctatggactgttgtccgaactctg

SEQ ID NO: 454188 - DNA, 485 bp, Sorghum bicolor
gccgtctttttgtgtgtagtcgattgtatgaacaatttatgccattgcagagccaaaaagcggaaacatcaggtttttgaacagtcagaacaagccttcttttgtaataatgtgttcagctctaaagactgagttagaactatgttagatccaaatcctattatttgtgtcaagtattgtgtcttgtatttatgaagtctgttacctatctagatgagaaccttgccagctcttcagatggggctgactgcgagttaaaatttctggcgcgcgtgaactttagtagcttccaatgtgttatatgttcctagagattgtaatagagcggttcatggattagctgctagtgggtatgaatgtgtgggcaggctcgagcaaattataagctccccccgtgaacatgtaatgtaattgtcgctgacgattgtcagcccaagagtaatgtagttgtacccaatttataaaaaaaaagagaacattttcgt

SEQ ID NO: 454189 - DNA, 513 bp, Sorghum bicolor
actacaagccccgcactgacctgcccaatgtcgtcgagatgtacatgaagaaggagctggagctggagaagttcatcacgcacagcgtgcccttctcggagatcaacacggcgttcgacctgatgctcaagggggagagcctgcgctgcatcatgagaatggaggactagagcttcattgcaagctttgcttctgcatccatgctgcatatataccaacggacatgaaaagttgaagacgcttctcccttgtgcagtacatacagtagcaataaattgttaacgtttgtcctgacagacacacggccatgcccatcctgtattctgtttcacggtttcatctttattgtcagtgtgtgatgtgtgtggtcaggtttaatttcagcccttcttagaaaacccaaaaaaagaagaagaaaaaagaagtttgtggccagcttttagagtccctttatcacctgtatgtaattattaccattttgcataacaataatgaaatattgttgtcagtgtt

SEQ ID NO: 454190 - DNA, 446 bp, Sorghum bicolor
tctatcagagaaggaatacccgtacagctagctcatgacggcctacgcatcttcattgacttgtaatgcagtttgttccgtctgtccgttgctcatttcaaacgggaacaaagttcagaccggattgtgcagccgttcggcgattactttatttgtctataatttttctatggaaaaggtattttttattattacccagggaaaaaagtgttgcactcaccatgctgttaaatgtctagtcatcttcgctagttgtacaagctccaatgtttatataaccactaaacaggctgctaaatgccggtgagttgattgtttaggagcacttaagcttttatgcccagtagcaaggtggctaattctatgtaatgtaatgggaaatttcattcatctcttactttgatgtcaatgtttgaatgtaatataattatgacctttttctaata

SEQ ID NO: 454191 - DNA, 297 bp, Sorghum bicolor
agaagtggcccctgctttgttctaaacccgacatatccaaaagcagaagttcaacaggggagtgtctcagtaaataaactttccactccatttcacaagcattgctgatgcctgggcagcaaccaaagctgccgttttggatggccctcaaaaatagacgtccatcgacagcttgactatttttacaaattgtcaagtcagttactgaagctccttagcttcagctttcagctagctcccttattaacatgaggtctcaggccctgatgtcaaataaaaaatatacccccttcggtt

SEQ ID NO: 454192 - DNA, 427 bp, Sorghum bicolor
acccttacatcgagcagcaaaagtattgattaatatgcaactggagacaggagactatcctcaacaagaacatgttggcaacaccaactcctctgtttacttcaactaccccaactaccgtattttgttccctatttgggctcttggagagtatcatcgcaaagtacatgccaagagtaattgaagagagcccatgcaaaggaaaatatgatatgtagtattatgtcccatattaaagaaaaattatagtggaatcaatgaaatcccttgtattttctgtcatcaaatgtaattgggtagccccatatatacaagattacaatgggccatgtaatcatgtataactattgtttatgatgtatacatactgatacgtactgttatgaaccccccccaaataagtaacaatttggtttgtgtccaatcc

SEQ ID NO: 454193 - DNA, 583 bp, Sorghum bicolor
taccttgcctacttttaggcacctactcattgcattcggtggacttgctggtttggaagaaagcattgaagaagatacaaatttgaagggtaaacacgcagatgatgtattcacatcatatttgaatacatgccccaaccaagggagcagaacaataagaacagaggaggcacttctcatttccctccaatacttccaagatccaattaggcgcgcagaacagaaaatgtagaaggtaatacagacacatgcaaatctagccatgcccaacaagttggctacggagcttcagttgtaatagtggagttttctcactgagaattttgacccttcgttcacgtatgcgttgatgacagtggagccaagaggttgtgagccatcgaggacattttgacacaaccatttcagtttagaatatttgatgtggggctgactttcattgaaagcgagtgttagctttgccatttcaattgtatccagtggttgtccactatagtctatatcgctgtttcatgcctttgaccctgtactaaaaacggaggatggctgttaacaccataaggtcatgcctttgctaaagtct

SEQ ID NO: 454194 - DNA, 279 bp, Sorghum bicolor
aaatggctgaggaggcgaaacggagggctgaaattgcaaggctgcgggagcttcacaccctgaaggggcatgtggagtcggttgttaagctcaagggcctggacattgaccccatccagcagtcatacacagtttgatgacttttgcttaaaaacaggcatactatatttcctgcaaaggaacccctagttttagcaggtggtagtcgcctgcttgtactttccaaaccaaagctgccccatttacagatcaacatagtatagcccataatgagttttg

SEQ ID NO: 454195 - DNA, 429 bp, Sorghum bicolor
agagagcagcaaaaccagcggcggcggtttttccatccccttcttgtttgtcgttggccttctgggcatcatcgtcggctacatcctcaagagaacatagtggaatggtggtgtctccagcaaggctatactcccatgagaggatacccccacgtggtatgcctccccatgtgtttgtgctcctaatcggagcgccctgttctaacgtgtaacaacagcagcactcctagaagccttcggtttgtgtacattgtggtggttcacaccttttctgttcagaattcttctcagagttggtagacttgttttaaacctaactgccgcaacgttgttacccttcacataacctttattctttctgattctgatggatctcaaatttgctggtatgtttctacccaactgaaaatgtttgaactgttgcaagtc

SEQ ID NO: 454196 - DNA, 588 bp, Sorghum bicolor
ctgtcagctagaaaagttagcgcagctagaggggctgcttcggtccctgaagaagtttttcacagagccaaaggggtgcagctatgcaacatacaggcatatcagtgtactcctgcattttttgctgattcatacccactcaaccagttttcctcagaagtcattgctagccggctgccagttccaccatctgcaagggttatttccgagagacacatcatttcagttgtgcctgtaacccgtgtcacaatggcccatcggaagaaatcatttagcttctatgttgtcggctacagcagggatgttttcataagggactatccttcaaagttttgctggggcctctgttgctgcttcgagtggctggggaaatagttatttcctggcacgaataatgaatgtttcatggtagagaaggtggtgtgaaagagttaaaataagccattacaaattattgtattttctattatagaagatatctctgcgggtataatattggaatctgcatattagatttcctgggtacaagtacatcaccaggtatatattgttcggtgaaaaataaaaatggtgacatttgtccattgc

SEQ ID NO: 454197 - DNA, 466 bp, Sorghum bicolor
cgtcacacaagaaatggccgtcgccaaggacgagacattcggtccccttgcccctgtctttgagttcgagaccgaggaggatgccatccgtctggccaacgacaccgagttcggtctcgctggatacttcttctccaaggatatcagccgtgtcatgcgtgttgcccacaagttgcaagttggaatggttggtgccaacacaggcaagatcagtgctgctgaggcacctttcggcggtgtcaaggagagcggctatggaaaggagggcagcctgtacggaatggccgagtaccaaaacatcaagtctattaccattggcaacctcaacaattagagtgggagttgcataaaagcatttgagcgagcaaaaagggatttattttatttagcatgataatgacgaggtgggaaaccctcacagaacaacgaccgagattaaaagcatgatctcttgaataaaaagagt

SEQ ID NO: 454198 - DNA, 369 bp, Sorghum bicolor
gccgtatatgtctgtaagtacgtatacgtatagcatgtatgtatatgtacggtatgtgtgtggggcttgctttgcgaccgctgggagtatatccaatcgatgctactcccagatgcgtaccccgtgagtgagtgagtgagtgagtatatgtatgtatacatcgaaaggggatcgatcggagacgtacgacgctctcgtaccgtagataataaatacggtacatcgtcgtcgtcaattgatgatctcccttcgtagctagtagtatatagatgaggttgggataagagaaagtgatacaggtgtccattattatcccgtcccgtataactagctatacggtttaattaatttggaatatgtaatttctcc

SEQ ID NO: 454199 - DNA, 574 bp, Sorghum bicolor
cggacgcgttcggggagctctacctcttcaagtggacgacgctgctggtgcccccgacgacgctcatcatcatcaacatggtgggcatcgtggcgggggtctccgacgccgtcaacaacgggtacggctcgtgggggccgctgttcggcaagctcttcttctccttctgggtcatcgtccacctgtacccgttcctcaagggcctgatggggaggcagaaccggacgcccaccatcgtcgtgctctggtccatcctcctcgcctccatcttctcgctcgtctgggtcaggatcgaccccttcatcccaaaggccaagggacccatcctcaacccatgcggagtcgagtgctgatatgaatatgatcgatcagcgagctcccctagcttgcttgcattgcttgttgcatacaggcccctacttttgggggcaggcttcgattcgatctactcatattcgacttgtttaattctgtacaatgcaagttttgtgatcgagtgagataaagtgttaattgggtgtaagaactgtggtggaggatcgagttcactcaaattaaaggacattattttttt

SEQ ID NO: 454200 - DNA, 106 bp, Sorghum bicolor
ccacgttttgttgcccaagtcttcattccgactgatggtgatgttatgttctgataattctgttcatcacctgtttaacgtggtaggactgatgcctgttcgtttt

SEQ ID NO: 454201 - DNA, 464 bp, Sorghum bicolor
gcgaggccacgccagaagcacgtgtcattggtggagaagatctggatctgctgagccagattactggccgccccttcaacagcagcaaccgcaaacgcagcttgggtagcgcaggcgtgctgaccggcggcgaagacgatgacattgacgaagtggaagacgatgttggcttttgatactttttccgggctgtttttgtttgttcatcagcatcatggcgcggcgctcggaactttcttccttcttttctcttctcttcttttgttctttgggaaaaggtagcaaaggaaagcgggcgtttctaatggtgtcggtatacattgcattctttggaaaggcacatccccaatgattatcacgatgatgggcgtttttttttgtagctcgatttgggtactcttttttttctctttaacttttctaccaagcatcggctactcacgataatataaatgacaactccg

SEQ ID NO: 454202 - DNA, 480 bp, Sorghum bicolor
aaaatgaacatcagttgatatcgttgatcaattgggtctggaattttcatcacaggccaaagaagggaaaagtctaggaatccaagccaacataggaagaaatcaaagagatagaaccaaaatccaaaaataagaggaaacgggaggtgttgaggctgctccttcccaatcacgacaccgtcgaggggtacctgcagctggtgtggcggcgtgaggaggaccagcgagcacctagggtttcgtccaagccatgcggatctgcaaagagaaggcagcgtcgagggtaaggcgcaacggcggcgaccggtggggctcatccacgccgctccgtaacggccgaggacggccaccttgggggcgcgtgccgcaaggaggccgtcgctgtcgcctgcagcaggagaagagagggaggaggtgcgagaagagggggacgaaagtgtggtgggccaggagcggaggcgacgagggggccccggtacc

SEQ ID NO: 454203 - DNA, 532 bp, Sorghum bicolor
gtgccctacctgataatgctatgcttattgtatgcactggccatggtgatactcctctagtacaaagattacggaaaatgcttcaccatgaagaagaaacaatagacagccgggaaactattgttcaagctttgggagatttacaagcccaagcggaagttgctctatgcttctgctgcgtaaaacattaattataatggaatgaggtaaaacataaagaaagaactttagccactgctgacagaagcgcggtaaattgacaatatgaaacgtgaacctgatcctggatgcagcagaatgcttgatgaattccaattatatgggcatctattgagtttgttgaccccaaactgttcttgatggacagaagctcagagctgaattcattaatttatggctagaccagtatgttatggttgcttgttgctctcactcaaatcttcaagtgggttcgttgtataatacaaaattgggtgtagttctggagccaactatgtggctttcttaccttcagtgacagaaatattagtta

SEQ ID NO: 454204 - DNA, 522 bp, Sorghum bicolor
aaatctggctatgccagcaaagattcaacttgcactgaaggagcacttaacttactcatgttacccccagaaaagttatcattatttgtcccttctcagtatgccaactctgatcaagacttgctgctggagattcctctcaatgcacggcacccagaggcagaacttctttgtcagccatctcagctgagctcaataacccacagctccacctctgtggatggggttgctgacggggaggggcatctgaagcaaccatagtctcaggtcacatcagcaagcaggttaggaacaaccattagttgcagtttactttagcctcgtggatcatggtgcctctatttgctgaccaccaacgggcgtcggtttgttcacgggagtgctgtaattgccctgatttacataacaatgtgtgtcgactgctaactttgttcagctaacatttgtagcgtgcttttggaccatgtttttgctggttttctgtagcatatggctcatggagaaagtatagcttatctctgt

SEQ ID NO: 454205 - DNA, 492 bp, Sorghum bicolor
ccgccgctccgactcggtgcgctccgtgccgccgaacatggcgttgagcaggatgttgccgcagatgttgatcccggcgtcggcggcgcggacggcaacgtggtgggcgatgttgccgccggagctgtcgcccgacaggaagacgcgggggcgggcgtccccgccccctgccgctgcggaggaagggctgcgacatggcccacttgagcgccgtccagccgtcgtcgtaggcgcacgggtaccggtgctccggggcgcgacggtagttgacggacaccaccacgcctttgctcagcttcacgaaccggcggcacaggttgtcgtagatggccgtgccggaggaagagtgcgcgaagctgccgccgtggaagaagaggatgaccgggaacgggtccggggacggcgcgccggcgaggaagtccaggatgggcagggtgaccgcggccgcgccaccgttgttgttagcggcggcggcgggggggggcccggggt

SEQ ID NO: 454206 - DNA, 379 bp, Sorghum bicolor
gacacaatttgatgtgactggcaccatcagatatggcgttcaaggatacaccataagttcacaatcaaatggttattgacttatgtaatgtttcaccatcacattgagataagtcaaaaaggagaatcacgagtctgagacaccgcgtggatggagaaagggaggaagaaattttgggagacattggaagtgctgccagtgagcctacatctaagctcagaacaagtggtttatgttttttttccctctaattcggtcgtgtttggatgcttgagtcctgcattgcattctggagaacattcgtagtcttttttttttgtaaatattttggatctataagataaaggaagcggtctggaacttactcagattctgatgc

SEQ ID NO: 454207 - DNA, 428 bp, Sorghum bicolor
tctgtcttctctcaagaacatggcaggggaaacggggaaaaagttgacatcgatggcatccaacatcatcactgatcttcaggaccgcatcctctgagattaacttacagtaaagtaacctttacattgcttcagtggctggcttctcccggcaacccgggtgacaaactggcctggcctgcagatctttgtaggagttcgtaggcgtctgagaacttcctggcagatctgtctaggagttcggaagcatctgaaaacctgaagtgtaagttagagggatagagggggaaagaagaaaacttatggcgaatgctgtacttggctaagtcatgtatgcatctggagctgtaacgggaatgtctttttgaagttggttttatttcggttcgagatatatacttttgctttaaatgataattatatgagta

SEQ ID NO: 454208 - DNA, 421 bp, Sorghum bicolor
gtgcagacgtacgtcatgttctacaacaaccagtcggcgaactaccccggcggcaaggtcctcgccagcttcaagaccggcaacgtcaccggactgctctcgccggagcagggcatcagtgcggccaaggagctgcagcggcagaacaagctgcccgggctgttcatctggtcagcggacagctccaagcagagcagctacggcttcaagtacgagacggaggcgcagcagatcattgccaaccactgatctgccggatcaggacttggcttaacaaggggtcacactttttatattacaataaataaataataaacctctcaggtcaacaacaattacttgctggttaaattaaagaggttggtgttgattcaatgatcagaataatggtgactgaaaaaaatgcaagtttaaggaactt

SEQ ID NO: 454209 - DNA, 402 bp, Sorghum bicolor
gagaaggagcagtcaagaggcaactctggcggaggaagatttgcccgtggaggtggtgggagattctctggtggtgcccgtggaggcggcttcggtggtggtggcaaaggcaaaggtggtggcggcagagggttttctgggaggggaggcggcggcaacagatttaacaggaggaattagaagctgctgcatgggcgtttgagagaactatgttgtgtttgacgtagttttgaggagggggagagaatagtctcagttttggctgcaattgtatcggcttttgtttatttttttggtgttcgaatacgacactcacttttgccaacgcaagagtgtacgtttaaatctactcgaaaattacaatcgtgacttattaagtaaagctttatatgtattgtttcc

SEQ ID NO: 454210 - DNA, 320 bp, Sorghum bicolor
gtcggagaggaactacgggctgttctaccccaacggctcgccggtgtacgcgctcaactccgccggctccggcggcggttcgagtcccggcgggtcgctcaacccgtactacacgtccatgttctcctcctcgtccagatcggcggtgagcgcaccctttttgacagagagagtgatactattactgctgctgcaagcgattgtaatactgcgacaatcatattcattgtactgttagtcagtgatcccttgtaatcttgtatacggaaatatgcaatttcaattcacccatagggtaggcctagattcggcaatttggc

SEQ ID NO: 454211 - DNA, 428 bp, Sorghum bicolor
tacattgacatccatccttttcgctgcagctgtgttctggttcattggtatatttgtccccagcgtcgatcggttcaatgaagagagtgaggatggccttactgtcgccgatagatccaatctcaggccactgcttgatgaaagcgacgagccacggacatctgactaaaatctgcgcaaatcgcaaccttttatttcttggaagggtaatcttttagtagtccgtagtattcccttgtacccgcaacacgtgaaatgtaaatctgcatgcccgttggctgtacctgtacatatatgaggtctatttgccttgcgttttttttaaaacttctttgtacaggctacagaagcaagctagagtgctagatttttcggattgtaaatgacaattgacaacttactggctagaattttattcccccgtttgg

SEQ ID NO: 454212 - DNA, 784 bp, Sorghum bicolor
ggcacgagggccaactccatactctggtggatctatgatgggagcaggtggaatgtatggaatgcccatggacaggtatgggccaatacctgttggtcctggtccaatgggcacaagggctggctcatattctgatgaaggttctcagaagaagcctgcaggagctggccgtgataatgattgggagtgtccaaattgccacaacatcaactttggctttcgcacagtctgtaatatgagaaagtgcaacacacctagacctgaaaaccagggatctaagcccgatggtttaagaggctcaaaaccaaagatgccagagggcagttggaagtgtgagcagtgcaataatataaactatcctttccgaacaaagtgcaatcgtccccaatgtggagcagaaaagccatcacagacaaacaatgtaaatgattcagcgacagatcaggacaatcagtgagtcctagaacagtaatgagggtcaaggaggtccagcgtcgtcgtcaaggttcagtcaatgtggggtacatctgtgtcagtagtcgctgctgtcgttacaagtttcttccccttgagaccttagttgagtcggggccttggagttggcaatggagtcttgccttccctaatcactatggataatggtcaagaacatcaatttgtcatttggtttggtcaagaacatccatcgtgcctttcctggctgaacttggttacttgtctttgttactagtactctgggtatattaccatctgttatatgaatgtcttttagggagaactagtc

SEQ ID NO: 454213 - DNA, 450 bp, Sorghum bicolor
cagtgaagtaatcagattgctcaagaatgtaacccgcgtctcatcgcagcgggaggacgtcaatgccagccatggtcgtgtgaccttcagggacgtactcgactacgtggactagccccccccagttagttccctgaaattattagctgcgaagcatgtaaattcccctgtcttttgtctctcaatggttcattctaggagggtgtgttaatgcagaattctagtgtagccagcatgaatcgtccccattacatgaacagcggaaatgtgagctgaagttcgctgtttcgatgttcaggtgatgtgtgtgtgtacccgtgtaggcaattttggttgggaaggggaagctgttgcttggggttcccagtgtgaaagcgagcctcttattgccagtaaattggttgtctgaatctattctcctgctgctatattgatgattgtgttggttct

SEQ ID NO: 454214 - DNA, 536 bp, Sorghum bicolor
gcaggaggatgatgagttcagaatctgatacatcactaaatgctgaccatcggagcatgaggaggccaccatcagcgtcagttgggagccttcctcctatggggaggccaatctcttcgtcacaggcatcagatcgcagagggggaccttcagcttccaacacaaggaaagatgagtacaactggagatacgatgccgatgatatatctgaagaggtgctgcgggcatcggctgctctagaaaatgtccagttagaccggaaatctcggaatctgccgacatcgtggaggcattcaggggacggcaccgagtaacaagcaacaaggctttggagctggttgcttgactgaccctgtatcgtgtaatttgtataccactcatttgcggtggtacaatgcttggattgctgttatattattagggagatgccacactggtatgtatggttgtcttgtaacgaacaaaacaaatcaaatattacattttgttgaactatgggtggacttgatccgataggattggcacgccgtttcagt

SEQ ID NO: 454215 - DNA, 469 bp, Sorghum bicolor
ggcacgagggaatactgaggatactctgtctatgtttagtttttttttcctgccaagaaatggtttgttatgttagaaaatgaaaacgtgatccttccattgctccttatagttgatagttaacctatatggcattcatcacccagtgtctctggttttcagtattcactgattgggtatctggtggccttcttttaaattttaatcaacaacacaggaggacatagtagtgtttagtaattggtggatgaagatcaatggaatgatcaccaaaccattgaggaggggtctgaactcgctaatcatcttgggagatggatgctttgaaaacattgaaaaggatgtattttttaatggggcttgcctgatgtgctgcgagtggctgcaattagctagagaggaagcaaatctctagggtctgactggtgctagggaattagcacaacttgacatggattcattacagtgt

SEQ ID NO: 454216 - DNA, 432 bp, Sorghum bicolor
ggcacgaggcaagtacgacggcaagtacctccactccctcgtccgggagctcctcggcgagacgaaggtcagccaggcgctccagaacatcgtcatcccgaccttcgacatcaagctcatgcagcccaccgcgttctccaaatacgatgccattaacgatgtctccaaggacgctctgctctcggacgtgtgcatcagcacgtgcgccgcgccgacgtacctcccaggacaccagttcgagaccaaggacaaggatggcaagccccgggccttcaacctcatcgacggaggcgtcgctgcaaacaatcctacgctgctggcgatgacggacgtgagcaagcagatcctgctgggcaaccaggacttcttcccgatcaagccagcggactacggcaagttcatggtgctgtcgctgggcaccggcaccgccaa

SEQ ID NO: 454217 - DNA, 447 bp, Sorghum bicolor
ggcacgaggaccacacggaagcacttcccccaatctatgctttcctcctcctcctctctctctcgtatctagatttgttgcaggatgacaaaatatgaatgaaatcagattcgattcgtgaggcagtaggccaaggatgctcctccaatccatcatcttaaattaaccaacgccaggcatccgcgcgcaatccgtccccttagcgaagcaccagcgatcctcaccgccccgccgacactttgggggcggcgcctgcgcctgcgccatggcgttcctattcggtgcattcctgggcctggtggtgggcgtggccgtcgtgatggcgtttgcgcgattcgagaacagccgcgccgagcagcgccgtgagctggctgctatagctgctgctttctcgaagttgactgtacaggatttgaggaagctcataccacctgagttctatccatc

SEQ ID NO: 454218 - DNA, 497 bp, Sorghum bicolor
  unsure (1)..(497): unsure at all n locations
ggcacgagggcatgctcgggcatacctatacctcacggaagaactacacaaagcctaacaagatttgtgacatcagcacatttggttacacaattcaaccagaatagaaataaagatgataagttgagggttgcagtgcgccttcctaataatagagctactgatgggttcttaggactatatgataaagacattgctattgtcacatgcttcggcttcctaggagtccatcgtatagatctgaatgataaggcaaaacctttccctgttgataatttgaaagctgctgggcgtgccttcaactctggcagttggatggccatgcgtggatctctatatcagaaacgccccctcgaacacctcgaagacctcaacacctgggtttcagatagtcaacatatctcanaggctgtacttggagggccacttctggggtcagataataaaattgtagggatgagcttagatatatatgaccctggtgatgcaaatntgag

SEQ ID NO: 454219 - DNA, 493 bp, Sorghum bicolor
ggcacgaggggcctccagtgtcgccgtcctctccctcactctctgccgacccttctccttccccaggcaagccccctgctccgatgtcgggcctccactaccgtcgtcctctccctctctccgtttctcggtcgcggctcctcattcacccctggcagtggccctccgccgcaactcgagtctgtcgtgacgccactacagcctgctactgcctctccctctcgtctgactcggacatggcccctccctctcctctgcatccaggccatggcccctccgctgcatcttgagcttgcactcagctgcgtcacatcatctgtcagcacggatcaaggtcgcccttgccgtgtcccctccgcttctgcagctcaagctcgtgacgaggagctccatttgtgcaggggcacatccatcgctgctccatcaatgcaggggcacagatcttgagttttctactttttcgttcttagctacgatctgattttcccggaat

SEQ ID NO: 454220 - DNA, 478 bp, Sorghum bicolor
ggcacgaggctcctgtccacctctcatccctcctctccctagctagcaagctctagccttcctgtagcgcgtcggagatgggcgcctccaccaccacgtcgctggcggcggcggcggcagcgctgctgctgctcgtgtcgctcgccgcggcggcggacatgtcgatcatctcctacggggagcggagcgaggaggagacgcggcggatgtacgcggagtggatggcgacgcacggccggacctacaacgccatcggcgaggaggagaggcggtatcaggtgttcagggacaacctccgcatcatcgacgagcacaacgccgccgccgacgcgggcgtccactccttccgcctggggctcaaccgcttcgccgacctcaccaacgaagagtaccgcgccacctacctcggcgtcaggaccaagccgcagagggagaggaagctcagcgccaggtaccacgccgacgataacgaggacct

SEQ ID NO: 454221 - DNA, 510 bp, Sorghum bicolor
ggcacgagggctcaggctcggtcccagggataggatcttccgcgcgtcggcggccccccccctcggcggcgtccagcgacggaggggcagtcccaggctcggcggcggcgtcggcggctccccttcccgcctctcgccagtcgcctcgcgccctcgcttccgtcctccccgcaccggccggcgaccctgcgaatacccaagtgccatcgtgggttcaggagaaggatgtacgggaggcgtgcatcgcagctgctgaaggagatcgactcctctgaggctggccagctcgcgccattcaacactgacgtgtttgatcaggtgattagagagtgcaatgagcacaactcacagtttcaatcattgatcaggaaaatggttgagcaaaacttagacatcgagacaactagaaatgaggatcactatggtgcagctatccaccatctttccctgctccgtaacaaaagatgcctgatggcttacatgtacaaccgagcagaagttattcagagt

SEQ ID NO: 454222 - DNA, 457 bp, Sorghum bicolor
ggcacgagggcgacgtcatttgcctttacaaagacttacttctctttccaaattttgtctttagacactcttcactctacaactgattgaactctgtttctgttacagattcttgtgtcacagccgctgcttactctacaatcactacaacgtcatcacatctcagcgcatttcatcgactgtgattctgtctggatcaaatcattgcgttcaataaatccaaaatatcttcaaatccttccatcatgtcgactccccgtaccaagcgccaattcgctggtgcttcagccgatccctcccagcgacaaatcacctctttcttcaatgccagtggaagaacttccgctgaatctccagttgccgcagctgagaagcctatgcagcctacccttccttccaatgtccaggcaaaccttctcagcgttggcatgcgagtccgcaagtccgtccccgaagg

SEQ ID NO: 454223 - DNA, 426 bp, Sorghum bicolor
ggcacgaggatttggaagacatttccagtgaaatcctggaaaaatgcagtggttcaccactggccattgttacaatggctagcttattggctaacaaagcctgtacaaagcaggaatgggatagggtatgtaattcaattggttcaacactggaaaaggatcctgatgtggaagaaatgagaaggatattatcccttagctttgatgacctcccccatcatttgaagacatgtttattgtatttaagtatatttccagaagattatgagattgaaagggatcaactagtaaaaagatggattgctgaaggattcattaatatggagggtggacaagatttggaggagataggagagaattatttcaatgatcttatcaacagaagcatgattcaaccaatgaaaatcaaatgtgatggtcgagtgg

SEQ ID NO: 454224 - DNA, 294 bp, Sorghum bicolor
ggcacgagggcggggccaagcatgccgttgagcgcgcaggcgcaagatgactggcagggctgggcacgcggcgaggcctgtggtggtccaggatcaccggcggggtccagcacgcggttgatcgcacaagcgcaagatgaccggcggggctggacacgcggagggtcttgtggctgtcgcgaacactggcggggccaagcatgcggtgagcgcacaagcgcaagatgactggcagggctgggcacgcagtgaggcgcgggaacgtccttggtggggtcagaggaacaaccaagc

SEQ ID NO: 454225 - DNA, 525 bp, Sorghum bicolor
gcacctgcagacctccacttgacgctccccgccagctactactccaaccaacaaaatacctccgtctccgcctctcccatggattggaggttgggggcgtgaccgcgtgagtgaaggaagggtaggtaggtcgctggatagggacagggagacggcgggaggcgtttcgccgagcagttggcgtgcttcctccactccacaggccgaccgacgcgcgccccgctccgcgccgctgtttcaggttctacaattccagtgttgagtgctttaggctactatgggcaagtcaccggggaagtggatcaaatcggtgcttttggggaagaaatctaccaagtcaggttctaccaaggtgaatgaatcgaaggctgataacaacagatattcaactggggaggaccgcacattatctgagaattctcctgtgatttctgagccggtactagttaacatccacaagaatgtagctgtcaatgtgatggctgaaaatgtcagtgatagggaagcgcgacaagatctgcagaa

SEQ ID NO: 454226 - DNA, 390 bp, Sorghum bicolor
gggccaacgtcgctccaacctcgacaccaccattcgaaatgtcggaatctcagaccaagaagttcgcgaagggggagcgctccataccgcacccctctcagaaagcgagcaaattctacccagctgaagattcacaggtccccaagaaggctcgcaagtccatccgccctgctaaggtccgaccctcgctcactcccggcaccgtcgtcatcctccttgctggccgtttccgcggcaagcgtgttgttctcctgaagcacctcgagcagggtgttctcctcgtcaccggtcccttcaaagtcaacggcgttcctctccgaagggtcaacgcccgatacgtcattgcgacctcgaccaaggtggatgtttctggcgtgggcgaggatgtgt

SEQ ID NO: 454227 - DNA, 513 bp, Sorghum bicolor
ggcacgagggatcgatcgcagctcgatcagtcagagccttgcttgcagacacgaagaacttcgttctggccggccagttgttgatcgagcgagctgtgtgatggcctcttccgccgctcccatgaagacgttggttctggcggcggcgatgctgctactgctggtgcacgggggagtcgccggcggcggcaacttctaccaggacgtggacatcacgtggggcgacggccgtggcaagatcctgaacaacgggcagctcctgacgctgtccatggacaggtcctccgggtcggggttccagtccaagtcccagtacctctacggccgcttcgacatgcagctgaagctggtgccaggcaactccgccggcaccgtcaccaccttctacctctcctcgcagggcagcgcccacgacgagatcgacttcgagttcctcggcaacgcgagcggagagccctacacggtgcacaccaacgtgtacagccaggggaaaggcgggcgggagcagcagtt

SEQ ID NO: 454228 - DNA, 559 bp, Sorghum bicolor
ggcacgaggcttaagcctgctccaacgcctccccgttgacacgaacccgctacaactttgagcactttacaactgctcaaactcctcaccaaactcgacccgcctttggtctcttaaaggcaccgccttcaccacggctcctccggccgtgagcttcgtcagtgacaaagatttcagcctctgcaagccctctcacatcatcaacgcgatcccccctcccgctgctattgctgctcgacgataagctcctcgatctctccgtcttgcacgaccctcgatccgactacactcccccgtcgttcttcgacacccgtcagctgccgcataggaggtttacagaggttcttcctctagccgaggaagagtcgaggaggcctcgccagtccactgagggatcagtctgctaccgctcacgaccgccctaacaccggctgaacacccccgtacgttcaagcttcactctactatatatacttttcaataaagtatcgtctttctctagtccacggacttaaatccctctctcaacttcccaacgaacccccgcaactgtttggga

SEQ ID NO: 454229 - DNA, 421 bp, Sorghum bicolor
ggcacgagggccaatcttccctcttctcctgctcctgttcgcaactctaccgcgtaagcaactcattgttcagttctcaagtcgtagctaacgtgtcttgccattaataatctgtccaagcccgcctacgcctccgactctgactccgatggtcaggcccgaggtggtcgccgcagccagaagcagcaattcgttgttcctctgcccacctccactggtctctcacagcctgctggtcaactcctcaagggtgccacagatgagaacggtgctcagaagtccgctgccctcctcgtgggtatcaagctcgaccttgaggccgaggttcacttgactgcccgcgtcaagggagacatcgtggtcggtctttactagacaggagtgaattccaacactgagattgtacttggtggttggtcgc

SEQ ID NO: 454230 - DNA, 503 bp, Sorghum bicolor
  unsure (1)..(503): unsure at all n locations
ggcacgaggcggcctttcactcttcagctgccgtcttccgctcactgctgagcgacatcttactcgcattgcttgcgctgctctattttgcatgcgctccagccgccatcgttgctgacgcatcgctgcccgctacccctcccacttgacgagggcatctaggctgacggccgacacttgtcctaccatcgttgcgcccgacctgcaatcacccttcgttcgcagccaacaccatctccattgatacgcctctcagtcttgcgctcagttccacacggagcgcgcgtctccaccacatcgtccggtcgtcaagttcgcaattccgattagccttcccatcgccatctataccctccaaggttgcatacaacccacgaacctctggtgcgcgccgatacacaaccacacgaacttgcgaaccatcttagaagtcatggcctcaaatggcgcctcgggcgcccctgcgccgcanacgcaagcccaagtacaaccgtgtcgataca

SEQ ID NO: 454231 - DNA, 478 bp, Sorghum bicolor
tgcgattagatcaattaataaatatttaactgagaaagcccttgctgaattagtattgccatgcattgacagaagttctgctgatatccgcggtatactttctgttgatttgatcaaacagatgggggctattagtgatggtatttgacatttgtgctgtgttcaaattaaaacaccaactacatcgaattctttgggagttctgtaccacaagatggaaaccatggctttaggttggtgttggtgtagaatacattgccgcccccattttgttttaggacctgtgggggcgactgtatataatggaaaacattgatccattgttgaggcatgcatggcccgagaagacatccaatggggagctgtgttccagaattaggaagtcatgctgtagattttagccaaaagccgttctaattgttttttgtttgagatgtaatctagtgaatgtcacatatattcttttgatccaagggct

SEQ ID NO: 454232 - DNA, 488 bp, Sorghum bicolor
gaggcataatgtttaaggctgaagctgttcgagcgaagacatgatgcctttgaatacaaggtttgttggtacatcaaaaattatctcaacagtgcatgttatgctccttccaatctttctccagtagacctatgtgctttagtttacagagaagataaggggacagaatatttgtcaatggtcatacaccaaggagccaattattatagcttatacacttatatgttatttgtttcaaaggctgaacatatatggagatgtagcttggatattggtttctgtgtaaattaagatcctgctcaatgggtgaatgcctcgtgcaacaaaaaatgttgcttcaacaatatgaagctcatatggcagaaaggatcagtggtaacaattaaaagatgcgtacgaaggggagattgacaaagtgcaacccccaaattgtaatcctgctccttgacaatacatttatggctcttgttctgggttttaaaaactgc

SEQ ID NO: 454233 - DNA, 506 bp, Sorghum bicolor
atctactccgtcgagccgatggtgtacgtggccgagagcgccatcagctccggcacggcgggcacgtcggcggagggcgccgagaacacggccgccatcgccgcggggctcgtcctcatcaccgtcgccgcggcctcgtccatcctcatccaggtgaacaagagccagcctaaggtgacgccggaagccgcctacaacggcccgccgctcagctactacgtcgccaagttccaaccggcggcggtggcgcagaccctcgaggcccccgcccccgccgaggcggtagaggcagcggcgccagaggcgacgacgtccaccgtcgacgcctctgcggctccggaggcgcagcagctgtcgtcgtgagctggttcggttttgtcgtcgtgagctgagcctgtagtgcatgatgatggaagatatgtatacatgatacacatgagagcatttcggaattgtatcaagtttcatgtttatacatatatatatatatatatacacatattata

SEQ ID NO: 454234 - DNA, 477 bp, Sorghum bicolor
ggaaaagaaaaataggctttggcgattacatccgcattgggtcccgacgggcattgcagcatgatcctcatgatgagaggggtaaccaagaattctccgctccttaccttgagtttggtgagaacacggctggagatgtccaagaacaggctgtggagcagaggatgacgttcaaggacgttttcaatctgccccataacccgataccaacagtgcacgagggacagcttgcctttcgtgacggaaagaagatacacggccgattatcccgctccaggactgtgtataaaatgggtcgaattttcggtagcagcctacggttgtaagatgtttgtttaccgtcttcatgttttgctattgtgccacaatattgacggagtgcataatacccgatacatgcttaagttcagcatggtttgattgtatacatcgttgtatcaaaatggacagagactctttctcaatagacccaataca

SEQ ID NO: 454235 - DNA, 580 bp, Sorghum bicolor
agaagcctgggttagaaatggctactgaacaaagtgaacttgatttgtcatatggtatgcggtaccaaaatatcaaaattcctgaggcatatgaacgccttatcttggatacaataagaggagaccagcagcacttcgttcgcagagatgagctaaaggctgcttggcagattttcactcctttgctgcacgacattgacgacggcaagctgaaggccctcccatatgaacctggcagtcgaggccccaaggaagcagacgaattgagcgcgagagttggatatgtgcagacccacggttacatatggataccaccgacccttgcatagaagagaatggccggttccatggccttataggaattgtgtgtatctaggaagagtgccctacaataaagctgcgcatatatattgcccatttcgctatatcacacggcgttgtaataatgttctgctgaacatcccaattacgatatgaaataaaaatgcatgttccattcagagggtgtttagttcccttttcatccaaaaaattatgggttttggtttctcattttgtataatgaagctaaatactatgt

SEQ ID NO: 454236 - DNA, 475 bp, Sorghum bicolor
cgacagacttcctggcataccagcgcatggccctgaacaagatggccacgaacccatccctaatgggtcagcacgccttgaatcaggtcgcactggggatgggtggccgagccagccagtccatctatgatggcggcttccagggcatcagtactgccgccgccacaacctccgcccagcaacaacagcagcagcagcagcagctcatgtactactagagtactactactccatgaggcaccagctacctatctcttaaagaggaaggcgaggatgaatggatgatgccccttgctacacccttatacatatagtagatgatgtactaccaggaccttttttataatcttttaagacccatctaagtaacatgtcctctctatgctagctatatatatctatatacaccctataacgtatgtatttctggatacatgaacaccccaaggttcttagtataatcttctgtgtttga

SEQ ID NO: 454237 - DNA, 461 bp, Sorghum bicolor
cgtccaaccccaataggctcttctccaaggtggttaagaagggtgatgtctttgtcttccccaaagccatgatccacttccagatgaacctcgaccatgagaagccagcgacggccttgtcatcgctcagcagccaaaaccctggtgttattacgatcgctagcgcggtgtttggatcaaaaccaccgatctcagatgatgttttggccaaggctttccaggtggaaaagaaactcatagactggctccagtctcagttctgggataccaactactagtggttatacatgttgcaccaacacaagcgttacgtacatgtgcgccctatatatgtattgaataaattgcatgtggaggagtaatacttattattatgcgtgcgtgggagctgccagaagtatgtttgattgtattgtcactatctaatatacagaaaataagatttcattgaaaatctaatt

SEQ ID NO: 454238 - DNA, 465 bp, Sorghum bicolor
caagaaggccgctgccaaggcgtaaatgacgctgagcagtattgaactttaattaatgacggccacggcgttaaaggatctgttcacggcaagggtacggaaagtacggctactgctattttgatggtttggttcggagcacgggattatcggctgtttgtttacacgtgcacgcggagactcgcgtctgtatgattctaccctcagccatctcattatgttggaggtggtacactagaagtgagggttatttctatgcgattttgtcccctgtattatcttatatgacatgacagagtcttgttacggtgtgtcatggttcgaaacagtgctggagggacggtcggcgtgtttttggagagggcaaaagtctcggttgtgggtgaggaagggttggttgcttgcgattataccactgtcgctgttttgagttattcgatttgagctacgcaatgaacaattttg

SEQ ID NO: 454239 - DNA, 471 bp, Sorghum bicolor
gcagcgccctcggcttcgcggcgtccgggaccggcgtcgtcgggggtggcgccccgggcggggcgccggccgccgggatgccgtactactatccgccgatggggcagccggcgccgatgatgccggcctggcatgttccggcctgggacccggcctggcagcaaggggcagccgatgtcgatcacagcggcagcttcagcgaggaaggacaagcagggtttgctgcaggccatggcggccccgctagcttccctcctgcgcctccgagctccgagtgatcgccatgatgtgtacgtcacgcactcacgctgtgtgtatacactctactatagcaaacatggtaatggagctgcatacagaacgaataaggcgtgacgcgtgtcagacagtgagagtacgtagtaatttgtacatgcacgtgatgtgccaattaatcaaagattaacatgcagttaattaattaattaaatt

SEQ ID NO: 454240 - DNA, 533 bp, Sorghum bicolor
gagcagcatgtagtttatactgtctcctggttttctctctcgagactgctgtcagttatgcttttggggttggtttcagttgcttgtatcttcaacttctgtgtcgacatgctgataacctatcaaaggaagatattccagaagtttttcttaggaagaaagtgaagaaaattggcattacaagtgaagatttgaagaatacaatagagaagacattgggtggtgcaggagtagctctttcatccccaaggcttgtgattcctgccgtgatttttggattgtcagctttatcagatcacttccaaaatagcttcagttttgaggttcttccagggatgatgggtttccttgcatacaaggctgcagctttggttcaagtctacagagataacgaggacctccgcttgatactccctgaggaagagggcgctgacagtgacagcacttgatgtatacaaattagagattatgttaacccagttgtcgataaatacagaacagaccactttacagagtcacacttctgaattttg

SEQ ID NO: 454241 - DNA, 541 bp, Sorghum bicolor
ttgaaagccataagggacggagcagacgtcaaaggatactctgtgtggtcattactggatctctacgagatgttcgggggttacaaggcgcatttcggcctcatcagcgtcgatttcaatgacctgaggcgtcagaggcagcctaggctgtctgcgtactggtactcagacttcttgaagaataatgttgccattcaggtggacaatggtgaagcaactgcaacttctcatgaacaaatttaagtgctccatccaaagattggcattttatactctgagagctacactctgaacagaaataatggaaaagggtaaaatttacgaaatatttcaacgtatttggtgtactctatatatgaagcttaaggtcgtgtgggttgtaaagtatttactataatagaaactaaagaaagaagtcaaagaaccgtccttgagtacactctgcaatcagaaaatgtattagttagagaatcatccatcgtcataaaaagagggagattgaatgtatctcaggccccagtatcagaatctccttattaga

SEQ ID NO: 454242 - DNA, 425 bp, Sorghum bicolor
acatcaggaagctcatgatggaggacatgccaatggtttcatccaaggtagaagggcctaaccccaggaggatcgacggcttcctgtacaggtacaaaaaaggcgaggatgtgaggatagtatgcgtctcccatggtagcttcctcactcctgcaaagtttgttaagcaccctggcggcggtaatgtgtcgaatccgcttcggcaaatagttgtcaaccctgctccattttcatgaacagggggttacagggttaaactgctgctggtatctactgtgctgtaacatgtaggctccctgtttcggggagttcaacggaaggtttttgtattttacataaattgagtgtgccagcaaattcaaaagaaatgtcatctgcaaatgttataggcttgtttacaaattgacaaggattcagttgctgcc

SEQ ID NO: 454243 - DNA, 482 bp, Sorghum bicolor
cttcctccaagcagcatcctacgcgggcttcatcgtgttctactcctggatcagctcatccttcccgcgcccgcctgctaagcgcgccgtcgccatcgccatgatcaacgccttcagccagctgggcaacgtcgcgggctcgtacgtctgggacctgaaagagaacgggtaccgcaagagctacggcatcgtgctgtccatgtttggcgtcacggtggtgggatgctacatcttcaggctggtgctgatcgacctcaacaaaaagctcgagaggggagaggccgcttgggagacgcgccaggatgtggctgcgcatacggcggccgtcgaggtcatggacagccccgacgaggctttgaggatgaagcgggatttccgataccttatttaaagcggcgacgtctgggcaggtctgggcatacgtgcatgcatgcatcaggggttatattagactcaatgcaaataagacaagtttttgtttg

SEQ ID NO: 454244 - DNA, 320 bp, Sorghum bicolor
ccccgaccaaaggcgtcgaagtgggcatcttcattgtcaaaaaaacaaagactacaaatgcagctgcgcaataacactggtaggcaggcgcctgcgcgaggtccaaggtggccaactcaaagcaaaaccgaccgggctatgggagcccacagatctctgaattttcttgtatgacattgcgagtacccattctctgcatagcattgcgcggcgttagcaacattcgagacctgtctggaacagtacaaaaggcaaagacatgtaatattaatatcctgtgacgacttagcgcataacaatacagcaacgtttcccgactt

SEQ ID NO: 454245 - DNA, 594 bp, Sorghum bicolor
actgaccaaagagacttgtttcaaaggatcttagattttgtcaagtatggtgactgccctgaagaatcgatcaagattgctggaaaacgtgatgttttaagggtgtcgtcatggtctgaattaatccagttgaatttcttaaagcggtttctggggaagggctttctgaagcatgttcaggagaatggacttcttcaggatatctttgacattaaggttgacaaagctgaaaccctgtcgtccactgataagaaaatctttaggtctgaagaggaaaaagaaagagctctgaaattaaacaaggaacgtcgtctagcccaggtaaggaagaatgccgtcatgttggacgactaacatggtcacttgggtgggaagaaccattctgcgtctcctttcaaactactccgtattattactggcacatttcactggaggttgtgccatcatgattgtgtactttgagatactggagttatactattatagtgcacctaaacaaattgctatttcgtgcatatggaacgtcagatagcacgatttatgttgaagttcagcatgatttggcgggaatagtcaagaattacttcgaagttc

SEQ ID NO: 454246 - DNA, 477 bp, Sorghum bicolor
tacagatcatgccaacaaaatctagagcatcaataatccaacaatatctggagcatcaagaatctgaaatgggctcactatggtggttgggagatgtaaacgcgttaggtttggcactgttccattgagtttaacaggcatctgcagcatcatcatttggccacctcaccctctatacacatagttggagtaccagcttgtcaaataagcgttagcttctatacatcattctttgggggaaactgtgcaatcaagcaaaaagaaactatattctttgggaaaactgcacgatcatgtgaaaaaaaaactttagtaaacacccttctttttatcctttacatgcgaacctgatgtaaatgtaactgtagttgttgcttatgatatagcaatgtcagtccctcagtttctcagaatgattgtatttatacgcttgttctgaactgaaagatggtaacaaagtgtgtactctatttgcgc

SEQ ID NO: 454247 - DNA, 470 bp, Sorghum bicolor
cagtgaatagctgtgtattggtctggcagggtactgtggcaaagcccaccttccacaggttcactgtacacaactgccggagtgaggctgcagctaagaaggttttcattgatgctaaagttcctcactactgggaccttgctgtcaatttctcagaagattcttcctgagcaaagcacctgttcagaactttgctagctgcttctgatctttgctggccatgctagtgatgtgtggccaatgttataagcgcttgtcatgatggtaagtcttcctatcacgagtatctataccaacgggcacatctgctgaagtgctgaattgagtaatgcttggtgttgtcagtctgttgtgaacatgccatttcagagatgttgatgtctattgctggattttcctgtggactagaaactatgttgcgaccaactgttgaattttgcagtgtgcatttggaataaatctatttcgcc

SEQ ID NO: 454248 - DNA, 499 bp, Sorghum bicolor
aagggcaacatcccggcgttcggcgtggcgtcggggttcgccctcatcggcggcgtcgtgggcatgttcctgctgcccaggatctccaagcgccagttcagggccgtcagcgcgggcggccactgatcgagcacggcccggcccgccggagcacggcacggcgacacaaacccaaccgtgcaagatcgagctgtatgttgaaagttgaacagaataagaagcaggcgaaacgagaaaccattgtgtgcttttgttgtgtgtggttgataggcgtggcgaggtggagtggaggtgaagccgtgaaggtgagcatccagcaccagctggttaccaaggtctggtcaggtctctgtgctagtgctattagctagtgtataaggagcgagtaggtcagttaaggctggtgcgttgtgagtgctcctgtaatctttgtgtccctgtcttgtgtgtgtagctacagcagaccgatcatcaggagaagaacaaaaggattattcga

SEQ ID NO: 454249 - DNA, 495 bp, Sorghum bicolor
tccacggtggtagcgcctggggtgctggtaccttcgctggtgccgacggttctcgccagcccaccgctctcgagctccagatcgccgaaactcagggcaaggccttttacgaggccgttgccaaggtcaaccaccagtgactatatggcagtgccgagtcgaagcccgagactccggcccccgctgccggtgcggctgctcagaagcctcagcagcccgtccagcagcagcagcagggcaaccgggaagcggcaacggatagggacagcgaaggcggaccatgcggcttacccaagaagtgtactattctgtaactgattgggtcgtgctggttctctctgcgcctgttcttgtttcctttgtggtgccttcctgggggcgttctcgtaggcgtttcgaatttttgacgacatatgaatatatatgaccaccctcgatcctagagacttctcctagataaaagctaattcaaatccgaatggaaagttctcgtca

SEQ ID NO: 454250 - DNA, 526 bp, Sorghum bicolor
tatcaaccagatccaagcaactctcagataggagttgctttgggcggagatgactcctctgtcaactcaggcaactcgaaaggcaagggcctccaaggggaggagtatgagatgacacccgtggaaaatcctcatgcgggcatgggaatatatcagaccggcatcaatccctatggagagtcaagtcggacgactgctccgcagccaggttactttccagaagggatcacccatatgaatcagtcatacggataccctaacccgtatggacatcacgaagacaatggccgaatgggtcgtgagccgtaggctcggctgtgctacgagcctgataaaatagttgtcgctctgtatttttctctcgttagcttggcgttgaaggatgggataccactattgaagtgtcacgatttgaactgaatgaaatatatatatgtatatagctccactgcggacttgcacttgcaggatgatgcgcagggcagtctaagtagctagagccacctaatctcgaaagtttccactg

SEQ ID NO: 454251 - DNA, 595 bp, Sorghum bicolor
agcaaaaaacaaaggaaagttgggttgccaaggcgtagcaaggcagacctgttcatgggacagagtgatggcgatactgagatggccaatggaggcggttcatcgaattctgataatggagacgcagagacgtcggcatcttaggttgctcccaggggtttttgccgttgtggcaactcaagtggagtcctccagcatattcattccgagcatgatatgagctccgtttaggattttgttctctcatcaataattaattttcatgtgcataaggcccccgttggtctaatcaaaggttagggaaatcatgccatctcaaacaagaattggaggtggtccattgtagaaacaattcatgtataccggttccgaaattgtgtatatctaccgataggttcaccttaccttttacccaatgtagttagtttaccttatcatttacccaaaagaaatatttttccctttccggtaataccatccatacgtcatttatgtaccagtggaaatcatcctgtatatgtcttgatgagtttactgccgacatgcttgaaactttgacattcttctaagtttataagtttggaattgatgctgt

SEQ ID NO: 454252 - DNA, 557 bp, Sorghum bicolor
gcgcccaagaagatcctcaagaagaagccggtctactcgatgaagaaagggcagattgtgcgggtcgacaaagagaaatacctcaacagcatcaattatctgtcagtgggacacccgcccttctacaaggggctggactacatatacgaagaccgcggcgaggtcttggacatcaggaactttgaaaccggagaatacgccctgatcgcttgggtagggattccgacgccaccggcatggctaccaacatacatgctcatcaagtcggacaagctcgactacgagaggatatgatagtcggcgcccggcggcctctcgcagtcgcaggagaccgtagcatgcacgcgccaccgccaagccatgcatgtttcctgtcctttccttggggtcaggacacggtgttgtacacagatgacaatgccaacacacagtgatcaggcaattctgccacctcggctgaaataaggaagacatcgaaagccacgatgacaagatttcataattgctgttgtacagcacttcttatattatataatatagtaaactcatatttcgta

SEQ ID NO: 454253 - DNA, 465 bp, Sorghum bicolor
ccagacgccggcgacgctggccgagtacaccatcggcggcactggcaacccgcaggattactacgacatctcgtgtgttgatggctacaaccagcccatgtccttctcctgcagcaccggcgttgcgctgtcgtgcacgtacgccaaatgccctgatgcgtaccagtactcgactgatgacaccaagacccatgcttgcagtgccaacagcaactaccagatcaccttctgcccgtgaagaagcggcacagatggtgatcacgtcgatcacagagccacgcaacagacagttcattcctatattatgaataactagcactgtctagctaagattacagttcataatatataagatatgtaataaataataaatcgtccttgtgtgcatgtatacggatatatgacacactttgcgtgtttgtacttgactatgaagaacattcttaatatatacatgttttcgtc

SEQ ID NO: 454254 - DNA, 454 bp, Sorghum bicolor
cactggttttgcagtacgttttcaaaggccaggtatttgaacatctccaacaatcaaatcggcggagggttgccagccaatatggagcacatgtcggtagaacgactcttgattggttcaaaccaattaactggtccaatacctcccatgccaattagcctgaccacgttggacttgtcaggaaaccttttgtcaggacctttgcagtaaaatcttcaacctccttgccagtgattatgcttgctatatatttttctagtttacaccgttgcttgttttacaacaaatgcatttggaatgtataaattgtatgtcttcagttagttccgagtgctgacaaccactgtttatttggaatgtcgtcattggtttcttgtaatgtttttttctcatcactgttttagagtgtcatcctttgtcatttctactgtgaagaataataatttatttttca

SEQ ID NO: 454255 - DNA, 442 bp, Sorghum bicolor
gcacaacaactcccagacgtcaaccctcaaatcaaagcgtaaaaggtgatggagggcaagctgcacaatgtaatgcacacctgctgacacatataccaacacgctaatcaaacgaagctcgacgaccatggcgactcacaaaaataaagaggatcggccgatcgattcaactgtatatctagtgattagtcagaggtgacaggttgatgacacacacatacacgtacactagtctgaccactggcatatttgtttgctgtgatttttgagctcatgtgctcagagcatacttcattcttgttattattattgtatagccatattttgtcccccagcgtacatacataatctgaggattaaaaatccatcccctgtgcacatatatagtgatctgatctgaccatcatctgctggcagaaagagagaaaaaacagaggttgca

SEQ ID NO: 454256 - DNA, 567 bp, Sorghum bicolor
acaagtatgttggtgggaggtgaaatctcattctgagccagctagccttggacttccatatgtagatcgatgggtatgggtatataccgttcttattgaactgctgttgagtagttgtatgtagataataatatgatctcactccaataaatgcgatttaaggatgtcaagacatctggatgaaagtttgcttctggtctagctttaggtcccatgtttcattcattgagttgtgatcctgtgtgtagatctgctaagtcgtatggagctaatggtccttatctgaatctccatctgattattatcgattgatgagttcatggatcaggagctgtggccaatggtaatgtgcaaagttgtgttggtgatagtaactgtgtattgtcggtgattttcgtggttgctggttagtgctgttcagggcgcatgcggtccactagtagtggaagtttatttagtaagagcaactccatattgggaccgttttaagggtgtggttgggaccgtttaaaattggacatgcgtggtcgttccactaaggcatgtgaaaagatttcggatttcgct

SEQ ID NO: 454257 - DNA, 227 bp, Sorghum bicolor
atgctaaagctgctgcgatgaacaagggtgtgcaagaactgatgttttggatgtagctgatgttttgaagacatttgagattttttatgtagcctatgttttgcagatatttgagattttggatgtgtagcctatgttctgcattcatttgggcttttggggttgtattgttgtttgagacctgtataaaatgcctgtgatattttaattaattgtggagattgctt

SEQ ID NO: 454258 - DNA, 228 bp, Sorghum bicolor
tccgccgaggcatatgatgatccttggagcagagcaaaatcatatgctccatgattgcttttttttagcccttttcgaaatccaacctaatttttcccccatttttcccatccttctgttttgatttaggattaatagtagttactaatcagatgaatatagacgcttttcaaacgaggtactaaagctaatcaggaacaaggaacaaaaaaaccgcggaattgttgg

SEQ ID NO: 454259 - DNA, 504 bp, Sorghum bicolor
ggaaaatatttggggagttggagtagtgggagaacaacctgtcattttcccgaagactggttttgagtactcttctgcatgcccattgagcactccaaatgggagaatggaaggtgactttgagatgaagcacatcgacaaggctggatcatcaacattcaatgtcgcaatcgcgccattctctctgtcaattcttggggacgacaatgatgttctgctctaaaccacactgagatttaaactagacacgccaaacacaaatagttactgttagcgatgtagttttgagtgtgcaaggtacaggtgaaactactagggttgaccgatggctggagccaagtgccctggtgcaaggtcaggcacagtttgctggaatgtagaatctggaccatgcgagtgtcaattatagaggcacaataggatatcctatcaattgtacagcgtggaactatagagcttgctatcatgtaattcctctgttccaaattacaaggtattttgttt

SEQ ID NO: 454260 - DNA, 553 bp, Sorghum bicolor
aagaggttcatagcacatttgagatgcaaggcataaagatggagcagcacttcatcatctaaggcatgatgactggcatggcattgtggcgacatcagaagacaaattggacgtactagcgggcagtttgatgtagatatctttagctgcaaggacaaacagcaggggttacaagtggaagactgcgctgggccgggatgttcagactaggaaacttgacatttgtttggcttatttcatatgggttgaaacagcttcttgtgatctgggattgactctgcttcccttattttactggagtatctgatagcacaattcgaatctgggtttttgggtcatggtcactttttatgtttccctgtagacagaaatgtaggcaggtgtactttttgaagtgatcatggaccgaatcctgtgggtcgtttggttggttttgttgagcagggcagtgagtcgtgaactttttgcctgctttcatgtttcaatttcagtttcaggggcatatcttttgtttccttgttgaacaaagaactatctctagtagcagtttgca

SEQ ID NO: 454261 - DNA, 463 bp, Sorghum bicolor
cgcccacattgcctgcaagttctctgagctcctcgagaagattgaccgccgtaccggaaagtctgtcgaagcctctcccaagttcatcaagtctggtgacgcggccatcgtcaagatggttccctccaagcccatgtgcgttgaggccttcactgactaccctcctcttggtcgtttcgccgtccgcgacatgcgtcagaccgtcgccgtcggtgtcatcaagtccgtctccaaggttgacaaggctggcaaggtcaccaaggccgccgtcaaggctaccaagaaataagcgctctctttgggttgcttgtttcccttctttcgtctctaggtatctggttctagggatgtggttgcttcggaaaagtagtgatgacttttgaaatgtgtcaaggataacggtctgggtcatggcgtccttccatagtttccagaatgataaatgaaaacatggtgggccctt

SEQ ID NO: 454262 - DNA, 439 bp, Sorghum bicolor
ctgaaggaggtcccagttgtcctgaaagccctgtatgatggagatatcctggaggaggaaaccatcgtggactggtacaatgctgctgttgcagctggaaaggactcccaggttgtcaagaacgccaagccctttgttgagtggctccagagcgccgagtctgaggaagaggacgatgagtgaaggggggcagctctgctctactgctgcacttaatagtattatatatttcaatttagtttcttttgcttgtctggtgtgatttcgtgtcagtgttcgtgtagtgtggatgtctaaaactgttaattgtggtgtggtgcagcataccctatgtggttggctgcgtgtggtgtcgtcagtttggtgtctgtgttggatgtcacagtttattatgttcctgtggattgctactatataatatttgcttgggttgtgttct

SEQ ID NO: 454263 - DNA, 537 bp, Sorghum bicolor
ctgaggtcataagagaagaatactataatgaaaagatcgacatgtggtctttgggtatcacaattatcgaaatgatggaccgtgttcctcctcactacgccatcaaggatgaggaagaactgtttgatatcattgctactgaacctagcccgacattcacatacagttatcctaccatgtatatgcgtggcctcgtagcctggctcttggatgaagaaccagagacaagaccaagtgctcgtgatgctcttttagagattgaagctcacgttcaatccaacttgttaccttgttcatcagctcaagatcttgttcgattcctgaatcatgtcttaccatctgaacactaagctttacctcccctatgtttatatatatatttatatgttcttgtatttcttctcttatgcatctaccattcgtatccttctttggttacatctttaattttttttcatccttgtcattaatttatacattatgtcttgtatgtttgaaacaacaacaaaataaaaaatagtattatttcaccctttt

SEQ ID NO: 454264 - DNA, 506 bp, Sorghum bicolor
tatgccgcccagtacgcccagtactacggtggcgcagacccttacgcagcctatggtggttatgctaactatgttgctatgtaccagcaatactatggagctcaggctcaagcacacgctcccggcgctcctggtgccacccccggacagtcagcttcacctcctccgcccccgggtgaagccgcccctcctcctcccccaccgcctagtggcacctccccctcctcccccttctgggtcccctcccgggacaggtgggagctacggttcggttccccctccaccgggcctctgattcttgattgggtcatccatcaccaaaggggagccacagaactacagattttgacagaaaagcatgccgctggatatggaattccatggctatgtacgtgaacgctccagtttacattgcagaaagaaagagtgttgatttaggtctcgtatgcgattacgagctatttgagtaggaattcacatcgaaccatctttgtatggatgcgatt

SEQ ID NO: 454265 - DNA, 500 bp, Sorghum bicolor
gagccgaattgaaggaatcagcgtgatggattctgatgatctccatgctgctcgcgaagagcggcagctggtagactcgctctggaaggagtgctacaacgagccttcgtctctcagggagaagggcctcgttgtgcttcctggagaggatgcgccccaacagctgccaccagatgttgcaggaaagatgtttgagccgccgcttcgcgcgtgggcagctgcaagacctgctcaggaagatgattctgattctggcagcggaaagaaggatccaccattgatgcttaagttttgacggtctccagataccaatcccagttcttaggcctgatggatacctgcctgttgccctgttatgcacacactatcatcgtgtatggttcagtagcggttaatgtgctcagcatttcggttcagagtttgctttctgagacacagacgatgacatatattgtattatgtgatgctcgtaaattaatgctacatgtgaattatcttgc

SEQ ID NO: 454266 - DNA, 572 bp, Sorghum bicolor
cacctcgactgtgcgggatgatgaaagcctcgcaagctccccatcactccccagctacatggttcccacggaatctgcaagagccaaatctcgtctccagggctcatcaatgaccaatggtgcagagacaccagagaaaggaggctctactggaccagtcaagaagaggttgtccttccaaggtggaactgcagctgcctcaccaatgcggcggcattctggtcctcccaaggtggagagtgcagtgaaggacattgttgcaccaccacagccagaggccttggtagtcaatggtggaagcaagtgacaagtaccaggaggggaagcggattatgaagatatgtttcatccatggacagaagtttaaaagtgatatcagatctatgaatgatttgaattgttttcctgttacgacaccattgtttgctatataagattcacagtacctgccagttgattccatttgttgtttctgtaaaacaaatatcaatttgtcactagaatatgtggtgtttgtatgtaaacatgtcctttatttatgtgagccatatacttctttttcagaagatccc

SEQ ID NO: 454267 - DNA, 604 bp, Sorghum bicolor
aagttctttttctatgcccagaaagatggggctactgctttcttccttgttgaatgtattgtgaacacagcatcagcgaaggcgcagctcaaaattaaggctgatgatggggctgctgttgaggcattctcgactttgtttcagtcagccttgtccaaatttgggctttcttgatcctgagtattttgtctgagcgattcagtggtccactgtttttttctggctttcacagtttgcccccactctgctccctaagcttgtccagtacttgatcaaactattggagaaatcagagtagaaggtgcaattcgagggcatagcaatatattattattactagattcagcaagagagctctggagttctgcggaggaaaatcttatttgtattatttgggtgactgtgcatctgtacatgactacatgtcacccagataaatagctgggttatttaggattgtactagttttgatgtcttgatctcttctggagggccttctttttctttaaggttgtagaaacaacacacaacacccccttccatgtattctatttaccgttatttcttgcacagatgatcaatacagatgtttcttccattttga

SEQ ID NO: 454268 - DNA, 497 bp, Sorghum bicolor
atcacatgagttcccagcaagaagatactaagggaccttctgaggttcagagcttggtggaggaattcaatgatttgttccaacctccttcacagttaccgccgtcccatgcttgtgaccatgccattcctttgattccaggggccagcccgatctattctcgaccataccactttgcacctgctgtcaaggatgaaattgagaaacaagtcaacgaaatgcttcactctgggttgatacagaaaagctctagtccttttgcttcttctgttattttggttaagaaaaaggactagtcatggcattttttgtgttgattataggcagcttaatgcaattactcagaaaagtaaatatccagtgccgcttattgatgatttactagatgaattgggacaggcttcttggttttctaagttggatttgcgctctggattctgttgaatataaatgggcttttagcccaataattatatttgatgattaatttagggccc

SEQ ID NO: 454269 - DNA, 469 bp, Sorghum bicolor
gcacagatccctcccagcgtcaatgggaagtaaaaacctggtccgacgcacaagatctgaaaatcccaggcaccgatggcataccgggccgacgcgagatcacagtccgcagcatgatgggcgactttggcggaaacgccggtctgctgagtctctggttcgaccaggaatcttgggagtggaagtatgagtacgccacgtgtccgctgggaagccagcacttctggtggttcgtgcacatcttcgactttatcgtgctggtatggatgcagtcgtacgctgtgctctctgtgatggaggcttatggtgttgatgtggacgggccgttttggaggggcgtgtcacggatgaaggattttgtgctgcggcggaaacaaagtgtcagtgataagaagtaaaactatttggataaaacgatgtttgggttagtgatattttcttcatagaatacaaagcgttctgatttcgt

SEQ ID NO: 454270 - DNA, 498 bp, Sorghum bicolor
ctggcaggtgggctgctgctgggcggcggcgcgtcggacgagtactccgccacgacgacgtgcgaggaccaccagcccgtcaccggcggtgatcatgcggaggcccggaccacccccgcgctgctaaacctcttcaactaattaactgaccgaccatcgtcgtcatcgatcgtgttctccgtacgtaattaactgtttccgttgttccttccttgtaagatatgtaactgtgcagagagagagagagagagagagagagagagagagtcgttcatctcgtgatgggggcagggccagggtgtacgtgtgctacgtgattagttgcagggatgatcaatgggtgttggttaatcgacgtttttttttttttggcatgtgaaaatgcttgtgaaaagtagtaaagaagaaactcgccgattagcactgttaattgggtgaattaacgagtttttttttcttaattttaattgatgattcggttgcctcggcaccttgcta

SEQ ID NO: 454271 - DNA, 562 bp, Sorghum bicolor
tgcgatgcttgagaagtctgagagggagcttttgggtcataataatcagtatcttccaaagattgtgtctgtttttgcagagatattatgtgcgggcaaagatctagcaacagaacagactgccagcaggatgattaatctactaaggcaacttcaggcaacattgcctccttcagtattagcctcgacatggtcttctttgcaaccacagcaacagcttgctctacagtccgtgctgtcgtcatagctaaccaaataacctcaacggtgtaaagcatatgatagtcttcacagcttgaccttttgtgttgtatttttgtacttctgagccagggttcctggggtttgcttggcattcatgtgcccttaggttttgcacaaggggcgcttgcatccggtgtgtatatcggctgcagttgcagaactgcacggatgtgtacgagactgggctctctccacatcgtcgatgaagttgtaaagctatataccttgttcacttagtagttttagttgggttgaaagagttgtaaattaaaacaattttgatagttgatttattgtc

SEQ ID NO: 454272 - DNA, 528 bp, Sorghum bicolor
caagacatcccccacgtcgtcgaagaaggtgccaaagtcatcagagagaacaacgagcccagcatcgccaaccgcatccaattccaagaatacgacttcttccagaagcaaccagtcgtcggcgcggatatctacctcttgcgccagattttccacaactgggactttgaaaactctgtcaagatcctcaaaaacactgttgagtccatgggtcagaattctcacgtgttgatcatggactttgtggttcctgagcctggcactgtttcgtctgtgactgagcgtgttcttcgatctcgtgatgtgggtatgatgcagctattcaattcgcttgagcgagatcttgagggctggaaggcgattttggaggcggtggattcgaggcttaagattaatgctgttaacacgccttatggtagcttcatgtctgttattgacgtcgttctagggtaggggattaatagatttggatatacagttttagttatttgatcaagattagaaatacgataatattgatcgtctctt

SEQ ID NO: 454273 - DNA, 639 bp, Sorghum bicolor
taggatctctatcttgcctgaagaattgggtttgctgtcaaaccttcagcaactttctgtttctcaaaattctttactgtacctgcctaagagtgtaggagatttgcgcaatatgtcactacttaatgtatctgataacaaactgaagggacttccagaatcaattggagcttgcagttccctggaagaatttcaggccaatggaaacgctattgaagatgtgccatcgtcaatttgcaacctagtttgccttaaatccttatcacttaatggcaacaaaattcgtcagcttccgcaaaacttactgaaagactgcacggctcttcagaatttatcgctgcacgacaacccaatcacaagggaccagttccaacaaatggatggatttgaagagtttgaggcgcgcagaaggaagaaattcgacaagcagattgattcaagggtcatgatgggctccacggccctggatgaaggggttgatttccactgattttagagctcaagtgactcccattctttctaattggtcaggaccaattgtagatctgtacatatcagtctcacatcccgcaaagaaaaacaacagacacgcatattataacacatataaatgaaccgaattctgtcattttttcttgc

SEQ ID NO: 454274 - DNA, 463 bp, Sorghum bicolor
ataacatacagtgtcataaagcatcgcttgggtgatctattttatcggctagtatctcaaaagtttgaggatcctgccgaaggcgaagaagctttggttgccaaatttaagaaactgtatgatgaccttaccaatgggttccgcaatctagaagatgaggcacggtgaagtgttgtagattttgtgtaaacaataaggaccgccagatgttttatataagatacggaggttgtagattgagatcatgtatgagaattttccccaccgctgctccatctctttgccaccactgttttagtcatcagtgcccgatgggaccctgtttatttcaatgtatcatttattgctatcattgtaataagcgatgggcatgcttgtagttgaataagtacaatgtccatgtattcaaacctcagccatcatgtttatttgtttgttgaaaaaactatgctgtcttcttggg

SEQ ID NO: 454275 - DNA, 455 bp, Sorghum bicolor
ggcacgaggagatagactagtagtctctgcatactatctctatcttcatacaactctcacatctcttcatcaccatgaatcggcaacaacattacacacagccgtaccagacggcccccacccacaggtacccaagcaccagcagtgccttcagtgccagcgcaaaccccaatgaagactggaccaagatcaccgatcttgctgagcgcaggaggatacagaacagaatagctcagcgcaactaccgcaagaagttgaagaagcgcctggaagacctcgagaagcgagctgcctccaactcggcgtccccggaacagaagccggtagagctggaaagacccagcgcccagaagaagaacagtacatcctccgagtcgcgagaccctcatagcttctccacgttcgacagccagacatcccaagcctcatcgatgcaattcatgccttttgacgac

SEQ ID NO: 454276 - DNA, 429 bp, Sorghum bicolor
ggcacgagggtcgggtccctcctccagaacagcgaggcgccgaagcagcaaccgccgctcccgagtccgccgccgccgccgccgcgccactccaactgatggcgggtaagggtattcttcattttgatggtgcttcaaaagggaacccaggaaaagcaggtgctggagctgtgcttatgactgaagatggtagagtggtatctcggattcatgagggccttggtgtcgctactaataatgttgctgagtatcggggcctgaccttaggactgaaacaagcgattgatcatggattcacgagtattaaagtacatggcgactctcaacttgtctgcaatcaggtatccttttcactataagttatcaaagcttcatcccttacttggttctctagcttctctgttttgtcatgatagacatgtcgccctg

SEQ ID NO: 454277 - DNA, 465 bp, Sorghum bicolor
ggcacgagggagattcaatatcttcgagtggccatgggtcatgaaaatgaatcttttgaggactttgtgaaagcacatgatgcatgccaagaggaccttatgttttttcctactaacaatagctatggtttagctagtgttgctggaaatgctgataagatttctgctttgcaaaatgagtttgaaactgtgaagaagcgaatggatgatgaagctaagaaggcttctcggcttgagcagaagattaagcttctgacacaaggatatcaggtacgggctggaaaactgtggtcacaggtccaagatacattcaagcaaatggacactgctgcaacagaactcgagtgcttccaagagctgcagaaacaggaacatcttgctgcttcgtatcgaatcctaaatttgactgaagaagtgaataaacagaaagcactagaaaggaccctccagagccgctatggtgag

SEQ ID NO: 454278 - DNA, 363 bp, Sorghum bicolor
ggcacgaggcaccgcctaaacctttagacacagcacataatgtgcagctattcaagtcatcagatttggcgcctgtttcttcgatctttgcctcaccacatgttaatccagcaaaggaaactaaagttttgatcagggatgaatctgttcagcttcctcaagaattgcactcacctagcagtgtcaggactcgaatatgtccctcaggctcttttagaatgatcagatgcaaagacattgtgtcagagagttgcaatatcacttgtcaactaaacgaggcatctattgattcttcagatcatacatcaaactctacaggccaattgagtcaatccatacaggatgctgctggcagtatggaaa

SEQ ID NO: 454279 - DNA, 449 bp, Sorghum bicolor
ggcacgagggactcaccgacagacagtcaccggcaacaagcagcatcgacaactcgacgacgaggggaagctttgcgttggtgtggctggcaatatgtcgtcgtccgcgggtaacaagaagacgatgaagacggcgtgcgttactggagggagcgggtacatcggctccgcactcatcaagttgctgctggagaagggctatgccgtcaagacgacggtcaggaaccccgatgacatggagaagaactcccacctcaaggacctgcagaagcttggaccgctaacggtcttccgcgccgacatggacgaagaaggcagcttcgacgacgctgtcgccggctgcgattacgtcttcctcgtcgccgccccgctgcacttcgaggcacaggatccagagaaagagcagatcgagccggctatccaaggaacgctcaacacaatgaggtcgt

SEQ ID NO: 454280 - DNA, 429 bp, Sorghum bicolor
ggcacgaggtccccccgtatccatctcattttcccctttccccaggcttgtctttgccagaactcgctgtgcgagcacattcaccaccatcatgaagtacagcctgatcgccgcgctcccggctttggccgccgcgtcgcccaccttctcgactgagacgattcacaaggacgctgctcccgtgctctcgtcgacgtcggccaaggaggtccccaacagctacatggtcgtcttcaagaagcacgtcaaggatgcctccaagcaccatgactgggtccagagcgtccactccaagaacacgcaagagcgcatggagctgcgaaagcgctccagcgacctgcctgtgagcaacgaggtctttgctggcctcaagcacacatacgagctggccggcctcaagggctactcgggtcactttgacgacgagac

SEQ ID NO: 454281 - DNA, 459 bp, Sorghum bicolor
ggcacgagggagagagcctgcctccactcttggtttggttggccccctggctggcggcaccacactagcctagtgagtagtgcagcagcggcagtcttgcttgctcggttgctcctactacctgtcctgcacactgcacaggagcagcagagcctagctaggaccgtcgtcgtcggcgaaaggggagcgggcggccatgaagtacgtgctggtgaccggaggggtggtgagcggcctcggcaagggcgtgacggccagcagcatcggcgtcgtgctcaaggcctgcggcctccgcgtcaccaccatcaagattgatccatacctcaacactgatgctggaaccatgtctccattcgagcatggggaggtgtttgttttggacgatggtggagaggtggacttggaccttggaaactacgagcgttttctggatatcaaattgacccgtgactacaatat

SEQ ID NO: 454282 - DNA, 192 bp, Sorghum bicolor
ggaagggctttgggacatctgccgctgcaagcagcctgaggtgtactggaaagcgaccatctttcccagacattgccaccacaacataaccggacatgcaggctcttgtgattgtcccggaggagcgcaaccaccatcaccgccaccctggtgcccgtagcaagtcatcgggtccacacttttcatcaccgc

SEQ ID NO: 454283 - DNA, 487 bp, Sorghum bicolor
ggcacgaggctgacatcttcacacactgctctcatcaacaccttttgatcctttactcagcccacaactcacactctctcctcctctcagctcccaacaaacacctcttgtcaacctccccttctcccgtctccgccatgtctgcgaacggccaacacggtggtgagttcttccccggcatcaacaagatccaatacaaccccaaagccgcccccaccgacaccctcgtcttccgccactacaatgccgacgaagtgatcctcggtaaacccatgcacgaatggctccgcttcgccgcgtgctactggcacacgttccgaggtgtcggactcgacatctttggtggtggcaccatcaaacgcacctgggacgatggcactcagtcggtcgacaatgccaagcgacgcatgcgtgcagcattcgaattcttctccaagctcggtgtgaagtactggacattccacgacagagacatatcaccggaggg

SEQ ID NO: 454284 - DNA, 498 bp, Sorghum bicolor
ggcacgagggttcaggtagatcccagtgagcaggaccaagttgcacagaagcttcttagagaatatcgatgcatacctacttttctcccatctgacctgcagcagcagttctatcatggcttctgtaaacaacaattatggccactttttcattatatgcttccaatttgcctagacaagggtgagctatttgatcgcaacctatttcaagcctatgtccgagccaacaaactttttgcagataaagttatggaagcaatcaatacagatgatgattgtgtttgggttcatgattatcatctcatgctgctccctacattcttgaggaagaggttacaccgaataaaaattggtttcttccttcacagcccttttccctcctcagaaatctacaggactctgcctgtaagggatgaaatcctgaagtcactgcttaatgctgatctcattggtttccaaacatttgactatgctcgccacttcctatcttgctgtagc

SEQ ID NO: 454285 - DNA, 474 bp, Sorghum bicolor
ggcacgaggcagtgaccatgttgtcttccaagtcgtcctatgctgccgcagctgtcgtgctcgccaatctcgccgcagttgcccacgctcagtcgtcgggagcgtcggcattcacgcccctcgcatcccagagctttgcgtatacggctctcccataccaggcagacacgggaacaggtgaacgtggtccccagtctggctacaacatttgcaactcgaccaccgagaaccaacagtccttgtgccagacggccattatcaacagcattgacgacttttgcctctgggctccccaggatccaaacagtttgatcggaaacgtcgaaggcgagtgcgttgcctggtgcacaaagcccggacatggaacgcgcttgattcctgctggcgccctcaccgccgtccaatttatgaagacacctgattacgtccaagtcactggtctcatcaaccaggcactcatcaacattgcctcca

SEQ ID NO: 454286 - DNA, 425 bp, Sorghum bicolor
ggcacgaggctggatacctggaggtgacgtggggccgaagccagagaagatgcttcaaccgagctttggggagcctggacaatgctttgccatgcagggtagcagtgggtttgttgagatcaagctcaagtcgggaataattcctgaggcagtaacacttgagcatgtgtctaaggatgtggcgtatgataggtctacagctccaaaagactgtctggtgtctggatggtacgaggagacgcctggtgagacccaattgggtcatgctgcaaagatggctttggtagagttcacgtacgacttggagaagaacaatgtgcagacatttgatgtgtcagccccagatgtaggcgtgatcaatatgatccggttggatttcaattcgaatcacggaagctcgcagctgacatgcatctaccgcctcc

SEQ ID NO: 454287 - DNA, 464 bp, Sorghum bicolor
ggcacgagggtggtggcatcgccaattcaactccgcatctgatctgcatccgcatcggcaccagcgcgattcacaccgcccagcgaccaggcgggagaggaggcagcaccagagtgtaggagatggcgctcacaagaattggtcttgctggccttgcggtcatggggcagaaccttgccctcaacattgcagagaaaggcttccccatctctgtctacaacaggacaacctccaaggttgatgagaccgtgcagcgtgccaaggcagaaggaaaccttcctgtgtacggcttccatgaccctgcatcctttgtgaactccattcagaagccgcgtgttgtcatcatgcttgtcaaggctggtgcaccagttgaccagaccattgcgacgctcgcagctcacttggagcagggtgactgtatcattgatggagggaatgagtggtatgagaacactgagaggagg

SEQ ID NO: 454288 - DNA, 499 bp, Sorghum bicolor
ggcacgaggccaaattcttaccagggtgatgacaacagaatgaagaatatgcagtctgaggcctcacaggcaatccggaactctaagtatctgaaggcagcacaggagttgcttgatgagattgtcagtgtttggaagagtgttaaacagaaaacagataaaggccctgctgaagcaggaaaggcagatggaaaagagactgatggggggactaaaagtgatggagtatcttccgatccacaagagtctggtgccaatgcagcagctgagctttcaactgctgagaaacaagagctccagaataagatggcgaaacttatggcaatgttagacgaggtggatcgaaagtacaaacactattatcatcagatgcaacttgtaatgtcatcgttcgatatggttgctggttctggagctgccaagccttataccgcagttgccctccagacaatctcacggcatttccgatgtctaaaggatgctatcaatgatcaaatta

SEQ ID NO: 454289 - DNA, 459 bp, Sorghum bicolor
ggcacgaggcaccgctccggtcgtccccaaatctaagcgagacggggcgcagggagaggagagcctaaaaccctaacccccccgaatcggatcccgccgccggagcgccgaacccccgtccctcggcccgccatggagatgggagggatgagtgatgcggagcggctgttcttcttcgagatggcctgcaagaactccgaggccgtgtacgagcagaaccccaacgacgccgacaacctgacgcgatggggcggcgcgctgctggagctgtcgcaggtgcgggccggccccgacggcctcaagctccttgaagatgcggaagccaagctggaggaggcactgcaaattgatcccaacaagtctgatgcactctggtgcttgggaaatgctcagacctctcatggattcttcactccagacactgcaatagctaatgagttctttgcaaaggcaaccggg

SEQ ID NO: 454290 - DNA, 490 bp, Sorghum bicolor
ggcacgaggcctccctccagtctcctccgggtcggccggcttctgctcctccctcacgatccaaactcccaaccaaaccctagcgggcggcggcgtgtactccctccggcgtgcgcagagacaggcgaggacgctgggcagtgggcacgggcagctggggggcgccggctaggaggatcgcggtggggcggcggccgctcggctcgtggtggggcccgaagccggcagcgcgcctaggcggctgcgccgcggggtggccggcggcccggctgctcgggcgtttgagcgactggaagccagcgcctatgctggcagcagcagttctgcaacctgcataggcaccgagggcaggagaaggtctgaccgattggagtcttcagcaatcttcagcaagctatcaactgggaatccaatttgctaatgctgctaaatggctcaaccttctgtcattctagctactgcaagttatgatcacacaatcagattttgg

SEQ ID NO: 454291 - DNA, 502 bp, Sorghum bicolor
ggcacgagggtgatgtgaaggcaggtaatatccttattgataatcctggtgtagtcaagcttggggactttggtgtctctgcttgcatgtttgacaggggtgataggcaaagggctaggaatacatttgttggaacaccatgctggatggctccagaagttctccagcctggaactggatataatttcaaagctgatatatggtcatttggaataactgcactggagctggcacatggacatgctcccttttcgaagtaccctcccatgaaggttcttctcatgacgctccaaaatgctcctccaggtcttgactatgaccgtgataaaaggttctcaaagtccttcaaggaaatggttgcgatgtgcttggtgaaagatcaaacaaagaggccaacagccgaaaaattacttaagcattcttttttcaagaatgtaaaacctccggagctaactgttaagagcattttgactgatttgccccctctttgggaccgtgtaaa

SEQ ID NO: 454292 - DNA, 603 bp, Sorghum bicolor
ggcacgaggattttgcatgattcagtccaagagttggctgatactgttatagcagttgttcgacgtcttagattgtgtggtgaagatggaaaggacatatttccacttgttttggttggaggggtccttgaaggaaataaaaagtgggatatcagtggcgaggtcataaaatgtatttccaaggtcttcccaggcactgatcctatttggcctgaggtggaaccagcaatcggtgctgccttgctagcctggagccatcactgcaaagggttgaaattggagaatggaagttgattcccggcatttaaggatgtcaattgtatattgaggaattggccacccaaaggagaaatttgatcccaaagatacattcatcggcatgaagccctttggttcccaccaagtaataaatcccggatggatgcaaacataaggtgtggataaaacatatttctgatgtaagtagttagtgtgtcaaaagaattgttcaatagccctctgattctaactatcggtgattgttgtatgtgtcctgtttgtgtttggggttaacatctgtgtcccatggataataaatcttcaaattgtgtatttttttttcct

SEQ ID NO: 454293 - DNA, 563 bp, Sorghum bicolor
ggcacgaggcgagtccctagtcctgccggcggcgctgcgcggcgtggccgcgtgagcgggtcgctgatagcctgaatgcctgatacgctcacggcgatcaagagggttgagttgagggtagctctcggttcactctctcgctcactactgcccgctgctccgccgccgctcggtcggccgtcgcgggcgtccccaatccgcagctttggtaattggttgcgtattccctcatcattgcaatggcggggtcacttatctctccctcaccttctgtggatctgaagacagagaagcctaatgagatgattacaagtggtgttctttcaagccttcagaatttcctacacaagtgcctcatagctatcctttcatatggcccaatgccaaagcacattgcatttattatggatggtaatcgtcgatatgctaaattcagaagcatgcaacaaggagctggtcacaggatgggtttctctgctcttattgcaagtctgctgtactgctatgaaatggatgtgaagtacatcactgtttacgcattcagcattgacaattttaaaagg

SEQ ID NO: 454294 - DNA, 537 bp, Sorghum bicolor
gcggtcgtatgcgaagcaaccccttctcacttcaggtttggtttgcatttccgttcaagtataaaggaagcagtatttggcatggcatttgaatagcattggaacctatagaaaaaaaagtgttccagcagtattacgttacactggtgttgtactgttaaaaaacatggtggacgtagaactgttctataaggacactagcgatcacagcatcagctctgaggaagaagatatgcttatcaggagttgtagcaatctcaatgtgagttttggataccattgtgattcttctcagagcttttctcctgaaaatgatcatgggaatggcatttctcctaagaacatatttgggactaataccatgatcgggtcacgaaatggctcatttacttgtttatctggtgctgctattagtgcaaattttacactggcaaacacaaatatttgcaatggtcttattggtgaagaaattttaccagaactagattctccaaactccttcagaaaaatcgtttcttctccatcaatgtcaagatt

SEQ ID NO: 454295 - DNA, 410 bp, Sorghum bicolor
ggcacgagggttgatcaaaatatctcgctgcgcttttgcgagtccttttccctccaaggaacagaaacacccggcgcttttaccccacccgcacccgctttcccctcccggccaagaacaggagcaacaacaaggctcctcctcgagacattccattcatccatggcgaagctcgtgaacaagctggtcgattcgttcgaggagcaagacaccccggacgtcggctgcgtgcgcgccgtgctggccgagctcgtcctcaccttcctcttcgtcttcaccggcgtctccgccgccatggccgccgggtccggcgtgaagcccggcgaggctatgccgatggcgacgctggcggcggtggcaatcgcgcacgcgctggcagccggcgtactggtgacggccgggttccacgt

SEQ ID NO: 454296 - DNA, 515 bp, Sorghum bicolor
ggcacgaggcttacatccataccttcaatatgagcatgctttcagctgaagtcacagaatggggccaatctcccaaatctgtaaaagtcgtccctccccaaactccagtcaacgactccgaaacagagatccgtgtcatcgctgccggtcttcaccagctcgttcgctcaagagcagctggcaagcactacactgctacagaacttccccaccgacctggcgtagacggtgtaggcgtcaatgtatccacgggaaagaaagtttacttttctctgctgggtaccacgcagggcagctatgccgagatcgtcaatgcgccctcgcacaatatcgttgagttgcccgagggtgttgatcccgttgtagcggcggctttgatcaatcccgttatggccagttggatggcattgagaaagagagctggtttgaaggagggggctgcgttcaaagtgtttatcaatggtgttactactgcgagtggaaaaattgctattcgagttgcgagaagccttggg

SEQ ID NO: 454297 - DNA, 194 bp, Sorghum bicolor
tacagttggccttatggctgctccagcagggaagaatgtgcgccttcagaggagggctaacttcagagtaaaagcagccaaggagctgtacttcaacaaggatggctcagctatcaagaagctccagactggagtcaataagcttgcagacctagttggagttacacttggaccaaagggaaagaatgtcattt

SEQ ID NO: 454298 - DNA, 499 bp, Sorghum bicolor
ggcacgaggggcgccctgacctgtcctttttcctcgccttcgatcggcggccgcctccctccacttccgtcccgccgccgccaccgccgccatgaagggacccggcctcttctccgacatcggcaagaaggccaaggatctactcactaaggactacacgtacgaccagaagttgaccatctccaccgccagcgcctctggagtgggccttacttccacagctgtaaagaaaggaggtctttattctctggatgtcagttcagtttacaagtacaagaataccactgttgatgttaaagtggacacagaatcaaatatctctactacattgactgtgttggacgccttgccatccacaaagcttgtcacttctgtgaagctgcccgactacaattctggaaaggtggagctgcaatacttccatgagaatgcaacctttgctactgttgttggcacaaagccgactcctgtgattgatctttctgggacagtaggcgct

SEQ ID NO: 454299 - DNA, 423 bp, Sorghum bicolor
ggcacgagggtttactttcatatctttttgtataggctcagcaacaagcaacaggctgtgttatcgtagttgctgcttctctcccaaagtaacctgattgtcgcctttcccccttgcaatcgccaccgcaaagctccaataccgcagacatgtctgctgtcaacggcgctggccacagcagcacctccaaggccactgatcaagatggctcctcggctcccggcttccagccccagaacaagatgacggtccagccgcctaggggagaagacctccaggttagctatgccgctgaaattggaggcgaggccaaccccaagggctggtatggcagcatgatcaacaatcttggcgcatgtattggaacatgtggcgcaattccctgctgcatcctttgccccaacccttataagcacgttaacc

SEQ ID NO: 454300 - DNA, 493 bp, Sorghum bicolor
ggcacgaggccggagcgtcaggataagaaaagagcgcggcggcaggcagctcctcctgcggctgcgagcgcccgtccatggcgtccctctccccttccctccacctcccctgcaattcaagaactggtttccttggaaagacacatgggattcgtcctcgtgttctccctgctggaagagtcggatttgtcagaacagtagtggaatgcaaggaatctagaattggaaagcaacccatcgaagtcccatcaaatgttactctcacattagaggagcaatttgtcaaagctaagggtccgcttggggagttatctctaagctttccaggtgatgtgaagattgtgaaagaagaatctggtatgctgagagtttataagactgcagagaccaagagggcaaaccagatgcatggacttttcagaacactgacagacaacatcatcgttggtgtgtccaaaggattcgatgagaagcttcagttagtgggtgtcgg

SEQ ID NO: 454301 - DNA, 512 bp, Sorghum bicolor
  unsure (1)..(512): unsure at all n locations
ggcacgaggccaaggccaagtccacctatgcctcctctgctgacctgggatggagctttgacgacaccgagaggctgtacaccattcccttcagcaagttctccggtctcaacacggctaagctcaccaccatcttgttctctggctttaccggcactacttcctttgggcccatggccttctactgtggcacctcgggagagtacgttccgccgcctccggcatccgaccctggtgcttcagccacggttcccgctcctagcaacccttcggctaccggtctggtcattgacaagtttgccaacgccaacaccaacgctatgggcaactggcacggcggtgacgagggaatgactctcaagtacaacaacaataagcttaccatcacgtcccccgacgccgactacgccttctacacccaggtgtccagtggatgctccgacttcacaaagtacaagggatcttatctccacattgcctactcgggtaccacggacttcactgtcgctntc

SEQ ID NO: 454302 - DNA, 567 bp, Sorghum bicolor
ggcacgaggcacggctcttcccttgcgcgtgtttcgaaattggctgtgacagttactgttgtttttgttggcgcctaaaagttcagctcatttcgggaacgtttgcagctaccttaccacattcctttggaatctttggtaaagcaccttaccctgtgagaacgacgatttcgcgtttcgcatccccatcactctcctcagaagcatttcattgcttgtcccggcgtgacggcgtcttagaggcttgattcgcatctgtacgaacacttttcggagtccaattctcggttatcagattcatattctttaaggattagactcggcgtgaaggtcttgcgatccaaaaatagcgacttacttcgttgtgctttcggtactcgattctctgacgctcttctacgacttttttacgacgtgtacgagtttactacccacgtcttcttttattgttgctctgctctgtaaagccctgcaacatcttgctttttccttgaacatataaagctcgtgcttggttcttgactctgcgcattatggatttcgccggtgtcccccccaacaacgcag

SEQ ID NO: 454303 - DNA, 401 bp, Sorghum bicolor
ggcacgaggctatactggaaatctgttccatgacttcactgacgtgatggtccctcttttcacgacagcaagtgagtttaatggagaagttcagttccttataacggacatggcactttggtggacaatcaagtaccacactgtgcttcagaagctgtccaagtaccctgtcattgatttcagcaaggatgaccaggtgcactgcttcaagcatgtcattgtcggcctccatgcttacatggaattcacgatagactcgtcgaaggctccacacaactattcaatggttgattttaacagattcatgcgcggagcttactcactgggcagggacaccgttaccgtgcttggagagtaccctaaggtcaagccaaggttgctcatcatcaagaggcaccgta

SEQ ID NO: 454304 - DNA, 488 bp, Sorghum bicolor
ggcacgaggtcttcagcagccgctacatgcagctgtgtgaggtcttcacattcggtggcagtggcgatgctcggtggagaggaaagaaggccgctcaggatcgtgttgatatgagcccgctgagcagagtcgtcatcgatggagttgtgtattttctcttggacgaggatctgatcaaccgacaagttctaccaaaaggcattgcttcctttgaccttctgacagaagagtggaggtcaattctccgaggacctgtaagcatccctgcttactattctaatctttctctggctgcccttaatggatccttagttctggtccattgtatgttacatgtttcgatggacctgtggtttctggtggacactgaaaagaacttatgggtcagaaaacataccgtagagatcaatttgagtatccatgatgaattccttgcacatcctttggtgatactgaagaatgggagtatagttacttatattggatct

SEQ ID NO: 454305 - DNA, 453 bp, Sorghum bicolor
accggctcccatcatctcagacctgcttctaccggctctgcctccctccttatacatccttgaaaatgatggaaaaccagctgcagaagatcacacaagagcatgtgagctgcagcttcggtacatggtagttgctgctgctgttctggatcctgaaccggtatattctgtacatatggtaggctagtgacaccctactgtctcattgaatctgttcctagagcttgaggaggtaataggctgtctttctttttcatgtatcgtgagttagtctccgagacttttatttaatcatatctaatgcagaaggaattgatagaaagcaggttccttttgttttctaaagagcagtgacgctgtgtagtccagccggtggcagtaatgtaacatgtgcatgtagccgcattgttctcagtattgaccctccgattaccaatgaacggctggtgggct

SEQ ID NO: 454306 - DNA, 464 bp, Sorghum bicolor
agatttgtggaaatggttgactagtcaggagcagccaccagaggatctgaattctaatcctgtgtttgctgccatcaaatcaaaggttacagataacctgacaaagcatgcttctcccgagacccgatcaacaccaggtcaaccatgggttagaggatgggacgacataaagaaaggcaaagatggacccaagtatggaaatcagtgataagctgcttgaaatggggatgacagctttacatcctaaataatagctgtccgtttcccccatctgcttgttttgtgcttgtgtagaataaagtgaaatgtgatcagcatgtgtgaagtttgttaaaatatattggtgaatcagaatcagcttgtaactatggatggcacttttgatgtgtccctagcagttccaggtatcgtctactactggaaagatgttatgcattgcagcctgttaatgatggcaatcattg

SEQ ID NO: 454307 - DNA, 437 bp, Sorghum bicolor
atggcagcattaaggcagaacacatttcaacaggtgatcagctggctgacattctcaccaaggcactgggcaagaccaagtttgaagagctcaggggaaggatcgttctggaggcaatctcagcaaaggggaacaagaccaagggggagaattgatagcagttggtcatgtatctagtttagcagggcctaagtattgcccgttgcagtttttctgttttctttaccttggttgtttatgtggctgtaataagcttgcttgggggtcaagaagataaaacccttggcagccaagtaatcatggcatctactttagaatatgcttagtcctaggggtggctctcagcctataagagctgggttttctgtaaccaagacttccattttccacttcaatcaaaaggccatagcaggcgaactgccctctggctgttaccc

SEQ ID NO: 454308 - DNA, 534 bp, Sorghum bicolor
aagaacagaatattaatatttgttttatacaaaagagaagcaccaaagattgaaggattattaaaaagacaaggatataaagtagctgctattcatggtgatatgagccaatctcaaagaattgctgctttacaatcttttaaagatggtacaaatcctcttttagttgcaacagatgttgctgcaagaggtttggatattccagatgtagaatatgttctcaactattctttccctctcactatagaagactatgttcatcgcattggccgtactggacgtgctggaaaaactggtgtttcttttacaatgttcacttctcaagataaattgagagctgcagagcttgttgctattttgaaggaagccaatgctgacattcctcctgccctcataaaattaagtagctatggatccaagaagcaagagcacgctctttacggcgcccacgccaaagattttggaaacaagccaatgcccaagagctcacatgttaagtttgatgactaacttggtacaaataaagaaaattta

SEQ ID NO: 454309 - DNA, 386 bp, Sorghum bicolor
atcttcatgtccattctgtcttgattgaagtcgatcgctggaatcaatggacggtcgcatttgggagcctgctgctgctcaaaactttcagcttagcaagaggaaaggaggagggggatgatgatgatggatcccaagagtctgtcggaggctcggagcaaaagctagaactacctatcttctttagcaagtatatatccataggcagtagagtatgatcaaatgatcatttaggtaattatttattattttatttgtgttgggctgatgggctgacctattagttggcgattggcatagctcaaacccaatcttggaaaaagtagtgaagggttccatttttgttccatgtatattatctcccttataattttaaatcccccctt

SEQ ID NO: 454310 - DNA, 342 bp, Sorghum bicolor
ctccctccccctgattcgctgccatctggtctgggagcccgagtgggcggcagcaggagcccacaggcggcacgccaaaccaggacagccatggtcgtggtcttcgaggccggacgggcgacagtagaagccagcaggccaaacgcatccagctcctcagtctggctcatcgtcgccagccacaccctttgcccagttgattagaggtccgacagccgggagttactctttctgatcaagatgccagaaagaaatttactcaaatccagcagaaattggttgttctactcattgtttttgatcctcacttctctcccaggttggtgactagctctttatcgt

SEQ ID NO: 454311 - DNA, 492 bp, Sorghum bicolor
cttactggcagggcgttccgatcaaggaggctctgcagaagaagacgttccagaactcgtactggagtgtgcagaagcacgtcaaggctgttaacagcaaggctgctgtttgggttggtgagacgggttggcctactaagggccctaactaccagaaggccgctgctactacggctagtctgcagagctactataacaatattgggtgctggttgtggaagcagaaggatgccagtgggttctggttcactgctttcgatgccccgttggctacgcctgctggttgagaagtactttggtattgcgaacaaggaccgcaagctcaagttccccctcccttgctagatggagcgtatctgatttcaaggtatattttttgaagataggatctggctgggaaacaggcgctggagactcatagcatatacattcattcatagactatttcattcaaaagccagcggggtaaaaatataatggccttgtaattcc

SEQ ID NO: 454312 - DNA, 515 bp, Sorghum bicolor
atgctacgaactactctcccgcctctgagcccaccgtcttcaccgttggcgctaccgacagctccgaccgccttgcttccttctccaactacggcactagcgtcgacatccttgccccaggtgtcagcattctctccacctggatcggtggccgcactaacaccatctccggtacttccatggctactccccacgttgctggtctcgctgcctacctcctgggtctcgagggcaagaagacccctgctgctctctctactcgcatccagaccctttccctcaagaccaagatcagcggtgttccctccagcaccaagaactacctccgccttcaacggcaaccccagcgcttaaccggttgattggttggacgaattctttcttttgtatctatcttatgagcgtatgatggctggattgcgcatgccatgggttggtgcatggatctctgggagatagcatgagtgtatatacggttgaacgaacttgattgggatttttcctggatatcccta

SEQ ID NO: 454313 - DNA, 437 bp, Sorghum bicolor
aaccagctgcagggtcctatctgcgcgggcgtgcccgcccgcaaggtcgccaacttcagcggcgtgcaggaacctaacctgtcctgctcggagatgttcgacgtctatcgcaagccctttgcgctgtaaactgccgtctctcctctggctttgccattgcagactacatactgctgccgtctggactctataaaatgccttgtcgtcggaactcggaacaataaaccagacgggtttaagcatgacatatgcttgctaatgatgtgtgtctaattgtctatgtgtcaataatgtgtgtctgtctatgtgtcaccgccgtgaggcaagctcatagcttgtggaggacccaatgttgatcatatcgtccatggctcccgagcctagtactgtaccttatggcggctccattgtaataataaggctattgtttctctttt

SEQ ID NO: 454314 - DNA, 145 bp, Sorghum bicolor
ctaaatactgtatgtggacgggaagttagttcaaatctttcttttggtgacttcaggcagtgtcctgctgctgctttcaactagatttcctttaagcgtctatgtaactaaactgtcgaagttgtgctgctacttttacgtccat

SEQ ID NO: 454315 - DNA, 864 bp, Sorghum bicolor
ggcacgaggcttgatcatccttcttcttcttcctacttaatatatactgtatagctctagctctgcttccgatcctgtacgtacgtagtacccactacactagtacacaataagtagctaggcagcaatggcggcctcatcagtgacgacgacgatgatgagcttccggccggctgctgcttccctgctggtcctgatgttggtggtcgtcggcagcagcgaggtcgcggcgtgcggcagctgcccgacaccaccatcatctcctcctccaccgccgcccagcagcggcggcacgccgtgccctccgccgccgtccagctccggtaagtgccccaagaacgcgctgaagctgggcgtgtgcgccaacgtgctgggcctcgtcaaggtctccatcggcaaggtgcccaccgactcgtgctgcccgctgctggacgggctcgccgacctggaggccgccgtctgcctttgcaccgcgctcaaggccaacgtgctcggcatcaacctcgacgtccccgtcaagctcaccttgctccttaactactgcggcaagagcgtccccgagggcttcgtctgcgcctaattatataaaccattatatattgtcatgcattcatgtcactgtgattctatcttcttccggatgtacgtttttgtaacgcgcgcattattgttcgttatattacgttgttgcctgccttctctttttttactcttcctcacttgcattacattacatatatataattgcgtgacaatacaaattgggtgtaaaaggaagaaatgcatggtccgtcaacgtacaataagaatgtactagtttatattttcttggtaatttaaatggaacttgaaagatttgtcgga

SEQ ID NO: 454316 - DNA, 465 bp, Sorghum bicolor
acaaggccaacgtcaagcaggtgttcaaggatttcgccgtcgagacccagttctcggatcacgatgacatcgacgagcagaagctcatcgccactgtcgtcaaggccggtggtgccaactacatgggccagtcctctcactaaatgttacttcaattccactccccgatggagcgacgtgcccttccgtctttctcgcaaggagcggaaaacgcgtcgaccatcttctttcctcctctcgcttccccattccttagtttattacatcagtaccactacccggcgctcccgacgaagatcttccgtccagacctggagcctgactgctcagccgcgacgatccactgtgccttcatctactcgcctacaccctcgtcaagaggagtttttcgtatgcgggtgtcttagtgctggttgagtttcggcgaggcagtctcgcttctcccgccaccaataaactttttgt

SEQ ID NO: 454317 - DNA, 416 bp, Sorghum bicolor
aaggctcagaagaaaactgatctgtatgctgctcattgttgtcaaagctgccatttccagattctcccagcagctacagatatgcatggacatttcttttcactactaccgaagttttggactgagaaagtggacactgcatctgctagccatagctcactaagagatcagatagcggactacctgctggatgaagacgatgaaaactgacattaatctctgatttcatgacataatttggagtcacaatgtttaattcatatggaatgtctgaatgctggtttataccgacatgttttgtttgttgtacaagaagacaccgcattggcgtcacacaggcatatgccaaacttatggataacagtgtttcttctttttttctcccgacgaaaccaatgttagtatgacactgctct

SEQ ID NO: 454318 - DNA, 454 bp, Sorghum bicolor
gacctgctgtacagagagcggccaaaaccaatcaggctcagggctaggcatagtttgctagtttcatttacatggaccccagcttgttacggtagtgcccgtggcgggtaaggacttgtattcgagaatttggcctactttactttcatttcatgtggccctcgaggcagccactcgttgcttccgatgtggttaatggccctgcttgtttgcttgtttgccgggccacttttacttgttcctttgctgttcttttgtttgtttcttcctttcgtcactatatcactcccttcactttctgaaccggttccatcttcatttatctacacttacctttgtcagtcttttgaaattccctttgtcattccctttgtctcttattatctgtcttctgctttcttgcttagtccctcatttacattactatataacaataaagcacatatttgttgca

SEQ ID NO: 454319 - DNA, 554 bp, Sorghum bicolor
caacgccgtcatgttccaggtccagctgatgatcaacggcgaggagcaggaaaagattgctcgtgagcgcatggttcgtttccgcaagaccatgaagcagtacagcatcgaccagggcgctgctgtcgactgggaatatctcaactacgccgactttacccaggatcctctctctacttatggacctgagaatgttgacttcattcgcaaggttgccaacaagtacgatcccaagggagtgttccaaaccagattgcctggtggattcaagatctccaaggtcgcttgagcatactgtagtcttcaataagaatataaatatagatatggcacgtcattcgtgttaattgatttctgagctctaactactatgccgtcggtatgcgcctcacctcggcaatgcgtctcgacagggtcctagcaccagtcgtgatagtgcaatacagggtaagaaatactctctagataaaaaccactacgcttaaagacagcagttatatagttctaagtgtagtgataattatttttattagaaaatttaagttcttactttt

SEQ ID NO: 454320 - DNA, 495 bp, Sorghum bicolor
atctccacactattggcaactccatcaagaagacccaccgtgtgctgatcgtggaggagtgcatgcgcacgggtgggattggcgccagcctgaggtcggccatcatcgacaatttctgggactaccttgacgcccccatcatgtgcttgtcatctcaggatgtgccgacgccgtatgctgcgactttggaggatgcaaccgttgttcagcctgctcagatcgtggccgcagtcgagcaaatatgccaatagattgtgtcctggtacgtttgagagatcgttgttgccatgaaaaagcttttcgtttgttagtttttcgctgtaactagcattcgttggggacttgaggtgtaggcttatagtcgttctgttgttttaagatgtataattcagctatgtggctgcacggagttgatcttgctccattatctgcgctatacaatgccaatttgatggtttgaacattttcattgttgacagaaagaatcattgtact

SEQ ID NO: 454321 - DNA, 546 bp, Sorghum bicolor
acgctgttgatgagtgggtggttgaaactcgcaaggagaagaagcaaaaggagatcgaggatgcggagaagcgacgcaaggaggaacaggaggcccgcaaagcggaagccaagaagaagcgcaaggaggaacgagcaaaggcgaagaaggccaaggctaaggctaagcgaaagagtaacggcgagagctctggttccgactcttctgattctgataccgaatccgagactgaaaaccgcaccagcgaaaagaaggatgaaaagaaggacgagaaggacacggagaagaaatctgaagacacgcctaaggaagctgaggaaaacaagaaactggaggttccagatgaggaatcaagcaagtccaaaggaacatctgattctggatatgacacccccaacactgctttgtaatcatttgcatgagtggaagagtctcatagagaacgcatacagctgcgttggatggaagttttctgcatttgtcaactttaaagattgatcatcttgaatagcgtcagcgtcactttttcaaatacacttaatagtc

SEQ ID NO: 454322 - DNA, 593 bp, Sorghum bicolor
gagctgaagatgagcggagccatttctctcgaccatccagatgagcgtgtgttggggctatatcttatccgatttgcagaggttgttgaagaggcctgcacgaatctacttccaaatgttgtatgtgaatacttgtacaatctatctgaaatgttcacaaaattctataccaactgccaggtggtcgggtcaccggaggagacaagccgcctgttgctttgccaagcgactgctgttgtcatgcgacagtgcttcaacctgctcgggatcacaccagtctacaagctttgatcggatgcatgtttgatttatacattcaacatccctttacgtagaaaccccaattcatcatggttgcagttttggtcttgtaccctagttgaggcagttaacatactgtaatccactgtcctgtttgaaaacagaagcaactcaaaaggttgtagcgaaatctggttgcagatttcctattgatcccactgcgatatgtatttttgtgttgtcttgcctggtggtagctcatcaatcaatgctgtaaggcaagtttaagttctaaaaaaaaaaagaaaaaaaaaactaaagggggggcccgg

SEQ ID NO: 454323 - DNA, 578 bp, Sorghum bicolor
tcttggaaatatctttgggcggtggtcaggatcgagacgaacggtgtttttgcgacaactgatatcccattacgggacggaaatctgggaaattacggggagttggtcgaatttttggtgtagtcccgctgctgcaatgaacgggaaggaaaaggttcacccttgcccattcctttctttgtatcatcttgggacggcctatatatttgtcctctttttattttcttgttcatggtgtaggcctgagcgccatagccggtgctggtctgcctagtgtttttgggaccggagtagctttctactttggagcgttgtttggtttgcccaagtcctggttggacgggcttcttttacaatattttgtctcgcctcggcaagcatctggagtgttcagggggcctggaatacatgtcatgatcagattcaaagagatttgttttgggatttgggaggccctcgagcctggttttgcaatgcagcggtagactgcatgtgtggctattgttaactgggtattggcgctgtctggttgcgacaacgcggcttcagcgctgcgagacgagaatatacgaatgttc

SEQ ID NO: 454324 - DNA, 466 bp, Sorghum bicolor
cagcagatcttccgagccaaggggctctatagtgatgtggacctgagcagcaacactttccagaagaagatccgcaccggtcagctggagcagtacaactttatctttgttgtcggtgccgaggaggccagttcacgcaccctcaacatccgtaaccgagacgaccaagccacccaggcaaagggtgagctggttcctattgacgaagctcttgagaagatggttcagctcaagtcttcgcgaggacttgtgaacaagctatagagggatgtgataggtttgctatgacactggaaggggcggcgcgtacagagggtgagattaaaagcagagggtatatgaattcacagtcaaccatatgagacatgttagatgatgacaggcacgggaactcgcatggagagatagagtcaagaacagaaacagatatccaagtagcggtcaatggggaaaagaacgcttcttg

SEQ ID NO: 454325 - DNA, 578 bp, Sorghum bicolor
ccttgcagttcatttcttgatgtggaagaagagttgaagacagtttaaataattgctcaatgaaaaccgtcatgtattctaggtggctttgattgtcgcaggcggttcaagaattcagcaagaagaacactgagcttcctgctctcacaagcgattcagcaacagcatctccagcacgggacgcggtacgggtaacagtagcagatttgaatggcaatgatgctccagagtttcttacaggggatgccagcttgtctagccacaagactacaccgtcaaggccaatgattaagatgctgtcatgcttgtttccttctcggatctgatgaatgatcgatcactgggcatcgggtgtccgaggtgcatgcatggtgatgccccagtctatctgcgaagtggtgtgcagatctgtaaggacggtggcagcatacctttccaaaaaggaaatggcaccagcattggcataaataatatttcttcgagtcatattgtccatattcatccgatttgcatgtatataccttcgtcatgtgaaattcattgttcggacctttgatgagaatgcacatcttggattg

SEQ ID NO: 454326 - DNA, 512 bp, Sorghum bicolor
ccaacatcaacagcaacggcagcatctgtctcgacattctgagagaccagtggagccctgctctgaccatttctaaagttctgctttctatctgctctatgctcacagacccgaaccccgatgatccgctcgtgcccgagattgcgcacgtgtacaagaccgaccggccccgatacgaggccaccgctcgggagtggacccgcaagtatgccgtctaggcaagatcaaacggtttcttttggggggtttgatggcgctgggtgtttgacgtcctctatcacgaaatgacggtgcggcatgtttggcgacccttttgcgttgtaaccggtcgagtgggatggtagtgggaagcggacagaccaagcttttccctttgctgttctatcattccttcaagcacactgggtgaatgatgtcaggggcgagccgcatggccggcggacaggtggcagactagacagatatatccgctattctaagggcttatgcggctggttaactttgggtttgca

SEQ ID NO: 454327 - DNA, 486 bp, Sorghum bicolor
cgccgcccgcgccagcctcaggaagcgcggactccacctcccgccctggcgtaagcccgagtacatgcgcgccaagtggctctccccctgcgaacgcgaggctccgccggccgacgccgccgcgggcgaggagaaggacgacgggcagggacccggaaccggaaccggaaccgccgcgtgacgacagggctctcttgccatttttgtcttggaggagggtctagctgcaaaagctagaaatctcgtcaaaatttaacttttaattttggtggggtggtacgtaatttggactcccatgtgatgagtgaggttattagtgcagcgcgaaatgaaggcgagaggtatgtagtgtagtgctagttttttttaggaagagaagtagtaaaagaaaatatcggattagcgtccacttttggtaatgatgtttgtttgtgtagtgataaaacttgcgaagatgtgatttgattattattattattattatta

SEQ ID NO: 454328 - DNA, 603 bp, Sorghum bicolor
caatgtagttgaagagcttgagaaaatagcaatcgttcatctacttcagcagagggcaataatttcgcttatcggaaatgtgcggcaaatgtctcttatactagaaaagaccggacatgtgctgaggaaaagtggggtcaatgttcagatgatctcgcaaggagcgtccaaggttaacatgtcgctgatagtccatgacagcgaggcaaaggcactcgtagaagcccttcatcaagcgttctttcaagacgatgtcctggcgcaagtcgaagtggagaacctactcgtgggctgatcgacgtaggttgttttgtctctaggcatgttatctcaacaacggcttgaacctatcttttgcatcaaaagtatttgtctttccagcttcccagcgaatgactgcaagactttgcgtttcttgtttccaaacctggttgcagacaccagggaacaccgactgtcagcaagatggcaagcctttgatatagtaattccaagtttccaattgcctctaatccaaatttgtaaggtttgcctaaggttatgagaacattattaatatctgtaacacaaaatagatatactatgaaaataagtctcatgacg

SEQ ID NO: 454329 - DNA, 405 bp, Sorghum bicolor
taccaggtcgtcatcggcggcagcacttacacggtctcgggcacgtcggcctcatcgccggtctttgccggtttcatcacgctcgtcaacaaccagcgtgccgccctgggcaaggcccccgtgggcttcctcaacccggccctctaccagctcgctgcccagaagtcggcggtcttcaacgacatcaccgtgggccagaacaactgctgcgccggcagcccgggctcccaggtctgctgccagtacggcttcaacgccaccgtcggctgggacccgctcaccggcctcggctccgtcaagttcccgctcctcctccaggccctcgcccagctctaatcccgcctcttgattttatttagaaaaaccatcatttatgaatacagacaataaatgaatggtattgtt

SEQ ID NO: 454330 - DNA, 617 bp, Sorghum bicolor
ggttcaacgctctcgagttttttgtgtacgactgtgatgttatgtcatatctggcatttgaggacggagctatgcccagcctccagaagcttggtttactactggatccacataaatgggacaaggttacacctcttggtctccaatgtctttcgaacctcaagaaaataactgtatggacggttgccaccagttatagcaacgacgcaggagcgggtgacaaagaatcagaggagatgtctgcggctgctttggtccgcaaggtgtttcaggaagcagccaacgcacatccgagtcacctagcatatacctttcacgaagggcttgataggccggcagaggaggcacaagagtagaaggtggatggaacacagtgcagaattattgggactctgttgccatcacgcgttcatgctgctgctatctctcctgtagcctctccactaatccttcaagtcataatgccatttcattttaactgccggtttgcctcctacaattgcaggggccatatgctgtataactcttgaaaaatttattttgttgtatctactttctgaaacaatggctttaatttactagcgtttattgccaacagaagctgttctgttagctgt

SEQ ID NO: 454331 - DNA, 561 bp, Sorghum bicolor
gagatgaaggctctgctcggagaaaaagcctgcggttaaaattgttgtgcagatcgagaggaaatggagtgatgtgcgtttaaaaactgtgctctgtttggaatcaatcctagctagtaaaaaaacccaataattagagtgtagtcttgcaaacagtacattcagtctagtggtctacgtagaaccatactactagtgtgtgatttgttgagtggaaactggaaacataccgtcttgaagtattcgttgtttatctgaaatgcaaatattgctacattgtcagcagtacgacacaagcagaacgtgagtcatcgggcgagggacaagatgcagcgactgaagaatcaagcgtgacgcgtccaagaaaaggggctcgagccaggcggccaaatgttctcgtcagtggacccgaatgggcttgagccagcgactaaacgcagctgcgcctgcgggctcaagtctggacgctgcccatgtataaaacggagtctgtgaaacccgaggggggcatcaaacaagaacaaaccaaaccagtattaagattcctattaccgttacctt

SEQ ID NO: 454332 - DNA, 626 bp, Sorghum bicolor
atttcattcaatgcacaggcgctctctgaacgttcagctgaaaagaagatcaggcgaatgcttttcccccgttcccagcgtaaaaacgtgaaaacctctactgaagatgtatcctaatatatcagctgattttccttatagaggatgtaaacaccttgttcaaagacaagggtgccaatggaatgatttggtcttatgcgagtttgctaggagatggcgcacaacctgtcgactatgaggataaccaaaagcagcagagtacctgattgaggttttgacctcgctgatgaaggaaggttggccttccaagaatatagtttggtttctgacagataataaaaaaacaaataaggtgccaattcgtgtaaaagatgcactgccattttatgctggcggaaactgatgagttgaccaaaggtttgtcagctacaaattcccagtaataacgagctgcgagaggaaagggcagagtaataagatctcgttcagttctttactccaacttgtaactaacttagttgtctctttcatgtctgaataaatgtaatgtaacgcaactgtgattatgtcgttgttgaactatacaaaaaatgagaatttaataaagtttcgagtgcttgtactgt

SEQ ID NO: 454333 - DNA, 501 bp, Sorghum bicolor
ggtctgcgtgcccaccaagtcggtcaagaccatctcgaccgttgtgcccaccgtcatctacgagaccgttgaggttccctgcgtcaccaagacccccacccccagccagggcaccaccctccccggcggtgctgctaacaccaccgtccccaccacccctggcaagcccaccagcaccgtcgtcactgccggcgctgccaaccttgctggctctgccgtcttcgccgttattgccggcgcggctgccgtcttcctcgcctaagcgtctgcttgagcggagaaaccgcgtcttttttctaacgacataggcctggccaaggctacggcattcacgacaattcacggggctttccggacggtaaagtcattctggggcaaatatcctagcatttggatggcgtggcagataccttatgtgtacttaatcttctaatgtatttggcgttcttgatgacatgataagcctttatctcgagcccatatgcaaacctttttgacgcg

SEQ ID NO: 454334 - DNA, 425 bp, Sorghum bicolor
tgcgtcaagatcctaaagaattgctatgcagctctcccggtgaacgggacgatgatcattttggagtacatcctcccggagacaccagaagaaacactagcagcgcaaatagcgtacgacctcgatctcgggatggtgctcatgttcggcgccagcggtaaggagagaacagagaaagagttgtcggagctcgccaaagaggccggcttttttggagactgcacggctacatacattttcgccaatgtttgggcccttgaattcccaaagtaattaattaaagtagctcttaattaataagcaagcatgcgcttattaattatactctgcttgcatcttggttcatgtacgtgttacacccatactccagaataaggcatgttatacaagatgcccccatgaattaatatatgtcgtgtatgcca

SEQ ID NO: 454335 - DNA, 489 bp, Sorghum bicolor
aagggcaccatcgagacgtgggagaagttcctcgaggacatgcgcagggaggaggtggagaggaagagggttgccgcggagcaggcgcaggcacaggcgcaagcgcaagcgcaggccctcgggcaataggatgaggcggctgccagggggcggagcgagtcggtcgactcgtgggactcgtggaatgtgccgctggggcagcggtatgcgcatattcttcctgggagagggggggcttcgtagtgtggagagcgaggcggcggtttgggttcgaaagcgcgattgatttgagcgttcgcgggggtaatgaaggggcgagtgttgagtgggtatattcatgatgagccggtttgccaaagttgagtttggcaaagtgtgaagcgttgacttgactgttacattgtccgtctcgaccccctttttcgcgcgatggttgtacgtgtcactactattcgcacacgtatacgcactacctttatactcttctcc

SEQ ID NO: 454336 - DNA, 591 bp, Sorghum bicolor
ggtcgggctcacgttccacctgctcaaggacgtgcccgggctcatctccaagaacatcgagcgctcgttggaggaggcgttcaagccactagggatcaccgactacaactccatcttctgggtggcgcaccccggtgggccagcaatcctggaccaggtggaggccaaggtcgggctaaagaaggagcggatgcgcgcgacgcgacatgtcctgtccgaatacggcaacatgtctagcgcctgcgtgctcttcatcctcgacgagatgcgcaagcgctctgccgaggatggccaggccaccaccggtgaaggcttggactggggtgtcctcttcggcttcggccccgggctcaccgttgagaccgtcgtgctccatagcgtccccattaccaccggcgcagccatcaccgcctgaaatgctccagacacggtggagtggacaggtctctttctagagtccattacatggtaattattatttttttaagtgtcaacggggagggagagtttccccaacctcaaatttgtattaagtgattttggctgagaaggctaccagacaataaagctttgacatcagcgtttttccct

SEQ ID NO: 454337 - DNA, 463 bp, Sorghum bicolor
actatgactatgaacagatacaggtttcataattgctcgtaacatgtatcacaaatttcctacttttgggacgattgcatttctgctgctttacacaagcgaaacacggttccctaccgttcttggggcttgaacgggtttagggaacggagggttggctctctataagaacgaggcttggagttaggatcgaattggaagcgggcggaattggaggccctttcgcatagcaggctacaaaaggaatttcttttgccctttttgaattgcagagttaaaaacacaaaggacggcctggcacggcctggcgctggtggttatgaagaaggaagcctagttaatgaggcgacgaaagctcatgatgatgcaaacaaaactaggaaatggagcttgacacatatcagaagcacaactcaaagaggaatgaggcatctgacatgaatacaaccaacgattcaagctc

SEQ ID NO: 454338 - DNA, 525 bp, Sorghum bicolor
cgtcacgtgcgacgagcggtacggccacgtgcgcgaggtcagcctgcgcgtcgaggacgccgatggcgccggcgtcagtggcagggacgggctcgccgccgtcgccgctgccatggccgcgcccaggcggcgcgggtgcggggaggacgcggcgagggaaaggtacgaggacttcgtcagggggaagagggcgcgcaaggagtggaaggccaggcgcgagggcatccttgacctctgctgctccagcgtcggcgccgccgcgttcctcggcttcctggccgtgctcacgttccggtgagcactcgtcgtccggctcaccgggcgacgccgaagcgacattcagagtgccgttgacatgtacagtgtagttcagggaatgtgaatatatgattgtgctgtaggttatacggtcggctgtcaaagaaatgtacaacagggaaagtcaacatcatactttttttttctactattcattttcctttctagacagcgaggtttatgaaataaaacgattcaaacttttta

SEQ ID NO: 454339 - DNA, 368 bp, Sorghum bicolor
ccgccacgccccgagccgccgccattaccgccgccgtggctctgctcctcaacaggatgctctgatctgatctgaggagtggtcagtcggttcagctggctccagatcttctgtgctgatgagtttgtggtgctacacctacactacagttttcttcttctttatttgtaggtttctattaattttttccttgagatcgatgatctctactactactagtagtttttttcctgcttcttgaattgattgcgtgattattggttggttcttgcttccatctctctctcttgcttctgtcgtagtccagttcagtttgttgatgcagtttgcagaccagatgatgattaattagtataatgtcaagtgtg

SEQ ID NO: 454340 - DNA, 645 bp, Sorghum bicolor
agccatcaagtgtgatggcaaatgtgatcccaggcatggtaagtacatggcatgctgtttgatgtaccgtggtgatgttgtgccaaaagatgtgaatgctgctgtccattcaatcaagaccaagagagcagtgcagtttgttgactggtgccctactggcttcaagtgcgggataaactaccaaccaccaactgtagtccctggaggggacctggccaaggtgcaacgagcagtctgcatgatcagcaacaacacagctgtggctgaggtcttttcccgtattgaccgcaaatttgatctcatgtatgcgaagcgtgcattcgttcattggtatgtcggtgaagggatggaagaaggggagttctcagaggcaagggaggatcttgcggcactggagaaggattatgaggaagtcggagctgaagttgaagatgatgatgaggaagctgagtattgagtcatcccatctggatgcatggttattttcctttggtatcagtcaaccaggagtgcttgggttgcatggttgtacctcccatttgtttccctgtttgctattgcattacacctgttcatgattgccagagtagaactgtgaagattggttgaactggtgtgatggtttgagataaaataaaataagta

SEQ ID NO: 454341 - DNA, 1054 bp, Sorghum bicolor
  unsure (1)..(1054): unsure at all n locations
ggcacgagggcaagaagaagacacgcgtggtgaatttgaggcgtaccaaatcagaagttaccaccccagagactggcagtgaagcgtcagatacggcatctgtcgatgtccctctatctgagcccatgattgacgaatcaatccctgaggagactgagtcgtctatcattgctgaggcatccacaccaaataaagttcgctttagaagcgcgggtgaggcaggacgtccctcagtcatggccactcttgaggaagctcggaggatgggctccccactcaagaacgctgttgaaccctcagaatctcagaactatccatcgatcgctgctatcacttctgaactgaagtccgagaagggcaaatctcctggattggaaaaccaaagcattagctcagagacttcttctgtcatccttgaacaagcttggattatgaagatggctggcgaaattgccaagcgagtttatgacgagaagaacaggcaacgtagcccctgngacgagcgtgaggacgcaccaccaccagcatacgaagctgctactcagtagcggaaaagtcacatatgtcagcacatacaactatcctactctcgttagcattctatttgttcattctttttaggcaggcgctggagtttggaaacttcgggctgaggaaatggcctggaggaagcaattttttatgtttttttgtgtcgtttggtggcgttggaagagccagggcgaagggtaaaataggtgtgcctggtcatgagttctgaccggacaggtttcagaggggtggtactgttgttcgtcctctatttctatgccacgacacagttgtctgtttggactggtcgatagccccaggggggttgactcatgacgatgtcagagtctttacaatgttatttacaaaatgataggcgagacaggcggggtttagacggtcagagagatcgttggggtatctagaagatatcatggtatcaggaccaaggaacgaggaacgaggctagtgttggttttatataaccgcgtagtactcgcaaaacaactccaattcacattcg

SEQ ID NO: 454342 - DNA, 455 bp, Sorghum bicolor
gcgacggcgacaggcgacggcgccacccacgggcgggcttcccctctctctgtccctctcctccggcgttgcggcgtgctaggtgggcaaggactgtggcctcctcttcacgcgatggcggggtgtctgttccctccacgggcgctcgacgaaaccctagggagacagaatgtccaaatgatttggctatccagtcccttttatcagcagtggattcatttggtgctgactacaagcttcttgggatacaggcttccagggagccaacgacatgatataagaaacttttcatgcttccattggcccaattctacaatggcattgtcaggttttatgtgtctcacaaaactcattcgctttcctgcactcaaatcacagtttagtgtacttagagcaactgtgtttttactttccagtcaccctttcacaactggacttaacagatggaaacatgc

SEQ ID NO: 454343 - DNA, 481 bp, Sorghum bicolor
ggcacgaggctgcggtctgcccctccttcctcgcctcgcctcccctccccctcaaagacccgtcatcttcctcttcagttccagacacacacacagagcgcaatcgggcggaggaggagaagcgcgaccacgaccatgggcttcatctcgttcgtcggccgggtgctcttcgcctccctcttcctcctctccgcctaccaagagtacgtgacgtgacgtccccccaccctctcttcttcttcttccacgccttcctcgcccaccatccctcagatcccgtctcgtctgagtaccctcttgctcgtcgccaaatcgaggccgctccttgtctcgtcgcctctccgttggttgcttccgtaccgatctggccatggtggctcgggctcgggctcgggcgggctcaatcgaaatgcttcctctccggtgcgccgacgcgagctgagatccggtctgtgcgggtgcggtgcgttttttggatctt

SEQ ID NO: 454344 - DNA, 505 bp, Sorghum bicolor
ggcacgagggaccactttcgagtacccaacttcctcccaccaaatcttcaacatccacgcgagagttctcaacatgtcgtccgatcaagctgatgctgccaaggcggccgagggcgcgtctgggaagagcttgccttctcgccctgcgaagcagcccaaggagaaacagcccaaggataagtctgccaagggtggaaagtctgctggcctcgaacttcctgagacccccgagttcatccagcaccgactcgatctcttcgataagatcaaagcccgacaggacgccgaaatcgctgccaaacctcgtgaggaaatcaccatctcgcttcccaatggcaaagaggagaagggaacttcttgggagaccacccccggcgccatcgccaagggcatctccaagtctcttttcgagcgcactgtcatctccagagttgacggtgagttgtgggatctgacccgaccgctcgagaagagctgtaagctcgagctccttgactttgaacac

SEQ ID NO: 454345 - DNA, 454 bp, Sorghum bicolor
ggcacgaggcttcgctatccattctcccacaattcaactctcttcatccgtcacccaaaaatctacatcaaccaacaacctcactctactctcccctacaactaaaccgctactgcacttctccagtaactattcctcgactttttggatcttgtctactacgactacctaaatcgacgactctctcaaacacttgcaatttcttcttgtttgtgtttactcgctccaattaatcccgcaccaactccggtacgcacgcacaaccgcgactcacatcatgtctgcatactaccattacaacgcccaccccgcccccgtgtcgcacaaccaccatggtggccgaaatcgcagagctccccgtctttctgtgtcccaacaagctcaacgccagttccgcggtgtccgcagcatgaaggaactcaacgagactgcttccctcacagccttccgaacc

SEQ ID NO: 454346 - DNA, 488 bp, Sorghum bicolor
ggcacgagggccgcatcgcaccgcagcgcgatggagcccacctcgtcggcgtcgatcgcgcggcagacgtgggagctggagaataacatccccgcggcggccaccgacccggacgcgatggacgcgatctaccgctacgacgactcggtgcaggcgagagcgcagcaggagaagccctgggccaacgacccgcaccacttccgccgcaccaagatctccgcgctcgcgctgctcaagatggtcgtccacgcccgcgccgggggcaccatcgaggtcatggggctcatgcagggcaagtgcgagggcgacgccatcatcgtcatggacgccttcgcgctccccgtcgagggcaccgagaccagggtcaatgcccaggccgatgcctacgagtacatggttgagtactcaaccatcaacaagcaggctgggaggttggagaatgtggttggctggtatcactcacaccctggttatggatgctggctgtc

SEQ ID NO: 454347 - DNA, 431 bp, Sorghum bicolor
catcttcaccaaatacacacactgtgggatctaatttcatctcttctatcaaggcctcacgaagagcttcaaatagcaagagctcatgaccgtcggacttgccggccacggcgctcgatggcgcatccgcctttgctgcaaccgctgcacgcgccaccagccttccacgtcccgccggcgccgccgccacggacacgaccctcaccgcggaggtggatcggaggccggcgcagggggcggtggccggggccgcagcgcgcagcgagaatgcggttgccattgggaggatcgggggtttgggatctatcaggagcgcagaggccgcgacagcggtggcgggttgcgtttataggtagaggtggagtttggtttggttgggcgtagctggcgatggtggactggtggaggaatggaggcggcagcctcgtgcc

SEQ ID NO: 454348 - DNA, 455 bp, Sorghum bicolor
ggcacgaggcactgattagttgcattctttttgaagcctcacttagttgcattcaatgtgaacttgtcttcctctttgattgaagtgctggtcaccggccggcaccatcattgtcaccaaatctcttgatcattccctttatctatagtgcttgctactgcatcctacaaatttcctaacaaatcatcatcacttgcttggggcaggaggcgtgctatcacagttcataggtgggcagaggcagctgggtagatgtggcagacctttatatgaaacaaccgttaacatgcattttgggcactccaaatgaagaaactttgccagacattgttttgttatctgattacaagtcaaatttccagaagtggacgatgtggtaagtaataaacaagttctttttattattacaaatagtaagatggggttttgagttgtgaatactttcactgtgtacg

SEQ ID NO: 454349 - DNA, 301 bp, Sorghum bicolor
ggcacgaggattcgacagtcagcagatccaacagctcatcacatctggatggggtgaacaagtcaagggtgcacactccaagttcacaagaagattactcgtcaaagcaagatggcacaggcatacaagagagctcagttggtcatgatactaaaatgatagttgctgcatcagaatgtgggactgaaatatcaatttcatccacactggactcaccagatagatcagaaggtgatggtggggagatcgtgatggagattggagctctggaaaatagaaactatgtcactggcaaagctga

SEQ ID NO: 454350 - DNA, 492 bp, Sorghum bicolor
ggcacgaggctcgccttggtgacgaagcttcttctctgtctcgttgcctgatcgatttcagcgttcatcaattacagattccagtggacaccgcccatcatcgacgtcgcaattatcttttctcgtctcataatcgaatcttttccagcaacatacataccaatcgtagagaccatatcattagctgtgattcatacctgcctaggtagctagccaaccatgcccgcgattccttctacactccctccttccgtggaggaggcctatcgtcgaaaatgtgttcaactcaagaaccgcaccaatgaagttgaagacgccaatgatgccgcccgacttcgtcttgcccgtatcaagcgccaggttgaaaagttgcgaatagagcgcgcgtttctactcgaacagctcgcaaagcgcacgagcgcaaacgtcgaggactcagacggcagcccaagcccaccccctacggtatgctattattttcttcccatccct

SEQ ID NO: 454351 - DNA, 580 bp, Sorghum bicolor
  unsure (1)..(580): unsure at all n locations
cgtccgatggccgccgtcttcttccaccacgtggtcggcgacctcaccgtcggcaagcccgaggtcgccgagctgcacgacaccgacacgctcgacgacgccgcgcgcgccatcgccgccagccccgagggcgccgtgcccgtctggcgccccagggccgcgccctacgatccgccctccggggccaggttcatcggcatgatctccgctctcgacatcgccgccttcgtcgccgccgcgggggtcggggaccgcgccatgcgcgccgtcgtcggcgaagtcgtgcagcccaatcctgcgctgctcagggagatcgatccgggtaccaggttgatcgatgctctggagttgatgagacatggagtgaagcgcttccttgttcgcaagagtgggagctggaaaggcattaccaagagattntcagtgctttttaatggcaaatggctgaagaacatggaatcaacatctccaaatgcagccagcagcagcagcatgccgctatccccgccttctggttctgcagacangttttgctgcctatcaagggaagatgttctccgggttctcattggatgccttg

SEQ ID NO: 454352 - DNA, 572 bp, Sorghum bicolor
  unsure (1)..(572): unsure at all n locations
cgtccggcacctgtgacaacacaatatctttttgtgactgccactcttccccttgatatctacaacaaggttgttgaaacctttcctgactgtgaggttatcatgggacccggtgtccaccgaacaagctctcgtcttgaagagattcttgtggactgcagtggagatgataatgaagaaaagaatccagaaactgcattttcaaacaagaaatcagcacttttaaagattattgaggaatctcctgttcgcaaaacaattattttctgcaacaagattgagacatgtagaaaggttgagaatgcgctgaggcgggttgacaggaaagcttcgcagatcaaagttctccccttccatgctgctttggatcaggcccagcgcatcacaaacatcaaggagttcctgaacaagcaaacggctgactccatgttccttgtgtgcacagatagggcatcgcggngcatcgactttgcgaacgtgaaccatgtggtgctctntgactacncncgcgacccaagcgagtacgtgcggcgcgttgggcggacggcccgtggtgcgtncggcacggcaag

SEQ ID NO: 454353 - DNA, 448 bp, Sorghum bicolor
  unsure (1)..(448): unsure at all n locations
cgtccgagattagcagcaagcttccaccaaactgcagcggggctgaaacattgaacatggcacgctcccttgtgtctgcccggcatgctggtgagaggcttctgaggtgctggggtggtggaaccggatgggctgtggaggatgcaaaggacaagataacaaagctcctggaagagtatgagagtggaggtgatttaggagaagcatgcaactgtatccgtgaactgggtatgtctttcttcaaccatgaagttgtcaagaaggcgctcgtgatggcaatggagaagaagaatgagaggaccctgagcctgctgcaggagtgctttggtgaagggatcataaccatcaaccagatgaccaaggggttctcaagggtcagggatggactcgacgacctggctctggacattcctgatgccagggagaagntcatttcctatgtggagca

SEQ ID NO: 454354 - DNA, 587 bp, Sorghum bicolor
  unsure (1)..(587): unsure at all n locations
cgtccgcccacgcgtccggaggaagcagcggcggcagcagcagcagccaggccatggcgtcgtcgtcgaccccggcggccgtccgcgagatgcagaaggatctcgaggtgcaggccaacgccctcagcaagatccagaaagacatcgccaagaaccaccaggtccgcaagcagtacaccatccaggtcggcgagaacgagctcgtcctcaaggagctggagctgctcagcgatggggctaacgtgtacaagctcatcggaccggtgctggtcaagcaggacctcgcggaggccaaggctaacgttaagaagcgcattgagtacatcacggcagagctgaagcggatggatcgggctctcaaagacttggaggaaaagcaaaacagcaagaaggaatcgatattcaagttgcaacagaggatgcaggctgtacaagctaaggcttagacatctgcttgtttgttgcaaccagtccaagtccatgctgcatttcatcctaataccctccaggtttntgtcgttgggaggaatcaggtctgatattctcgtgtccacagaaaaaggaaaaacggttcctagtgaattact

SEQ ID NO: 454355 - DNA, 520 bp, Sorghum bicolor
cgtccgcggacgcgtgggtgctcatctgcagctccatcctgtccacggagggcgtcgtccgagccatccccttccgcaagctccgccacgacaccatcgtcgccgacgtgctctccgtcaaggagttccctcgcaacctcctcctcgaggttctcccaccgggatttgggatcatctgtacgcaccccatgtttgggccggagagtgctaaacacggctggggcaagcttcccttcgtctttgacaaggtccgtgtcgcggaagacggggatcaggcagcaaagtgcgaccagttcttgagcatatttgaacaggagggatgtaggatggtggagatgtcatgcgcggagcatgatcgctacgctgcgggaagtcaattcatcacgcacacaattgggagggttttatcacaactgaacctcaagtcaacgccaatcaacaccaagggttatgaaaccttgctgcaacttaccaagaacaccgtaagcgacagtttcgatctgtactatgggctcttcat

SEQ ID NO: 454356 - DNA, 609 bp, Sorghum bicolor
cgtccggaggagaggaatatcagcagcagctattaattcattcattcgtggaatgggaataacaagaagtgacaatagcttgatacgcatcgaacgccttgaataccatattagagaagaacttaacaatgtttgccctcgagctttggttgttttgcatcctctaaaggttgttataactaatttggattatggaatggttattaaccttgatgccaaaatgtggcctaatgctcctgacagtgatgggtcagcccactataaggttccattctcaagaatcatctacattgagaaatctgatttccgtctgaaggattcaaaagatttctatgggcttgctcctggtaaatcagtattgctgagacatgcattcccaataaaatgtatggaagttatctatggagacaatgcagatagtattgttgaaatccgagccgtgtatgatgcttcaaaggctacaaaaccgaagggtgtcctgcattgggttgctgagccttctcctggggttgaaccactcaaagttgaagtcagattggttgagaaattggttctttcagaaaatcctgcagaacttgacgactggctgggtgatctcacccacagtcg

SEQ ID NO: 454357 - DNA, 562 bp, Sorghum bicolor
  unsure (1)..(562): unsure at all n locations
cgtccgttggggcgggcggggggagttactttagggtttcggcgggtgcggtcgccgtgtaggcggtggtagggttttgccatggcggagaagggctgcctgaagcggctccagaaggagtaccacgcgctctgcaaggagccgcctccacagatcgtggctcgtccgctgcccaacgacatattggagtggcactatgtacttgaaggaagtaaaggcacaccctttgaaggtggatattactatgggaagctcaaatttccaccggattatccttttaaacctccaagtatcagcatgacaacccctagcggcaggtttgcgccacacaaaagaatatgcctgtcaatgagtgactttcatcctgaatcttggaatccaatgtggtctgttgcaagcattctcactgggctcctgtccttcatgatggatgatgcactgacaactggaagcattaagacatcagatgcagaaaagagacgtttagcaaaagcttcccttgcctacaattgggagagcaaaaactggccacacttnaggaaacttttcccagagtatgttg

SEQ ID NO: 454358 - DNA, 502 bp, Sorghum bicolor
  unsure (1)..(502): unsure at all n locations
cgtccggcaatggcgaaggcctggntgagctgtgggggagctctgggcggagaagctgttgacctgtagcccccctgctaactggcaatgtctcacagccgctccaagagcgattctatcagagtgctcagaacggatagcgcggattcggcttcgccgaggtgccacgctcagcatcaacaggaggccggagaactcaaggaccagaatagcaccaccaagatgctgtccagtgctactgagcttccatgctccttgaagcgtgaggtccaagtccttgaaaagcgactaaatgatcaattcgtcatgcgccgtgctcttgagaaagcactaggttacaagccttgtgctattcatgcatcaagtgagaactgcattccaaagccgactgaggagctaataaaggagattgcagtgctcgagctagaggtcatatgcttggagcaacatctcctaacactataccgaaaggcctttgaacaacaatattcccctgtgaatt

SEQ ID NO: 454359 - DNA, 275 bp, Sorghum bicolor
cgtccggtagctcttgcgcagcgtaaagaagacagaaaggcaaagctacaggcacagttttcacaaatgcgtccagttgcgatggcgccttcagttggtcctcgcttgcccatgtttccacctggtgtccctggagttggtcaacagctgttttatggtcagccacctccagccttcataaaccctcaggctggatttgccttccagcaacctctgatgcctggtatgaggccgggtggtccaatgccgaactttatgatgcctatggttcagca

SEQ ID NO: 454360 - DNA, 425 bp, Sorghum bicolor
gcgtccggggaagacgacgaacctcgagcagggcggggggggcgaagcagggggcgaagaagatgaaggacgagaacaagaagcgcttggaattactcttgcgcatcatcctcgtatccaacgctatttacatagtggtgaggatggctataatgcattcatccttcacttggaagcattggatgggccttatggtaacatcagccgcatattttcttccatataagcaacttgccagtatggcaaagccagtttactctgataacggagaactactggatggtggcttcgatttgagcactggtggggtttgcgagtatttatatgatgtgatctacattactgtctttgtgcagctgatgtctattatttctgaaaaattttggtggacatatttagtgattccagcttttgctggatacaag

SEQ ID NO: 454361 - DNA, 430 bp, Sorghum bicolor
  unsure (1)..(430): unsure at all n locations
cgtccgggcttcaaccaagacacctacgcagcttccatagacgctggcggcgatgctacactttcctttccgggcgctcctccgttcaaggcgtcggatctgccgggagtagttgacagcgaccccgaagcagccatggccatcctccagacgctccatcggatggcggcgtccgacgggatcgtcgtcaacaccttcgtggagctggagacgcgggcggtgcgcgctctgcgggacgggctgtgcgtgcccggccgtgccacgccaccggtctactgcatcgggccactggtgtccggctccggcggcggtgggggaaatggagcacgagtgcctncgctggctggacacgcagncggacagcagcgncggggtcctttgcttcgggaggcctgggacgtttttcgagaggcagctgaaggaggtcgcc

SEQ ID NO: 454362 - DNA, 559 bp, Sorghum bicolor
cgtccggctaccggagccgccactcccacgaccacgaacgccggcgaccgagcggaaacgaaccagttatctagtggagctgcctcgtccaaggtactgtaatgtcctttctattcaagtctagcaatggtggtaccactgaaaaaaccatgcccctggaagaacagcaagaaaaaataaatgaactacgcaaggtgcttggtgaccactcatcaccagccattcaagacttcctttcagatgcctcattagcgagatttcttcgagcaaggaactggaatgtgcagaaagctagtaaaatgatgaaagcagctgtgaagtggcggcttgcattcaaacctgaaaacatctgttgggatgatatttcagaggaagcagagaccggaaagatatatagggcagactataaggacaaacatggcagaactgttcttgtattgaggccctgtttagagaacactacctcagcaacaggacagatcaaatatctagtctactctctggagaaagcaattatgaacctgaccgaagatcaagagaagatggtatgggctgacag

SEQ ID NO: 454363 - DNA, 447 bp, Sorghum bicolor
gcgtccgagagcctgatgttcctggcacattttgtcggcgacgtccaccagccactgcatgtaggctttgaagatgacgaaggcgggaacacgatcaccgtccactggtaccggaggaaagcaaacctccatcacgtgtgggatgtcagcattatagatacggcaatcaaggacttctacaataagagcatggatactatggtagagactctcaagatgaaccttacagatggatggtctgatgatattactcactgggaaaattgcgagaacaaacatgccacctgtgcaaatgagtagaatccatattcaatttagaaacttcaatttcgttcgtgtgttaaagtcatacagaattgacattatatgaccttgaccatatgacttgcagctatgcaattgagagcattcattattcctgcaactatgcctacaaagatgtggagc

SEQ ID NO: 454364 - DNA, 509 bp, Sorghum bicolor
  unsure (1)..(509): unsure at all n locations
cgtccgatagaagatgaagatgagaggatatcaagcctggccaaactcttctttcatgagttgtcaaaaaaaggaagcaacccaatttataatcttcttccggatatcttgggtagactgtgcaatcaacacctgaaagaagaaaccttttgcaatattatgcagttcttaattaattcaattaagaaggacaaacaaatggaagctcttgtggataagctgtgcaataggtttgctggagtaaatgatgtcagacagtgggagtatatctcttattgcctttctcagctaaccttcactgaaaagggcctgaaaaaactcatcgataattttaagatgtttgagcatgcattgtctgaagattctgtgatgaaccacttcagaagcgtaatatcaaagtgcaagaagtttgcgaaacctgagctaaaagtttgcattgaggaatntgaggagaaacttagcaaggttcatcaggaaaagaaagaacaggaggaaacaaccaaaaatgc

SEQ ID NO: 454365 - DNA, 305 bp, Sorghum bicolor
  unsure (1)..(305): unsure at all n locations
ttttctatgcatctcaagttctcaaccatatataacaacaagctgttcaacacttggtggcctgcctcgtcgtcgtcgcggacgctgcaaatggcagcgtcccccacttcgatcaaccaacagtccaacacgaaaaacgtctgatacacaacaacaaaacacaacgcgctctactgtccaagaagcctcttgacgccggccttctggtccgacgtgagcctcgccgggaacttgatgtcgaacttgatccggaggttgcccttcctggacggntccttggggatgggcatgccctcgccgggcac

SEQ ID NO: 454366 - DNA, 371 bp, Sorghum bicolor
cgtccgagccgaaggaaaaatttccccccaaccaaaagcggtctctcccaaacccctagctaccttcggatcccgatggcgaacccgcgcgtcttcttcgacatgacggtcggcggcgcggcggcggggcggatcgtgatggagctgtacgcgaacgaggtgcccaacaccaacggctcccaggtgtgtcatctgcaccgtcgataccccctggctcgacggcaagcacgtcgtctttggccaggtcgtcgagggcatggacgtcgtcaaggccatcgagaaggtcggatcccgcagcggatccacctccaaggaggtcaagatcgctgactgcggccagctcagctagatcgttggtctggtctgcccgt

SEQ ID NO: 454367 - DNA, 404 bp, Sorghum bicolor
cgtccgcgtcgcttcgccgtgccgcaccagggaggaggagaggaggcttggccgcgaagctcgccatgatctcgccggagaggagctcgtcacagagcccgcggtcgccggcggcggcggcgggggcgccgttcctgtcgatatccgtcacggatcccgtcaagatgggcaccggcgtgcaggcctacatctcctaccgcgtcatcaccaggaccaacctccctgaatttgagggaccagagaaaattgttattcgacgctatagtgattttgaatggttgcatgaccggcttgctgagaggtacaaaggcgtttttatacctccccttccggagaagaatgctgttgagaaattccgatttagcaaggagttcattgaattgcggggtcaagctctggattta

SEQ ID NO: 454368 - DNA, 442 bp, Sorghum bicolor
tgcgtccgggcagggcagaaaaccctaaggaagactacagcagtggtgttcaggaagcagagaggaataaattggttttcttcgagggcagttcatataattttgacttggaggatttgttgagagcttctgctgaagtccttggaaaaggaagttatggaaccacctacaaagctgttcttgaggatggaaccacagttgttgtcaagagattgaaggaagtggtggttagcaagaaggattttgaacagcagatggagatagttggtagggttggccagcatcaaaatgtcattccattgcgggcttactattactccaaggatgagaagctgttggtgtttgattatgtcccatctggtagccttgctgctgttttgcatgggaataaagcttctggaagagctccattgaactgggagacaagagtcaagatatctct

SEQ ID NO: 454369 - DNA, 567 bp, Sorghum bicolor
  unsure (1)..(567): unsure at all n locations
cgtccggctggtagcatcctgaatgacagtcaaatcaatgagggatgcaagtggtcatgtatgtttggagaagttgaagttccagcaaaggttttagcagatggtactctcatctgttattctccccagcatagacctggtcgagtacctttttatattacctgctccaacagattggcctgcagtgaagtgcgggagtttgaatttcgaccaactgtctcccaatacatggatgctcctagtccacatggtgaaacaaacaaagtttatttccagatacgccttgacaagttgttgtcccttggaccggatgagtaccaggcaactgtatctaacccaagcctggagatgattgacttaagcaagaagataagttcactgatggcgagcaatgatgagtggtccaacttgctaaagttggctgttgataatgagccttctactgctgatcagcatgatcagtttgctganaacttgattaaggaaaagttgcatgtctggcttctaaataaagttggtatgggtggcaagggacccagtgtgttggatgatgaagggcagggcgtg

SEQ ID NO: 454370 - DNA, 502 bp, Sorghum bicolor
cgtccggcaagtcatgttttcaacccatcctttcatatcaagatactttgagaaacagagtttgaaagctgcatttgcaactgctccagctgatccaacagtagacctaaacatgcaaatgacaaaactaggacatggtttgctctctggtaaatattctgcaccagcaaaggaggggcaggaagggatacgtcctcgcatgtttaagtcagttattgccgcgaaccatcctgaattttctagcatgagacaacaggatgccctcgacttcttcctccaccttattgacagagttgagaaggcaaaccctgggaaccatgagctaaatccttgttccggtttcaagttcattgttgaagagagggtccagtgcccttctgggaaagtttcctacaacaaacggtctgactatattctttctttgagcataccactgcatgaggcaacaaataaagagcagctagaagcttttaatgagaagaaagctgcaatggacttggat

SEQ ID NO: 454371 - DNA, 558 bp, Sorghum bicolor
cgtccgatcctatcacacataatctcgttgacatcagtatcatctaacagtcctatggtatttccagaagcacttctccagcagatactgaagtccatgatacatactgatattgacactcgtgtgggagcacaccacatgttttctgctattattgtccgagggccaagccatcttcggagtgagtcggagtacctatatgaaacaaaaaagcagtctcggactacatctgtatttgcttcagctactgctctactggagaagttgaggagagaaaaggagagtttaagttcagataagcctcgaaatatcgtgcatgatgatgtgaaggaaatgcatgaagaggataaacggaaaaatccagcttatttctctaagctggtttcctctttcattgaaagatgtgcaaagcgaagtagctctgtagaggagaccaatattgccatgctaactgaagatcaaaccaaccaattgctgtcttcattctggattcaggccaatcaaacagataatactccttttaattatgaggccattggccattcatacagcctaaca

SEQ ID NO: 454372 - DNA, 340 bp, Sorghum bicolor
cgtccgccgcaagctccgcgccaaatcggacaacaagatgtgcttcgattgcaacgccaagaacccgacgtgggcgtccgtcacctacggcgtcttcctctgcatcgactgctcagcggtgcaccgcagcctcggcgtccacgtctcctttgtcaggtcaacaaatttggattcgtggactccagaacagttgagaatgatggtctatggaggaaacaaccgtgcacaggctttctttaagcagcatggttggaccgatggtggaaagattgaagcaaagtatacttcaagagcagctgacttgtacccgcagttgcttgctaaagagggtgctaaaagc

SEQ ID NO: 454373 - DNA, 461 bp, Sorghum bicolor
cgtccggtcccagtcgtggttcgtcctggtcacattcgctttgaaccagcaggtggagaacccaacaaatcgccagcaaaggaattacagggcacattccaatggagtgcaacaatgagcaaaaagaagggccagaagtggggaatgaatagctcaaacaagaaaagtgctgatattggctatcatgcaggaatagctggaagcgacacagaagttaacaatcatgtcatggacattaaggttactaaaaatgacttttgtgctgtcagtaatcgaaggaacaatgaaggcagtaatattgagatgtccagtgtgaaaagtgttgctaatgaagaaaagtctagtggtgaacctttcgattttgagagcttgtaccccctaacgcgtcttccaaaggagggagatctgattgcctacagattggttgagctgtcttccatgttgtgtccggagctgtcttc

SEQ ID NO: 454374 - DNA, 565 bp, Sorghum bicolor
  unsure (1)..(565): unsure at all n locations
cgtccgggaggaagagcaggaggctaggtttaaggtgcacggcgatggcgtcggcggcgaagactctggcgcgggctggatcatccctcttcggccgcatcctcccgtctccgtccccttccccttccatactccgcgccgggctgccggcgctcgccaggctgcagccgcacgtcccgccgccggcaccggcgggggtggacgcttacgaggcggagactgtcgccaggctgagctcgctccccggcgagatctccttcccctgcggcctcccgtcgctccgcttcttcatcgacgacgttgaggatcctgttgctaatgatccccttcagttgcttccgaaacgaacttaccagcccagtaccatcaagcggaaaagaacccatggatttcttacacgtaaatcgaccaagggtgggcgcaaggtgattgcccggagaatcgccaaaggcaggcacagaatttcaatttagcagccctggatggtttcagtacccccagattcgtattgtgttcgttgggtgaacacctannancttttattttattgtttaccatcctgctc

SEQ ID NO: 454375 - DNA, 477 bp, Sorghum bicolor
cgtccgtgctctcctagcatagatggtagaatgctggggcgatgacgctatacttaatttcagacacaggaaatcgctatccgaagcacccccagccgtagctccttaatagaggatcagagctctacgagcatgtccatcctacagctttctggtgccatagtggcagctgaggccttcacgagggggggccttgtatatcagcccgaatgtctacacctctgctctacaaggctctctggccttaccctagatgcgaaggctgccaccggcgtcaccacaaagtacacttcactgaaacctctttgagatagggtgctcgtgaagcttggcgcctgagacgagaacacagttggtggcatattgcttccatctaccggccagaccaaacaacaaggaggttacgctgtcgcatgcgctaaggcaaggaccattggatacattacattactttgtgatctaaagactggagtacac

SEQ ID NO: 454376 - DNA, 177 bp, Sorghum bicolor
  unsure (1)..(177): unsure at all n locations
cgtccgggtgcatggccgatcttagttgnttgatctagttgtctgattaattccgttaacgaacgagacctcagcctgctaactagctatgcggagccatccctccgcaactagcttcttagaggcactatcgccctttaggccaccaaagtttcaggcaataacacgtatccacat

SEQ ID NO: 454377 - DNA, 525 bp, Sorghum bicolor
  unsure (1)..(525): unsure at all n locations
cgtccgcccacttctgactccccctccccgcgggtcggggcgccttaaacccacgcaatccagcggaggagcccatctccgcccccggcgacgccgctcaaaccctagccgctccgccggctctgccaccgcaagccaatgcccccacctcgaaccctggcatcaccatttcacttcatagcgggggggaggacccagcaacacaacagccgagctttgtttagtttaactactgcaggcaagatgaacaggaagccaggagactgggactgcaggtcgtgccagcacctcaacttcagccgtcgggacatatgccagcgctgcagtgaaccacgcggagttgctgatcgtggcagtggtggtggaggtgactatgccaacttcgggggccggggccggtccttcttcggaggtggctttggtgcttgctctgatggcccgcctgggngctggtacttggtctgcggggcacacancttngccaggcgttcaactgntttaagtgccnnnnctacaggaggaggc

SEQ ID NO: 454378 - DNA, 323 bp, Sorghum bicolor
  unsure (1)..(323): unsure at all n locations
cgtccggcttttgagtagctccactgatgacttttgggcatctggcttggtatttgtgatggttcgacgccacttagcttttatgctcaatggtcaaattatgttggacagacccctggcacccagttctcatgattactgcaagattttatgtgtcaaacctgttgctgcaccttatttgggggtgaatttcagagtcgaaggttttaacctactcagtacttcctcaaggctaatttgntcatttgaaggacgttgtatattccaggaagacacggactttatagcaaagaatgctgagtgngaggatagggatatngaat

SEQ ID NO: 454379 - DNA, 352 bp, Sorghum bicolor
cgtccgcccacgcgtccgaccggacagtgtgtaggtctccttgagtcttatccgccccaaccacgcggctcgccggagctcgcccggccgcaacgccgcccaggccggcggctcggtcccgccaccggccggcggctcgcggagcccggccgacccgcccgaacgcatcttacctacacgcgggggggggggacaacacgacccaacttcaagagctcattgctaacctggaaacaattcctaacacatggtccccaggacctcatataaaccctattcagatcgagaaggatggggacacaaatcttcatatggactggatcgctgactttgccaacatgcaggctatgaa

SEQ ID NO: 454380 - DNA, 395 bp, Sorghum bicolor
acgcgtccgggcgccgaggaagctgaacaagacccttatcgtgggccgtcactcgctgcccggatggacggtgcagggtcacgtggagtacgtctcgggcgggccgcagccagggggcatgttcttcgcggtgccgcacggcgtgcacgcgctccgactaggcagccgcgcgtccgcgtcgcatagcgtgacggtgcgtacgggcgcactatactcgctcacactcgtggtgacccaaactcgcgcacactaggactgcgtgcaatgcagcaacttgacaacttatagttctctggacttggtcagtgcacacactctacaggactcaacctttttgatgactggaatcgatcgcaggagaacctcgaaggcagtgacgatcactacttgatgga

SEQ ID NO: 454381 - DNA, 332 bp, Sorghum bicolor
  unsure (1)..(332): unsure at all n locations
gcgtccgcccgcgtccgccggcagtgtgtaggctcttgagtcttatccgcccacccgcgggtcgcggactcgccgccgcacgccgcccaggccggggctcggcccgcaccggccggacgtcgcggagccaggccaccagccgagggtactaacctacacgcgggggggggagaaatactgcccttattcaagagctcatagctaacctggaaacaatttctaaaacagtgccaccagnatctcatataaaccctatacagatcgagaaggatgatgacaccaatcttcatatggacttggatcgctgagtgtgccaacatgcaggctaggaa

SEQ ID NO: 454382 - DNA, 398 bp, Sorghum bicolor
cgtccgctcacatgtccgttctattggagagtaaggggggcaagatgacataacaaatgatggtcactgatggatgaagcttagcttgaatacaggattaagcgatcgcatcacactctgacggagtgctgagaatagatttcatactagctgattactacaaatggacactgaagccgttctgatattcatgctggataacgagttattggataaacagaaggaacttattgacacttggagagcgagcagtacttgtgacactgctgtttgatctgaatattcatgatgcttacaagcccttggtggaagcaatatggagattcaatgttggcgatataaataattttcctcacgtggcctggagttttgtaaatgatgggctgagtcgcacttcg

SEQ ID NO: 454383 - DNA, 351 bp, Sorghum bicolor
cgcgtccgctcacacgtgcgttctattggacagtaaggggggcaagatagattaacaaatagatcgtcactgatggattaagcttaccttgaatacaggattaagcgatcgcatcacactctgacggatgctgatactagatttcatactagctgattactacagatggaccctacagctgttctgatattcattctggataacgagttattggataaacagaaggaacttattgtacttggggagcgagctgtacttgtaacactcgagtttgacctgaatattcatcatgcttacaagcccttggttgaagcaataaggagattcaatgttggtgatataaataatttt

SEQ ID NO: 454384 - DNA, 471 bp, Sorghum bicolor
cgtccggatctacttggttctgtagatgagatattctatgatatttatgacagatatgaaccagtgaatgaaccatctcttgacaattgctttgtctcgacgagctatgatgccaccacacattttgaaacaactgtaacagatgttctgaacatgtatacaatgatcactggaaagactgtggatcttagtgtggatctgagtgctgctagtgctgctgaagaatattgatttcagtcatcatgtttatcaaagatcacatcgtcagggacagcacatggaaacttcaatgaatggctggtatggtttattccggtccagattatatcatgccccttctactgttctgcgaaatgtctactgggtacttgttgctggcagaactatgcacaatattgactacgtgatggacggcgatggctctatcttatttactagtgttgatcgaatggtgtaaaatgttatacccgt

SEQ ID NO: 454385 - DNA, 442 bp, Sorghum bicolor
cgtccggcagatgatttgctgctgcaacaagatggatgccacgacacccaagttcttgaaggccccggtattgattagattggtaagggaggttttttttaaccttaaaaagggtggattccacccaaaccagaatcaatttggttccaatttttgttttgaaaggtaccaccttatttaaaaggtcaaccacccttaattgttccagggccccacccttgtttgaggctctgaactaaatcaatgacccaaaaagactttcaaacaagcccttgcgtttcccctttaaggatgtgtacaaaattggtggtatgggaactgttcctgtggaacgtgttgagactggtttcataaagccggttatggttgccaccttcggtcctagggccctaacaactgaggttaagtctgttgagatccacaacaaggttctccaggaggc

SEQ ID NO: 454386 - DNA, 560 bp, Sorghum bicolor
cgtccgtgggatttatatcggtaaatcctgcatcctggtcagtaacaccatcaagcccggcgttcatccatgccacacctggagttcagatggtcgctggaggagatgatcttgggcaacaatacaacactcctgagtctgtggtaaactacaggggcagtgacataatcatagttggacgtgggattataaaggctagcgaccctatgaagacggcatgggagtaccgcttgcaagggtggcaggcatacaagaacagcttgctatgagaggggcgtcgtgagcattccaagggcaaatccaggcgattggcgtaataagagcatacggaaaggtctccctacagttgagtcaggacctaattgcaatcagactcactgcagaggagattcatccagagcatgcttcatcatcgtttgtgttagaataatttcctcttggttcacaccgttcgtgttggtcgagttattaggcattgtgatgcctgtgttgggttagatcgtcttattgccactctgggttagctccggactccgagcaatgtgatgcttttgatgccg

SEQ ID NO: 454387 - DNA, 550 bp, Sorghum bicolor
cgtccgcccacgcgtccgggaatatgggctagcccaactccttcgccattgttacctactttgcgtgctctagttcaggctggtgtatgcatggggttatatttatacctgtcacctaaatttccactctcacggtttagtgagcccttatattatgaatggggtttctggcaccgactcttctatcagtacatgtcaggcttcactgctcgttggaaatattactttatatggtcaatttcagaagcctcaattatcatatctggtctgggctttactggttggtcagaatcttctcccccaaaagccaaatgggatcgtgcgaaaaatgttgatgtattaggtgttgaattagctggaagtgcagttcaaattccccttgtgtggaatattcaagtgagcacatggttacgatactatgtctatgagaggctaattcagaaaggaaagaaaccaggtttccttcagttgttgggtacacagacagtcagcgccatctggcatggactgtatccttgatatatcatattctttggtcagtcagcattga

SEQ ID NO: 454388 - DNA, 531 bp, Sorghum bicolor
cgtccggcaggagactgattgcgcacagcaggaggctattgatttgaaatctaaacttcagtccaaggaagctgaaatcgaaaagctgaaattcgagcatctgaaaattactgaggaacattgtgatttgatcaatcagaaccataaattaagtgaggaagctgcatatgcaaaagaattggcatcttcagctgctgttgaacttaagaatttggctgaagaagttacaaagctatctgtactaaatgcgaagcaagcaaaggagttattagttgctcaggagatggcacattcaagggttcatggtagaaagggtcgtgcaaccagtaggggcagggatgaggttgggacatggagcctcgatttagaggacatgaaaatggagctacaggccagaaggcagagggaggctgctttggaagctgctttggcagagaaggagcttctcgaagaggagtacaagaaaaagtttgacgaggcacagaaaaagaactatctttggacaacgatctagcaggcatgtgggttctt

SEQ ID NO: 454389 - DNA, 462 bp, Sorghum bicolor
cgtccggtattctcctcgaaggcatttgttgccggggctgtggcgtattttctggacaacaccctgcataggcgagacggcaccgtgaggaaagaccgggggcaccatttctgggacaaggttaaggtccctttaagattggacccgcccaggggggagttttacttccttccatttcaacctaaccaggtttttccaatccttctgatcttgttgttgttaactgaaaacagaaaatgctgttcgattaggttgttgtttgattttgccattgccacgcccaagtggctgtttttcctacttctggtggacccttggagctggagttctgaatcttgtaaagctaagcctaccttattcggaaggaatggagaaatggctggttattttggatggaaatggggttgggttctcggttagatgaagaaatggaaaggagacctgctccagtactctttctat

SEQ ID NO: 454390 - DNA, 426 bp, Sorghum bicolor
  unsure (1)..(426): unsure at all n locations
cgtccgcgttcgtcggctcgggggcatacgccgcgcactggaccggcgacaacaagggcacttgggaaaatctccgctattccatctcaacgatgctcaactttggcatcttcggcatgccaatggttggctctgacatctgtggcttctacccggcgccgactgaggagctctgcaacaggtggattgagctcggggccttctacccgttctccagggaccatgccaacttcgcgtcaccgaggcaggagctctacgtctgggagtcagtggcgacgtcggcgcggaacgcgctcggcatgcggtacaagctgctcccctacctgtacacgctcagctaccaggcgcacctgaccggggcacccgtggcgcgcncggtgttcttctccttccccgacttcacgccctgctacgggctgagcacgc

SEQ ID NO: 454391 - DNA, 239 bp, Sorghum bicolor
cgtccgcgacccacgcgtccggcaggaggttatgagaatgaggatgatgacacagatgtgctggtgtacagtggtcaagggggaaatagtatgaatactgaggagaggcatgaccagaagcttgagaggggtaacctagctcttgagaggagcctgcataggaagaatgtgatatgggttcgacgtggcttcaaggatccattttgcctaactgggaaaattttcatatccgatggcct

SEQ ID NO: 454392 - DNA, 528 bp, Sorghum bicolor
  unsure (1)..(528): unsure at all n locations
cgtccgctttgaatggggaccttaagaaccagtttgttgagactactgttggctttgacaccatatgcaaggtgaacgcacaacttatcagcaatatgtgcactgatgctctatctgctgagaagtattactactttattcgcctgatgggacgtaaggcttctcatgtggcattggaatgtgctcttcagtcacatccgaacatggtcatcctaggagaggaggtggctgcttctaaacttacaatttttgatattacgaagcagatttgtgatgcggttcaggcaagggctgaaaaagacaagaaccatggggttattcttattcctgagggccttgtggagagtattcctgaactatatgctcttcttcaggaaatccatggtctccacggccaaggtgtttctgttgagaatatctcttctcagctttcaccttgggcatctgcactctntgagtttttgccccttttatcaggaagcagctacttctccatcctgaatctgatgattcagctcaactttctca

SEQ ID NO: 454393 - DNA, 465 bp, Sorghum bicolor
cgtccgtcgacccacgcgtccgggaatgtacagattacagaacactacaacattgcccatggtggtgccagactcaagggtgaattttccaggatcgattatcaatctagaccttacgtaaggggtgtttcatcttttaggcatcttattgcaaaactgcctccaagggcacactctatttattacagagatgagattggtaatatttcaacatcacatgtgtggagtgattctatgaagacccaactggaaattgaaccaaggtttccattgtttggtgggtggcaaacaaccttcactgttggttatggtttaccacttgaagactttgttttctattctgatggaaagagatttctcaatatcacatttggttctccattggaggaagttctcattgaaaagcttggtgtaaaggttgttctacctgaaggatcaaaggatatcgaagtttcagctcccttt

SEQ ID NO: 454394 - DNA, 529 bp, Sorghum bicolor
  unsure (1)..(529): unsure at all n locations
cgtccgcggacgcgtgggggccgcctgagggcctcgccggcgcggaagatgtacgtcgtcaaacgggacggccgccaggagacggtgcacttcgacaagatcacggcgcgcctcaagaagctcagctacggcctcagccaggaccactgcgaccccgtcctcgtcgcgcagaaggtctgcgcgggggtctacaagggcgtcaccactagccagctcgatgagctcgccgccgagaccgccgcggccatgaccgcgtcccaccccgactacctcaacacccagtactacggggtcgtcggcctcggcacgccgccgcagaacttcaccgtcatcttcgacaccggcagctccaacctctgggtccnctcctccaaatgctacttctcgatagcgtgctacctccaccccagatacaagtccgccaagtctagcacttacaagaaggatggagagacttgcaaatcacctatggctctggtcaattgctggattcttcagctacgacgacgtgctggttggagaccttact

SEQ ID NO: 454395 - DNA, 286 bp, Sorghum bicolor
cgtccgcttttgcgggtgctgtttccaggacttgtgtggcaccactggagacaatcaggactcatctgatggttgggagcaacggtgactccatgacagaggtgttccagtcaatcatgaacactgaggggtggactgggcttttccgtgggaatcttgtcaatgttattcgagttgcgccaagcaaagcaatcgagctgtttgcttttgatactgccaagaaattcttgaccccaaaggctgatgagtccccacagaccttcctacctccatcactcgttgctgg

SEQ ID NO: 454396 - DNA, 519 bp, Sorghum bicolor
cgtccgagatgattgccttttagtgaactgcactgttggcgttgttcagtcacataccgaaggaccaaagatatacacgattccagtaccgcggtcgaacatggctctacatattggtcagctattgacaagtggcaagaggacagatattgctttcgaagttgatggagagatgtttcctgcccacaaagtgattctttcagcccggtctcctgtttttagggcccaactttttggtccaatgaaggataaaaacatgaagtgtataaagattgaagacatggaggctccagtattcaaggccttgctccatttcatgtactgggatgagttgccggatattgaagaacttactggtgtaaatacaacttgggtatccaccttgatggctcaacatttacttgctgctgctgaccgttatgcattggagagattaaagttgctctgtgaacttaagctgtgtgaagatgttcaataaacacagtagcacatactgtggcactggctgaacagcaccac

SEQ ID NO: 454397 - DNA, 637 bp, Sorghum bicolor
cgtccggcggctccgggtggcgctcggcgcggcgcgcgggctggcctacctccacgagctcgccgacccgcccatcatccaccgcgacgtcaagtccagcaacatcctcatggacgagcacctcacggccaaggtcgccgacttcggcctctccaagctagtgtccgacagcgagaggggccacgtcagcacacaagtgaaaggaacactgggctatctggaccctgagtactacatgtctcagcaactgaccgagaagagcgacgtctacagcttcggcgtggtcatgctggagctcatcgtcgcgaagcagccgatcgagaagggcaagtacatcgtccgcgaggcaaagcaggtgttcgacgccgacgacgccgagttctgcgggctcaaggacatggtggacgcaaggatcatgaacaccaaccatctcgcggcgttcggcaagttcgttcagctggccctcaggtgcgtcgacgaggtggccacggcacggccgtccatgagcgaggtcgtcaaggagatcgagatgatgctgcagagcgaggggctcagcagcgcctccacgtctgcctcgacgtccgcgaccggattcgacgtcaccaagggggctccttcgcacccgtacaatgatcct

SEQ ID NO: 454398 - DNA, 500 bp, Sorghum bicolor
  unsure (1)..(500): unsure at all n locations
cgtccggctgttaagaagcagtacagaaaggcgacgctatgcattcatcctgataaggtgcagcagaagggcgcaacacttcagcagaaatatattgcagaaaaagtctttgacattcttaaggaggcatggaataaattcaactccgaagagctcttttgaagcaatccctgtgaatataaatatatggacagcttaactgtaataccaacatgaattgccggagtggccaaggcacagatgaacaaagtgaaagctccacctcaattaccttggattctgttcagttgctcgtgttgttgccctgatctgtacctgttcactccaaatgtatatgcagccttctactcatctgagggccaatggcatgtcttcttttttttggatagttnttacagggtggtttggaccacattgtaatgtcttcttaaaactattgtgtacaatggaccacagaaattcaaactacacttgctctctagccttgttgattttctacc

SEQ ID NO: 454399 - DNA, 415 bp, Sorghum bicolor
gcgtccggaattctgagatgcattacacaagtatgccattgctcataggtttcattacaaatttgtcaagaatgactcttctcgtgtaaccgcagaatgtactgatggagggtgtgcatggcgtatacatgcatcaaagtctcattcaaaggagttcatggtcaagaaagtttttggtactcatacttgtgaatcagagaccatcaaaagtcatcgtttggcatctcagaaatgggttgctagtgttattaaggaaaaaatacgtgatagtccaaactacaggccaagagatattgcgaatgatctccaacgtgaatatggattgtgcctcaactactcccaagcttggcgtggtaaagcaatagcccgaaaagaactttacagctcagatgaagaggcatgcaatcagctacct

SEQ ID NO: 454400 - DNA, 545 bp, Sorghum bicolor
cgtccgaacaaatatgaggatgcttccactgaaagtgagcgtggtaagtctgccatgtcaccaagcagcaggcctcctgcagtggaaaacaacaatcagcatgaggccagggccatggctcagcatgagaatgggaatgttacttcagtcgagaggctattgcctaagcttccacgtgcagattacttcacagagcctagtatagaggagattgcggccaaagaacgtgcacaggcaggttactgtggtcaggtgagggactttgttgtggggcgacatggctacggcagcatcaagttttttggggagactgacgtgaggtgcctagatctagagtcaatcgtggagttcaacaaccgggaggtgattgtgtacaaggacgacagcaagaagcccccggtgggtgaggggctgaacaaagctgcagaggtgactcttctgaacatcaagtgtgtgaacaagaagactggggagcagtactgcgagggggcaagggtggagaggtaccaggagatgctggtgaagaaggccgaggagcagggtgc

SEQ ID NO: 454401 - DNA, 551 bp, Sorghum bicolor
  unsure (1)..(551): unsure at all n locations
cgtccgtgttctccaagctactccatccccaccatttcaaattgcaatcttgcaatcttgcagcagctgatggattagcagcaggacaaagactgatagatccatccagacaagcgcacgccaaagaccgcattcgccaagcagcggcggcgcggggttgatggagacgcggcggccccggcgcggcgggaagaagcgcttcctcctcccgctcgcgctcctctgcctcgccgtgctgctccccggcgcgctgctcccgccgtccgcctcggcgtcatcctcgtcgccggccgtgggaggtggcagcaggaagcggcggtgggtggggtttgactactatgtactggcgctgcaatggccgggcaccatctgccgcgagaccagcaactgctgcgacaccaatggctgctgccgatcgaagcctctcaagtggttcacgattcatggtctctggccacagtacaattatggnggctggccatcatgctgcagaccaaccaaattcaacataaataagatattaatgctgatgccaatacttgagaagtact

SEQ ID NO: 454402 - DNA, 241 bp, Sorghum bicolor
cgtccgcggactcgtgggcaaccatggccccaactctaacgcgtgctgataggctggttggccaggttcttggtgaagttggttcactacctgatgtttatgtagagcttgagatcaatttcttcctactccggaggctgttgggtgtgaggacgaaaggtacagttttttttttcgaaggtgtgggagctcaccaagggcgagatcctcatgcttaacataggatccatgtccacaggcg

SEQ ID NO: 454403 - DNA, 325 bp, Sorghum bicolor
cgtccggccgagttcccttccacttccagttccagccttcactcagcacggcagccttcgatcccccgagactgcagccgcccgccgcccgcgccatggagccagccgccctaccgcaggttccccgcgtcaagctcggcacccaggggctggaggtgtcgaagctggggttcgggtgcatggggctcacgggctcctacaacgcgccgctcggcgacgaggccgtcgccgccgtcgacgcgcacgccttccgccgcggggtcaccttcttcgacaccttggatgcctacggtcaccagaccaacaagactctgctggggaaggc

SEQ ID NO: 454404 - DNA, 608 bp, Sorghum bicolor
cgtccgatttgccttccccagaatggcatatctgcaatagatgctccaggaatgccattctatgacccagaagctacatctacactattgggtgaattaaacacccttataaagagaaccgacatccgagaggtgaagctgcttccttatcatatcaatgaccctgaattcgcagatgcattggtagatgcattcttgagtatggatgtaaaggcctctagttcagcccaacctaatcaaggtcttaatataaaaaggtcctgttcttcaggacagaaaatttcagatagttctgttatatggagacctcctgtggattttccggatgcaaaaccagaaacattgcggaagacgcggtcaatattacataaactaaaggaacaaatcagtgaaggtattccagttattggagctggtgctggcacaggcatatctgcaaagtttgaagaagttggtggggttgatcttatagtgctgtacaactctggacgggtccgaatggctggcaggggctcactagcagggctcttggcctttgctgatgcaaatgccatcgtaccttgagatgccaatgaagtcgtccccgcgggtaaaaggatttcctgccc

SEQ ID NO: 454405 - DNA, 491 bp, Sorghum bicolor
  unsure (1)..(491): unsure at all n locations
cgtccgcggactgcgtggggaagaaccagctgaaatcactcgtccaagaacaccacaccaccagtccaccaccacaagtagagatttcgtcttggagagccaccaccaatggcttgttccactgcatctttagcggcgacgctgctggcgttggcgctgatgttccaggcctccctcgcggggaggaggctcaccgcgctcgtgcaggagccggccatcaccatgaagtaccacaagggcgcgctcctgacgggccccatcgccgtcaacttcatctggtacggcgacttctcggcgccgnagcgcgcggtgatcaccgacttcgtctcgtctctgtccgcgccgccggcggnggtgcagccggagccgctcgtggccacgtggttcaagacggcgcgcaagtactacgccagctccaaggtgcggttcccggcgcttcgccttggctcccacgtcgtcgaccagacctgctccctcgtcaagcgcctcac

SEQ ID NO: 454406 - DNA, 355 bp, Sorghum bicolor
cgtccgcggacgcgtgggtccggtccctgctggtgcagtacccatcccaccggatgccaactcccatagtatggcgacccatggaaaaacagggtaccggcagcctcgccctgccctgcatgccgaggccctgtctcctctcccgtggtcctgccgggatgctctcgctgatcctcattggcgctaggccatggaagatgaatatgctgctctccagggcaatcatacttgggatcttgttccccgccctgccaaagccaatgtggtcactggctactggatcttcaaagcccagctcactgctgacggttctctgcagcgctacaaggcctcggtgtgtgcttcgagggtccac

SEQ ID NO: 454407 - DNA, 572 bp, Sorghum bicolor
cgtccggttaagagggagttcaatatgagacttacagatattgttacacaattcaagatgcaaggagtgaatactgctttgtactacaagaacaaggagatggaagatacctttaacatagtgcctacgagtgctgtaagtggtgaaggcattcctgatttgcttctattgttggttcaatgggcacagaagacaatggaagaaaaacttacttttgttgatgaagtccagtgtactgtactggaagtcaaggtcgttgaaggtcatggtactacaattgatgttgttttggtcaatggtatactgcatgaaggagatcaaatagttgtttgtggcatgcagggacccattgtgacaactgtcagggctttgttaactccacacccaatgagagagcttcgagttaagggtacctacctacatcataaggagatcagagctgcacagggtgtcaaatatctgctcagggtctcgaacatgcaattgcagggaccgctctttaacggtaaggacctgatgatgatttagacaaactgaatggagctgtcatggaaagatgactagggttagga

SEQ ID NO: 454408 - DNA, 603 bp, Sorghum bicolor
cgtccgcccacgcgtccgcaaaattgatttctggatctagtgaaggaggtgcagctgtattcaagcttttgtacaatggtcaacctgcctgtttagcacagtctcctcagttgtacaagcaaatggctatctgtggtggttttgaacgagtatttgaggttggccctgtgtttagagcagaaaattcaaacacacacaggcatctctgtgagtttgttggtcttgatgctgaaatggagattaaggagcattattttgaggtctgtgacattatagatggcttattcgtatcaatatttaaacacctgactgaaaactgcaagaaagaactcgaaacaataaacaggcagtatccgtttgaacctctgaagtatctagacaaaaccttgaagctcacttatgaggaagggattcaaatgttgaaggaagccggaacagaaattgagcctatgggtgacctcaatactgaagctgagaaaaaacttggtcggcttgtcagggaaaagtatacacagattttttcatcttgtatcgatatcctttggcttgacgtccggtctacaccatgccttggtttgacacccaacttacaccaactttttt

SEQ ID NO: 454409 - DNA, 384 bp, Sorghum bicolor
cgtccgcccacgcgtccgcccacgcgtccggatgaggtgctgccaagaattaaaaggcttggatacaatgcagtacagataatggcaatccaggaacactcttattatgcaagctttgggtaccatgttacgaacttttttgcgccaagtagccgttttgggactcctgaggacctaaaatctctgattgacaaagcgcatgagcttggcttgctagtgctcatggatattgttcatagtcattcatcaaataataccttggacggtttgaatggtttcgatggcactgatacacattacttccatggcggcccacggggccatcattggatgtgggattctcgcctatctcattatgggagttggtaagtcttgagatatcta

SEQ ID NO: 454410 - DNA, 327 bp, Sorghum bicolor
cgtccgaccagaccggacgccgaacgcaccagggtttgaggcatccccgaattcccccaccgccccccgccgccgccctcctgcttccccaacacccctcggccccgccgcctcccctcgcttcggtcctcggttaaccatccaggttctgtcaacatgtctgatagccatgagacggacaggaacattgagatttggaagattaagaagctgatcaaggcattggagtcagccaggggcaatggcacaagcatgatctctctaatcatgcctccacgcgatcaggttgctcgagtggctaagatgttaggtgatgaatatggaact

SEQ ID NO: 454411 - DNA, 325 bp, Sorghum bicolor
cgtccggcttacagcttctcggatcaaagcagaaatggagaagattttgcgatggcttgtcccttttgctagtaacacaaataaggcacaccacggcttcggttgggttggagagtgggcaaatacaggatctgaattaaactgcaagctatcagggcatatggacatgtcccgaatcgagacactgtatcatgctgacaaggagaagactgaagcacttatcctggagctggtcgtatggcttcatcatcttatcagtaaatcaagaaacgctagtggaggtgtaaggtcccccatcaaatctccagtcagctcaccaacacaa

SEQ ID NO: 454412 - DNA, 328 bp, Sorghum bicolor
cgtccgctcagccgcgtcgcgtgccattcccatagcattctgcgattctaagctatctgttggcagccatggggaagagctaccagaccgtgagcgccgagtacagcgaggtcaccgagaaagccaggctaatgctccgtgctctcatcgacgacaagagctgcgccccactcatgctccgtgtctcgtggcactccgccgggacgatcgacgtgtggtcgaggaccggcggtcctttcggtacgatgaagaaccctgccgtactggcacatggcgcctacgcggtgctggacatcgaggtgcggctggtcgagcccatccaggagga

SEQ ID NO: 454413 - DNA, 371 bp, Sorghum bicolor
cgtccggctgctcaagcatcacgagagagttctgtatgtcgacatcgatatccaccatggggatggagtggaggaggctttctacacaacagacagggttatgacagtctcgttccacaagtttggggattatttcccaggaacaggggatatccgtgacattgggcactcaaaggggaagtactactccctgaatgtccctctggatgatgggattgatgatgaaagctaccagtctcttttcaagccaatcatgggcaaagttatggaggttttccgccctggtgcagttgtgcttcagtgtggtgctgattccttgtctggggataggttgggttgcttcaacctctcaatcagaggtcatgcggaat

SEQ ID NO: 454414 - DNA, 436 bp, Sorghum bicolor
cgtccgcacagaagaagctgtctatctttgcacaggaaaccccatgccaaatgatattgagcggatagcattttggctattaaatgaaccattttcaactagcttcaaacatatatctgacatgaagatgagaaaaggtctggccttggttgatatcatacgggaggttactatgtttgtgttcaaaatagaaatgccatctgatgttcgtgtaaagctaatcaataacttggctgatatcgaatacaggctaagctttgcatgcaacgataaactgcagctgggcgcactgatctcagctttcacagatactcgcacggctatggttgctgctgccagctaatttcagcaatgtgaaggatctccgcccccctctggaatctgaagatgaagcacatctatattttgtgggtcatcgtcttgcctttagtgagca

SEQ ID NO: 454415 - DNA, 466 bp, Sorghum bicolor
cagctgctggccgaatcgctccttattttgtagaaaggtttcagtttgataagaactgtttggtcattcagtggtctggagacaatcctaatagccttgcaggtttaactttgaatactcctggtgatcttgccattagccttggtactagcgatacagtattcgggataactgcagaagctaaaccaagcattgaagggcatgttttccccaatcctgttgaacccgatggttatatggtgatgctatgctacaaaaatggctctttgaccagagaagatgtgcgaaatcggtgtgcagacaaatcatgggatgtttttaacaattatctggagaaaacaccccctctaaatggtggaaagttaggattctactacaaagaccatgaaatccttccaccactttcagtgggtttccatcggtacgctgtcgaaaacctcaatgacgttacatcagacactctgtg

SEQ ID NO: 454416 - DNA, 322 bp, Sorghum bicolor
cgtccgcccacgcgtccggatgaggagcacagtggtcccgctctaccagccagcgcggctcgccgggctcattccagtgatgcagtcgtatgtggacatactggtggccaacatcgccggctgcccggaccaggactgcatccccttctgtcagctctcgctccggatggccatcgacatcatcggcaagacggccttcggcatcgagttcggcctgtcaaagaatgccgcaggcggcagcggcgagaccgaaggcggcgagggcgacgacaacgtcagggagttcctcaaggagtacaagcggtccatggagttcgtcaag

SEQ ID NO: 454417 - DNA, 418 bp, Sorghum bicolor
cgtccggaagaaccgccgcgagatctgcaagtacctcttccatgagggtgtcctgtatgccaagaaggactacaacctggccaagcacccgaagcttgatgtgcccaacttggaggtgattaagctcatgcagagcttcaagtcaaaggagtatgtgagggagaccttctcctggcagtactactactggtacctcaccaacgatggcattgagcacctccgcaccttcctcaacctgccatcagaggttgtgcctaataccctcaagaagtcctccaagcccccatctcggcccttcggctctggcccaccgggtgaccgccccaggggtccccctcgtttttgggaagacagacctaggtttggggatagggatggttacagaggagctccacgtggtgctccaggtgattttggt

SEQ ID NO: 454418 - DNA, 311 bp, Sorghum bicolor
cgtccgctgaagcatgcgctacatgtgccgctagactctcagcaggcatctcagcgaacggcgcaggcattgtcgaacgtgctatatgccatgcgcaaagctatctacagaatgctctattgtatgcaaacacttaggagcacacgtctgaacgcagagctgatgaagcaggtccatgtggcagatcatggtgatcatcagctaaacaagatgcttgccgacatacatgccgacttcaatactgacaacattagtggctaggcatgggatatggatgaagatatggctgaagatgtggtggaagatgctgt

SEQ ID NO: 454419 - DNA, 310 bp, Sorghum bicolor
cgtccgagcttcttcgcgtgtggtcttcctccgatctcagccccgttgcggagctcgcgggccatggagagggcgtctccgatctctccttctcccccgacggccgcctcctcgcctccgcttccgatgaccgcaccgtccgcatctgggacctcgccgtcggcggcggggcccgccttatcaagacgctcacgggccacaccaactacgccttttgcgtctccttcagcccccatggcaacgtcctcgcctcgggatccttcgacgagacggtgcgcgtgtgggaggtcaggttccgggaagtgcctcc

SEQ ID NO: 454420 - DNA, 438 bp, Sorghum bicolor
cgtccgcccacgcgtccggaagggaccaatggaatatgcaccagaactgtttgatgagcagaaggatcaagctgctgttgagaagatcctgaaggttgttttcttggatgtaaacgctcaaagccctcaactggaaaaggtcaacaatcaaatagctgaggcagaagctgcacttgaggcacggaagaaacctccggaagaaaatggcccaaaaattgttggtgaagggctcgtcattgatgaatggaaagagcggagggaaaggtaccttgcgcagcagcaagttgaagtggtcgattcggtgtaaattgcattctgctgctccacaatctatgcatatggcttcaacaagggcagtgacattcttgtaaactcttaggtttcattgtagtggaatgtttgtggtagtctaaggttgcgcttgcaggatgagtcccc

SEQ ID NO: 454421 - DNA, 379 bp, Sorghum bicolor
tcggattcccggtcgaccacgcgtccgcagggcttcctagtcttcaatgctgttggtggtggcaccggctctggacttggttcactcctccttgagcgcctgtctgtggagtacggcaagaaatccaagctgggcttcactgtgtacccatctccccaggtgtcaacctctgttgtggagccctacaacagcgtgctctccacccactccctcctggagcacactgatgtctccatcctgctcgacaacgaggccatctacgacatctgtaggcgctccctggacattgagaggcccaactactccaacctgaatcgccttgtgtctcaagtgatctcatcacttactgcttccctgagttcgatggtgccctcaatgt

SEQ ID NO: 454422 - DNA, 285 bp, Sorghum bicolor
cgtccgagaacataaccctcaacgcaaagacttttggtgagacaaaggttaaatctatgatactgcattgggacaaagagcaagcttgggaaatattgaatacttttgacatcattgttgcaagtgactgcacatttttcaagcaatttcatgagggccttgcccgaacagtcaaatccttgctgaagcattcgacaacctcacaagctatctttctgagccccaaaagaggcgattctctagacaaattcctgggagttattaatgagaatggtctgtgttgtg

SEQ ID NO: 454423 - DNA, 302 bp, Sorghum bicolor
cgtccgcccacgcgtccgcctgcctctgcctgccactagcagcagcaagcggagaggcggcgagggcgtccgtcaggggggagagctcctgccgtgctgcgcttcgtctcccgtcccgttggttcttcccgagctcgtcagcaatggagaatctgagatctgaaaacggccaccaaggtgttgccatggagggcgtcaagtttgcgccggagatggccaacaccaaccggagagccctcagtgacatcaagaacataatatgaggcccgcaccaacacttgtctgttagcaagaggggtctt

SEQ ID NO: 454424 - DNA, 420 bp, Sorghum bicolor
cgtccgcccacgcgtccgggcggccaactgaattaggacgaaagcaacgaagccgaagcgagtggagaggaagacgacgacgtcgtagcagcagcaggacgcaggagaagggaagaaacgagggatctacgggaggagggtggtgggcaggaagatagaaggtacgtgcgagcagagagccgttcctcatggaggcggcgatggatctgatgcggcggatgccgccgcggagcgcggagacggcgctcaacgcgctgctctccctcctccccgaccactccctcgacctcctctcccaggtcgacctcccgctccaggtttgcatggataaagagagcttgaaggcatacattctatgccaatataaccgtgacgctgacttctaccgatctccttggtcgaataattatgacccccttt

SEQ ID NO: 454425 - DNA, 328 bp, Sorghum bicolor
accgtcccgattcccgtcgaccacgcgtccgttcgccactctccccgtgcgcaaatccgtagatggaaggggacaaaatgcccagggtgaggctcggtaagcagggtcttgaggtgtccaagcttggcttcgggtgcatgggcctcactggtgtatacaacgcccctgttcctgaggaagctgggatcgccataatcaagcacgcgtttgaggccggcgtcaccttcttcgacaccgctgatgcctatggaccacataccaacgaggtcctgcttggaaaggcattgaagcatttgccccgtgagaaggtgcaagttgccaccaaatg

SEQ ID NO: 454426 - DNA, 442 bp, Sorghum bicolor
cgtccgatggcactcccatcgacaattggtagccttagatacttgacaaagcttgacctccactcaaaccagttgatcaatctgcctgatacctttggggaactttcctgcctgattgatcttgacttgcgtgcaaaccagctaaagtctcttcctacatcatttggaaatctcacgagccttgccaatcttgacctgagctcgaatctgttgaaggtccttcctgattgtttaggaaagttgaaaaacttgagaaggttaattgctgagacgaatgagcttgaggagctaccctatactattggatcgtgtacctctcttgtggagcttagattagattttaatcagctcaaagcccttccagaagccattgggaagttggaaaacctggaaattctgacgttacactacaacaaaatcaaaggccttgctacaacaattg

SEQ ID NO: 454427 - DNA, 329 bp, Sorghum bicolor
  unsure (1)..(329): unsure at all n locations
cgtccgaaaggagagcgtagatttggagcttcttcactaggaaggaagagggagagggagagggggagcgatggcggactggggccccgtgatcgtggcgacggtgctgttcgtggtcctcacgccggggctgctctgcacgctgccgggccggggcagggtggcggagttcggcagcatgcacaccagcggcctcgccatcctcgtccacgccgtcctctacttcgcgctcatcaccatcttcctcatcgccgtcggcatccacgtctacgcgggctagtagccgagccggccgttgccggngccggngcaggatacgatatgcagtg

SEQ ID NO: 454428 - DNA, 366 bp, Sorghum bicolor
cccggtcgacccacgcgtccgatcgagatattaagccagacaatttcctcatgggccttggcaagagaatgaatcaggcatacgtgattgattttggattggcgaagaaatacagggacagtacaaaccagcacattccatacagagagaacaaaaatttgactgggacagcacgatatgcaagtgtaaacactcatctcggaattgaacaaagcaggagggatgacatggaatcacttggatatgtactcatgtacttcttaagaggaagtcttccttggcaaggtctaaaagctgggaccaagaaacagaagtatgagaaaatcagtgaaaggaagatcgctacttcaggtgaggttctctgtc

SEQ ID NO: 454429 - DNA, 349 bp, Sorghum bicolor
acgcgtccggcggcggtggcgaactggaaggcgcaggaggaggtagcgaggagacagcatcaggcgtcgccgcatgagctgattgccacctcgagctcgtaaccatgaataggggattgaataagcatctaaagaggctcagtgctctcaaacattgaatgctggacacgcacgatagatcttttgcccactagccatcttgtggttctcataagttcacagagtgcctgcctctgatcctcatcatcaagaacacgctaacgtgtgctctgacataccgagaggtcatttctatcctgatgcaacgccatgtacttgaggatggctaggtcaggactgacaataccta

SEQ ID NO: 454430 - DNA, 324 bp, Sorghum bicolor
cgtccgatgagcaccacctccctgctcctccccttcatcctcaccacaaccccttcctcccgtcctctcaatgcccctccctgcaagacttccgaggtatggcgccaatgctggggaagcgtccgatgtacggcgcggacgtcgtcgccggaggaggcgacgaggtgaacggctgcggcggcggcggcggcgcgaacgaggacgagctgtcggacgacggctcccaggccggggagaagaagcggcggctgaacgtggagcaggtgcggacgctggagaagaacttcgagctcgggaacaagctggagccggagcggaagctgc

SEQ ID NO: 454431 - DNA, 298 bp, Sorghum bicolor
cgtccgaaggagtcaagcaactcagatgagaagtgtaatgagtttgcatctgctgagtcggaggactcggtgtcaggtgttctatatgatatgctgcaaaaggaggtcattgctctaaggaaggcatgccatgaaaaggatcaaagcctgaaagacaaggacgacgcagttgagatgttggcaaagaaagtagatactttgacaaaagctatggagtcagatgccaagaaatcgaggcgtgagttagctgctatggagaaggagttggcagctgttcgcatggagaaagagcagtata

SEQ ID NO: 454432 - DNA, 182 bp, Sorghum bicolor
cgtccggctgctccgccgcagccgcggctacgcgtccgcggccaacccggagcggaaggtggccatcctgggcgcggcgggaggcatcgggcagccgctctcgctcctcatgaagctcaacccgcttgtcttctccctttccctttaccatatcggcgggaccccccgcgtcggcggcgacg

SEQ ID NO: 454433 - DNA, 317 bp, Sorghum bicolor
cgtccggccggagagcgtcgactggagggagaagggggctgttgcgcccgtcaagaaccaggggcaatgcggaagttgctgggctttctctgcagtaagctcagtagagagcattaaccaaattgttactggtgagatggtgacgttgtccgagcaggagcttgtagagtgctctactgatggagggaacagtggctgcaatggtgggcttatggatgctgcctttaacttcatcataaagaacggaggcattgatactgaagatgactacccttacaaagcaatcgatggaaagtgcgacatcaacaggagaaatg

SEQ ID NO: 454434 - DNA, 474 bp, Sorghum bicolor
  unsure (1)..(474): unsure at all n locations
cgatccnggtcgaccacgcgtccggttaatttggcgggtcttcctgcattggttgtgccttgtggatttgttgaaggtggacctgcagggctcccagttggacttcagctgatcggatctccattctgtgaggggaatttgctgagagtaggccacatctttgagcagactcttcagaatctcagctttgttccaccgttgttggcagagagctagtcaacataccgttgttggcagagagctagtttcaacataggcatctcagccgctcgacaagcaattacctgaggcccttctgtgcatcgacttcattcccatgcggaagaggttggtactacgcgtgtagaaaatagaatctttgcccgtggagttgctgataaatgtgagagagcaacggcacccatgcgatgtacgccagcaatcagcacattgcatacagcacagcattgtacacaccgacagaatgattgatga

SEQ ID NO: 454435 - DNA, 318 bp, Sorghum bicolor
cgtccgcttttcttttccttctcctacgcaaccagatcaaaccctagatcagatctcatccccccaccttcgtcatcccatgcggggaggttattatggattcttcgtcttcatctacgttcacccagtcgcaaagccagccggatttttattacctctataagctgcttcttatcggccactcggacttctgtaagagcattcttcttcttctctttacctacgactctttctaggatctctaccccaccataggtgtcgtcttcaaggtcaagatggttaacacctgttgcataaatcttatgcttgccatctggg

SEQ ID NO: 454436 - DNA, 380 bp, Sorghum bicolor
cgtccgaaaaatctggaacagaagttacggatgagacagcaatatatgatagctcaagttgctcagatatatcctgtgaggcctttggatgaacaatcttcagatcacaagcctggatttacctccaacataaccaaaacaagaaatgctgaaccagtgttgccaaatggctcccaaaacagacctttggttatattgggtctacaattatcaaagctttctgtgaaaaagactggctacttcagtgacaagacagaggttcagaaatcttcgactgttctgggatatgctgctcatgcagtctccctcattgcatcgtatctcaatgttcctcttcgatatcctttgcgctttggaggttcacggtcatatgttcttga

SEQ ID NO: 454437 - DNA, 391 bp, Sorghum bicolor
cgtccgtgctgttttgtctactgttatagcattgattatttgctgtctggctgcatggttgctgatactcagattcaggggtccgagtgacacggctcaaggatttccacgtactgtacttccaaaattttctaggtcatctggcacaggtcacacacttttagttggtgctggtcgctatagttcaccttcaggtccatcaggttcactgggctcaagcatcgcaacatatgcagggcaggcaaaaacattcaaatttgctgagattgacaaggccacaaatggctttgatgattcaaaagtacttggagaaggtggcttcggatgtgtctaccagggcacacttgaagatggaactactgttgcagtgaaggttctgaagagatatgat

SEQ ID NO: 454438 - DNA, 426 bp, Sorghum bicolor
cgtccggtttgtttggtgccctcaggtgtcatggcatcggcatgattgtgggggcattgggagtttccaaggagcaactgagggatgcactcttggaaggtaatgcacatggtttgggagtggaagccttgcggatgctcactcagatggtgctcagcaacgaagaagagcttaacctcaaatatttcaaggacgattccctgaccagactttgcccagtcgatgcttttttgaaggcaatgctggatgttccgtttgcgttcaagcgagtggatgccatgctttacattgccagtttctatttggagatcaatcaactgagaatgtcttatgctattcttgagggggcttgccaggagatgagaaacagcaggctgttccacaaagtccttgaggcagttgtgaatttcggcaatttcatgaaca

SEQ ID NO: 454439 - DNA, 419 bp, Sorghum bicolor
cgtccgcccacgcgtccggcccagcagacctttatccacagagatttgaagccatcaaacatacttcttggcgatgacatgaaggccaaggtggcagactttggattggtcagacttgcaccagctgatgggaagtgtgtctccatagagacaaggcttgctggcacttttgggtacctcgcaccagagtatgcagttactggacgagtgaccacaaaagctgatgtcttcagctttggggtcatcttgatggaactgattacaggacgcaaggcacttgatgagactcagcctgaagacagcatgcatttagttacatggttccggagaatgcagctcaacaaggaaacattccgcaaagcaatcgaccctgttattgaccttgatgaggagacatatgctagtgtttgtactggttc

SEQ ID NO: 454440 - DNA, 343 bp, Sorghum bicolor
  unsure (1)..(343): unsure at all n locations
cgtcgccacgcgtcggaaaccccaaatcgtcccttccctatccacctcgactcccttcttccatagcagcggcagcggcggcggcgggaagggcggcggagccatgggcggagccggcggcggcggcgaggcgaagcggtcggagatctacacctacgaggccgcctggcacatctacgcgatgaactggagcgtgcgccgcgataagaagtaccggctcgccatcgccagccttctcgagcaggtcaccaaccgcgtcgaggtcgtccagctcgacgaggcctcgggcgacatcgnccccgtcctcaccttcgaccaccagtacccgcccaccaagaccatg

SEQ ID NO: 454441 - DNA, 469 bp, Sorghum bicolor
  unsure (1)..(469): unsure at all n locations
cgtccgaggcatgcagaccaaatctggtgctcgtattcagttaataccccaacatcctccagagggtgttacattgactgaaagaattgtacgtattactgggaataagaagcagattgaaattgtaaaggatttgatcaagcaagctatgaatcagacattttcaaagcatacaaaccaatctggcggatatggtccacaaggttaccgacctcagggtcatggtgctggttctcagtgggggccacgttctcagaatcatggctatggatacccacctagaggtatgcctncacctcaaaactacaacgcaccctacggtggctacccgccgcagggaccaccaagaggtggtatgggctgggaccagaagcagggccctccaccccattcttcgtaccaagggtggggtgactactacaagcagggctctcagccatatgatagccaggcaacaagctacccttct

SEQ ID NO: 454442 - DNA, 427 bp, Sorghum bicolor
  unsure (1)..(427): unsure at all n locations
tcgacccacgcgtgcggatgaaatctccagaaggaaacaaagcgcaatagaggaaatcagaaaggtattcttttctcctgtgacacctgtgaacgtgtcagaatggagaactggccatcagagatgccccccagaacttcaagaggaggtacttgaggcactccatccaccatcccagatcacatcactttgcatcagaaactatgatggtcagagatacccacgttggttgtcaggggaacaggacactcgagatttgaacagcacagatatttcccacttgcaatatcttatgttctgggattgcaatggttcaagtattccccccaagattggtaagtttttcgttcatatctttaggctcacagttacaggctgcagttggacctctttgccagataactnggaccatcttgaatcactaaag

SEQ ID NO: 454443 - DNA, 535 bp, Sorghum bicolor
cgtccggcttgctctagcatctatagcttcagtggagattgacgaaatctcaaacagtcaagaggcaagagcaaaggttcaagaaaagatgaaagagttacgaagagaaagagaagggaagcttactcagagccttaaggaccgacttcaaccatatgtagatgggagaaaagatgaatttgtgagttacgcaagtgcagaagctaggcgtttatccgaagcagcatttggtgaggctatgcttcacactatcgggtatatttatgtgcggcaagcagcaagagaactcgggaaaagtagaatctatatgggtgtaccgtttatagctgagtgggttagagacaaaggacaccacattaaatcacaggttaatgctgcttcaggtgctatctctctaatacaacttcaagaagggatgaaaaagatggagggaagtgagaacagtgaagagcaacttattgagatgtttgaggagaaaaaagatgccatgcttagctcactttgtgaaattatgtggtggtattgatcaacactt

SEQ ID NO: 454444 - DNA, 238 bp, Sorghum bicolor
acgcgtccgctgagcaaatgctcacatgcaggctttaatacatgctgcacaagacagactgctaactattcgtgaaagcgctcggttgcatggttgtgctgacagtttcaggtttcgtggaacagtcaaagacagataccgccagacaggaaatgccaggtctgtacctgtcggtcgtgcgctgggtgttgctctggccatggcctatctgaacaagactggagatgaccatctgatg

SEQ ID NO: 454445 - DNA, 136 bp, Sorghum bicolor
cgtccgggtttgatggtgctatcaacgtggatgttactgagttccagaccaaccttgtgccgtacccacgtatccatttcatgctttcctcatatgcccctgtaatctctgctgtgatggcctaccatgagcagct

SEQ ID NO: 454446 - DNA, 260 bp, Sorghum bicolor
cgtccgccttgagaggctgaataagatcaggaaccaccgtggtctgcgtcactactggggcctgcgtgttcgtggccagcacactaagaccaccggcaggcgtggaaagactgtcggtgtgtcaaacaagagataagctctcttgaggcatattggacttatctagagtttcttttgtatgcagacatttatgctttgatatgccacatgatgtttcatatcttgttgatagatgtttgtccggttttacaagtctttta

SEQ ID NO: 454447 - DNA, 513 bp, Sorghum bicolor
cgtccgcggacgcgtggggtgcttttgcacccaatggacaatctgttgcctgtggtggtcttgatagcgcgtgctctattttgaatctcagctctcaagcagacagagatgggaacatgccagtatcaagaattcttactggacacaagggctatgtttcgtcatgccaatatgtcccagatcaggaaactcgccttattactagctccggtgatcagacatgtgttctttgggatgttactactggacagaggatctcaatatttggaggtgaatttccatcaggccatacagctgatgttcaaagtgtgtccatcaactcatcaaatacgaatatgtttgtctctggctcatgtgatacaactgtgaggctgtgggatatcagaattgcaagtcgagctgttcgaacctaccatggacatgagggcgacggtaacagtgtgaagtttttcctgatggccataaggttggtactggctcagatgatggcacatgtagattatttgatatgag

SEQ ID NO: 454448 - DNA, 541 bp, Sorghum bicolor
  unsure (1)..(541): unsure at all n locations
cgtccgctcacagcttgttttcctttgggtgccatggccgatccggcggaggagaacgttgcctcgccgcctccgaccccggcggccccagccgagggcgtctcggacccgcccctgcagcctgctgctgacggcgcctcaacggagaaggtgtctgctccggcgccggaggtaaggtcccggggattcaggcttcttggagaggacaactccgtgcacaaggcccttgtgggcggtaaaactgctgatgttctgttatggaaagacaagaaaacttctgctgttgtaatagggggtgcaactgtcatctgggttctgttcgaagtgcttgattaccatctcctgactctgatatcccatgcactgattggtgtgcttgccatcttattcctctggtccaaagcntaccaccttatcaggaagagtccaccagatattccagtagtgcagatacctgaggatcttgttgtgaatgtttcacgagcattatgcaatgacattaacagagcacttcacctattcatgagtatgcatggggcat

SEQ ID NO: 454449 - DNA, 451 bp, Sorghum bicolor
cgtccgaacgacacagcctctgcttaccggactccgacggtagtcttgtccggtctccggtgagcggccagcgaacacaccactgcgaatcggatcctgcgacatggggagagggaagagaccagtgctactgacaccaagatccctacacggatgcacatgaagacagagatgtgtatacttatggagggggtcaacgcattctagagggaccagcatacgttacatgataaagctcatcgagatctatagcacaagcccaccatcggatacaaagatgaaactgcggagtacaagaacatcagcttcactgactgagatgtctgcggtcatgacaagagcaagccgttgcggaggcatgtacttacagaatacacagggtatcatcttacatgtggacatgaacgataatgaccgtgtcagtgaatcaacggatgagctacaccggatg

SEQ ID NO: 454450 - DNA, 398 bp, Sorghum bicolor
cgtccgctcttccgtcgccgaggtagcggtggccgcttctgcggcggcggctgcgatggcgtcagctttgccgcaggagaaagagcagcagcaggcgcggcggccgatgcacgcgggggtcggcggcgctggcgccaatggccgccaccacgcgtacagccgcaaggacaagtctctcggcctcctctgctccaacttcgtggttctctacaaccgcgacgacgtggagtccatcgggctggacgaagcggccaaatgcctcggcgtggagaggcgccggatctacgacattgtcaacgtgctcgagagcgtccggattcttgtgaggaaagccaagaatcgctacacctggataggtttcggcggagtcccaatggccttgcgagaactcaaggaaa

SEQ ID NO: 454451 - DNA, 421 bp, Sorghum bicolor
cgtccgaggaagcaagcaatgcaatggccttagatggcataatgtttgagggagcaccagtcaaagttagaaggccaacggactacaatccttccctagcagctgctctgggcccaagccagccaaatccgaatctcaatcttgctgctgttggcttgacacctggctctgctggaggattagaaggtccagaccggatctttgtaggtggtctaccatattacttcactgaggcccaagtgcgggagttgctggagtcctttggacctcttcgtggatttgatcttgtgaaggatagagaaactggtaattcgaagggatatgccttctgtgtgtaccaggatcttaatgttaccgacattgcctgtgctgctcttaatggcatcaagatgggagacaagactcttactgttaggcgggc

SEQ ID NO: 454452 - DNA, 321 bp, Sorghum bicolor
  unsure (1)..(321): unsure at all n locations
cgtacgaacagacccagtaaaatattgccagtccggccgacgagatggcccaacgccgcctgctcgccctcgccgccgtcctcgccctcgcgctcgcgggcaccgncgccgcggacaactccgacttcgccgactccaacacgatccgctccgtcaccgacccgcggnctccgcgctcgagccaccgtcttcggcgcgctcggcgacccggacgcgctcgcttgacgcttgcgtaggacggcagactacagagccngcgngtcagacggtangatcttcaagctcagtgtcgtcacaccgaagcttcacgctgataacgtt

SEQ ID NO: 454453 - DNA, 493 bp, Sorghum bicolor
cccggtcgacccacgcgtccgcccacgcgtccgtgaaagctgtacatgcacctcttctatggttagtggtggaatggcctgaacagtcctatgaaacagcagaaatggtgaggtcgtctggggttatgtacaggcatcttgtatgtagaaagaataccacgagtgtccggaagattgctgtctgtcaaaggaataatgcaatctatcatatcaaaaggcatcaccttgatggtattaatgcatttgctgacgaagagcggtcatactcagctgatgtatttgaagaaatgcagaagatcaggcgctttggctcatggcctgtagcaatccatgttggaacaaagtatagggcagttttggaaggtcctatttgcaaaggtaaccgagtcatgggatggcacacagtccagacggctcaaaagaagagtttgactcgtcgattcccaattggtttctctgcatttgctttcaacagtacaaatgtatgggaccc

SEQ ID NO: 454454 - DNA, 502 bp, Sorghum bicolor
cgtccgaggaggagcgagaccgcgcaccgcagatccgtggtcgccgctagggttccggcgagatggacgtggtgaaggcggcgcagctgtccgggcggacgctggaacgggtggtggtgcaccccctggtgctgctcagcatcgtcgaccactacaaccgcgtcgcccgcgacacccgcaagcgcgtcgtcggcgtcctcctcggcacctcctcccgcggctccgtcgacgtcaccaactcctacgccgtgccgttcgaggaggatgacaaggatcctaggatctggttccttgaccacaattaccatgagtcgatgttctccatgttcaagaggattaatgccaaggagcatgttgttggctggtacagcactggcccaaaactaagggagaacgactttgatgtccatgcgttattcaacaagtatgttcctaatcctgtcctggtgattaatgatgttcaacccaaggagctgggaatacccactaaagcatactatgc

SEQ ID NO: 454455 - DNA, 493 bp, Sorghum bicolor
  unsure (1)..(493): unsure at all n locations
cgtccgcccacgcgtccgcccacgcgtccggcaaagatgtattagatgaagcaacaacaatgagactactggaaagttacggaagagtggatgaactagtgtactttgctggtttgaaggagcagtatgaaattgtggttcatcattacattcagcaaggagaagcaagaaaagcattggaagtgcttcaacggcgcaatgttcctgtagaccttgtgtataaatttgccccagatttgatcatgttagatgcttatgagactgttgaatcatggatgatggtgagaaacaagttgaatccagggaaactcataccagcaatgatgcgttatgtgagcgaaccacatgcgaagaatgaaacacacgaggttattaaatacttagagtnttgtgtgaaagatttgaacaatgaggaccctggagtgcataatctgttgctatcactatatgccaagaaggaggatgaatcccagcttttgcaatttctcgacac

SEQ ID NO: 454456 - DNA, 310 bp, Sorghum bicolor
cgtccgcaccagccgccgccatgtcgaagcgagggaggggaggtacggcggggaacaagttccgcatgtcactgggtctgccggtggcggcgacggtgaactgcgcggacaacacgggcgccaagaacctctacatcatctccgtcaagggcataagggccgcctcaaccgctccgccgctgctcgcgacatgcatgccccgcagaaggaagctgcctagagaaggagccgcgatcgcgcccagcgggcgagtggtctgctgaataggagtgatcagggatagttgttatgacatgagagctctgctgtg

SEQ ID NO: 454457 - DNA, 422 bp, Sorghum bicolor
cgtccgcggacgcgtgggcgaggttccgggaggctctgttcttttactcggcactgtttgatgctctggatgcaaccaccccaagagacagcaaccagaggatgctgattgaggagaacctcttcgggagggctgccctgaatgtcattgcgtgtgagggtacagatcgggtggaacgccctgagacgtacaagcaatggcaggtgcggaatcaacgagcaggcttgaagcagcagccgctgaaccctgatgtcgtgcagatagtgcggaacaaggtcaaagattgctaccacaaggactttgtgatcgatgttgatcaccacttgctcttgcaagggtggaaaggccggattctctatgccatctcgacatgggtggcaaaatgatgctccctcttacttttagctggtcttttgacttac

SEQ ID NO: 454458 - DNA, 495 bp, Sorghum bicolor
cccggtcgaccccgcgtccgccaccgttcgccacgcgtcgccacgcgtccgcccacgcgtccgcccacgcgtccgcccacgcgtacgcccacgcgtccgcctttctctacgtggaggacatccaaatgaggttcatgaaaaactacggcagagtcgcccactctgcgctggcttacgccatgaacgatgaattctccagggtgctccatcagcaaatggagttcttctccagcaacccaagtgctgacacactcaaccgtctccgcggagaagtcagtgagatacacaccgttatggtcgacaacattgagaaaattcttgacagaggcgaccgcatctcgctccttgtggacaagacatccaccatgcaggacagcttctttcactttctcaagcaatccaagatgctccgcagagctctttggatgaataatgccaatctgctatttggttgacagtatttattattgtgctgctttacttgacatttttgtt

SEQ ID NO: 454459 - DNA, 342 bp, Sorghum bicolor
cgtgcgatcccctcctatccctctcgccttcccacccttcatccacccgccgctcctcgagcccaccgtcccgcgccgcctccggctccggcgagatgtctcgcttcggtcgatccggtccgccgccgatccgcgacacgtactcactcctcgtcctcaacatcaccttccgcacgactgctgatgacctcttcccactcttcgacaagtacggcgagattgtcgacatctacatcccaagggaccgcagaactggtgactcgcgcggattcgcgttcgtgaggtacaagtacgaggacgaggcacaaaaggcagttgataggctcgatgggagattggtag

SEQ ID NO: 454460 - DNA, 418 bp, Sorghum bicolor
cgtccggtttgcttctaatctgaagagagctgctgatagtgattctctgatcgaacgaggcgtgaaggagaactatccattgatgtctatccttgacaaaagaccgatagagtctgcacttccaagtatttccaggcctatcatgtccttggatgggaatgaagatgccattgttggagccctgaaacaaagcttgagacaactggaggctcttggagcacaaagggcaggtcttgaagacatgctcaaagaaatgaaaagaaaggacgatatattgcctaagttgatgactggtgtggatcacatgatgatcttttcaagaaggagcttgctaagtatgatcctatctgtgctgataatgctgataacattgtggcacaggaacaattattgctacaaatacaggcacaaaatgagc

SEQ ID NO: 454461 - DNA, 443 bp, Sorghum bicolor
cgtccgcaacaactttcttgaaggatgatttagattatttgattcagtgcctgcagcagccatttgaggaggcacagaaagttggtgcgttgtgcttgctttgagcaagtggaaaagtttgccagccaattccctgaccttgctttcattgatctgttggataaattccgtgagacttgtcgcatcgataagacatacttcatgtgccagcaggacagtatcaagaaggttgctaatatgcttgagagggtgcaggggctatccctcaaggatcggttcacatttttggtttggttcaattaatattagggattccaaagccctttccatcttctgagatttgcaactaactattgccaaagccgtcgtgttagcatcgcaatgggagtgccaaggggttctgcaagaaatgactctgagcttctggaccttgagacaaaaca

SEQ ID NO: 454462 - DNA, 310 bp, Sorghum bicolor
cgtccgcggacgcgtgggattatggctcctgaagatctccgtgtctttacacagttatcaacagctaacatcactcagcgcattgcagtcccttattgtggttcttttgaagtcataaagtacagactgaagcaaatatatgagagcgtggagtcagcaacagaagaatctgatgttccagcattgattgtgcatgaaagagtgacagttcgcctagattcagaaagttatgttacgctgcagtggtcatctgatcccatcagtgacatggtgtctgattctgtggtggctatgatcttgaacattggtc

SEQ ID NO: 454463 - DNA, 418 bp, Sorghum bicolor
cgtccgcggacgcgtgggcgctccagcgccactcgcatcgagatcgagacgacccgcgtccgccgctcccgtgcaccgccgcgactcgcacccccggaagtaactctattccttgatcaacatgtcgcgggaggagaatgtctacatggccaagctggctgagcaagcagaacggtatgaggaaatggttgagtacatggagaaggtggctaagaccgttgatgtggaagagctcaccgttgaggagcgtaacctcctatctgttgcctacaagaatgtgattggggcccgccgtgcctcatggcggattgtctcctccatcgagcagaaggaggagtcccgcaagaacgaggaacatgttgctcaaattaaggagtaccgtggcaagattgaggctgaattgagcaacatttgtgat

SEQ ID NO: 454464 - DNA, 265 bp, Sorghum bicolor
  unsure (1)..(265): unsure at all n locations
gggtcgacacgcgtccgactgttctagctcggagcgcacgccatgttagcatcgatccgagatccgacagcggcagcgccagcnagagcgagagatgggggctaggatattcggtcttgagaccccgctgatggtggcactgcagcacctgctggacgtgcacgacggcgacgcctgcgctgcgggcggcgacaaggcgggcgccggcgctggcggaggggacacgcgcacctacgtccgcgacgcgcgcgccatggcggacacc

SEQ ID NO: 454465 - DNA, 237 bp, Sorghum bicolor
cgtccgcggacgcgtgggcttcaggatggcacagtgtttacaaagaaggggcatgacgaagagccatttaaatacaagaccgatgaagaggagagttattgatggtcttgatcgtgctgtattgaacatgaataacgttgaggttgctcttgtcacgattcctcctgaatatgcatctgttgcaactgagtcaaagcatgatcttgctgatgctccacctaacagcacagctgtcta

SEQ ID NO: 454466 - DNA, 467 bp, Sorghum bicolor
  unsure (1)..(467): unsure at all n locations
cgtccgcacacgcgtccgccgttctatctactaccccacctgacatatgccacgccaagcgattcctcgaccacatggtgtcctacgaagttacggtcgtggtgtcgcggcagttgctgcagacgttcgcgcaggacctgtggaagctggagtccgacgcgcagaaggaggtcgcccactacgcgctcacgcagatccagccacgtgtggtctccttcgaggagcaggtggtagtgattagagagaagcttgcagagctatatgagtctgaacaacaatggtcaaaagcagcacaaatgcttagtgggattgacttggactcaggaatcaggatgctngatgacaccaacaaattatccaagtgtgtccagattgcacgactctatttagaggatgacgatgcaagtaaatgccgaggcttttatcaacaaggcttcatattttggtaaccaacagccacccagaag

SEQ ID NO: 454467 - DNA, 458 bp, Sorghum bicolor
cggcttgctgtaagtctgctgagtgtctgaattgtcgtttgaggtcttttcctcaagttttgtatcgattgtgaggtccaggtggacctttgacttttctaaactgtgctgtaacagatacttggtttttcgatgttaattgaaaagccggggcattagcccttgaactctaaaaaaaatttggacgctaatatgctcttggattggatgtgcaggggatattgtgaagtacctgttcaggcagtatggacaaggaaagagtccttctcctggacttcttgagagtacaattttcacaggatgggtgcccactcttcttagagctggaagaggaatgacactgtggaacaaagctggtgctgtacctgcaaagaagttggagctcttctcatatgagaataattcttatgcaaggatagttcgagaggctttctgtgaattggagcttccttatgttc

SEQ ID NO: 454468 - DNA, 222 bp, Sorghum bicolor
cgtccggggaaggtgggttcggatcatgtgtataagggctgcttggctgatggaagagaggttgcggttaataaactgaaagatgctggcgggcagggggatctcgagtaccatgctgaggcggatattatcagtcgtgtgcatcatcgccatctagtttctcttgtagggtgtcgctattcacatgaccagagactgcttggctatgatattgtgcccaac

SEQ ID NO: 454469 - DNA, 357 bp, Sorghum bicolor
acgcgtccgcttaccttttcttttactttttctgaccagataataagcttctccgaaagaaacaaattgacctgcaaaataagaaaaagaagtcgagtcagaagaaaatcactggatttcagattcaagaatcagtgttgttgatggccttaatctagttcacaagtacaaaggtttccgaaacactaacagccagatttcagcctgtttagctgcaaatgggaggtatgtgatctcagcaagtgaggattcccatgtgtacatatggagaaacgatgataaccttggacaaggcagaagcaaggggaatgctactgtcaccaattcctatgaacatttccactgccaggatgtgac

SEQ ID NO: 454470 - DNA, 397 bp, Sorghum bicolor
cgtccgggcaaaaccaccttgctacactttgttgtccaagaaatcgtccggtctgaagacgcaaaatccgagaaagccgtaggagatgaagccagaaatatcgtgaaagacgaaatgttccgtaagcaaggattgaaagttgtatctgggctgagcaatgagctcgggaatgtcaagaaagcagccagcatggatttcgatgtgctgcacagctatgtatccaagcttcaggccggtcttggcaagatcaagtcggtcctcctgctcgagaagcagtgcacccaaggccagaatttcttcgcgaggatgcgtgattttctcaaggaagctgagatagagatcaaacaagtcaggtgcgatgaggagagggctcttgggagagtgaagagatcactga

SEQ ID NO: 454471 - DNA, 413 bp, Sorghum bicolor
cgtccgcccacgcgtccggtcctgctctcgagggtctatgcatccgcgcagcggtggaatgatgtgggcatgatccggcggttgatgagcgaagagggtttcaagaaggagcccggtttcagctccattgaaatggatggattggtgcaccagtttgttgcgggtgacacttcgcatcctcagtcagaagagatatacgagaagctggatgagattcagcagaggctcacgtctgctggatacacgccggacttgtcagaggcgcctatggtcgctgacattgaccgcaccatgggcgccaccctgcgcttgcacagcgaaaggctagccatatcctttggcctactcaatgcgacacccggggcacccatccggattctgaagaaccttagagtgtgcaaagactgccacac

SEQ ID NO: 454472 - DNA, 475 bp, Sorghum bicolor
  unsure (1)..(475): unsure at all n locations
cgtccgggcttatagagctagtccaagggatcccatgcaagataaacctcatctctttcaatcctcatggcggttcccaattcaagcccacaccagacgataagataattgagttccgcaacgttttaattcaaggtggcctcactgtttttgttcggctcagcagaggggatgatcagatggctgcctgcgggcagctaggagagcctggagactaccagctgcctctgctccgtgtacccgagaaatttcaggttgccttgtgatgataaacagcgcatacagtaaactggtcctgagcagcttgacgatcacacggagtaattggcttggaacgacggttcgatcgtgcaaatcttagtaagttctaccgccctcctgaagattgcctggaactctgcaatatcgtgcanatctgaacctgngtacttatgtgacagcacattttgacatggtgttgcttctgctaatgcgt

SEQ ID NO: 454473 - DNA, 355 bp, Sorghum bicolor
cgtccgctgggtttgatgcagcattgggtgatcctctcggtgggtgctgcattacaccaaatggatatgcactgctactaacaaagttgttaggatttgctcaaggaaggatagtgatggcccttgaaggaggttataaccttaggtccatagcaaattcagtttgtgcttgtgcaaaagttctcttgggagacaaattcacattcaacgctccagagatgcagccatttgaatctacatggagtgttatacaagcggtacgtaatgaattgaagacatgctggcctgttctgagtagcaagctgccagaaaatgtatcattgaggattaggccttcaccaagcgaggtcaacgc

SEQ ID NO: 454474 - DNA, 468 bp, Sorghum bicolor
cgtccggatttctttgccctttttctcgacccaacaatgaattattcttctggaatcttcaagcttgggtgtcggctgtgatggtaggtggaggatgagagcttagaagcagcccagctacgtaaagttagagttctgatcgacaaggctaatgtggagcaaggacatcatgttctagagattggtagtggctggggcactttagcaatggaggtggtgaaacgaacaaactgtaaatacacgggcatcacgttgtctgagaagcaacttaagtatgcccagagaaaagtgaaagaagctggattagaggatcacataactttcctgctgtgtgactaccgtcaaataccaatgggccataaatacgatagaattataagttgcgagatgattgaacatgttggccatgaatacatggacgacttttttagctgctgcgagcagcatttgaaagaacacggtctattt

SEQ ID NO: 454475 - DNA, 363 bp, Sorghum bicolor
acgcgtccgcataatatttgttgatgaggttgacagtttcctaggaaagccagaaaggccaggagagcacgaagcaatgagcgagttcaaaaatgaattcgctgataaactgggatggtttgcatactaaagagcaagaacatgttaccgttcttggagccacaaataggccatttgaccttggtgaagctgttattcgaaggtttccttgcagattaatggtgagcattcctgatgcgttaagtatagagaagattttaaaagtgatactatccaaagaaatgttggcgccagatgtggacctcatataagttgccagtatggctggtggatatatatggactgacttgaagaatctgagtg

SEQ ID NO: 454476 - DNA, 453 bp, Sorghum bicolor
cgtccgcttttcttctgccatggatatggggatacctgcactttcttttttgaagggattgctaagaggatagctgctgctggttatgcaggggatgctatggattatcctggttttggcatgtcatatggtctccatggctatattgcaagctttgatggaatggtggaccatgtcattgaacagtatgcacgaataagaggcatgaaggaagtgtgtgagctgccacactttctcttaggacagtcaatgggaggtgcagttgccctgaaagtacacttaaagcaacaaaaagaatgggacggtgtgcttcttgtcgcacctatgtgcaagatttcagaagatgtaacaccacctgcacctgtattgaaggcactgagcatattgtcatgtcttcttcctgagggcgaattatttccgcaaaaagatataagggatttggcatttagagat

SEQ ID NO: 454477 - DNA, 346 bp, Sorghum bicolor
  unsure (1)..(346): unsure at all n locations
cgtccggttctctcccttgtctcttcctagttactactaggacgaacccaaatccaaacccacctgagtataggggaaagtgaaggaagagggccgccaggcttagggtttctcgacgcctccttcctctctccgccatggacgcgcagcgagccctccttgacgagctcatgggcacagctcgcaatctaacggatgaggagaagaaggggcacanggagctgaagtgggacgatccggacgtgtgcggcccctacatggtccggttctgtccccacgacctcttcgtcaacaccaagagcaatctcgggccgtgctcgaggatccatgatctgaagctcaagga

SEQ ID NO: 454478 - DNA, 369 bp, Sorghum bicolor
  unsure (1)..(369): unsure at all n locations
cgtccgtgttcttcccacctcggacccaaatcagcccccaagaatccgaccagcctgttccctggtactgggtttagtttaggggaggaatggcgaccaagaagagcgtgggcaccctgacggaggcggatctgaaggggaagaaggtgttcctccgcgccgacctcaacgtcccgctgggcgacagccagaagatcaccgacgacacccgcatccgcgcgtacgtccccaccatcaagttcttgatggagaagggcgccaaggtcatcctggccagccatctgggacgtccaaaaggtgtcactcccaagtacagcttgaagcctcttgtcccgcgctngtctgagctccttggagttaatggtgtat

SEQ ID NO: 454479 - DNA, 500 bp, Sorghum bicolor
  unsure (1)..(500): unsure at all n locations
cgtgcgcaattcagtaccgtgttgtcaaggaaaatgcagatgatgcattctatgagttgcagaatccccaacaacaaattcaggcctacgtgtttgatgttgtccgggccatagtgccaagaatgaatctggatgatctctttgagcagaagaatgatgtggccaaagctgtactggaggagcttgaaaaggtgatggcagcttatggttacagtattgagcacattctcatggtcgatatcatccctgacgctgctgttcgcaaagcaatgaacgaaatatatgcagcccaaaggctccagctggcaagtgtttacanaggagaagcagagaagattcttatggtgaagaaagcggaggcagaagccgaggcgaaatacctttctggtgtcggtatcgccaaacagcggcaggcgataactgatggcctcagagagaacatcctgaacttctcacactcggtgtcaggcaccaacgcgaaggaagcatggacctgatca

SEQ ID NO: 454480 - DNA, 212 bp, Sorghum bicolor
  unsure (1)..(212): unsure at all n locations
tccgaattcccggtcgaccacgcgtccgctctgcattgttgggtcaacgatgatcattctacatgccccccaggagaggactcctagttccgtggaacagatttggaacctggcaacacagccttccttcctttgctatgctgccattgcagtnggggtgtccctgttcctcatgctatactgtgctccacgctatggacagacaaacataa

SEQ ID NO: 454481 - DNA, 370 bp, Sorghum bicolor
gagtactattgccatgtttcacagatagcattacaggatagcaaggggaatgaggatgtcagagtttttgtgaaggctgatggcagagtgtttctaattggaacactatcagttgacaaataccctcagtatacaactagtttggtgttctagaaggagtttgagttactacacacctcaaaaaccagcaccatctctgcccttggctacaaatttaggcattgcaacagaaaatatgacagcgaaacaagtactgaagagggtgatgaatctaatgaggaggttccacaggctattccattataccctaacgcagatgatgataaaagcatagaaagtaaatgtggtgtggagaatcctgctgctactg

SEQ ID NO: 454482 - DNA, 466 bp, Sorghum bicolor
  unsure (1)..(466): unsure at all n locations
ctccaccaccgaatctgaggaactagccgttggtggccgctcccttccacctccacgtcgccccccgccccccatggaatccgccagcgtggcgctcgccagccccgcctccgacgaccgacggttctgggaccgtctccgcacccgcgtcgacaccatcctcgaggaccgccgtgacctcccagccgccgccgcccccacgcgcgtggtggagtccgagcggnggaagcgcctccgggaggactccctgatgctcgtccgtggcctcgactccgtcgtggcgtcgctggcgcagctctccgacaccctcaccgncgcgcagaagggagtgagtgctctggcgacatgctcttcccaggcgaggggatgcgagggcggcgcctgccccgaggaggttgaggaggaggagcccaaggcgaagcggatgtgcggcggctccaccgaagattcaccacggaacagcaat

SEQ ID NO: 454483 - DNA, 475 bp, Sorghum bicolor
  unsure (1)..(475): unsure at all n locations
cgtccgctgcagatgacattggcgactgtattaatcctgggacagttgcagggtacagtgaagtgaagggtgctgtaggtgcttctgccgccacttctgcagtgcgacctgctggctcccgatcatccagtttccacggtgtgaccaggcatagatggagtgggaaatatgaagctcatttgtgggacagttcttgcagagtagagggacgtagaaggaaagggaaacaagtttatctaggaagttatgatactgaggaaaaagctgccagggcctatgatgttgctgctattaaatactggggcggaaataccagactaaactttccgattgaacaatatggaaaggaattggaggacataagggatttgtctcgagaggaatgtgtaacatacttgagaaggaggagcagctgctnttcaagaggagcttctatttacagaggagtgacaagaaggccaaaagatgggagatg

SEQ ID NO: 454484 - DNA, 417 bp, Sorghum bicolor
cgtccgatacagcatccctgaagttgacaagttgaaggcaaagttcatagctggaagaatcattccagccatcgccacctcaactgcaatggccactggccttgtctgcctggagctttacaaagtcctcgctggtgggcacaaggttgaagactaccggaacacatttgcgaaccttgcaatccccctcttctccatggcagagcctgtgccacccaagaccatcaagcaccaagacatgtcctggactgtctgggaccgctggaccgtaactggcaacatcacgctgagggagctcctggagtggctcaaggagaagggcctgaatgcgtacagcatatcctgtgggacctcgctgctgtacaactccatgttcccgaggcacaaggaccggctggacaagaaggtggttgtgtg

SEQ ID NO: 454485 - DNA, 393 bp, Sorghum bicolor
  unsure (1)..(393): unsure at all n locations
cgacccacgcgttcgatcgccgtggaggcggccaagggcctctgctacctgcaccacgactgctcgccgccgatcctgcaccgcgacgtcaagtccaacagcgtcctcctcgacgccgacttcgaggcccacgtcgcggacttcggcctcgccaagttcctccgcggcaacgccggtggttcggagtgcatgtccgctatcgccggctcgtacggctacattgctcctgagtatgcctacacgctcaaggtggatgagaagagcgacgtctatagcttcggcgtcgtgctgctagagctcattgccggtcgcaagccagtcggagaggttggggacgcgtggacatcgtgcagtgggtgcggtggtgaccggtcgagcanggaggcgtgatga

SEQ ID NO: 454486 - DNA, 415 bp, Sorghum bicolor
cgtccggccaggaccacatgaatgacttggtgatgtcactggctcacaaattcacgaagctccaagttctatctctacgccaaatcagagctgagctagaagacagtggggtggaggccgtggcgaacaactgccatgatttacgcgagctggatcttagcagaagctttaggctcagcgacctgtccttgtacgctctggcgcacgggtgccctcaccttacaaggctcaacatcagtgggtgctccaatttcagtgattcggctcttgtgttcctctctagccagtgcaagaacctcaaatgcttgaacctgttcgggtgtgtgagggcagcttctgacagagcgctacaggccatcgcatgtaactgtggccagctgcaatcgttgaacctgggctgtgtgatagcatcact

SEQ ID NO: 454487 - DNA, 199 bp, Sorghum bicolor
  unsure (1)..(199): unsure at all n locations
cgtccggaccgtgctgctggtggcagttcctgctcgagtacctgtccaagatctaccactccatccgcgtactgcgccggatgcatgacttctgcggctacctgttcggcaccatctggtggnggatcaccctcaacctcatggcctacttcgtagctcatcacgcggtgggcgcgagctggtacctgctcggcgcgca

SEQ ID NO: 454488 - DNA, 367 bp, Sorghum bicolor
  unsure (1)..(367): unsure at all n locations
cgtgcgcggactcgtgggttcatcttcagcaaaataataggcgaagggggttatggacgtgtttatcgtggtgtaattgaagatggtgtttaggttgctgtcaaattgctcacaaggaaacatcacaacagagatcgcgagttcattgcagaggttgagatgctaagtcggttacatcaccgcaatcttgtcaagctgattggtatatgcattgaacggagcacgaggtgcttggtatttgagcttgttccaaacggaagtgttgaatctcatctacatggttcagataaaatatatggcccgattgattttgacactagaatgaaaatagccctcngcgcatcaaggggactagcctatctgcatg

SEQ ID NO: 454489 - DNA, 386 bp, Sorghum bicolor
cgtccggtgccgcctcctgtttccacgagctggggttttagttttagcggcgcaaagagggggaagagagccagcgagagacgcagactgaaaggaggagatgagccggagcctatggatcccggtgaagctgctccatgaggcagcgggtcatgtggtgacggtggagctcaagaccggcgaagtgtaccggggggccatggtcgagtgcgaggataactggaattgccagctcgaaaacatcaccttcaccgccaaggatgggaaggtgtcgcagctggagcacgtcttcatcagaggaagcagagtgagatttatgattatacctgatatgcttaagaacgctcctatgttcaagcgcttggaagcgaggattaagggcaaag

SEQ ID NO: 454490 - DNA, 411 bp, Sorghum bicolor
cgtccggtggtttcctgcagaatgcagttggtcaagacctagtccatcttggcgttgcaagaacagccagtggtggctcttcggctgtcgctggtggtgttagcactggacaccagcgcagcaaaatggatcttgatccagcatccagcagcgtggataatttcaaaacaccagaactgacaaaagaaaatggtctccaggaggatgagaaaggggagagtagtatgtatgatgagaggcaacctaagagaaggaagcggacccttatgaataatgagcaaatagatgaattagagaaggctctagtagatgagcctgagatgcacaagaaacgctgttctaattgcagagtttggtcaaagaaagtaagtctgcagggcttcaagatcacagcatcacaacttaaaaact

SEQ ID NO: 454491 - DNA, 398 bp, Sorghum bicolor
cgtgcgggcatttggaatggtggtggtggtgctggacaaaagaatctctttgtagcatcctttttctttgatagggctgctgaggctggatgtgtgaacgccaatgcagctgttgctaaagttaaaccctcggacttcagacaagctgccgagcgtgcttgttcgttgagcgtcaagaatgccgaggctaccttccctggtgttccaaaggataacattccatatatctgcatggaccttgtttatcaatacacgttacttgttgatggattcggcgttgatccaaaccatgagatgaccttggtaaagaaggtcccttacagtgatgcatatgttgaagctgcatggccactttggagtgccaatcaggtggcatcttcatcataggaaggaaacac

SEQ ID NO: 454492 - DNA, 479 bp, Sorghum bicolor
cgtccgctctggttcgctcgtgccgttgcgctgcggctcgcaagcctctctctcctccacccgcacacgccgcccccgcgggagcgaaaccgtagctagggttctgcgccgccgccttcgatccagacgcgggcacccttctccgcgagcccgccatggacgccgggcgcaagcggaccgcgccggaggcgggcgccaacggcgcgggcggcccgaagcgcgcgagagaatcggagacaactcaaatgggtgtaggaagcaaatccaagccgtgcaccaaatttttcagcacggctggttgtccctttggtgcaagttgcctataggggaccccttggcctgatgggccaccttccacctgctgtgaagactcgcatgtgtaacaagtacaacactgcataacgatctcaatggaggagcgagtgccactttgctcatgtggagaggcagctagagaagcccctgcagatggacaactg

SEQ ID NO: 454493 - DNA, 409 bp, Sorghum bicolor
cgtgcgggcaagaaagcgcgccgccaaccccttggcgatggtgcacatgggcttcctgtccctgtacacgtccagccatgccggctccaagttgagcaagactagcgccagggatcaggtcttcgaggaggtgaggaggctggtggagctctacaaggacgaggagctcagcatcaccatcaccggacacagcctcggcgccgccatctccatcctcaacgccgtcgacatcgtcagcaacggcgtgaacgtgcccgccggaggcggcggctcggcggcgtgcccggtgacggcccttgtgttcgcgtgccccgacgtcggcgaccgcttcttcagggccgccttccattccttccgggacctcaaggctcttcacgtcaagaacagcccgggacgcgtgcccatgtac

SEQ ID NO: 454494 - DNA, 390 bp, Sorghum bicolor
cgtccggtgccgcatgatcaagagtactacctttcaattgtttcagagaggctggacagcaccatcaccttctcacattgtggtggcattgagagccatgagagctctgacaatgttaataccatttttctccctactgagaagccactgacacctgatacatgtgctccgatgattgcaacgcttccattggaggcacgtgcgaaaataggtgacttcattaaaggagtgtttgctgtctttcaagactaggatctctcatttcttgagatgaatccattcaccatggtcaacggggagccatatgctctggacatgacgggagaacttgatgacacagcatcctttcaagaacttaaagaagtggggagatatagaggtccctctacc

SEQ ID NO: 454495 - DNA, 399 bp, Sorghum bicolor
cgtccgtgttccatgcatctgtgaattcaacacatgaagatgcagttgaatctgatctatcgaaggcatttggaggacttaatgaggcttgacgggttcttcccatttgacccatatctgcttaaagagtctgacaggtatatacgcccaaattttgagttctggtccttggtcaagacgacatacagtaacaacaacagcgacgaggacaatgacgagcttgcagacattgacgcacccggaatgaatgtgggcagcttggatgatcactttgaaatagatttcaacaatgatgatgacattgagtattcgatgaataagatgtccataacgccgcaccggactttctaccatccactggctacaaacagtgagttcaagcacatgcctgcgaggatc

SEQ ID NO: 454496 - DNA, 313 bp, Sorghum bicolor
  unsure (1)..(313): unsure at all n locations
cgtccgnaagaatatgtgaagcatacaaatacaattcctaaataaaactgcattactgactaaaatctggaaacatgataattaaatacacaatgggggaacttgagataacacaagcttcctctttcataatacaacatatccatggactttgaaagtttgaaccctggacagcagatatacgaaaaactcatttctgacatgtatcttatcacagattgtacaaataattttactgaagttgccacatgacacttctctatttggacatattgctccatctaatctacatcagccatttatatccattaca

SEQ ID NO: 454497 - DNA, 444 bp, Sorghum bicolor
  unsure (1)..(444): unsure at all n locations
cgtccgctgaaaggcttcgagggaaaccatccatttcataattacactgcacgtgccaagtacaggaaggttcttgcgggaaggcacccgagggccaaaggagcaagcttgacgttgaagtccatgtcctctgaaatgggtatggcagaaagctcttctttagaaagcacttcttcagatgatgatgaggacttgaatatttcatcaatcgactctggtgcatcagaaaacatttttgtgaatgatatcctgaaattttctgagagtcgagtgcagattcaagctaggtggctgcatgaacctgatgaaagtgatagattaaatgcttcacatttcagagatatcattacctgttcatgtggagagtgcaaacttcatcangaattcaatttgtggattgcccatatggtggtatcttcatgctccaccaatccggaaaatggt

SEQ ID NO: 454498 - DNA, 402 bp, Sorghum bicolor
  unsure (1)..(402): unsure at all n locations
cgtccgggtggacgccgcctacttcgccatggcgtacctcaacgttaccaacgttccggtgatggtgacggagaccgggtggccgcacaagggcgacccgtgcgcggagcccgacgccacctccgacaacgccgacacctacaacagcaacctcatccggcacgtgatgaacagcaccggcacgcccaagcaccccggggtggccgtgccgacctacatctacgagctgtacgacgaggacacccggcctggctccacgtcggagaagtactggggcctcttcgacatgaacggcgtnccggcctacaccctgcacctgacgggctccgggtcctgctggccaacgacacgacgaaccagacctactggtggcgcgcgacggcgcggaccccaagatgctgc

SEQ ID NO: 454499 - DNA, 362 bp, Sorghum bicolor
cgtccgcggacgcgtgggcgcagagacaggcgtcttcgtactcgcctatctccgcgactcaaaagctttctcccattccccagcggcgccggcgttccacccttccgacgacaccatgagggagtgcatctcgatccacattggccaggccggtatccaggtcggaaacgcgtgctgggagctgtactgcctggagcatggcattcaggctgatggccagatgcccggtgacattgagcgcccaacctataccaacctcaacaggcttgtgtcccaggtcatctcatccctgactgcttccctgaggttcgatggtgctctgaacgttgatgtgaacgagttccagaccaacctggtgccct

SEQ ID NO: 454500 - DNA, 460 bp, Sorghum bicolor
cgtccggtgatagacgcagacgctcacaaacacgagcgcacactcacccctatgaacgcacgcatgcacaccctacctctatgggcacctccgaggaaccaagttggaccagcaaatctcgagattgacgaagtcaccacaggcgcctcactatcgacggacatgtcgcctaccactgaaagcatagcggcgttaaatcctggaataaatccagaaaaatgcgagcacctgtgtcaagtcggagacttgaacccaggtgggcaggtttcaccacaaggaacccaaccagctgatctaaattctattaatggcgaaacaatttgcttttgggcagaccactggttgagtggcaggacagttgctgaaattgctcccaacctgatcaagttgatcccaaaagagggtgtcaagaatcggactgttgctcagaccctggaaacagctgggtggccgacataat

SEQ ID NO: 454501 - DNA, 137 bp, Sorghum bicolor
atcgcgccttgtaccggcactttaagcgcgcttgtggcgctgtttactcgcagggttcccgatacatttgctagcgccttagcacccgctcatttcgctttcttccctttcttttttgccactttcgccggtttttc

SEQ ID NO: 454502 - DNA, 539 bp, Sorghum bicolor
cgtccgggcggctggtggcggtggcgcgacgttcgagcgcgggaagatggtgtttcttgaggacgtgagctgcagcaacggcggcactcggcggttcgagctggaggagctgctgcgcgcgtccgcggagatgctggggaaaggcgggtgcggcacggcgtacagggccgtgctcgacgacggcaccgtggtgaccgtgaagcggctgcgtgacgccacggcgccggccgccgcgtcgaagaaggacttcgagcaccacatggccatgctgggccgcctccgccaccccaacatcgtgcccctcaacgcctactactacgcccgcgacgagaagctgctggtgtacgagtacatgcccaacggcagcctcttctccgtcctccatgggaaccggggccctgggcggacgccgctggaatgggcggcgcgcctgcgcattgcggccggcgccgcgcgcgggctagcctacatccaccactccggtcgccgtggcagcggcacgccgaagctggcacacggcaacatcaagagcaccaaca

SEQ ID NO: 454503 - DNA, 541 bp, Sorghum bicolor
  unsure (1)..(541): unsure at all n locations
cgtccggtgacattcagctcgagtggctatatacttacatctgagattgacggaacgattcaaatgaaaagttacctcactggtaatccagaaatccgtcttgctctcaatgaggatttgagcattggaagaactggatcttcatatgattacagaagttcttctggaggtggaacagtcattcttgatgattgcaacttccatgagtcagtacatctggatagttttgacattgacagaactttgactctgataccacctgacggagaatttcctgtaatgaactaccggatgacccaagaatttaagccgccgttccgtgtaaccgctctaattgaagaagctggaccatcgagggctgaagttctactgaaaataagagcagacttctccgcaaatgccactgctaacacaatcacagtacaaatgccagtgccatcatacacaatgagagcaagttntgagttggaagctgaagcagttggacagacaaccgatttcaaggaaggatccaggagactcgagtggaatctcaagaaga

SEQ ID NO: 454504 - DNA, 476 bp, Sorghum bicolor
  unsure (1)..(476): unsure at all n locations
cgtccgatcttaggaagcattgctctgaattccggcatatttactgcaatccagtgaaaaaggtatttcacccaattcatgatcagtctttctatttaactcaggagcataagagaaagctcaaggaagaatatggaattgaaccctggacgtttgaacagaagcttggtgaagctgttttcattcctgctggatgtcctcaccaagtgagaaatttgaagtcctgcatcaaagttgcgcttgattttgtttccccagaaaatgttggtgagtgtgttaagttgactggggagtttagacgacttccatctttccacaaagctaaagaagacaaactagagattaagaagatggctcttcatgccctgaacgaagctgtaaacttcntggatccttgttcctcagaagggttgaagaattggggtggtgagaacagctgtggagatgaatctgcagatgagaagccgatgcctaaa

SEQ ID NO: 454505 - DNA, 450 bp, Sorghum bicolor
cgtccgcatgttcttgggaataagtaccaacataagttgctcgaaataattgacgagtgtgaattgccagaatttttcggtggcaaatgcaactgtattgaaggttgccaaagatctgacaaaggtccttggaaggatcccaacataataaagagagtcctcaatggtgaggccaactatggcaggcaaattgtgaccatatccagcactgatggaaagataatcagttatgctaggccagggcacccaactagaaaaggcagtgatgcgtctgccgagtctgggtctgaagtggaagacgtagtatctcctactgcatcaaggaacctgattacacatcctattttgacccctgttcacgaggagtcaaaattgtcggcacatggatctgcatttgttgctcatgcttctattgaagaaagcattcctgtgtggacaaggtgttgtgat

SEQ ID NO: 454506 - DNA, 545 bp, Sorghum bicolor
  unsure (1)..(545): unsure at all n locations
cgtccggacccacgcgtccgcaaaaattacccgagaagacagttgaaaatatgaaaggggtaagatgtaagagaataacaaggtgcattggttctgtcgggctgtatgtcccaggtggcactgcggtcttgccttcgactgcattgatgcttgctgtgcctgcacagattgctggatgcaaaactattgtccttgccacaccacctagccgtgatggtagcatatgcaaggaggtgctatactgtgcaaagaaagctggtgtgacacacatattgaaagctggaggagctcaggcaatctcagcaatggcatggggaactgcatcgtgcccaaaggttgagaagatttttgggcctggtaaccagtatgtaacagctgccaaaatgattcttcagaacagtgaagctatggtatctatagacatgcctgctggcccttctgaagtttagtcattgctgataaatacgcgaacccagttcatgtngcttgtgatctgctatctcaggcagaacatggccagatagtcaggtgttctagtattgctg

SEQ ID NO: 454507 - DNA, 520 bp, Sorghum bicolor
cgtccgcggacgcgtgggcggacgcgtgggcttgtgtgcatactctagtgttgacggtggtggaactctgtttgtccttgggtcagaagatgagatggatactttcacccgaggtgttgaagaagagacacttaagaatacacttaaatgtggtgtaggatatgtgcatgagggtctaagtgaacttgatcaagaacttgtaacccagctgttccttgctgggaggatccaagtgtgtgttgcgagcagcacaatgtgttggggaagaccattgcctgctcatttggttgttgtcatggggacccagtattatgatggccgtgagaatgctcacactgattatccaattacagatcttcttcaaatgatgggtcatgccagcagaccacttaaagacaactcggggaaatgtgttatattgagtcacgcacctcgcaaagagtactacaagaagttgctttgtgaggccttccctgttgagagcaatcttcaccatctcttgcatgatcatatgaatgct

SEQ ID NO: 454508 - DNA, 504 bp, Sorghum bicolor
  unsure (1)..(504): unsure at all n locations
cgtccgcgaccggctcgcgacgccgtgtcatgagggtcatgcacacagtgacggaaagagagagtgcaattctgatgaagagaactcggaaggagaaagaaagcccaaaaagggctctctcaagaagagagcagctactgcagggtataagtttaggcattccttaaggagaaagagtaaaaccaaggatgataaccatgtagcctcaatagaagacatcagagatgttcaagagctggagactgttgaaaggttccgccagtgtttacttgacgagggcctgttgccagaacatcacgatgattatcacacgatgttgaggttcctgaaagcaaggaaatttaatattgacaaagcaaagcatatgtggtcagagatgcttagatggaggaagggaattggtgctgacaatatagaggaatttgactacaccgaattagatgaagttgtgaagactatccgcagttntatcatgggtggcaaagagggaaggctgttacatag

SEQ ID NO: 454509 - DNA, 529 bp, Sorghum bicolor
  unsure (1)..(529): unsure at all n locations
cgtccgcccacgcgtccgcaatcatgtctgggaagttaactgctgagcagttgacaaaattcacactatatgctgaatggctaattttgtccacatggtggattggagacaactggtcctccctgatgcagtctgtcggagcaagtgaaaaagtttttcgtttgatggatctccttcctagcaagcagcttagctctgaaggcctcaagttagagaagttgaaagggaaaattcagtatgctgatgtatcattttcatatccatcaagacctacggtaccaattttgggaggattgaatctgacactgaatccaaatgaagtagttgcaattgttggtcttagtggaagtggcaagagtactataatcaatttactacttagactatacgaacctacaaatgggcaaatactaattgatgggtcccactcactgagcttgatatcaagatggtcaaggaaaagaaatggttcgtcggacaggaaccacgcttatttccgaatggatatagctctaatattanaatatgg

SEQ ID NO: 454510 - DNA, 501 bp, Sorghum bicolor
cgtccgcggacgcgtgggcgccgcacaggcaggcagacggacaggaccgccgccgcagttttcaaatcccggggcggatttccttccctgcacctgcagagagagagagagagagacggtgcccagcaatagcaccaccgggatctcgccttctcgtcgtccgtccacctgtggcgccggtgaccgaagggtgagggcgctagctagagcctagaggctagagccatgtggaacagcatctaccggttcctgtgcggcctgtgcgcgccgtcgtcgtctgagcacgggctccacggcgcgcactccgccgtcgccgtcctcggccgcgacatcctcagctttcagagcacctcgcaggttccggacgagctgagccggcacgtcgtctccttcaagaaagcgcaggcgaattggtacaagaagctgctggtggcatggaagaaagcccggtcgtcttcgaagacgcccgaggaagctgcggccttcgttgtgcagacgctc

SEQ ID NO: 454511 - DNA, 502 bp, Sorghum bicolor
  unsure (1)..(502): unsure at all n locations
cgtccgtgacacttgagatgtgcatgacagggctggatgctaagaaagctgcagtgttcttcaagaactctgatgatggcagctgcacatcagctaaagagatgacaaagctctcagggatttctgagatcattcctgagatggagatttgtgactttgagttcgacccctgtgggtactcgatgaatggtgtctttggacctgctgcctccaccatccatgtgacacctgaggaaggtttcagctatgcaagctatgaagcgatgaacttcaaccctagctccctggtttacagtgatgtgatcaagagggtcctggcaggcttctctccttcggagttctcagttgccgttaccatctttggtggccgtggctttgccaaatcatgggcaaagggtgcagacgtcgattcctacatgtgcgatgatcttgtggagcaagagcttnctggtggaggctgctgatgtaccagagctttactgctgtgctctggcactggtcg

SEQ ID NO: 454512 - DNA, 496 bp, Sorghum bicolor
cgtccgccgtgttctccctcttccgcctcccctccgatctcctccgccgcatccacctcccccgaaccctagacccactcgcgcgcgcccattggcctccggtcgccatgtccgccgctcatcttctccgtcactcccgcaagctgcggagtttgcaaaatgctgtgggttgtgagaattttagtcttgttcggcatttctccagcggttccggatccgttatcgccaaggaaaacggtgttggaaaaagaaccagaggtaccagattttcccagcataaccagcctgcaaaagagctcgagacattctcactaggagtaaatggaagctgcacttggagaagagcatccaacagccttaccccaagtgctgctagcaggctcaatggtttattctcatgtggacaggtagtttcagcacgtccattctcaagtagtgcagacctgcctccacatcaaagaaatgggatgccgtctctttcgcctacaatgactga

SEQ ID NO: 454513 - DNA, 438 bp, Sorghum bicolor
cgtccgcccacgcgtccgatcacatcccaggattctcgtatataactctactactccataacgcttattactatctcacatttatcctgtagacatttctagtaatccttagatctcacatttacctttctcatctgacagtcttttaccaacagaaaacaacagaaggatgaaggctatcgatagggagaccaagacgatcctaaggggaataatagagaagagacatgaggccatgaagaacggtgaacccaccaccaccagagatgacttgctcggcatgctattagagtcaaatatgaattacacagattcagacggaaaatccagccgtgggattaccctagaagaagtgatcgaagaatgcaagctgttctactttgcaggaacagagacttaccgtgtcctgctgacatggacaatagagtcttaagcatg

SEQ ID NO: 454514 - DNA, 446 bp, Sorghum bicolor
cgtccgcggacgcgtgggttctgaagttgcagaggatgatccgctgccagccatagacggactgcgaatcacaggtgaagcctttcctggaagagaacttcaagcaagtgggtactccatccatggaaccacaagctgtaattttgagtgggtgcgccatttggacgatggatcagtaaatttcatagaaggcgcacggcagcccacctatttagtaactgctgatgatgtggattctgtactagcgattgaagtccagcctctggatgacagaaaaagaaagggggagattgtgaaggtttatgctaatgagcaaagaaaaattacatgtgatcctgaaaccaaggagcatatcaagaaaattctctctatggggcatgtgtcttatgaagttctattacctgttagatttttagatatgtgggaaccagctgtcttggcaataa

SEQ ID NO: 454515 - DNA, 507 bp, Sorghum bicolor
cgtccgtgttgagatgttgggttactgtgtggatgggaattatcgtatacttgcatatgaatttgcaaccatgggttcgcttcatgatgttttacatggaagaaaaggcgttcaaggcgcgcagcctggacctgtacttgactggatgcaaagggtcaaaattgctattgaggctgcaaaaggtatagaatatctgcatgaaaaggttcagccttcaatcatccatcgggacatcagatcaagcaatgtactgctgtttgaggatttcaaggcaaaaattgcagacttcaatcttttgaaccaagcaccagatatggcagctcggctccattcaactcgtgtattgggaacttttggatatcacgcacctgaatatgctatgactggtcagctgacacagaaaagcgatgtctacagctttggtgtagttcttttggaacttttgactggaaggaaaccagtagatcacacaatgcctcgaggaccaacaaagttagtcacatgggc

SEQ ID NO: 454516 - DNA, 538 bp, Sorghum bicolor
  unsure (1)..(538): unsure at all n locations
cgtccgcttgagcaagaggaatatgtggaggatggcattgactgggcaaaggttgactttgaggataatcaagactgtttgagtctctttgagaaaaaaccactggggttattgtctctgctggacgaggaatctactttccccaatgccacagatcttacttttgcaaacaagcttaagcaacatcttgactcgaactcttgcttcagaggagaaagaggcaaggcatttgctgtccgtcactatgcaggagaggtggcttatgatacttcgggttttctggagaagaatagagatttattgcacatggactcgattcagctccttgccaaatgcaagacttctctgccaaaaatgtttgcatctaagatgctagttcaatcagataattctatgtctgttccatatagatctagtgctgctgattctcaaaaactaagtgttgccatgaagttccagggtcaactgttccaacttatgcaaagacttgaaagtacaacaccacactntattcgctgcattaaaccaaataatttac

SEQ ID NO: 454517 - DNA, 526 bp, Sorghum bicolor
  unsure (1)..(526): unsure at all n locations
cgtccggtgtgtgtagcgctgtgcgtctttgcatcctcagcatccggggagcgcctgctcgttctggggggaaaggacagcggcgacggcggggaggagttggacctgaagccccggatgcattctcccgagatacagctacactgctagagcacactatcactaatgtttgcctatgacaatggagtcacctacaactgccgctggtgatgaactcgagagctacttgtccttgggtttgacagtatcctgctcagggaaagatagtgctgagtttccaaaggttctgttgcttctctcagcgtatcttgacaagaaggttcaggagaatgaagagttattagattccagtaaaacaaaggagtcaaccactatctttcatggtcagagggtgcctgaacttagtataaagctctatgcagaacgcattttcaagtatgcaaagtgcagcccatcttgctntgtgctgggacttatctacattgagagatatctacagcaaccaaacatttacatgacgtcattt

SEQ ID NO: 454518 - DNA, 458 bp, Sorghum bicolor
cgtccgacagttatcagcacagaacacagtaatactcttcgaagccttgcacactgttgccgcacattgcctacaaataaaccgtggtagtggtctgcgttcccaggttgcaggagttggcctcgttgccccaattgcaggaccggccttggtgcgccttgagaacgagtcataccagctgtgccttaagtttccttaagaacatattcttggacttttctctggtccttggaggcacagaggtggtggagagtcaccttattggcttgtgcaaggaggtccttgaggtatacttgagcacagcaaaaccttctgagctttagagtggcacacagccgttgggccattggcttatccctgttggttcatcgaagcgaagggaacttgcggcaagagcacctcttgttgtatcaaccctgcaagctattagcggactaggtgactcagcttttgagaag

SEQ ID NO: 454519 - DNA, 523 bp, Sorghum bicolor
  unsure (1)..(523): unsure at all n locations
cgtccgcggacgcgtgggcggaggggcagtcccaggctcggcggcggcgttcggcggctccccccaccttctctcgccagtcgcctcgcgccctcgcctgcgtcctccacgaaccggccgacgaccctgcgtacgcacctccctctcccctcccgccgttgctgttcccgtgggagcccggccagctgcccagggtggccgggccttggctccgccggtgctgtaagctatttgcgtccggatctgacctcagttacacgcctgtgttccgcccacgcaggatccagatcgtgctacggcggctcctgtccatccgccatgccgccagggtaaggtgaggctcaccaagtggtattctccgtacacccagaaggagaggaccaaggttattcgcgagctcagtggactcattcttacacgagggcccaaactctgcaactttgtcgagtggaggggtacaaggttgataccggaggatgctagcctgatttctgatgtgctngatgctgatgacaatgagctg

SEQ ID NO: 454520 - DNA, 560 bp, Sorghum bicolor
  unsure (1)..(560): unsure at all n locations
cgtccggcagaaatcgggatggttttgaataatgtgagactagttgcaaaagctagagagcaagggaatgatctctttaaagctgccaagttttcagatgcatccatggcctatggtgaagggcttaagtatgatccctcaaattcagtgctccattgcaatcgagctgcttgctggtcaaagttagaaaagtgggaaaaagctgttgacgactgcaatgaggcactaagaatacagccaaactatacaaaggctctcttaaggcgagctgcgtcctatgctaagcttgagcgttgggtggactgcgtgcgggactatgaggtgcttcggaaggagcttcccagtgacaaggaggttgctgaggcattgttccatgcacaaattgccttgaaggcgactcgtgggggaggtgtatcaaatatgaagtttggaggagaggtagagatagtttccaatgtagagcaactccgtgctgncattaagttcacctggggtatctgtgtctacttcatgtcggcaatgaatcagcaatgcacacaaattacaccatcagtcaacac

SEQ ID NO: 454521 - DNA, 314 bp, Sorghum bicolor
cgtccggaactgcgccccgctcatgctccgcctcgcctggcactccgcgggcaccttcgatgtggccaccaagaccggggggcccttcggcaccatgaagaaccccgccgagcaggcgcacggagccaacgccggactggaaattgccgttaggctgctagagcctatcaaggagcagttcctcatcctatgctatgctgacttttaccagcttgccggagtcgtggcagtcgaggtcaccagctgtctttatttcttcttacacggcttaacgtgaaagttcagtgatctctcgttagaatgtcgtcttcttg

SEQ ID NO: 454522 - DNA, 411 bp, Sorghum bicolor
cgtccgcccacgcgtccggacaaactctaccatagtggggtggttattggcatccatgtcaccttcagtcagtaaaatggtggaaggtatgcacactgcagcacaaatatggagaaccttaagtaacatgtattccaggcgaggtaacgtgatggtgatgatggagattcagaataaggctgacgcagtgaaacaagcggggcaatcagtggagcaatatgctagtgagttacagtacttgtggggagagctagactactatgctccacttcgtatgagggatccacaggatacattggatgtccagaagtggatagaggacaggagagtgactcattttctgaagaatttagacccagagtttgaaagaaggagggctgctttttgccatcaagatagtcttcctaccat

SEQ ID NO: 454523 - DNA, 513 bp, Sorghum bicolor
  unsure (1)..(513): unsure at all n locations
cgtccgcccacgcgtccgcccacgcgtccgcccacgcgtccgcccacgcgtccgaagtttcgtgatgaaaacaatgccatgagggcacagagtgcaggtttatgctcttctatcgaagagcttgacctaacgatcaagatgctgaatgatcggatggtgcatgagagcatacctttatctgaggagaagcgtctggtgaaagaaattaaggaccttgaaaaaaccagatcgaaagtcatctctaatgctgctaacagggctaaactgcaaggtacagtggttgaaaaagaggctatacaagaccaggtcaaaatcatcggggagggcattgatggaataaagaaggaaagacaggcagtaagatctaagattaaggtcctggaggatgagttaaaactngttgatgctgagattgcatcgcttcaagaagatttagatgcagcaactgccagaaaggacaaggcgtatgaatcgttgtccgaattgagagcagtgcgcgatgcaaaaaacgca

SEQ ID NO: 454524 - DNA, 376 bp, Sorghum bicolor
  unsure (1)..(376): unsure at all n locations
cgtccgctccaatctctttcgctcaaggagctctacaacggccagtgcttctcctatttgatcacccagtcgcccaacctcaaaaccctcaagattatcagatgctcgggtgactgggacatcgtgctccaggacgtcccgagggattccctcctagctgagctccaccttgagaagctgcaggtcangcgaccgggtgtagccgccttaattgggctcgaggtactctaccttgccaaggcacctgaggtcactgatgttggattagccgagcttgctgccaagtcgccatgcctccgcaagctgcatgttgatggatggaaagcaaacccaggatggtgaccggggcttgctgtgttgcaacagaatgtgccag

SEQ ID NO: 454525 - DNA, 545 bp, Sorghum bicolor
  unsure (1)..(545): unsure at all n locations
gcgtccgctgaaggtttcaatggggctgatcttcggaacgtgtgcactgaagctggtatggctgcaattcgtgcagagagagattatgtagtccacgaagacttcatgaaggctgtgcggaagctaaatgatgcaaaaaagctggaatcgagtgcacattacagtgcagattttggcaaggagtaatgtatgatgctgatgcaatggacaactgcatatggcgtgtatcatcagggagctcagtcagatgcgatgcaaaagggagaaagaaaccagctatttatgttcaggctccaggcagctcctctttttctgatattcacaatnttagtgaggaggattgtcaagctgaccagtgggagaaaccattncgagaatttagagttttgcaccagatgctctttgcttctgtaaatcatacgctatctgcctttcggcgtggtagtctggaataaccttggcccgagttgtctgttttcatgtacttggacaggtggaaaagaacaattgtattatcctgaaaaaaaaaaaaaaagggcggcgtt

SEQ ID NO: 454526 - DNA, 421 bp, Sorghum bicolor
  unsure (1)..(421): unsure at all n locations
cgtccgcccacgcgtccgacgcggtggtggccggccggcagcagcaggagcagcggtggtggccgtcgtcgcgatcagggccggccacccggacttgcaccacttcagggggcaaggcgtgtaccgagggcggtgcggcagcaggttcaaccacgccgtcgccgtggttgggtacggggaggacgcggccaccggggagaagtactggatcgtcaagaactcgtgggggaccaagtggcgcgacggcggctacatcaagttgaagaggcaacaagtccccgccgccgccggcagcccagcagcagcggcagcagggggctactgcggccctgccgtcagagtcagaccacctttcgtcccaaccatgaccatgtgatatgcagatgcgcatggttccaaaacantgcatgatgcatatgca

SEQ ID NO: 454527 - DNA, 494 bp, Sorghum bicolor
  unsure (1)..(494): unsure at all n locations
cgtccgcacagcttgagctagagatcaaagaaatcaaagggaagcatggcagcaggtttgcaagtgtttggccagccggcatctaccgatgttgccagggttctgacatgcctgtttgagaagaaattggaatttgagcttgtccgcatcgatacatttaagacacatcacaagcttcctgagttcattaggctgcgggatccgaatggccaagtgaccttcaagcatggcgacaaaactcttgttgattcaagggatatatgccggtatgtttgtaaccaatttccaaatgacggaaacaagaccctntatggatctggtgctctagaacgggcatcaataggacagtggcttcaggcagaagctcaaaactttggccctcccagttctgcacttgtcttcagctggcattttattctcatctagtcatctgggcattctcaggacccctgctgtatgctgaaatgggataactgaagcagccctgtgtatga

SEQ ID NO: 454528 - DNA, 559 bp, Sorghum bicolor
  unsure (1)..(559): unsure at all n locations
agtaccgtccgnattcccgggctcgcggtgctctgcgacgccgacgtcgcgctcgtcgtcttctccgccaccggcaagctctcgcagttcgcgagcaccagtatgaatcatatcattgacaagtacagtacacattctaagaatctggggaaatcacatcagcagtctcctattgatttgaatgtagagcagagcaagtacactggtttgaacgagcaacttgcagaagcaactcatgggcttagacagatgagaggtgaaaaccttgagggattgagtgtcgaggaattgcaccaaatggaaaggaaacttgaagcaggattgcatagagtgcttagtactaaggaccagttattcacgcaacaaatcagcgaactacaacaaaagggaacacagctggaagatgagaacaggcgtctaaaagaacaaatgcctcaggtgttaacgcctggcacaatggtggttgctgctagtgcagaaaatatcctcactgaagatggacaatcgtctgaatctgtaatgactgcattgcattcaggaagctcgctcgacaatgatg

SEQ ID NO: 454529 - DNA, 499 bp, Sorghum bicolor
  unsure (1)..(499): unsure at all n locations
cgtccgggtggctgggctcgagctgctgaattcgatctgtgcggtgcacaggccagcgagaagcatgattgttagcattggtgcggtgccgcagctggtggaattgttgccggagctagcaacggagtgtgtcgagccagccttggacatcttagatgccctgtctgcggttccagaggggagggtggcgcttaaggattgtccacggacgatacccaatgctgtccgcttgctgatgagagtttcggaggcatgcacgcgacgggcgctgtcgatgctgtggacggtgtgtcggatggctcctgaagagtgtgctcctgctgccgtggaaggggggtggccgcgaagctgcttcttgtcattcaaagtggttgtgcaccggagctgaagcagaaagcatctgagctgctcaagctgtgccgncctaactacactgacaccctcttcatcttcaagtgcaaactcacaaggacaattcaatgaggagatgcaaatgatg

SEQ ID NO: 454530 - DNA, 434 bp, Sorghum bicolor
cgtccgccccaaccctcctgctccatacgtcggaggttccctccaagccctggacaacgccttcaaatgggcagagaagtacaagctgggtgtcatcattgacttgcacgctgctcccggatcacagaacccctgggagcacagctcctccagagacggcacgcaggaatggggaacaacagatgccaacattgcgcagacggtgcaagtcatcgatttcctcgcatccaggtacgcgacgagctcgagcctgtttgccgtggagctgatgaacgagccgctggcgcctggagcgacactggacagcctcaccaagtactaccgcgacggctacgacgccgtccggaagcactcgccgacggccctacgtggtcatgtccaaaccgccctgcgtcggggaactccacggagcttctccagttcgccagcgggct

SEQ ID NO: 454531 - DNA, 391 bp, Sorghum bicolor
cgtccgcggacgcgtgggcgagcacgcgatcgcgtacacggcgccttcgcagcagcaggtgtacggggccaaggccaccatcaacgtgtgggatccggccatcgaggaatccaacggcttcagcctctcccagctctggatcctctccggctccttcaacggctccgacctcaacagcatcgaagcaggatggcaggtcagccctgagctgtacggggacagcaggccgaggctcttcacgtactggacaagcgacgcgtacgaggctactggttgctacaacgcgctgtgcccggggttcgtgcagacgagctcccgcatcgccatcgggcgcgtcgatctcgccggtgtcgtcggccggcggcgcgcgtacgacatgacgctgctatct

SEQ ID NO: 454532 - DNA, 327 bp, Sorghum bicolor
  unsure (1)..(327): unsure at all n locations
cgtccgcggacgcgtgggtgcagcagttgaagctcgtgttctgccaccaccaaggcttaaataccatgatagtggccgagagaaggatgttttgcccagagttggccaatggaacatgatgaataagaaaatggttaatggtggcagagtcagcaactgggcatgtattaacttctctcggaatgtgcaagatagtgctgctaggggtttctgtcacgagcttgcagtcatgtgccaaatatcanggaatggatttgctcttgagcctgtgctcgctccagtgactgcaagacctgacatgttgaaaggcgttaaaggccgtatcag

SEQ ID NO: 454533 - DNA, 414 bp, Sorghum bicolor
cgtccgtatgtatccaaattacacatcctatgatccagtcttgactggaaaatgccatgtaaatttttctgcactctcttatgtcatggagaagacagcatatgattgctccattcctttagcaccactagttgctgatgttatatgttgcccccaagttaatagcttgatgaatattttccaagctgcatatggcagtggaaacaataccctagttctcaaccaggcttcagcaaatgcttgtttctctgacattgtgaacatccttgcaagcaaaggggcaaacaccaacatccctgagttatgtactctgaggccatcaaatcttactgatgcttcttggcctgtgaaggatgttagctcctttgagaaaatagtcaacaccagtaaacttctaaatgcatgcagcagtgt

SEQ ID NO: 454534 - DNA, 351 bp, Sorghum bicolor
  unsure (1)..(351): unsure at all n locations
cgtccgcggacgcgtgggttatcaaacagattaggcaggaatctggggctttaatcaaagtggctagctccaattcggaccctgatgatgactgcataattacagtttctgcgaaagagttctttgaagatcctgtatctccaacgattgatgctgcagttcgtttgcagcctagatgcagcgagaaaagtgattcagaatcagccgagcagtcatatacaacacgcttgctggtgtcaacatcacgtattggatgcctaattggcaaagtggttcaatcattactgagatacgaagaacatccagagcanatatacgcattctttcaaaaagaaatgttccaaaggtagc

SEQ ID NO: 454535 - DNA, 358 bp, Sorghum bicolor
cgtccgcccacgcgtccggaaaaatggtttctcaagaccactcttgaaatgtgcagaagaggttctactgaatggcgatgttgcaagtacatctgggaaatccattgcaagcttacaggtggaagcatctgatttggcaaacttccttaccatggatcggaatggggggtaccgaggttcacaaactctcttaagatctgtattatctgagaaacaagagctgtgcttctctgttgtctcattgctctggcagaagctcatagcttctcccgaaatgcagatgtctgcagaaagtacatcagctcaccaaggaattggaggaaggttgtggatgcaacttttgtgatgcgtttcagcc

SEQ ID NO: 454536 - DNA, 362 bp, Sorghum bicolor
cgtccgcgcgcgcctttcccattcgcgccgccgccgccgccgctgcaagcgccagctcgccgtcgtccgagccaaacaccccaacgccgccatggggcgtatgcacagccgcgggaagggtatctcgtcgtcggcgctgccgtacaagaggacgccgccgacctggctcaagaccgccgcctccgacgtggaggagatgatcactaaggcggcgaagaagggtcagatgccgtcgcagatcggcgtcctgctccgtgaccagcacggtatcccccttgtcaagagcgtcacgggcagcaagatcctccgcatcctcaaggcccatgggctggcgccagaaatcccggaggacctctacttcc

SEQ ID NO: 454537 - DNA, 348 bp, Sorghum bicolor
cgtccgtatcaggggcttgtcacttggaattgcattgacagtgtatggcagggaagaagaagctgacaccttgattgaacaaatgactagagatcaagatcccatacttcgttatggtggtatgtatgcattggctctagcatacagagggactgcaaataacaaagctatccaccagcttctgcattttgctgtgtcggacgtgagtgacgatgtgcggaggactgcagtgttggctcttggctttgtcctgtacaacgagcctgaacagacacccagaatgtgtccctactatcagaatcatacaatccacatgtccgttatggtgcagcactagctgttggaatc

SEQ ID NO: 454538 - DNA, 392 bp, Sorghum bicolor
  unsure (1)..(392): unsure at all n locations
cgtccgcgatggcatcctgtgaaacaaaaacaacgcaatgtccataagctcacaacgtccagatgcacagacccggcaaatttgagttctttttggccccagtacgtaagacgcaaaccgtatgagcgtgttcaattccacctcaattgttacaaacagttgcaatgtacaactaaattttagcaaatgcagcatcctccgggcggttcagcataccacaggttaagtgctacatgagacaactccttatgggtctacactattgtcatatcaatcaagttctgcatcgagatattaaaggatctaatctcttgatagacaatcatggtatcttaaagcttgctgattntggccctggcgagatcattttcaaaatgatcanccatgcaaac

SEQ ID NO: 454539 - DNA, 452 bp, Sorghum bicolor
  unsure (1)..(452): unsure at all n locations
cgtccggttagctaagtctactctcaagattgaagaggaatttaagcagctgatgagtacatacagcaaacctattgagccagatcgcctgtttgactgtctacccaagtctctgcggccaacaaaaggtgaccacgaggatggaggcagcaattctgatcatccatccaaaggcttggagactgctgtatacaggaccccaacactaattcctcccagaatattgcctctcatgaatgacatagctcagcagttggttcaggctggaaatcagcaaacttgctacaaaatctacagagattcccgtgcttcagctctagaagtgagccttcggaagttaggagtggaaaaacttaccaaagatgatgtacaaaaaatgcaatgggaggctttggaggctaaaattggaaactggatacactntatgcgaattgggtcaaattactactagc

SEQ ID NO: 454540 - DNA, 455 bp, Sorghum bicolor
cgtccgcaattccctcgtcgcattccgcaacacctgctcctcctcgccccccttctctcagcggcgacgcctcggggcgctcctaccctgccccctctccggtctcccccgccgtcggcgaagcagccgtcgcaaaagcccgatccggacccccgcgaggtcagaaatccttgatatacctgatggctatgattgatgaacctctgtatccaattgctgtactgattgacgagctgaagaatgaggacattcagttgcgtctaaactccattagaagactttcgacaattgcacgggctcttggagaagaaagaaccaggaaggaactgattccctttctcagtgaaaacaatgacgatgaagatgggttcttcttgcaatggctgaggaattggtgtcttcattccttatgttggggcgtaaacatgctatgtttgcttcaccttggagacatg

SEQ ID NO: 454541 - DNA, 495 bp, Sorghum bicolor
cgtccggttgcgtttcttgttcaatcagttgaggccacagtccgtgtgagagttgttcgtgggtcatggccggatcattttcgaggacaaatcatgtcccgtacagccagtatcagtcatggtgctattgtgctactagattctcgatatggcagaatgaatttcaacaaatatggtgtaattgagctttcaagatgtgttgtttctgtggaaccatgtggacaactgaaagttgatgtggtggcttcacaagtcgatgatgatagaaatgttgttgcacaaggtctggttgatttcacaccgaaaatggccggtgtcagtcatggtattatgtgacctaggctttgtgtgctgagatttagcgttcactggtcccttccctgctatgctggcgagcatgtgggcctgatacaaaaataaggttctctttggcttctagcagatataggggcggcgtggtctggcacaacaaatgagcgcgccagttttaggtgc

SEQ ID NO: 454542 - DNA, 388 bp, Sorghum bicolor
cgtccgatgagcctacgcctggaaattactacttcgaagagaggtacgatttggtcaggttcataaagacggtccagaaggccgggctgtttgtacatctccgcatcggtccctacatttgcggcgagtggaacttcggtggcttcccagtttggttgaagtatgtaccaggcatcagcttcaggacagacaacgaacctttcaagacggcaatgcagggtttcactgagaaaattgtgggaatgatgaagagcgaaaaactctttgcatcccaaggtggccctattatcctctctcagattgagaatgagtatgggccagaaggcaaggagcttggtgccgcaggtcaggcatatatcaactgggcagcaaagatggccatcggatt

SEQ ID NO: 454543 - DNA, 315 bp, Sorghum bicolor
cgtccgctcagcgccgcagcctatgagcgcggtcggcgcctgcgatagacgcccacaggacatgcaaggcggaacagactgagaaggctctattgacacccaactaaggtctgctcagctcaaccaagtctatggagggtgagaagcctggcatgggaggcaacctgctctgggcgagcactggtcgcgggatcatgactgccaacgaagccatggtagggtcctacagcgtcaagatatgactatacactgcaaccgtttctatcaaatgcagaatcctagctgagacgggccacagtgctaagatgaacagaa

SEQ ID NO: 454544 - DNA, 260 bp, Sorghum bicolor
acgcgtccgagcttatattcataatgtaccaggtgtctgccatagggatgtaaagccccaaaatgttttggttgatcctctcacccaccaggtgaagctctgtgactttggtagcgcaaaagtcctggttcctggtgaaccgaacatatcttatatatgttctcgttattatcgtgccccggagctcatatttggcacaacggagtatactactttaatagacatatggtcagctggtagtgtactatctgatgctcttt

SEQ ID NO: 454545 - DNA, 440 bp, Sorghum bicolor
cgtccgcttagaaatgctgttagtaaaacatacaatcggatcagtgacctccgaaaggaaattcaatcactcaagaaaggtcttctagttgctaaagaggcaagtgcaaaagccataaaggagctggaggaggccaaatcggtgcttgagattgtagaggggcaacctgcaatagctgaaagaccaggtaggataaggcgactcgaatcacatgtcaaaaatgcagaggacaaggaaagaactattgaagaatctttagaagtgaagggagctctgcttgctcgggctcttgaagaaagcaaggacttgcttaagttactatttaagagctttgttgacgttctcacttgacgtttgccgcctgtctctgttgatggaaaaattcctaatctacgcacttgagatcaagatgtaaatttttgaccttcaagatcctgaag

SEQ ID NO: 454546 - DNA, 489 bp, Sorghum bicolor
cgtccgccaaggcgcaagacctcgcgcagccgctggtcgacgcccagatccccttcaagatccacgtcgtcaaggaccacgacatgaaggagcgcctctgcctcgaggcggagcgccttggcctctccgctatgatcatggggagccgcggtttcggggcatcccggaaaggtggcaaggggaggcttgggagtgtcagtgattactgcgtacaccactgtgtatgccccgttgtggttgttcgctaccctgatgatgctgcaggtgccggtggagatgcagcaggggcgacagatgagttgcacactgtaccagaggacgaacctgtttatcacgatgcgcctgaggtgcagaaagaaaactgaggtaatggtcgcaagcagctgaagaacgaaggaaaacatgaggcttgtagtgaggcgatcctgtgtatctggaagatgggactggctggttgctttgcttctgtatatcaactggcgtatcatg

SEQ ID NO: 454547 - DNA, 478 bp, Sorghum bicolor
  unsure (1)..(478): unsure at all n locations
cgtccggtcaagtggaatagtatgagaatgaataccgacaactggatctggagcatcattttgcttgcacatcgtccagggaaccacctgttgtcggtctacagccattgcagctgcccaactgacataacgctgcccacttgagccaaatgcatgctcaaccatttggtattcgttctcaatctgcatgtaatttatgtagttagatgacgtgcacgccaaanattgataactttgttgttttacagacctgagaagttataatggggcctccttgtgggtagtaaagcccttcatgtttcatcatgtttactatatctgtaacaaatccttgcatatgttgctgcatagatcaaatgaagtaatttagtatgatgcttaaaaacaggttaccatgantaaatattgatgaaagtactaaaagagtgcttatatttgatcttggaaattaaacccctactattggctggtcttcatt

SEQ ID NO: 454548 - DNA, 461 bp, Sorghum bicolor
  unsure (1)..(461): unsure at all n locations
cgtccgcccacgcgtccggacccacgcgtccgcccacgcgtccgcccacgcgtccgtagatacgatagtcaactttctgtcaatgcagatggatttggtttacaagtgaatgagaacaaggaaaactatggcaagcctgaccacaaacagttatatcctgatccaaggaagtcttctgaaagatccatgggtgcaccaaagcagcatttggggtctgtctctccatctcaagttggttctaacagggttggcatagtgttggaggatgtatctgaatgcgaaatcctctgggaagatcttgtaattggtgaaagaattggatttggttcatacggagaagtgtaccatgctgattggaatggaacagaagtagctgtaaagaagttcttggatcaagaattctatggtgatgctctggatgagtnccgttgtgaagtgaggattatgcgccgtcttcgaca

SEQ ID NO: 454549 - DNA, 413 bp, Sorghum bicolor
cgtccggctcgttgacctcagcggcaacggcttcaacggctcgctcccgtcggacttcggcggggcacggctgcgcctgctcaatgtctcgtcgaataagctcgctggcgcggtgccgaccgagctggccgcgctcgtccccgcgaacgcgacggtggacctgtcgcggaacaacttcaccggcgcgatcccacaggccggcccgttcgccgcgcagccggcggcggcgtacgagggcaacccgaacctgtgcgggccgccgctcaagcaggcgtgctccatcccgtcgtcgctgtccaaccctcccaacgccaccgactcgccgccggcgttcgcggccatccccaaagaaccccgtcgtgccccgccgggaaccccgggtcagccgccgagcgagcaggataagcttcgtc

SEQ ID NO: 454550 - DNA, 405 bp, Sorghum bicolor
  unsure (1)..(405): unsure at all n locations
cgtnccggtttttacanaagcgccgaggcgctggcggcggaggttttacaggtggtacaagaacaataccctccccgcaacacgacatgcaaagtcagttagtcagtagcattggtacaccgagtctaaaaaccagaaagttccccatcttcgagcaacttgagattgtgacagcttaacatcgactactaaggccttgttcagttcgcaaaaacttgcgaaaaagggcactgtagcactttcgtttttatttgacaaacattgtccaattatagagtaactaggctcaaaagattcatctcgcggttatagataaactgtgcaaaatagttttgttttcatgtatatttaatgcntcatgcatgtgccgcaagattcgatgtgacggggaatcttgaaaaattt

SEQ ID NO: 454551 - DNA, 440 bp, Sorghum bicolor
  unsure (1)..(440): unsure at all n locations
cgtccgcccacgcgtccgcggaagtggcagccagggaaccgcgtgctcgtcgagatcgcctgcacgcgcacctccgcgcaggtcttcgcggccaggcaggcgtatcacgagcggttcaagcgctcgcttgaggaggacatcgctgcgcacgtcactggggacttccgcaagctactggtgccacttgtaagtacataccgctatgatggaccagaggtcaacacaaggttggcacactcagaagccaaactactccatgagaagatccatcacanggcttacagtgatgatgagatcatcagaatcctcaccactaggagcaaacctcagctgcttgctacattcaatcattacaatgatgcatttggccaccgaatcaacaaggatctgaaggctgaccccaaggatgagtacctcaaaacactgcgnggcaatcatcg

SEQ ID NO: 454552 - DNA, 498 bp, Sorghum bicolor
  unsure (1)..(498): unsure at all n locations
cgtccgcccttgtcagtgacaggccgaccataatatttggtgctgatgttacccatccacatcctggagaagattccagtccttccattgcagctgttgttgcttcacaagactggcctgaggtcaccaaatatgctggactagtgagtgcccaagctcatcgccaggagctgatacaggatcttttcaaagtatggcaagacccacagagaaggacagtaactggtggcatgataaaggaacttctcatttctttcaagagggcaactggacagaagccccaaaggatcatattctacagggatggtgtcagtgagggacagttctatcaagtattggtgtatgaacttgatgccatcagaaaggcctgtgcatccctggagcccaattanccagcctccagttacttttgtcgtggtccagaagcgacatcacacttaggctgtttgctaataaccacaatgaccagcgtacagttgattagagtggaaacatact

SEQ ID NO: 454553 - DNA, 385 bp, Sorghum bicolor
  unsure (1)..(385): unsure at all n locations
cgtccgagcaaacacatctcctcgctcgcatttctccccaacccaatcaatccccctcgcccccgaaccccagctcgcaccgcatcgatggcgcccaaggccgagaagaaacccgcggcgaagaagctggcggaggaggagcccgcggccgagaaggcgccggccgggaagaagcccaaagcggagaagcgtctgcccgctggcaagtccgccggcaaggagggcggcggcgagggcaagcggngccggaagaagggcaagaagagcgtggagacgtacaagatctacatcttcaaggtgctgaagcaggtgcacccggacatcggcatctcctccaaggccatgtccatcatgaactccttcatcaacgacatcttcgagaagc

SEQ ID NO: 454554 - DNA, 481 bp, Sorghum bicolor
tcgacccacgcgtccgcatgggctcactgaaattgctgagaggattgctgctgaattaggcgagaatgttccttgtctgcctgaaggaaaatcacactcgctactgattccccctgcacctctcacagcctgcggtgattggccattgctgagggtaatgcgtggtattttcgaaggtggactggatgctactggaagggcagagcttgaggaagatgatgaagcttctggtgctgactggggtgatgaagacttggatattgttgatgcaagtgaagtggtggcaaatggtggtgattattttgatgcggaggagggtgaaccaaatgaggaggatggtgaggaaggtggctgggacttggaagatctggaacttccacctgatacagagactccaaaatctgctggcaatgctcgctctgctgtatttgtcgctccaacagcaggcatccctgtcagccaaatctggacacaaaaatct

SEQ ID NO: 454555 - DNA, 399 bp, Sorghum bicolor
  unsure (1)..(399): unsure at all n locations
cgtccgcgttggttntatccactttatgtcttcagcttcatattaagtacgatttggtataatgacattgccaagcatgctttggatgttgtgaaaagtaaacgcctagttttgactcgagccctggatgatcacaacacaactgaaacagaagagcagcctgaaggatttgacagggttgcacttggtattggggaacaggtctattcaatccttcttttaaccattttctttgttgaggtttcagtgattggttacataccttactttggcaaggcaatgaacttcctgctcttgtcattgatgtatgcctactactgcttcgagtacaagtggaacttctttgcagtgagtctccatgagagactngatttctntgagtcaaattgggcattcttt

SEQ ID NO: 454556 - DNA, 466 bp, Sorghum bicolor
cgtccgtgctgctgcatctcgggaccaactgaccaaattagtaaaatttgcaaaggacaatgggtccatcattgtctatgattctgcttatgcgatgtacatatcagatgacagcccaaagtctatctttgaaattcctggagcaaaggaggttgctcttgagacagcgtcattctcgaaatatgctgggttcactggtgtccgtctaggttggactgttgtccccaaggagctccttttctctgatggacatccagttgctaaagatttcaatcgcatagtctgcacttgcttcaatggtgcatcaaacatttcacaagctggtggtttagcttgcctctctccagagggtctgaaggctatgcatgatgtgttggcttctacaaggagaacactgaaataattgttgacacatttacatcacttggattcaacgtgtatggtgcgaagaacgctccctacgtat

SEQ ID NO: 454557 - DNA, 428 bp, Sorghum bicolor
cgtccgcgaaagctgaggctgcattgctggacaaggaggaagaaaatgtaatgctaaaacggcaattggaacagtatgagaggaaatggtcggagtatgaggccaaaatgaaatctatggaagaggcatggaagagacagctctcttctctgcagctgagccttgttgctgctaagaagagcctagctgctgatgatgcggccactagagccgctcggactgattttactccaacacatgcccagtatgactctgaagatacgttgtccactgggacccatacacctgaagtgatagaatcaagacatcacaaccacaaccctgaagctaaagtttcagcaggaaactcggataggcgagtaaatgctgtgaaccacctaacgaaggagtttgaagacagaacgcaggtgtttgaggacgatgcgggc

SEQ ID NO: 454558 - DNA, 263 bp, Sorghum bicolor
  unsure (1)..(263): unsure at all n locations
gaatcccggtcgaccacgcgtccgggaaaactatgcttgccaaagcagtagcaactgaagcaggtgctaatttcatcaatatatcaatgtcgagcattacatcgaagtggtttggtgaaggagagaagtatgtaaaggctgttttctcactagcaagtaaaatagcccccagtgttatatttattgatgaggtcgatagtatgctangaaggagagaaaaatccagggagcatgaagcgatgcgcaagatgaagaatgaatta

SEQ ID NO: 454559 - DNA, 372 bp, Sorghum bicolor
  unsure (1)..(372): unsure at all n locations
cgtccggagttgcaagcacattatatctttcctctttatgttctgttagctagacctactagtaacctttcacttgaagggcattctccaatttatcgattcagtcgggttcacttgcttacttcttttagtgaacttggaaataaggacaacagtgaagccacattcatcattcctgatgtgaagagtttgtcaacctcccatccttgcaaccttgacattatctntattagctgtgggcaagtcggacaaagtaatggtgaagacaactgctctggaaaccatgtggaaggttcttctctccagatgtttgaagggaaatgctccttgggtaaaataccgactaatttacttgcttcgtctttggagagt

SEQ ID NO: 454560 - DNA, 432 bp, Sorghum bicolor
  unsure (1)..(432): unsure at all n locations
cgtccgactntatcttgaggagattcttgcattgacacagcttggggaggactacactgaatttatggtgaataagatccgcggattgagagatgtcaagcctgaacttgggccgcgggcaatgaaagccttccgtaatggtaactttaataaaatggagcaggatctgactgggttctatgtgatttttgaggagtttttcatggtggagaatgtgaggaaagccatacggattgatgagcccataccagatggtctcacaacgtcaatggtggatgatgtattctttgtactgcagagttgctgccgccgagctgcttccactgcaagcataaactctgttcttgctgtgcttggtggggcaacgagccttctgagcaatgagtatcaggaggcactacaatggaggatgcgggagccaaatttgggtgc

SEQ ID NO: 454561 - DNA, 437 bp, Sorghum bicolor
cgtccgccagaagttactgttcttgatccacctggcgcaatagcaaacttgcttgatcgccagtctatgcttcaagaagtatctgaattggacctcacagattgtcatgttcttttctgcaggtaaagtacgtgtgcctaagcagctattcgttaatactgatccctcatcaataccagctgcggttaggagggcggggctctctctcccattggtggcaaaacccttggtggcgaagtcccatgagctatcccttgcttatgatccaacttcactgaccaaacttgagccccccttggttcttcaggaatttgttaaccatggtggtgtcatgtttaaggtgtacattgttggggatgcaataagggttgtaccgtggttttcacttccaaatgttgatgaaagggatctcttgaataatgcctgggttattcggt

SEQ ID NO: 454562 - DNA, 416 bp, Sorghum bicolor
cgtccgctcctactcggcttgacccctccaccacctccatggggtcgtcggaggccgacgaggaccagctcctcaagagcttcctcgcggaggtcagcgaggccgagcgggacaacgaagtgctcaggatacttggttgcttcaagttaaaccccttcgagcatcttaagttgtcttttgattcatcaccagatgaggtgaaaaagcaatacaggaagttatcattgttggtccatcctgataaatgcaagcatcctcaggcacaagaagcttttgcagctctggcaaaagcacaacagctcctgcttgatccacaggaaagaggctacattcttgaccaagttactgctgcaaaagaagaattgagggcaaagcggaaaaaggagctgaagaaagatagtgcgtccaagataaaa

SEQ ID NO: 454563 - DNA, 378 bp, Sorghum bicolor
  unsure (1)..(378): unsure at all n locations
cgtccgaaatgatgtaaaaccacaggcttgtatttttaaggttggtgatgactgtagacaagatgtgctggcgctgcaagtgattgctctgttaagggatgtatttcaagctgttggattaaacctgtatctttttccgtatggtgttttgcctactggaccaggccgaggcataattgaggtggtcccagatactcggagtagaaatcaaatgggtgaaacaactgatggtggtttattagagatatttcagcaagattatggtcctgtaggttcaccttcttttgaaactgctcgagaaatgtttatgatcagtagtgctggatatgctgttgctagcttacntccttcaaccgaagatcggcataatggcaatct

SEQ ID NO: 454564 - DNA, 366 bp, Sorghum bicolor
  unsure (1)..(366): unsure at all n locations
cgtccggcccgcctggctccgccgccgcgcgcccatcagcgggagcaccgtgctgccctacttcgcgcccatcgccgaccgcctcggcgcgctcccctacctcggccccttcgccgaccgcctcggcgtcggcccgcaccaccacggcaccgcccaggcgctcgtcaagttccccggcggggaggcgctgtcggtggccgccatcctcgaggcgccaggggaggtggtcgccaagaactcgctggagaactacgcctacaacatgcgcaacaccatcaaggacgacaagatcgcctncaagctgggcgcggacgacaagaagcgcatcgaggacgccatcgacggcgccatcagctggctcgacag

SEQ ID NO: 454565 - DNA, 498 bp, Sorghum bicolor
cgtccgccactatttcctcccccgccccctctctcccctctcttccccgcagcggcagtcgacggcaaaaccctagatctctctccctcttaaaccctcaacaagtgcggaaggatgtcggagccgtccaaggtaatccacatccgcaacgtcgggcacgagattgccgagtctgatctccttcagctgctgcagccgttcggcgtggtctccaagatcgtcatgttgcgtgccaagaaccaagctcttctccagatggaagacatacatgcttccgtgagtgcgctgcaatattacacttctgttcaacctagcataaggggaaggaatgtatacatgcagttctcatctcaccaagagcttaccacagaccagagctctcatggaaggaattctgatcaggagtctgaacccaaccgaatcctcttagttactatccaccacatgatctatcctataacggtggaggttctacatcaagtattcaaagcttatgga

SEQ ID NO: 454566 - DNA, 524 bp, Sorghum bicolor
  unsure (1)..(524): unsure at all n locations
cgtccggttccttattatcgcgccagcatcaatcttctgtgcattcgttgcgaagggattgatggataggttctcttatgccctgggattgccggttatgattgcagcagttctattcacagcatatgatctgagtcttctgcttctaacttctgggagagatccggggatcatacctcgcaatgcacatcctccagaacctgaaggttttgatggcaatgcagaggttggggctaaccagactccacctgtgcgtttgccccgagtgaaggatgttgttgtcaatgggatcactgtgaagacaaaatactgtgacacttgcatgttgtacaggcctcctcgctgctctcattgctctatctgcaacaactgtgtggagcgttttgaccatcactgtccatgggttggacaatgcataggacttaggaattacaggttcttctatatgtttgtattctcaacaactcttgctctgcctgatgtctttgggttctgctgggtgctcattgntaagatcagaaatg

SEQ ID NO: 454567 - DNA, 391 bp, Sorghum bicolor
  unsure (1)..(391): unsure at all n locations
ttcccggtcgaccacgcgtccgaatactcagtttcttgttgaatattttgcactggaccttctcatggacaatgaaggcatctgccaaggtgtaattgcgctaaacatggaggatggtacccttcatcgttttcgtgctgcaaatacaattctagccactggaggttatggtagagcctacttttcagcaacttcagctcacacatgtactggtgatggcaacgctatggttgcacgtgccggattaccccttcaggatcttgagtttgtgcagttccatcctacaggcatttatggtgctggatgcctgataacagaaggttcccgaggtgaaggtggtattcttcggaacaatgaaggtgagaganttatggaacgatatgctccaact

SEQ ID NO: 454568 - DNA, 330 bp, Sorghum bicolor
cgtgctggcgttgacactgagagacagaaattcacagaagaagaggaagatgaggttgttaggatgaggaacactcctgatttctttaataagatagttgatagcatatgccctaccgtctttggtcatcaagaaattaagagggcagtgcttcttatgcttttgggtggtgttcataagataacacatgaagggatcaacctgagaggtgacatcaatgtctgtattgttggcgacccaagctgtgcaaagtccagttctaaagatactgctgtattgtccaagactgttacacataggaagcgcatctgtgtgtctgcagactgtgta

SEQ ID NO: 454569 - DNA, 280 bp, Sorghum bicolor
cgtccggccagaggtgcagagcgcggataggaagataccattcagagaaaaagttatctacaccgttatttctctcttcattttcctggtgtgcagccagctcccactctatggcattcattcgactactggagctgatcctttctactggatgcgtgttatccttgcatcaaaccgtggcactgtgatggagttgggtattactccaattgtgacctctgggatggtaatgcaacttcttgtcggatcgaagatcattgaagttgacaacagtgtgaga

SEQ ID NO: 454570 - DNA, 404 bp, Sorghum bicolor
  unsure (1)..(404): unsure at all n locations
cgtccggcgaggtgggagctcatggnggcgcgggagtactacgactaccggcgggccatctacggcgacatcacgcataaggccatcctcgtcgacgccgccggcacgctgctcgcccccaccgaacccatggcccaggtgtacagaacgataggccagaagtatggagtggattattcagaggatgagaatctgatgccggattggccggcttattccccagccttggggtgaacaacgtctgaggtatgttaatgatggaaggcccttttggcaatccatagggagttcatccactggctgttcagatctacagtattttgaggaactgtttcagtcctatacaactgaaaaggtgagatccagtgtgcaatgttttgaccttcttctttgggcatataagc

SEQ ID NO: 454571 - DNA, 404 bp, Sorghum bicolor
  unsure (1)..(404): unsure at all n locations
cgtccgttcagttacagaggatattctgactgggtttaaaatgcatgcaagaggatggcaatcaatctactgcatgccaccacgaccttgtttcaagggttctgcaccaatcaatctctctgatcgtcttaatcaggtgctccgttgggctcttgggtcagtggaaattttgctcagcagacattgtcctatctggtatggttacaatggccgactgaagcttttggagaggctggcttacatcaacaccattgtttatccaatcacatccattccgcttattgcctattgtgttcttcctgctatctgtctccttaccaataaatntatcattcctgagattagtaactatgcctggatgttcttcattcttcttttcgcctccatttttgccactggtatat

SEQ ID NO: 454572 - DNA, 325 bp, Sorghum bicolor
cgtccggttcctgcaggtgtaccgcaagaagtcgacgggcgggttcagctcggtgccctacgtggtggcgctcttcagctcggtgctgtggatcttctacgcgctggtgaagaccaactcgaggccgctgctgaccatcaacgccttcggctgcggcgtggaggcggcctacatcgtcttctacctggcgtacgcgcccccgaaggcgaggctcaggacgctggcctacttcttcctgctcgacgtggcggcgttcgcgctcgtcgtcgtcgtcaccctcttcgtcgtccgcgagccccaccgcgtcaagttcctcggcagcgtc

SEQ ID NO: 454573 - DNA, 394 bp, Sorghum bicolor
cgtccgacttggagaagttccttggaactataccaatgatgttcaatgttgttatcctgtctcctcatggctactttgcccaatccaatgtgcttggataccctgacactggtggccaggttgtgtacattttggatcaagtccgtgctttggagaatgagatgcttcttaggattaagcagcaaggccttgacatcaccccgaagatcctcattgttaccaggctgttgcctgatgctgttgggactacgtgcggtcagcgtctggagaaggtcattggaactgagcacactgacattattcgtattccattcagaaatgagaatggtattctcccgaagtggatctctcggtttgatgtctggccatacctggagacatacactggaggatg

SEQ ID NO: 454574 - DNA, 488 bp, Sorghum bicolor
caaaaccctacctcatcccaccgctcgcatctcacggggaagactggtatgctcgccgccgcctggaggctgtcgcagcgagccgtcacgtctcctctcctaggcatcgggcgatcccaaatccgaaaccctttctccaccatggcgtctctctcgccggcagctgcctcgccgaagaggctgagggtctactcgtcccccgccgccgacggcgccggggcgggaagcggcaagcgcgtggggacccacaacggcagcttccactgcgatgaggcgctcggctgcttcctcatccgcctcacctcccagttcgccggcgccgacgtcgtccgcacccgtgactcccagatccttgatacattggatgctgttcttgatgttgggggtgtctatgatcccagtcgccatcgctatgatcatcaccagaagggcttcagggaggttttggacatggatcaacacaaaacttacagtgctggacttgctac

SEQ ID NO: 454575 - DNA, 374 bp, Sorghum bicolor
cgtccgattcaatgcaccagcaatgtatgttgctatccaagctgttctttccctatatgccagtggtcgcacaacaggtattgtacttgattctggtgacggtgtgacccacactgtgccaatctatgagggatacgcgcttcctcatgctattcttaggttggatcttgctggtcgtgatctgactgactgcctaatgaagatcctcacagaaaggggttattccttcactacaacagcagaacgggaaattgtaagagatataaaggagaagctggcctttgtcgcccttgattacgagcaggagctcgagactgctaagagcagctcctctgtcgagaagagctatgagttgcctgatgggcaggtcatca

SEQ ID NO: 454576 - DNA, 408 bp, Sorghum bicolor
cgtccgcggacgcgtgggcggacgcgtggggattttattgatggatatgttaagcctgttgtagggagaaagattaactggatgaaggcagggatcattgagagtgatctggttctaacagttagtccacattatgtaaaagaactcacttctggcccagaaaaaggtgttgagttggatggtgtccttcgcacaaagcctcttgaaactggaattgtaaatggcatgatgtttatgaatggatcctgaactgataagcacatagtgtgaattgatgcacaacggacctgagcagaccttaataagaagatgcagctgagtggatgctggactcagcatccgtatatttgtggcgctgagaaaaaggctgcatactatgagcatcagattggggcaatgtaaatatgt

SEQ ID NO: 454577 - DNA, 340 bp, Sorghum bicolor
cgtccgggagttcgtaggcatggaagaggaaattgggatgctatgcttagagatccaaagttgaagtttttgaacaaccgaactagtgaagagctggcctcaagatggattttggaggagcaaaagattattgatgaacctatgtctacagccaccagacgttctaactcaacagctttcccgggaatatctgatgcaatgatgtctcgggcgctgaatgaaagtaatttctctaaaatgaggatggagcagcctaaattgcagtcccacttaactgatattcagttaggttctagtgatatcctatccagatttccacatattgaggctgctaattaca

SEQ ID NO: 454578 - DNA, 414 bp, Sorghum bicolor
ccgtccggattcgcggtcgaccacgcgtacgccagcgacagtgcaacgccaccttctgcctccgtcgctcgccatggcgcgcaagaagatccgggagtacgactccaagcgcctcctgagggagcacctcaagcgcctcgccggcatcgacctcaccatcctctccgcccagatcacacagtcaacggactttgcagagcttgtgagccagcagccatggctgtcaaccatgaagctagtggtgaagcctgatatgctgttcgggaagcgtgggaagagcggcctcgtcgctctcaacttggacttcgatcaagtcaaggagtttgtcaaggagcggcttggagttgagattgagatggggcggtgcaaggctcaatcacgacctcatcgtcgagccgttgtgcccatgatcag

SEQ ID NO: 454579 - DNA, 389 bp, Sorghum bicolor
cgtccgcttgtcatgtcaaagcaagctgaagctgccagtctgctgtacaaatcaaacctcaactctggtagtgtgctggagtatgctcttgcattcacaagtgctgccctggatagacactacagcaaatggagcgcaactccaaaaacagggtttatcgacattactacttcaaaggacttctatcgcatttttagcggtcttcagtatagttacttagaggatagcattaacaatccttcaaagaaacaggaaatgctgggtgattctgtagcatgggctggctgtacgatcatgtacttactgggacagcagcagcacttcgagctttttgatttctcctatcaatttcttaacgtggcagaagtagaaagtgcacagtttcacac

SEQ ID NO: 454580 - DNA, 467 bp, Sorghum bicolor
cccgggacggcgtcgaccccgccttcgacgtccacttctcgtggatcttcgcgccgtggcaccgcatgtacatctacttctacgagcgcgccctcgggcagctcatcggcgacgacaccttcgcgccgccggctcttttcaagggctcctttatcaacccgctgtgcgaccccaaccggaacatggccaatgtcgacgccctagtcgacctagactacctgagccacaaagatgacaagcccatcgatttcaagggcccaaaggacgaaaaatacaaggatcttgttaacaggaacctgtgcaccatatacacccagcaagtacgtaagggcccggagtcgttccttgggggagaagtactgcacggccatcgagggccgcggcagcgcgggtacgctggagagtatggcgcacacggccgatgcacgttctgggtgggcaaagccgacgacgaagcccctgcgacg

SEQ ID NO: 454581 - DNA, 431 bp, Sorghum bicolor
  unsure (1)..(431): unsure at all n locations
cgtccgccctcctcctcctctctctctctctctctctctctgtctcgccncctgggaggaaggagggctccgtccgccgctcccggggaagagcccgccattgctgccgctggcctaactggggaagatggttgtccaggagttcacagttgatctcaacaagccccttgttttccaggttggccatcttgaggagcgttaccaagaatgggttcaccaacctattgtcagcaaggagggtccacgctttttcggaaatgatgtcttggagttcttgacttgcacaaagtggtgggctgtgccaactatatggctccctgttgtttgcttcatgttcgtgaaatcaattttgatgggtaataccattcaggacgtagttctgatggctctatttggaatatttatttggacgctgattgaatatactttgc

SEQ ID NO: 454582 - DNA, 450 bp, Sorghum bicolor
  unsure (1)..(450): unsure at all n locations
cgtccgcgcccatgccaagttgcttgttgagagtggcgtnnacttctgatattggaataattactccttactctgcacaggtaacctgcctgaagatgatgagaaacaaagatgctaaattgaaagatttagagatatcgacagttgatgggtttcagggccgggagaaagaagccatcatcatttcaatggtccggtctaactcaaagaaagaggtggggttcttgagtgatcacaggcggatgaacgtggcggtgacacgcgccaggaggcagtgctgtctggtgtgtgacgtggagaccgtgagcaacgacaggttcctgaaacgcttggtcgaatacttcgaggagaacggggagtacttgagtgcttcagaataccagagcagctgactggcgtcaatcaaattaaatccaactactctagtggttcgtgcaactgatgcttttt

SEQ ID NO: 454583 - DNA, 482 bp, Sorghum bicolor
  unsure (1)..(482): unsure at all n locations
cgatcccggcgccacgcgtcgccacctcgcaacccccacaacaagcaccnncncttcgccgtactccaccaccagagcatgcgcgttgccgcgacccgactcgccgccgctccccctccgatccgcttcctcttcctcctggtgctcctcggttccgcgatcggagcagccatggccggccacgtcctcggcggcgtgaaggagaaccccgccgccgccaacagcgccgaatccgacgggctcggccgcttcgccgtcgacgagcacaacaagcgcgagaacgcgctgctggagttcgtgcgcgtggtggaggccaaggagcaagtggtggccggcacgctgcaccacctcacgctcgaggccatcgaggcggggaagaagaagctctacgaggccaaggtctgggtcaagccatggctcaacttcaaggagctccaggatttcagccacaaaggggaggccaccacgttcactaacgccga

SEQ ID NO: 454584 - DNA, 424 bp, Sorghum bicolor
cgtccggcgctctcgactctcccgcgccagacgtcccttcgctggccccatcatggtacgccctcaccgggaagacgaggaggccgcctcaccgctcatagccgcgccggcgggcggcggtcggagccacgccgccgacgcgcacgtgctctcggcagccttcctcttcgtcttctccgcctacagcgccgcccagaacctccagagctccgtcaacaccgagggcgacctgggcaccgtctcgatggggattctgtacacctccttcacgctcttttccgtggtcgcgtcgcccgtggtcacccgtataggccccaagcgcgcgctcatcgtcggcaccagcggatacgtgctcttcattctcgccaacctcgtcccgacatggtacacaatggtgccagcttcactctatcttggttttact

SEQ ID NO: 454585 - DNA, 545 bp, Sorghum bicolor
  unsure (1)..(545): unsure at all n locations
ccacctcgcgacctggttttttagtagacttggcaaagnnngaatttgacttaaaacaaagctaagtggcttagaatttgtaatagagggagtacctttataaaaaaaggataaagaaagagtgatataatgttcaattcaaattcaacttgacttgttttattactgcagagcatgaacctcatcttcttcactatttgaacattcttgctcttaaattcctttctagtgttcttcgagtctttggacggaatggtcacttttcattaactgttcctgataattgacagttttccccttttccagactcatccttcacaaacatgctntctatcatcgatcgatttgcatactcagtactcttaccaggttatgctaccagaggctgttgcaattgtggtcgcacccacagatccaaccaggagttatggaatattcaggctgactgatcctggagggattgatgtgcttanggagtgtgatgaaagtgggttccacactcaccgagagacaaccaatggcagtccaatctatgaaacctgctc

SEQ ID NO: 454586 - DNA, 410 bp, Sorghum bicolor
  unsure (1)..(410): unsure at all n locations
cgtccgctcactctcgggacaaccggcgacccngccccccctaccctaggtgcccaggtcttcgccgttcactccgcgaggtcttccccggagacgagcacccaccagaatgaggccagttttttgtggaaaccttgactatgatgttcgcatctctgaggtcgagcgccttttcgggaagtatggaagggtggaacgagtggatctgaagacaggaatatcatggagcatatgtgctcttcctggttggactggctctacctttactgcctctgcctgagcccccacctcatgccttgtccatctccaggagttcacagtccaccatggcatctgttcacatggaaacgaccacctcgtgaccgatgtcttacttttacgatcaacattgcatncttcttccccggctt

SEQ ID NO: 454587 - DNA, 316 bp, Sorghum bicolor
cgtccggattccggtcacccacctccgcccactgagccaacctgtccgccccttttcccctttcctgaagttttctccctcctccgtcctcccccccgagtccacacggcagaggacgccgccggggggaggagaggaagggagcaggtggggggtgggggagatggcgatcctgtacgcgctggtggcgcgcggcacggttgtgctggcggagcacagcgcggctgccaccaacgcggtcgccatcgctcgccaggttctcgagcgccttcccgacggcggtgccgacagttttgttttctacacgcatgaccgc

SEQ ID NO: 454588 - DNA, 454 bp, Sorghum bicolor
cgtccgccaggaacaagtcaacattggctcagctccacctgggtcaaaagtaatggtttaggtcagcgagtgatgaaccaaggttcattaatactgtaacatttgatggcaaggagaacgcccccaccctggttatggtccatggctatggagcttcacaggggttcttctttcgaaactttgacgcccttgcaagtcgttttagggtgattgccattgatcagcttggctggggtggttcaagcagacctgacttcacatgtaaaagtaccgaagaaactgaggcatggttcatagattcttttgaggagtggcgcaaggccaagaacctcagtaattttatattgcttggtcactcctttggaggatatgttgcggcaaagtatgccctaaagcaccctgaacacattcagcacttagttttggttggtcctgctggcttctcgtcagaaac

SEQ ID NO: 454589 - DNA, 478 bp, Sorghum bicolor
gtccgaatccggtcgccacgcgtccgcgcgccgcgtcgctcccgttcgaacgccaagctcctcggcgaaatggccccgaagcgaggtggcagggcgcctgtgccggccaagaagaagacggataaagtggtgaaccctctgttcgagaagaggccgaagcagttcggcatcggcggcgcgttgccgcccaagaaggacctgcaccggttcgtcaagtggcccaaggtcgtccgcatccagcgccagcgccgcatcctcaagcagcgcctcaaggtgccaccggcgctcaaccagttcacccgcaccctcgacaagaacctcgctaccaacctgttcaagatgcttctcaaataccggcctgaagacaaggctgccaagaaggagaggcttctgaagagggctcaggctgagactgaaggaaaaactgttgaagccaagaaaccaattgttgtaagtatggccttaaccatgtgactta

SEQ ID NO: 454590 - DNA, 290 bp, Sorghum bicolor
  unsure (1)..(290): unsure at all n locations
agaatcactgtgcaagtttcgagacagccacagcaatggctgtcataagctggtttgcgctggcgccatcctgtatcttgaatttctggtcgatggcctccagatgagaaatataggatgttaaaacatacttttgaaccgtttcggcacaagatcggtgcttgtggtagcagcaatgcagtgtcgtaaagctaattgtaatatgcagaaattggtgaatggatgtggaatgtantgcgtggtcgaattgtctgtacaaaatacggagtgccttctttggatctgaaaag

SEQ ID NO: 454591 - DNA, 401 bp, Sorghum bicolor
cgtccgctcgacccggccctcctgctccccaacccctccgccgctgtcccactctgccgacccggcgacgccgcttgcctcgctccgccttgccaacggcgccttcgtctacctcgcatatccgcccgatgcgcgctccgcccgcccgccgccgcccaaggcgctttccgtcgctggctccttcggcaagaagatgaccatggatgacctcatcgcgcgccagatccgtgtcacacgccaggagaacgcgctctgcgccgccgcctcctttgaccgcgatgccgccaacgcgttccagctctacgtcgccgagtccctcgcgttcgccgtcaagcgggcgggcttcctctacggccgcgtcgacgcagagaccaaagaggtcttcgtcgacttcatctatg

SEQ ID NO: 454592 - DNA, 419 bp, Sorghum bicolor
  unsure (1)..(419): unsure at all n locations
cgtccgcccacgcgtccgggccacatgcgcaccnnnnatagccccagcatcgtgtccctgcgggaggcgtgcgaggacgagggcgccgtccacctcgtcatggagctctgcgagggcggcgagctcttcgaccgcatcgtcgcgcggngacactacaccgagcgcgccgtcgncaatgtcacccgcaccatagtcgaggtcgtccagctctgccaccgccacggcgtgatccaccgcgacctcaagccggagaacttcctcttcgccaataagaaggagaactcgccgctcaaggccatcgacttcggcctctccatcttcttcaagcctggtgaaaagttttcagaaattgggggaagcccctattacatggctcctgaagtattgaagagaaactatgggccagaaatagacacatg

SEQ ID NO: 454593 - DNA, 448 bp, Sorghum bicolor
  unsure (1)..(448): unsure at all n locations
cggacgcgtgggaactctggcaaggagaaaatggtcctgagctaaagcagngntnnnatcaatttagaaacattagtgcaattatggactgtgttggatgcgagaagtgccgtctgtggggaaagctccaagttcttggtcttggaactgcactgaaaattcttttctccgttgatggagacagccatttgaatcagccattgcagctgcagcgaaatgaggtcattgcattgttcaatcttctgaacaggctctcagagtctgtcaaatttgtacatgaaaaaggatcatcaattgaagaagtcattaaggaacagatcccttcaacttttcaaaagggtgcttccaagcccaatcttaaactggacttcctctgaagatgtaagagtgtagtttgtagttatacaaggacatgctggaagattaacatagacatgtatggatatac

SEQ ID NO: 454594 - DNA, 444 bp, Sorghum bicolor
cgtcgatgcttaaatcaactgtgcgaacctgacgcgaggagctgcattatggaagatgactcagagatggatagataatcctgctaccagaggcagggttctactagctgatctgtcatctaaggctgaagctttgccagtttgtgttgtcaatgacgtagaccatgagaaaggacctggagaattcacctatactaatcaggtcaaatactcgaggcctctcagttctatgaaaaagttgcagggctgtggatgccagagtgtttgcctgcctggtgatgccagttgtgcttgtggacagcataatggaggtgatttaccctacagttcattaggattgttgtcatgccgcaaaccgattatctatgaatgtggtgaatcttgcaactgttctataaatggccggaacaaagtgacccaaaaagggtccaggctacattttga

SEQ ID NO: 454595 - DNA, 477 bp, Sorghum bicolor
  unsure (1)..(477): unsure at all n locations
cgtccggactgccacaaggctgctgtgatcggtgacaccattgtnattctgaaggacacctcgggcccgtccctcaacatcctcatcaagctcatggccgtggagtcccttgtgtttgcccccttcttcgccacccaaggtggcattctgttcaagtacctgtaagggccacaccaagcacaggagaagtatatgatcgaccgaccatggacatctcgaataactcctgccgaattgccagttcttgtgtattgtgcgctagttgtctagctgcactgctgtttttttggtctcattgtttcaggattgctgctgctgttcgtattttctctttgggcctcctggaggcgttactgttagccttactcttactccctgtagctccacgtagaagagagcagatgtcctgcgtctggcaaattttcccagtcccttgatgattgcgatgatgttgaaatctttgaacaatgatacatg

SEQ ID NO: 454596 - DNA, 299 bp, Sorghum bicolor
  unsure (1)..(299): unsure at all n locations
aaatgaaaaaanncacnntgtgcgattaaatttaagatggatgataatgctgaactgtatgattttgatgatgagaaagatgaaaacaaggttgatttcaagaaacttgttagtgataactggatcgagccacctagaagagaaaggaagagaaactactctgagtctgagtactttaagcaagcacttcgtaaggtgcaccagcaaagccaagggagccaagattccagaatgcccacttgcatgatttcagttttcaataccaaagctaatgaatgatgaaaggagtcggaccttat

SEQ ID NO: 454597 - DNA, 468 bp, Sorghum bicolor
cgtccgcgacccacgcgtccgcggacgcgtggaaagggaagcctgaccgatatggcacctgtgtcctcttcaggcagcaaaaagagaaaggccccttctaagaaaacaaaatgtaaaagtgctgcagagagttgcttgcctgaaaaacctcttgcgaaagttgcttggtttagggttattcttgatgaagcacaaagtattaagaattaccgaactcaggttgccagggcttgctggggtttgagagccaaaagaagatggtgtttgtctgggacgcctatacagaatgctgttgaggatctctatagctatttcaggtttctcagatacgatccctatgctgtatataagcagttttgcactatgataaagattccaatcagtaggaacccaactaatggttacaagaagcttcaagttgttttgaagacggtaatgctacgccggactaaagcaaccatgcttgat

SEQ ID NO: 454598 - DNA, 526 bp, Sorghum bicolor
cgtccgctttctggtgcccccaaggctcatccagttagttctgaatcactcagtccaagctgacatagagcaaactctagctctcgtacgtaagcttgacgctgagaaggccattgagggcaatgtactgtcaagttgtgatcatgacaagtcagatgtagacaaatcgcacataggatctatggggcctataattataatcagaggtttaacgactgtcaaaggcctggaaggcgttgagctcctagacactattcttacctatttatggcgtattcatggcgttgattactatggcacgtcagagtcgcatgaggccaagggccttcgtcatgtgagagtagacagtaagacttctagcacatctgatgtcagtgctgctgattgggagaagaagctggatactttctggcaggaaagactgaatggtcaaggacccgtggtcatacttaccgccaaggacaaaattgatgcagcagctgcgtgagttttagaacctcttgtcaggaaaatcaaggatgaaaag

SEQ ID NO: 454599 - DNA, 486 bp, Sorghum bicolor
  unsure (1)..(486): unsure at all n locations
cgtccggccaagaaagacacagctgngaagcatgcccttcaagttcnnntcctttttgtctgccaactatgtcctgtttttcaaattgtacaagatggcacccaacttgaactcatgtcttatggatctctatgtggagcaaatgcgctttgcggctataaaatgcatgtccaagtcatatcgcccaactgtaccagttagatacgctgcacgggttttgggatttgtgggagttgataaagtttgtgaggctctggaagaatgcgaggaatggttaaaagcacatggtgctattctttccgtagataacaatggagaattacaaatagacacaaaggtttcttctacttctttgtacttgccggaacctgagaatgctgtttctcatggtgatgcatctctggctgtggatgactttttgacacgagcatcataaaatatatgttctggtgagtgcccnnctgcccccctctttttgcactggtc

SEQ ID NO: 454600 - DNA, 342 bp, Sorghum bicolor
cgtccgtttcatttgctctagcagcaagtcgaatgaaggacaagactcgtgttgttcatggatctacggggacatgggaaatcaacaacgaatgatgatctggatttgtccatcgaaactcttaccaatgatgtcatagctgttatacgtacaatgtatggagatctgccaccagcaattatactcgttgggcatagcatgggtggttcagtggctgtacatgtggctgcaagaaaagaaattcgaaatcttcatgggcttgttgtagttgatgttgttgagggaacagcaatggcttcactggttcatatgcagaagatcttagcaaatcgggcacagcat

SEQ ID NO: 454601 - DNA, 478 bp, Sorghum bicolor
  unsure (1)..(478): unsure at all n locations
gtccggatcccggtcgccccgctccattgtctccggccgaggcttacatnctcnattccacggtcgctcgcggtctcgctccggcaaacccaatggccgctgccatccccaacggccacaccgccggcggcgacgacgcgccccctcccgcttcgtcgtcgctggtgttcctgggcacggggtgctcgagcgcggtcccgaacgcgcggtgcctgatccagccccccgacccgccctgctccgtctgctcccagtccctctccgtcccgcccgagctaaaccctaactacagatgcaatacttctcttttgattgactattgccaagatgaaggtgcacataagtatattataattgatgtggggaagacattcaaagaacaagttctgcgatggtttgttcgccacaaaatcccttgcgttgattctattcttctgacccatgaacatgcagatgcaatcttgggccttgatgatgt

SEQ ID NO: 454602 - DNA, 570 bp, Sorghum bicolor
  unsure (1)..(570): unsure at all n locations
tccgattcccgggtcgccacgcgtcgcggctatgatctcgcgcagttgggggcccctcgggcgcagggcctgccgtccctcggccgccgcgcctgctccttcgccgtcgtctgcggcaccggcaagaagatcaagaccgacaagcccttcgggattggaggtggcctgaccgtcgataaggatgcctccgggaggaaggtcaagggcaagggcgtgtaccagttcgtcgacaagtacggcgctaacgtcgactgatacagcccaatctacaacgagaatgagtggtctcccagcggcaacgtctacgtcggtggaacgactgggcttctgatctgggccatcaccctcgctgggctcctcggcggcggcgccctcctcgtatacaacaccagcgccctcttcggctaaggatactcatttccaatcgtgatccatgcgcttcttcttgatgcggntcatcatgtaaaatcatgccagcagggtgtctgtctgtaatctagccctcttcgatgcccactgtaatgcaagcttcatcatgtaacaatgctactttctactactacgacgtac

SEQ ID NO: 454603 - DNA, 502 bp, Sorghum bicolor
tacctccggaattccggtcgaccacgcgtcgtgctgctatctattggcatggtatgtacaacttgatattccctgcctaattggaaagggtgggctgataattagtgactctctgaatcataactcaattgtcaatggcgcgagaggatctggtgcaactgttagggttttccagcataactcccctgctcatttggaagaagtcctgagagagcagatagctggtggtcaaccacggacgcacagaccatggaagaagatcattgtcattgttgagggtatctatagcatggaaggggagctgtgtaaactccctgagattatagctgtctgcaagaaatacaaggcttacacatatctggatgaagcccatagcattggtgcttgtgggcaatctggccgcggtggttgtgaactccttggggttgacccaactgatgtagatataatgatgggtactttcaccaagtcttttggatcatgtggtggatatattggcgca

SEQ ID NO: 454604 - DNA, 533 bp, Sorghum bicolor
  unsure (1)..(533): unsure at all n locations
cgtccggtaattggaacaataaataatttccgcctcggccgcctcncntttgaggttgagtgggatgagataaatgctgcttggggtcaggctgcactgctgttgcataccatggctcagtatttcaccccaaaattccaataccggatcaagattcaccctatgggaagctatccaagagtcacagacatccacaataatacatatgaactgtttggtcccgtgaatttgttctggagcacccgatttgacaaagccatgacatggtttctgacttgcctgcaagagttcgctgagtttgccataagtttggataaggagaacaatgttccacctgaaaaatcactgaagcttccctacaagattgatggtgacaaagtagggagccacacgatcgtcctaagtttcaataagaatgaaaactggaccaaggcgctaaagtacatgttgtgcaatctgaagtgggttctctactggtttattggcatacaagttttgcaccacacatcggatcgctgcacacacaatctctg

SEQ ID NO: 454605 - DNA, 429 bp, Sorghum bicolor
  unsure (1)..(429): unsure at all n locations
cgtccggcaacctacgtgcccagtatgtcttgaacgacttgaccaagatcctggaggtattctcacaacaatctgcaaccattctttccactgttcttgcatatcaaaatggacagactcctcatgcccggtctgcagatattgtcagcagcaaccagagaaatccatgtgttctatttgcggaactttggagaatctttggatatgtctaatctgtggccatgttggctgtggaaggtacaaaggtggacatgctattgaacactggaaggaaacacaacattgctattcacttgagttagagacacagaaagtttgggactatgctggggacaactatgtccatcggcttattcagtcaaaaacagatggaaagctagttgagtacaattgccatgntgatcacacagcagaagagcccgtgttcac

SEQ ID NO: 454606 - DNA, 349 bp, Sorghum bicolor
cccacgcgtcgcggcgctattgtatatcgtgcatcgcctctcctcgcctgccttccttgcttggccgcctgctgcagaggcaactgcagttgcggctcgggctgcatattccgcagcggctgcggagggtgcaagatgtacccgtacatggctaaccagcaagtgaccaccaccgccaagactctcgtcatgggtgtcgcaccatcatccaaggagcacgccgagggccctacttaggcggcggcccccgccggagctgtgaacgaagggggcaagaacggccccaactgcagctgcaacccctgcacctgcaagggagctggataataacaccgtgcactgcactgca

SEQ ID NO: 454607 - DNA, 438 bp, Sorghum bicolor
cgtccgccaaagcccaaagccgcgagaggcaagggcgcaacaaaaccctagccgccttcccccgtcctttcttaaaccccaagccgcgccgcattcgctcgcccccccgttccgccgcctctctctctctcctaccgcatatccccccctcaggtttagtgttaaaaaatggcggccttcaacaagcttggcagccttctaaggcacagtgctctggcgagcggtgtcgctgctagctcgtctcctgctgtgttcaatgctgctcggctcatgtccaccaagctatttgttggtggtctttcatggggggttgatgacatgaaactgagagaggcgtttagcggctttggagatgttactgaagcgcgagtgatcacggacagggacactgggaagtcaagaggatttggctttgttcactacaccagcagcgatgct

SEQ ID NO: 454608 - DNA, 369 bp, Sorghum bicolor
cgtccggctttgaacactttgaatcaatattgaattagcaatcttagctatatctattaggccttgtttagttcccaaaatattttacaaaatttttcagatttcccatcacatctaatcttgcggcacatgtatgaagcactaaatatagataaactaattacacagtctacctgtaatttgcgagacgaatcttttaagcctagttagtccatgatcggacaatatttgtcaaatacaaacaaaaatgctactattcgtattttgcaaaaaaatttggaactaaacaagaccttagtgtactggattgagtgaggaaaaaaaatttaacatgtattatttagcccccctcttggtccatttctggat

SEQ ID NO: 454609 - DNA, 414 bp, Sorghum bicolor
  unsure (1)..(414): unsure at all n locations
cgtccgctctgagatatgatgctacagcagatgatctcatagatgttattgaaggaagccggatttacactccttgcatatatgttgttaacaagattgatcagataacacttgaagagctggaaatcttggacaaacttccccattactgcccggttagtgctcatcttgaatggaatcttgatggacttctggagaaggtatgggaatacttggatttggttaggatatacacaaaacctaaagggctgaacccagattatgaggatcctgttatcgtatcatctaagaagaaaactgtggaagatttctgcaacagaatccacaaggacatggtcaaacaatttaaatacgctctagtnatgagttccagcgtcaagcataagccacaaagagttggcaaggagcatgaac

SEQ ID NO: 454610 - DNA, 500 bp, Sorghum bicolor
  unsure (1)..(500): unsure at all n locations
cgtccggcaagctcaaggatggtgatgcgctcggttgcttggatgcgctcgaggactccttgcctatcaagaagggcctctcgagcttctactccggcaggtccaagtcgttcaccagcctggcggaggccacgtcgacggtggcggcggccaaggagctgctggccaagccggagaacccattcaacaagcggcgccgcatcctggccaactggtccaggcgagcctcctgcagctcgctggccacggccacctacctgcctccgctcctgggccccgaccacgccgtcgccgagggggacgagggcgaggaggacgactccgacgacgacgtggaatacagccagctgccgcaccgcggcaagaacgtcagggacgcaccggcattgccactgccgcccaccagagctcggcgcgttggcatgcataggaggaatggccttgggaagcttagatcttccgggtncttctcactgtctgtctccacaatagcagcagta

SEQ ID NO: 454611 - DNA, 356 bp, Sorghum bicolor
  unsure (1)..(356): unsure at all n locations
cgtccgagcaatttaatgttgtggggtatactttactccttagtttgatcgagtataaaacacttgtaatgcgtggggattttgatcgcgcgaatgatgttttatcatctataccaaaggaacaatatgacagtgtggcacgtttcttggaatcacggngaatgttggaggaagccctcgagatagcaactgacactaattacaaatttgacctggctgtgcagcttggtcgacttgaaattgcgaaggcgattgctaccgaggtgcaaagtgagtccaagtggaagcaattaggggagttagctatgtcaaatggaaagcttgagaatggcagaggagtgtcttctatatgctat

SEQ ID NO: 454612 - DNA, 415 bp, Sorghum bicolor
cgtccggtttttaataggatgaaggatcttggatttccgcctacaacattttctttcaatcagcttctgctactctacaaaaggttggacaagaagaagattgccgatgttctcacaatgatggaaaaggaggatgtgaaaccatctctgtttacttacaagctccttgtagatgccaagggattggttggagatatagaagccatggagaaagtggttgaatcaatggagaaagatggcattgagccagatctcatgtttaatgctacaattgccaggcactacatatttaatggtcagcgtgagaaagcagagacacttttggagtcaatggagggtgatgatatccagaaaaatcgttttgcttgcaagattctattacctttacatgcttttctgggcaataatgatgatg

SEQ ID NO: 454613 - DNA, 380 bp, Sorghum bicolor
cgtccgattaacgctcctcggctgtcgtctcgtctcccctcgaaacagcaaaaacccaccaccctctcctctcgcagcgccggcggaaacctggcatcaaggcaaagctaaatagtctttgtattcaattgaggaagaactgtgcccatcctgatcttttggaagctgcatttggaacaacaagcttgtatccacctgttaataagcttttagagcaatgtggcaaatttcagcttctggacaggctactaacttccctacttgcacgcaagcacaaggttctaatattctcacaatggacaaaagttttggacattcttgagtattacctagattcaaaaagccttcgggtttgcagaattgatggcagtgttaatttg

SEQ ID NO: 454614 - DNA, 453 bp, Sorghum bicolor
cgtccggagcaaggcactaagaaaatggtacgatctaattatttcacacaaggaagagcttgcacttctcatgacactggagcaggggaaacctatgaaagaagccctgggtgaggtcaattatggtgcaagtttcatagaatattttgcagaggaagcaaagcgtatatatggtgatatcattcccccaactttatctgatcgcagattgttggttctgaagcagcctgttggggtagttggagctattacaccatggaattttccattagcaatgataacccgaaaggttggaccagctttggcgtgtggctgcactgttgttgtcaagccatcagagttcacccctctgacagcattagctgcagcagatcttgctcttcaagctggaataccagcgggtgcactaaatgttgtgatgggtaatgctcctgagataggtgatgcattact

SEQ ID NO: 454615 - DNA, 437 bp, Sorghum bicolor
  unsure (1)..(437): unsure at all n locations
gcagtaccagtccggaatcgcgcacgcgtccgtgcgagcagcctccaaagtttgagttttatgatccgaaaacaccattcttcacttcccctcggtacttgccaccaacgaagtcggataagtgcaggattaaagacgcgatcatttcgcatggctgcttcttgcgtgaatgtgccattgagcattctattgtcggtgttcgttcacgcctaaactctggatgcgagctcaagaacaccatgatgatgggtgcggatttgtatgagactgaagacgagatttcacggctactatcagagggcaaggtgcccattgnggtaggggagaatacaaagataagcaactgcatcatcgacatgaacgcgagggtcggaagatacgtctctataacaaacaccgaggcgtncaagaagctgaccggccggagctaggatact

SEQ ID NO: 454616 - DNA, 452 bp, Sorghum bicolor
cgtccgcggacgcgtgggcgcagttcggctaccaaacgaaaaccctagccgccgccgccgtcgctgctcttcgtcgagatgggaggcaagtgcccgcaccgcaaggtgaagaagcgccgcctctcgcacaagacggcgcgccgcggtaagttcctcctcaaggccgacgatgccgtctacgacgagctcgtcaagctggccgaccagggcaaggacgctgaaggcaaggagctccccgtcgacgaggacctcccaggcatgggacagttctactgcctccattgcgatcgctactttgctagtgaaagtgtgaaggatgaccactaccgctcaaagcgccacaagaaaagggtcaaggtaatgtctgggccagccccacacacgcaacttgatgctgaacttgctgctggaatgggaaagcctgacaatggcctgaagcttatgtccatgtg

SEQ ID NO: 454617 - DNA, 422 bp, Sorghum bicolor
cgtccggcatatatgcatgatgggagatcctggtgttgcaaagagtcaacttctgaagcatattatcaatgttgcaccaagaggagtgtacaccactggacgtgggagcagtggtgttggtcttactgctgctgtccagaaagatccagtaacaaatgagtttgtccttgagggtggggcactggtgctggcagatatgggcatttgtgctatagatgagtttgataagatggaagagtcagacaggaccgcaattcatgaggtaatggagcagcaaacagttagcattgccaaggctggcatcaccacctctctcaatgcgagaaccgcaattctggctgctgcaaatccagcatggggaaggtacgatatgaggaggaccccagcagaaaatataaatctacctccagcacttttgtctc

SEQ ID NO: 454618 - DNA, 394 bp, Sorghum bicolor
cgtccgcacgcaccacccccaggtcccagactcccagtccccacccaccactcctcctcctcctcctcccctcgccgccgccgccagttcccgtccgatccgcccggatcgccccgccatggaccagtacgagaagacggagaagatcggggaaggcacgtacggggtggtgtacaagggcaaggaccgccacaccaacgagacgatcgcgctcaagaagatccgcctcgagcaggaggacgaaggcgtcccttccaccgccatccgcgagatctcactcctcaaggagatgcagcaccgcaacatcgtcaggctgcaggacgtggtgcacaacgacaagtgcatctacctcatcttcgagtacctcgacctcgacctgaagaagcacatggac

SEQ ID NO: 454619 - DNA, 382 bp, Sorghum bicolor
  unsure (1)..(382): unsure at all n locations
gcgtccgtacacactattcttaactcctagactgacagcccccaccgaccagtgctcctcgttctgctgcccgccgccgaacccgcgggggtgggggattaaagacgcgatcatttcgcaggnctnnttcttgcgtgaatgtgccanngnngaaggcacgtacggtgtggggtcccacgctaaactctggatgcgagctcaagaacaccatgatgatgggtgcggatttgtatgagactgaagacgagatttcacggctactatcagagggcaaggtgcccattggggtaggggagaatacacaaataagcccctgcgtcgtggtgcacaaccacgagggcatttacctcattttcgcgtacctcgaccgcgacctgtagaa

SEQ ID NO: 454620 - DNA, 332 bp, Sorghum bicolor
cgtccggagaagtaaaatcattgcatgttgcggaggaagcttctcaagcttttgctccaacatccagggctattcttggtgctctctctaatgtcggttcatcaagatccagctccgcactgtcaaattcagaaaggcagcaatggtggcataaaccatgtggacctctcctgctttctactgctagcaagcaaaagatggtcacagcttatgatatacgtgatggcgatgttgtgatgaaatgggaagttagcaatccagtaatgggaatggaatactccagcccactacaatggcgtagcaggggaaaagtagtaattgctgggagtgaa

SEQ ID NO: 454621 - DNA, 401 bp, Sorghum bicolor
  unsure (1)..(401): unsure at all n locations
cgtccggagcaaaccctagcgagcgagagccggaggcgagaggagatcgatcagccatggcgctgcgtgccctgtacaacgagatccggggcatgaaggtccgcgaggtgccggcttacctgaagccgcgcttgacctgngacaacgtcaagaagagcgccgaccaggccgtcgaccgctacatcgagaagtacatcgacacgagctcgccggacccgctcttccacgtctgcttcggagggatggtcttctcctacctagtcaatctgccctgggagcgcgcccacctcgcccacctcgaggagatggagaggaccggtgggaagcactagatccgcctcctcgcccctcgccggcagcgccggaggactggtggcttccctgggtccattcaggctgat

SEQ ID NO: 454622 - DNA, 574 bp, Sorghum bicolor
cgtccgctgatggcttcgccacaactactacaatgagaaaacttgggcttatttgggtgacgaatcgaatgcacattgagatctacaagtacccagcctggggtgatgttgttgagatcgaaacatggtgccaagaagatggaagaattggtactcgtcgtgattggatcctcaaggacctggctaatggtgaagttattggaagagctaccagcaagtgggtcatgatgaaccaaaatacacggagacttcagcgagtcagtgatgacgtaagggatgaggtgtttatacattgtccaaagactccaaggttagcattcccagaggaaaataatggcagtttgaagaagattccgaatctttcagatcctgcacaatactcaagactaggactagtgccaagaagagctgatctggacatgaaccaacatgtcaataatgttacttacatttggtgggtcctgggaaagatacctcaagatataattgatacacccgagttacaaacaatcactctcgactatagaagagaatgtcaacatgatgacataagtgattcgcttacttacataga

SEQ ID NO: 454623 - DNA, 340 bp, Sorghum bicolor
cgtccgcccacgcgtccgctggtctcagcaactagtatacaattaggccttgtttagttccaaatttttttggaaaattgacactgtagcactttcgtttgtatttgacaaatattgttcaatcatggactaactaggctcaaaagattcgtctcgtcaattccgaccaaactgtgtaattagtttttgttttcgtctatatttaatactccatgcatgcgtctaaagatttgatgtgacgggaaatctgaaaaattttgcaaaattttctgggaactaaacaaggccttatttgaaatttgtatgcaccttatggtaaacaatcccatacagtctttcc

SEQ ID NO: 454624 - DNA, 463 bp, Sorghum bicolor
cgtccgggccagcgcgcaaagccctgatgggcgcgcccccttccgccgcgcgctcgcgtggcggcccgaggcgcgcgctccgaagatccgctgccgctctcttcctcgccaccctcatcgcgctgcccttcgcggtgctataccgcgccgccgtctggcgctcgctgggggcttcctgggggtgggagtgggactcgctgccctcctcgttcgccgcatccaaggaggagggcgccgaagccgacgatctgtgaagatctcaaacttgagcgaatcctaaagaaggcttctatgcgagacaatacagttatcttgactacacttaatgctgcatgggcctctcccgggtctgtgatagaccttttcaccggtagcttccgttctggtgttagaacaaatttgctgctgaaacaccttgtagttgtagcatttgattggaaaggtacgagcaatgtgcaaaata

SEQ ID NO: 454625 - DNA, 436 bp, Sorghum bicolor
cgtccgcctactcacctttgctcaggccgccaacgaggacgagctatggcgagcaaggtggtctccatcctggtgctcgcattcctgctcctcgccgccgtcgccgtccccgtgtctgcaggtccgcggcagcgggggaagaacggcggtggcggcgccggcggcggtggtgggagcccaagtggtggcggcaacctgaagccctgggagtgctcgcccaagtgcgcgtcgcggtgctcgcagacgcagtacaagaaggcctgcctcaccttctgcaacaagtgctgcgccacgtgcctctgcgtgccgccgggcttctacggcaacaagggcgcctgcccctgctacaacaactggaagaccaaggaaggagggcccaagtgcccctagagctagatccacacactcccggccgccattgctgccctttaatttc

SEQ ID NO: 454626 - DNA, 447 bp, Sorghum bicolor
cgtccgggattggtgaatgcaagcccatatgagaaggggtggattatcaaggtcaagctcagcgattcaggtgagctcaattcgctcatgaatgatgagaagtactcgaaattctgcgaagaagaagacaatcattgaagaaaccagagtgtcttctgaacacaaggacctgtgtttcaagctttatcactgcttctagtctgcagacctgctgtgacaaattcgcaaggttcatcgcctggaataaattagttttaggatttgccaagggcttgggaaatccgagcttgtgaatgacgtggtcaagtttgattatctctttgtagttgtaatctcgtgatttccttctttctaaagataactttttgattccttggtatgcaaatttgttggcccttttgcaaatggttcagaatgttaagcgttattattactgtgcatagtgat

SEQ ID NO: 454627 - DNA, 378 bp, Sorghum bicolor
cgtccgggtatctctgcccaccttttcgccgtcttccagggtctcctcaaggtgcttgccggtatcgacaccaacttcactgtcacctcaaaggcctcagatgaagacggtgactttgcggagctgtacatgttcaagtggacaacgcttctgatcccaccaacgaccattctgatcatcaacctggttggtgttgttgctggtatctcctacgcgatcaacagcggttaccaatcatggggcccgctctttggcaagctcttcttcgccttctgggtgattgtgcacttgtacccattcctcaaaggtctcatgggtcggcaaaaccgcaccccgaccatcgtggttgtctgggcaatcctgttggcatcaatcttc

SEQ ID NO: 454628 - DNA, 498 bp, Sorghum bicolor
cgtccgcccacgcgtccgcccgtccccaaatcgaccgagcgaattcaccacagcctcaccgtcccgaatccgcaccaccgatggcacccaaggcggagaagaagccggcggcgaagaagcccgcggaggaggagcccgcgaccgagaaggcggagaaggccccggcggggaagaagcccaaggccgagaagcggctccccgcgggcaagtccgccggcaaggagggcggcgagggcaagaaggggaagaagaaggcgaagaagtccgtggagacctacaagatctacatcttcaaggtgctcaagcaggtgcacccggacatcggcatctcgtccaaggccatgtccatcatgaactccttcatcaacgacatcttcgagaagcttgcggccgagtccgccaagctggcgcgctacaacaagaagcccaccatcaccttccgcgagatccagacctcggtgcgcctcgtcctccccggcgagctcgccaagcacgccg

SEQ ID NO: 454629 - DNA, 425 bp, Sorghum bicolor
cagtgcagacacgcgtgatcatacgcatggactgcttaccttaccatactgggcgatgctgtacatactggcatctggggacaactgatcgaaaaggttgtcaaggaagccattgcatctgttgatggatataatgctgatagacgagaggctgttaggaaggcagcacaaagtctaaacctgaaaacggaggctgccatggcgatctttagtaaagcagtacggaagttattcttgagctacattcagagagcaaaagaagctgggaaccgcattgaaactgcaaaagagctgaagaagttaatttccttcaacatagttgttgttagcgagcttttagctgacattaaaagagagatatctccagttgctgaaactgaagcatcaagtgcagcatcagaatcttggggagaggatgatgacat

SEQ ID NO: 454630 - DNA, 496 bp, Sorghum bicolor
  unsure (1)..(496): unsure at all n locations
cgtccgagccacctcgcaccccctcgctgtctcgcaccacccgcgcggagcggcggaggggaaggagggaatcggtgggggggacggcgagcggcggcgggagatcccggggggctccgatcgagcgtaagcgggcgggagcagagcgcgcagggagggcaagagtagagtggttcgatggtaagggacacggcatactacgacgtgttggaagtgagcccgacggccaccgaggccgagatcaagaaggcgtactacgtcaaggcgaggcaggtccatccggacaagaaccccaatgatccgttcgcggcggcgaggttccaggaattgggggaggcataccaagtgcttagtgatcccacacagcgtgaagcttatgactcatatgggagatctggtatttcaagggaagcgatnattgtcctgcagcaatttttgcaatgctgttcggagcgagctttttgaggacacattggcagctgcgatggatcatggt

SEQ ID NO: 454631 - DNA, 538 bp, Sorghum bicolor
  unsure (1)..(538): unsure at all n locations
cgtccgagaaacattggcagtcacagaacctgctgagcttaacttcactggaatgaagaagaaaaagaagaagcaggtggatcttgattcatctcttgccgaccttggagacggggaggacagtcaagatgatcaagctgtagaggaacaaggggaaggcattgagcttggaggtggccctacatacccttgggaaggaactgaccgggattataaatatgaagagctgctggacagagtgttcaacattcttcgcgagaacaacccagatcttgctggggataggcgtaggaccgttatgaggccaccacaagttcttagggaggggacaaagaagacagtttttgttaattttatggatntgtgtaaaacgatgcataggcaacctgagcatgtggtgattttttgctcgctgaaatgggaacaagtgggtcacttgatgggcaacaaagggttgggatcaaaaggagatttgccccaaaaactttgaagcaattctgaggagatacataaatgagtatgtatctgcaatggatgc

SEQ ID NO: 454632 - DNA, 446 bp, Sorghum bicolor
cgtccggaaaagcttgtgaagtggcatggacaagctttggcagcgagcttgttcatgaaatctgggatgcaggtgagagctgtcatggctctcctggaagccgagaggcggatatccccaaagagtagtaggatcgcatacgctttcttactgaagacatatactgatctggggatgtatcctgaggttggacgaatttggagtgtctacaaatccaaagtgccaccatccaacacgatgtacttgtcgaggataagtgcgttactcaagatgaatgacattgatggggcggaagcaacattgaaagagtgggaaacagtgtctcttcgttatcatgatttcagattaatcaacttgatggttgatgcttattgcaaagaaggtcttgtggagaaggcagtagctcttgtggatgacgccatcaagaaagggaggacaccttatgc

SEQ ID NO: 454633 - DNA, 376 bp, Sorghum bicolor
cgtccggcgcgccgaggcggcaccgcaccgtggtagtagtagaaggcacgggacgcgcgcccccccggggggcctcctcactttctccgcgccatccacggcacccgcgcccctcctgctgctccctctccgcaatggcgacgccctcggccgtgggcgccgcgtgcctcgtcctagcgcgagccgccgccgggcttgggcttgggcccgggccgggcggcgatcgggcgcgcccgcgccggctccagcgcgtggtgcgcaggcggtgcgtcgcggagctgagcagggagggtcccgcgccgacgccgcgcccgctgtcacccgcgctgctggcgccctcgctcgtgcccgcctttctcgcgccgtcgtccgagcc

SEQ ID NO: 454634 - DNA, 414 bp, Sorghum bicolor
gtcgaccacgcgtccgagggcttaccaaacaacgcaagccatgggttcggagaatacaaccaacaaagactgaactaaagaagcctcaggattatactggacccaagctggaaagtctcttattccatgaatttttgagagctagatttacacccagttatgtgctaggtgcagcttccaattgttggctggcgcttatggatcggctcttgacaggcggcgttccaaagagtgaacggcaagcgataaagaagaagatgcttgatttggttgacatttactatttggctttggatgctccaaaggaagggaacaagatcactgttcctggagagctgaaggtcaagaaatacccacacttcatggaacgcgatgaaaagaaatcttacacatcgacgtctgtgctgggcaaaa

SEQ ID NO: 454635 - DNA, 502 bp, Sorghum bicolor
cgtccgggaaaggtgccccaacgactccactgatcactattgcaatgactaaaatagtggctagcgtattggagaagaacaacttgccaggcgcaattttcacatccttttgtggtggcactgaaattggtcaagcaattgccgttgacactaggatacctttggtttcattcactggaagtacaagggctggtctgatggttcaacaacaagttaatgcaagatttggtaaatgccttcttgaacttagcggaaacaatgccatcattgttatggatgacgcagatatccagctagctgtacgttctgtcttgtttgctgctgttggtacagcaggacaacgctgcactacatgccgtaggctgattcttcatgaaagcatatatcaaactttccttgatcaacttgttgaggtatacaaacaagtccgaattggggatccgttggagaagggcaccttactgggaccactgcacactcctgcttcaaaagagaacttttt

SEQ ID NO: 454636 - DNA, 449 bp, Sorghum bicolor
  unsure (1)..(449): unsure at all n locations
cgtccgccccaatcctccgacgatgcctgccgcgccgacgcttgtgcccccatgcgacgcggaggagccgctgctggccgagtcctccgaccgcttctccatgttcccgatccgcttcccgcagatctgggagttctacaagaaggcggtggcgtccttctggacggcggaggaggttgacctctcctccgacgcccggcactgggacgaggcgctgtcccccgacgagcgccacttcatctcccacgtgctcgccttcttcgccgcctccgacggcatcgtgctcgagaacctcgcctcccgcttcatgtccgacgtgcaggtcgccgaggcgcgggccttctacggcttccagatcgccatcgagaacatccactcggggatgtactcgctgctgctcgagacctacatcccggacgacgccnagaaggacccgctgttccgcgcca

SEQ ID NO: 454637 - DNA, 479 bp, Sorghum bicolor
cgtacgcaccacgcgtgcgcccacgcgtccggtttcgacgagctcgcggaaatggtggccttcaggttccatcagtaccaggtggtggggcgcgcgctgccgaggcccggcgacgagcaccccaagatctaccgcatgaagctttgggccaccaacgaggtccgcgcaaagagcaagttctggtatttcctgaggaagttgaagaaggttaagaagagcaacggccaggtccttgccatcaacgagatctttgagcgcaacccaacgacgattaagaactacggcatctggctgcgctaccagagcagaaccggctaccacaacatgtacaaggagtaccgtgacacaaccctgaatggcgctgtggagcagatgtacaatgagatggcttctcgccaccgtgtgaggtccccctgcatccagatcatcaagaaccgcacagtgcacttcaagctgtgcaagagggacaacacccaagc

SEQ ID NO: 454638 - DNA, 528 bp, Sorghum bicolor
tcgacccacgcgtccgcttcctatcttaggtggcaggaggctccatggagatcatcgacgagagccacgccatcgtctcctcctccgtcggacccgagtactacgttggcgtgctatccttcgtcgacaaggaccagctcgagccgggatgctcaatcctcatgcacaacaaggttctctctgtggttggtatattgcaagatgaagttgatcctatggtatctgtgatgaatcctgctttaccaatcctctacaaagggagcagaggtggcagggttttagggaggacaagggctatgtttcgcggaaggtgccaaatgcgaatgcctatcacacatctggtaaggcactggtgaaggagctgcaccatgtgacattacctgctggcagttcagttccagtggaaatcatggagaatgaagaatgtggtttggaaggcggcaggatagggaaagtagttttggagcatggaattgatgggaaggtggtagtggaggaaaaggagtgctataattgagcagatgacac

SEQ ID NO: 454639 - DNA, 566 bp, Sorghum bicolor
cgtccggtcaatttgagccaaccacctctctcgcagaattacatgcagctatttggtgttcttctcagtaatgccacttgggaccggccacgatgtgttcctgccttggttcgcttgctgcgagcgttccttaggaaaattccaaatgagctaaaccaagagggcaggcttccaaatatcttggcaatatcccgtagtctcctctcacgcagcagcactgaagattctgcattctacatgctgaacacaatagtggaaaatgttggttttgacattctgaacccatatataagtgagatatggagtgctttgtttactcggctgcagggtagacaggcagtgaaatttgtgaactctcttgtggttttcatgtcactagtgctggtcaaatatggatcaagtgttcttgtcagttctgttgatgcaattcagccaaatcttttcacccaaatccttcagcgattttggattcccaacctcaaattgatcaaaggtgctcttgaagttaagttgacagcagttgcttcgacaaagttgctttgtgagtctgcggtgctggtggatgc

SEQ ID NO: 454640 - DNA, 381 bp, Sorghum bicolor
cgtccgaatgggtcttctgtatcagttgaaaatgctggtttgctagctttgacacgtgttggtagccgaagggtagtgcagatatcagctggtttcatgatattcttctctattctggggaaatttggagctgtgttcgcctcaattcctgcacccatctttgcagctctatattgtatttctttgcttatgctggttctgctgggtttggcttcctccagttctgtaacctcaacagctttaggaccaagttcatccttgggttctcagttttcatgggcctttcaattcctcaatactttaatgagtacacatctgttgctggttatggccctgttcacacacattcaagatggttcaatgacataagtaatgtgatat

SEQ ID NO: 454641 - DNA, 462 bp, Sorghum bicolor
  unsure (1)..(462): unsure at all n locations
gtacgagaactgcaagctgctccttgtggacaagaaaattaacaacgccagagatcttatcactatcctggaggatgctattagaagtggatatccaattctaatagtcgcagaggatattgagcaggaagctcttgcaacccttgtggttaataggcttagaggtgcattgaagattgctgctatcaaggcccctggttttggagagcgcaagagtcaatatcttgatgacattgctactctcactggaggcactgtcatcagagaagaagttggattatccttagacaaggcagacaatcaggtcctaggaactgctgccaaggttgtagtaactaaggattcaacaacaatagtgggagatggcactacacnaggaggagtaaacaaaagggtgacacaaatcaagaaccagatngaggctactgaacaagaatatgagaaagaaaaactaaacgagag

SEQ ID NO: 454642 - DNA, 375 bp, Sorghum bicolor
cgtccggcacgcgcacgggcctgagagctctgactgaacccttcctcctctcctgcggcggcgccggcaagtcggcagcaaccaaccggagcgggagcgggagcggcgatgaagaagatcttcggcgccaagaaagacaagggaccctcccccttcattcaagacgccaccgagcgaattaacaagcggggcgagacggtggacgagaagatcaagaagctggacgaggagctggccaggtacaaggagcagatccgcaagacccgccccggcccgtcccaggaagccatcaaggcgcgcgccatccgactcctcaagcacaagcgcatgtacgaggagcagcgcaacatgtgtacaaccaaacctacaatctcg

SEQ ID NO: 454643 - DNA, 434 bp, Sorghum bicolor
  unsure (1)..(434): unsure at all n locations
cgcgatttgatatcacctctggctccttgttcttatgtggtgcttctcgccttgctcnagatttcttcttctctagaagacctgatgtagagacattctgtgatatttgtcctgatgtgactgtttcccttcaacaacagatagttgggcccttcagttttcgtgttgaatcctctgttgcctttgaccccagaagccaggaccattttgttcgagtggatgatcccatctttgcaattgattgggctctcaaggtcctgggttcagcaaaggccacagcatggtattcacccaagcatcaagaggccatggtggagctccggttctacgaaacctgaagctgtttatcatgaatgattgaacgttgtagaaaataatgcctggacttcattatcgttatgatcgctgatttcactaggatcagatctatggat

SEQ ID NO: 454644 - DNA, 310 bp, Sorghum bicolor
  unsure (1)..(310): unsure at all n locations
cgtccgcatggatagaaatgactactacggaggagattccacctccctaaacctgaaccagctctggaagaggtttagaggggaagacaagccaccggcacatctaggtgcaagcagagattacaatgtagacatggttccaaagtttatgatggcaaacggtactttggtccgtactctcattcacactgatgtgacaaaatatttgtcattcaaagctgttgatggaagctatgtcttcagcaaagggaagattcacaaggttcctgccaccgacatggaggctctaaaatctnctttgatgggtcta

SEQ ID NO: 454645 - DNA, 440 bp, Sorghum bicolor
cgtacgcccaccacgcgagccgccgactgcaccagagaaagacggctgcaaacgccacgggcgacgaactcaggcggccggggtgcctagctcgccggttctttacgccttctcctcccaattccttgggatcaacgccctacaagtacacggcgaggcttgccccccttcggctgccactccgtccgtcctactctgcccgccgccggcgccatgctgtacatcgtgggcctcggcctcggcgacgagcgcgacatcacggtgcgggggctcgacgccgtccgcagctgctccaagatatacatggaggcatacacttccctcctctccctcggcctcgacccggccgcgcttgccaacctggagaagctgtacgggaaggagataacggtcgccgatcgagaaatggtgaggaacgcgtcgaccaggtgctaagcgag

SEQ ID NO: 454646 - DNA, 180 bp, Sorghum bicolor
cgtaccgtgccctctggcaacactgggctggattcgtggcagacctcattctaccaggtgcttaacatccccaccaagattaacaagggtactgtggaactgatcaccgctctggtgctgatcaagagggctgacaaggtggactgatcaatttgatgcctgcttgccaagctgggtatc

SEQ ID NO: 454647 - DNA, 409 bp, Sorghum bicolor
cgtccgccaaactgcgtgtggcaaaggcaggaaaggcatttgtcgatctggtagatgccagtggctatgcctatgcagtgatgccatcggccaagggtcttgtgccagagacgcacccccacttcatcggcacctactggggcgccgtcagcactgccttctgtgctgagattgttgagtccgcagatgcctacctctttgcaggccccattttcaatgactacagctctgttggctactcattcctcctcaagaaggacaaggccatcatcgtccagcctgaacgtgtgataattggtaatgggccggcattcggatgtgtgatgatgaaggagtacttgtctgaattggctaaaagggtaagaagaacaccactgcctatgagaactacaagaggatctttgtacct

SEQ ID NO: 454648 - DNA, 459 bp, Sorghum bicolor
cgtccgccgccatggtcttcttcccagcacggcgttgagttccacccatcattgcttctcgccatcttggtccaaacattcttggtgattgctccaggcttgcatcccccatctggctctgtggtgaaagagcgatacaggaacagaggcaaagcaacagaggagttggttttgctggcgacaatggtggaagcagtggggaccttcgagagcagaggccccggcgttgcggggatgagcagcacgctggaggaggtgcagatgcaggagactctcgccttctctgaaaccatcaaggatctcaagacactgaggtcgcagctgtactccgcggcacagtactttgaacttgcctacatgcaggaagacaaaaaacaggcgatgacaaagaacctcaaggagtatgccgtgaaagcccttgtgaacacggttgaccacctggggtccatatctttcaag

SEQ ID NO: 454649 - DNA, 548 bp, Sorghum bicolor
  unsure (1)..(548): unsure at all n locations
cgtccggagggcgagctcctccctgcgccgccgccaaaaccctcaaaacccgagacgccggcggcgaagaggagagggcggaggcggagatggcgacgcgggtgaaggacgtggcgcggcggtcgaccaagaagtacgtggaggaggcgctgtaccggcgtctgttccggaaggggtccacgccgcaggcggtgcgggaggaggtggacggcttcctcgacagccggaagcgggcgtttaagtgggaggtgggcgtttgcgtccgccggatgcggcggaacgcgctctaccgcccggcgctcaagctttctgaagttatgacaagaagaggcatgaatcctactgttagtgatcaagcaatctgcctggatctcattgccaaatcgagaggcattgctgctgccgagaagtactttttggacctcccagaaacgtccaagactcatcttacatatggcgctcttctcaattcttactgcaaagagttgatgactgagaaggccgagtcccttatggcgaanatgagtgagctcaactttgcttttact

SEQ ID NO: 454650 - DNA, 463 bp, Sorghum bicolor
gtgcccaaagagtgtccatggtgggacgcagtactgtgttgctcacggtggtgggaagaggtgcttagtctcaggctgtaccaagagtgccagagggaggacagaatactgtgtccgccacggcggtggcaagaggtgcaagtttgagggctgtgccaagagtgcgcatgggagcactgatttctgcaaggcccatggtggaggcaaacgctgctcatggggccaggagggctcaagctttggggtcggtgggccagcgtgtgacaagtttgctcgtagcaagattggtctttgtgcaagtcacagcgctttggttgaggatcactgcgtacacggtggtggcttcgtaggtactgcgatcagacagttgacagctgattgcaaccctgatgagattcaagccgctgcaatgaaagatgatgctgatatggcgaatggagaagacgaaacttttctgggatgg

SEQ ID NO: 454651 - DNA, 332 bp, Sorghum bicolor
cgtccggaataaggtcagtgctgatgatggattgcaagtccaggagccaatacgtatttcaaataatcgaaatgacaacaaagttcgagaactagaacttagaattgagttgcttgaagccgagctaagagaagctgcagctgctgaggtaggcctttattcaataattgcagaacatggtagctcagtaaacaaggttcacacaccagcacgaaggctctccaggcattttgtgcatgcgcttaaaaactgtttaagagacaagatgggaagtgcagcaagaaacgcaacctctgggctggttttggttgcaaaagcttgtggatatgaca

SEQ ID NO: 454652 - DNA, 583 bp, Sorghum bicolor
cgtccggcagggtctgcaaacatgtttggtggctctgttatcaagatggtttaaacctgctgcagaatcttttgtgaaagtaccgttccttggagctgtttcacatcttactcttgcagtttgcccattttgtgtcgcatttgctgttctgtgggctgtttttcgccagcttccctttgcttggattgggcaagacattctgggtattgcactgatagttacagtcatccaaattgtcagagtacctaacctcaaggtgggttcagttcttctcagctgtgccttcctgtatgacatcttctgggtgtttatctccaagaggtggtttcatgagagtgtgatgattgtggttgcacgtggcgacaagactgacgaggatggtgtgcccatgctgctaaaaatcccgcgaatgtttgatccatggggtggatacagcatcattggctttggtgatatccttcttcctggtcttttagttgctttcgcgctaagatacgatttttctgcaaagaagggcttccggtctggttactttttgtgggcaatggtggcctatggctctggacttttaatcacatatgtt

SEQ ID NO: 454653 - DNA, 433 bp, Sorghum bicolor
cgtccgtgttgctggaaaggcactgcgggtagattcaagggtctttaacagcaaacatgggactgttttggatagtgggaccacatatgcctatttgccagagcaagctttcgtggcttttaaagatgctgtgacaagtaaagtgcattctctcaagaaaattcgtggccctgatccaaattataaggatatctgctttgcaggtgctggaaggaacgtctcaaagctacatgaggtatttccagatgttgacatggtatttggaaatggacagaagctgtctcttacacctgaaaattatttattccggcactccaaagttgatggggcttattgcttgggtgtattccaaaatggtaaagatccaacaacactattaggaggcatcattggtcgtaatacacttgtgacctatgaccgtcacaatgaaaag

SEQ ID NO: 454654 - DNA, 388 bp, Sorghum bicolor
cgtccgcttcgcacgccggttcttggtacacgaacaatgccaggaagctggaagaggaactcaatggttggctgggggcagctggtctaaccaagtctcctgatgttagggcagtaattgcaccccacgctggttattcatactcaggccgatgtgcagcttatgcttttggcaacatcgatccaactaacatttctcgggtgtttctgcttggcccttctcatcactactacactccaaaatgtgctttaactagggcttctgtctattgtaccccaattggggatttgccagtggaccaggaagtcatcgaggaactcagcgccactggaaaatttgaatttatggatcttagtgtggatgaagctgaacatagcatggaaatgca

SEQ ID NO: 454655 - DNA, 361 bp, Sorghum bicolor
cgtccgctgcgacgagcatcaccaggacagcaggaaggatgacgggctcaatggatctcccggccaagggcgggttcagcttcgacctgtgccgccgcaacaacatgctggagaagaacgggctcaagctccccggattcaggaagaccgggacaaccatcgtcggcctcgtctttcaggatggagttgttcttggggcagacacaagggcaactgaggggcctatagttgctgataagaattgtgagaagatccactttatggcaccaaacatctattgctgtggagcaggaactgctgctgacactgaggctgttacagacatggtcagctcgcagctacagctgcaccgttatgcaac

SEQ ID NO: 454656 - DNA, 541 bp, Sorghum bicolor
cgtccggttcgtcgtatagatgagcctgtatccaagcacattgaagaacaaggattagagtttcttcaatttgccttccgttggttcaactgccttatgatacgagaggtaccttttcatcttgtaacacgtctgtgggatacataccttgctgaaggagactatctaccagattttcttgtgtacatatcggctagttttttgttgacttggtcggacaagctgcagaagctggattttcaagagatggtgatgttccttcagcaccttcccacaaggacctgggcgcaccatgagctcgagatggtcctctccagggcgtacatgtggcacacaatgttcaaaagctctcccagccaccttgccagctaggactcacccagtgcatcatgcctgtaagcagcagtctgttctgttttttgtgaagccgtgtgcatactatcggttgcgccgcaccgatttgtatattttttttcctaccgaggaatcatgatctataatgaacaccaaaggacaaatactagtgctcaatttgataccc

SEQ ID NO: 454657 - DNA, 514 bp, Sorghum bicolor
cgtccggctaagcaaccgaccgcttcctctcagattccatctcactgcagcagcagcagcctgcgccgcttgtgctactgctgctacactgccatggcagcgcgcccggttcttccttctcctgctctcctcttgcttcccctgctgctgcttgtgactgcttcgtcaggtgccgcccatggctacggccacggcggcgacgacgacgacggtgcgggtaagctcagagtcgggttctacaaggactcgtgcccggacgccgaggcgatcgtccgcagggtcgtcgccaaggccgtccacgaggatcccacggccaatgcgccgctgctcaggcttcacttccacgactgcttcgtcaggggctgcgaggggtccgtgctcatcaactccaccaagggcaacaaggcggagaaggacgccaagcccaacctcacgctggacgcctttcacgtcatcgacgacatcaaggacgcgctggagaagcgatgccccggcaccgtcttctgcgccgaca

SEQ ID NO: 454658 - DNA, 448 bp, Sorghum bicolor
  unsure (1)..(448): unsure at all n locations
cgccggcggccccggccttcgaaaccgaaagggaccctaaccctagcggcctccgggagaggcagctaggagagctcggagcaccagcagccatggcggagcacgacctcacggcgctgatggcggcgcagctggaccgccacctggtgttcccgctgctggagttactccaggagcggcagctctactcggagccggagatcctcgaggccaagatccgcctcctcagcggcacgaatatggtagactatgccatggatatccacaagtccctccacggcaccgacgacgtccccgaggacatggtcaagcgccgcgccgaggtcgtntccaggctcatgtcgctcgaggaggccgacggcccgctcgtcgccttccttcagaacccgcaactcgtgcaggagctcaggcccgacaaacagtacaacatccacatgctccaagagcg

SEQ ID NO: 454659 - DNA, 502 bp, Sorghum bicolor
cgtccgaaagattgatcctgatgataccactggcttgaaaccacccaatgtctatggaagcattgaattcaagaatgttgatttctcttttcctgctcgccctgacattcttgtgctgagtaattttaatcttaaagtgagtggtgggcaaacagttgcagtggttggggtttcaggatcagggaaaagcactgttatttctttgatcgagagattctatgacccagtttctggtcaagtcctactggatggtcgagatctgaaatcatttaaccttagatggttgcgtagccacatgggcctgattcagcaagatccagttattttctcaacaacaataagagaaaatattatttatgcaaggcacaatgcaacagaggctgagatgaaggaagctgcaaggatagcaaatgctcatcatttcatcagcagcttgccacatggatatgacactcatgtcggaatgagaggggtgatctaacacctgggcaaaagcaacgga

SEQ ID NO: 454660 - DNA, 390 bp, Sorghum bicolor
cgtccggaggcggcttgcccggcctgcccgtcgccttggcccttggtgccgcgcgccatggccggcaccaagagcaaatcgtccaccaaggccggctcgccgctcctcggcaagtacgagctcggccacctcctcggccggggcaacttcgccaaggtataccacgcgcgctgcctcgccggtggcgaccccgtggccgtgaaggtgctggacaagccggagctgtccgccacgggcatggcggcgcggcttctgcgcgaggtctccgccatgcggcgcctgagccaccccaacgtgctccgccttcacgaggtgctggccacgcggtccaaggtgtacctcgtcatggagctggccccgggcggggacctgctgtgccgccttggcttc

SEQ ID NO: 454661 - DNA, 361 bp, Sorghum bicolor
cgtccgcccacgcgtccgacaaggcaggggttctatattgtcattaccaggaggggatgttcctcctggtggtgagttcgtccaggctgcagctcttgtgagtcaaccagctctttactcaaaggaactgctggagcaacgtgctgctggtcctgcgatgatgcatccatctgaggcagttgctaaaggtccaagatgggctgacctgtttgagcctggagtgaagcatgcactgtttgttggcataggaatacagatcctgcaacagtttgctggcatcaatggtgttctctactacactcctcaaattcttgagcaagcaggtggttgtgttcttctgtcgaacattggccttagcgca

SEQ ID NO: 454662 - DNA, 427 bp, Sorghum bicolor
cgtccgggctatggaagaagaaaggatgtggaattgctatttccttccacttctcccactcaaactgtatcagtgtggactgttgatggaatcctttctcatgcccaatcaaaacattcaaatcccaaggtcgagaagtatggtaaaatcaccaaacttgagctgaaattaggtggtgacaaggctgttggtagaaagaactaccttgctgcatcaaagctctacactcaagcaattgagctggatcctgatgacgcaacattgtattcaaacaggagcctttgccagctacaaattggtgaggcaaacaaggctttgcttgatgccaacagttgcataaagatacggcctgaatggttgaaaggttactaccggaaaggtgttgctctcatgtcactcaaggagtacaaaagaacatgtgatgctt

SEQ ID NO: 454663 - DNA, 386 bp, Sorghum bicolor
cgtccggcgagcctcggagctgttcccgttgcggcggcggcggcggagatggcgcgcgaatctggaggatgtgccgtcactggatctgatgcacgagctgctccgccgaatgaagtgcagatacaagcccgacaagcgcctaatcctcatcggcccggctggctctggtaagggaactcagcctcccattattaaggatgaatatcgcctgtgccatgtagctactggtgatatgctgagggctggtgcggcggacaagacacctctaggtgtcaaagcaaaagaagctatggatacgggagagcttgcttcagaagacttgggtggggtgattatcgatgaagctatgaagaaaccctcatgccaaacaggcttcattcttgatg

SEQ ID NO: 454664 - DNA, 479 bp, Sorghum bicolor
  unsure (1)..(479): unsure at all n locations
cgtccgggagagatggttcgtggaggccagcccggtgcccatccctttgcccttcggcaagctggaggacatggtccggcggcccgtctatccgccggtgcgggagtgtttcttccacttctcagcggagagcgtgaggaagctcaaggcaaaggcgaacgccgagatgcatggggctgggcgacggccacggcgacggccggcgtgtcgtctcgtcgctgcagtccttgctcgcgcacctgtggcgagcgtcgtgtcgggctcgggagctcgcgccggaccgggagaccacgtacatgctcctcgtcgggtgccgggcacgcgtgaaggggatcccacangagtacatgggcaacgccgtcacggtcgccgtcgccaggtcgacggccggcgacgtggtgagcaagggactgggccgggcggcgtggctcctgaaccgcgccgtggcggcgttcgacgaggccagcgtgagagacgac

SEQ ID NO: 454665 - DNA, 415 bp, Sorghum bicolor
cgtccgcctaccgtcgccgccgcctgccagatcctactcctgcggatcctccaccccacgtccccactgcactccatttccgccgctcccctcccctcccttctccgatccgtttgtgcttattttggagtgatactataaaatatggctgccttgccattggccaccgctgaagtatgcgatgctaatcctcatctgattatgaacggcgagctccgtgctctccagcccatcttccaaatctacggaaggcgccaggtttttgccggccctattgtcacactgaaggtctacgaggacaatgtcctgatccgcgagttccttgaggagaaaggccacgggagggtccttgtggttgaccgtggtgggagcatgcgctgtgccattcttggtggcaaccccgtccagcaagcac

SEQ ID NO: 454666 - DNA, 477 bp, Sorghum bicolor
cgtccgctggtcaagtcttatccgcctctcgtcaccaaccgcgtgcgctccacgcctcctccaggtccaggaaagcgagagcttctgcataagatcaacgaatcaaagcgtgatcagctcggtgccgatcaaacttcaacaaccaagtttcatgtctgatctcgacgtccagcttccatctgcctttgatccgtttgctgaggcaaatgctgaggactctggtgctggtcccggaacaaaggattatgtgcatgtgcgcatccagcaacgcaacggcagaaagagtctgactacagtccagggactgaagaaagagttcagctacaacaagatcctcaaggatctcaagaaggaattctgctgcaatggtactgtagtccaggatccagagctaggccaggtcattcagctccaaggtgatcagcgcaagaatgttgctactttcctagttcaggctgggattgcgaagaaagagaa

SEQ ID NO: 454667 - DNA, 376 bp, Sorghum bicolor
cgtccggagcagagcaggcacacctcaccgcagcgccctcctcgtctctatccccgtcggatccaccaccgagcaccgaccgaccgcacctctgctcgctcctgccgccacaatcgctgctcttctctaagtgctgtcgatttgtgcgttggctggttttcattcggttccatccttgtgttgatcaatggctgacggtgaggatatccagccacttgtgtgtgacaatggcactggaatggtcaaggctggctttgctggtgatgatgcgcccagagcagtgttccctagtatagttggcccgcctcggcacacgggtgtgatggttggaatgggccaaaaggatgcctatgttggtgatgaggcacagtcaaaa

SEQ ID NO: 454668 - DNA, 450 bp, Sorghum bicolor
cgtccgaagggaagctgcatgctagcactgacacgcaggactcggaccatgtagaggatcaacactcaattattccagtatttaacgaacacaaaacattagcaaagctgttaaaaggcacattgtgggacatctgctcacgtgctcaatggtgcacgcgatcacagaggtacatcgtacatggttattggcttcagacatcaactgccactggccggttgtgcatggaggagccaaatctgcagtgtggtgagcacttgaaggaattctgtactgggaaaagcaataaagattactgtatgtgaggggatgatcattatacaatcaatgagaactggagattagtaactgctgattactgacagatagagttgcgaataatggcttacttttgtaaagatcctacattggttgaacttctaagtaaacctgatgatgatgtttgtacca

SEQ ID NO: 454669 - DNA, 526 bp, Sorghum bicolor
cgtccgcccacgcgtccgaaacaaggttggagttgctgatatcgttgggaggattgttgaggatctgaaagatgagagcgagccttacagaagaatggtgatggaaacaattgagaaggtcgtggccaacttgggtgcttcagatattgatgctcgtctagaggagctgcttattgatggtatcttgtatgctttccaagagcagactagtgatgatgcaaatgttatgcttaatggttttggagctgtggttaatgcacttggacagagagttaagccttaccttcctcagatttgtggtaccatcaagtggcgattgaacaacaagagtgcaaaagttaggcagcaagctgctgatctaatctccaggattgccattgtcatgaagcagtgccaggaggagcagcttatgggtcacatttggtgtgtgctgtatgagcacctagggcttctttccttctctccttgtatattccttggccaccaaagcacatatcatctcttatcgatctaacctatacttata

SEQ ID NO: 454670 - DNA, 457 bp, Sorghum bicolor
cgtccgcaaaagacgatgctatagcgccgtctgagagcctgcctttagttgatgttcattatgaaggtacacttgctgagactggtgaagtttttgataccacccatgaagacaactctattttctcatttgaaattggacaaggggctgtcatcaaggcatgggatatagccttaagaactatgaaggttggcgaggttgcaaaaattacatgcaagtcagaatatgcatacggagctgcaggctcaccaccagagatacctcctaatgcaacccttatttttgaggtggagctattagcttgcaggccgaggaaaggttcaagtgtggggagtgcatctgatgagaaagccagacttgaggaacttaagaagcaacgagagctagctgctgctaccaaagaagaagagaaaaagaagagggaggaagcaaaagccgctgcagcagcccgggtaca

SEQ ID NO: 454671 - DNA, 417 bp, Sorghum bicolor
cgtccgagaaaacaccctgcaacatttgatgacagagctaactgtaagaagtctaaattaatttcctgtgggagtggatctatattggagtcatatcggaactttaagacaagtgggctgcctgtgcgtgtgcttttctaccaacatggtgactggagtgattttccagaggatgttgtcaatctagcacaacaggacttccagttgaagaggccaattactactgctgtgttccagaacaagcacatcatgttggacttcgttcacatgatttgcatagattatgagatgaccatagacaaaccactagcatgggttgatgatcatggcaaacacttctttccagatttatctgctggactgtacacatctaaaccatctcagcatgagaaaggtgaagctgatgagtgtgatgga

SEQ ID NO: 454672 - DNA, 413 bp, Sorghum bicolor
cgtccgcaagaagaagtatggtcaagatgccacaaatgttgaggatgaaggtggtttcgcacctaacattcaggaaaacaaagaacgcctggaactactgaaggcagctatagaaaaggctggctacactggaaaggtggtcattggaatggatgttgctgctactgcattctatagtgcgaaggacaagactcatgatcttaatttcaaggagcgagaacaacgagggttcaaacaaaatttcaggtgacagcctgaaagatctgtacaagtactgtgagtgtgagtaccctatagtgtgtatcgaagatgcattctatcaggatgactggaccactcatgccaaactcactgatgagatgggacagcaagagcagatagcaggagatgatcttcttgatacttaccccact

SEQ ID NO: 454673 - DNA, 382 bp, Sorghum bicolor
cgtccgcgacgacgccgacgacggcgccgcctctgccaacaacaacaacggctccgtccgctgcaacggcaccccgcagccgggcatcgagctgcgctgcgagctcaacggtaaccgcaacagcgactactgcggcccgctcacctccttcgactggaacgacgccgacccgcgccgcatcggtacctcctccatcgacaccacctgcaccatctgggacgtcgagcgcgaggccgtcgacacccagctcatcgcccacgacaaggaggtctacgacatcgcctggggcggcgcgggggtctttgcctccgtctccgccgacggctctgtccgcgtctttgacctacgggacaaggagcactccacaatcatttatgagtct

SEQ ID NO: 454674 - DNA, 302 bp, Sorghum bicolor
aacaactggagctatgataaatgcacacgtcagtggagccttgtggacactgatcacttgcggtacaagtacatgaatgcgtttgatcagcaatgaatgcgctcgatgagagattttcttcttttgtatccaacaatgtagcgacatgaatgatggaaaagtttgtttgacggggatggttgttaatttatcaagaatatacgtcaagtggtggttgcggaaacaaacatgactttcttctttgtgcagaagtgcacactgatactacggctgagtcagggcgacaataacgcatatagctc

SEQ ID NO: 454675 - DNA, 397 bp, Sorghum bicolor
ccggatcgaccgcacgcgtccgcatggccttgcttatcttcaccatgaatgcagtccgcgaataattcacagggatgtgaagtcaaagaatatcctcctagacaaagattatgaggctcatcttgctgactttggtattgccaagagcttgtgtgtatcaaagacgcacacatcaacatacgtgatgggcaccattggctacattgaccctgagtatgcacgaacatcccggctcaacgagaaatcggatgtatacagctacggcattgtcttgttggagttgcttactggcaaaaagcctgtcgatgatgagtgcaatcttcatcacttgatcctatccaaagccgcagagaacacggtcatggagatggtcgaccaagacatcaccgacacgtgc

SEQ ID NO: 454676 - DNA, 388 bp, Sorghum bicolor
  unsure (1)..(388): unsure at all n locations
cgtccggagagacgcaagaaactaaagagagagcagcaggatgatgggtcaaggctacattcccagcagattaggaatgattatgcccctcaacccaaaaggcatagtcgctttaaagaggcacctcagggctggttggactgtcctgcatttggggagccaatagataaaatcataccatctaaagttcctcttgatgaaacattcaatgagtcagtgcctcctgngaagcgatactcctcaaagcaactagttaacaaacaaagaaaagctggccgcgaaataggtctggtgattgatttgacaaataccacccggtattattcaccagcagaatggacgaggcaaggtactaagtatgcgaagattgatgcaggggagagatgct

SEQ ID NO: 454677 - DNA, 451 bp, Sorghum bicolor
cgtccggaaccagatgcaatcggtggtgcaatccgcgatggcggccaccaacacgacgacgacgactggagtcatgccaccaggtgcgaggccccagctgagctcaaacggttcaagtggccgcggatcacgcgaggccgaggacccggccaccaaggcgcaattgaaggccatggcggcaaaggctctgtggatgcttgcgcggcgccatgtgggagtctgcaagagcataacagagtctcgcgcgctcctctgcttcgccaggctcctccagagcggcgacggcggcgcgggaacggacctgcagttgcactccgcgatggcgatcatggagatcacccgtgtcggcgaacacaacctggcgcttgggcagttcgcgttcaagcccagcgccacggcagccaaagccgtcgtggagcaacttcttccgattggacgcaagggggacgac

SEQ ID NO: 454678 - DNA, 278 bp, Sorghum bicolor
cgtccgagcctatacaaactaggagaggtcgctgtggagaatgggcaaattgcttcacattctactgtcgagcttttggatatgatgctcgtttgattctggatttcactgatcacgtgtggacagaatgtttttcaaacttgtacgggaggtggatgcacctagatccatgcgaaggagtctacgacaatcccctactgtatgagaaagggtggaacaagaagttagattatgttattgcgatctctaaaagatggagtacgtgacgtaacaaaacg

SEQ ID NO: 454679 - DNA, 378 bp, Sorghum bicolor
cgtccgtgctgggcctcgtcagaggatttattttggcaccgatgaagtgaaggcctgcattgtaacttgtggaggcctgtgccctgggcttaacactgttatcagggaactggtgtgtggcttgtcacacatgtacaatgtcagcagcatttttggaatacagaatggatacaagggtttctattctagcaactaccttcccctgacaccaaagagcgtcaatgacatccacaaaaggggtggtacagttctaggaacatcacgaggtggccatgatacaaaaaagattgtgataacattcaagatcgtggaatcaatcaggtgtatatcatcgaggagatggaactcagaagggagcatatgagatcttcaaggaaa

SEQ ID NO: 454680 - DNA, 402 bp, Sorghum bicolor
  unsure (1)..(402): unsure at all n locations
cgtacacttttgtgctaacagaaatctcgtggcggcggctcacatgtctagcgacggcnctgcggctgcgcccactataggtgaccctatagaaggccaatctcctcgacccgtactccatcaagcacctcctcgacgagaccatctcagatgtcgtgaagagcaaggggtacaccgaggacacgcggctgggcaactggaagttgggcatcggggccgccgtgatcgctgtcgccctccttgcgcagttttaccctaagaagttcccgcagaaccgcgaattcctcctcgctgcatcgcactatatgtggtgctgaatgtggtgctgctgatcttagctacactaaggagaaggatgccatcctcttcacgcatnctnctgcgggttctttcaacagcact

SEQ ID NO: 454681 - DNA, 285 bp, Sorghum bicolor
cgtccgggaccagatcggcacctactactacttcccctcgctggccttccacaaggccgccggcgggttcggcggcatccgcgtgctcagccgcccgcagatccccgtcccgttcccgccgcccgccgccgactacaccgtcctcatcggcgactggtacaaggccaaccacaccgatctgaggtacgtccttgacagcggcaaggcgatcgggttccctgacgggctgctcatcaacggccggagcttgaatggctacaccttcaccgtgcagcccggccggac

SEQ ID NO: 454682 - DNA, 498 bp, Sorghum bicolor
  unsure (1)..(498): unsure at all n locations
cgtccgcccacgcgtccgggagaagtccgagcctatggatgacgatcttgataaaataaagaataacaaccacatgagtgaaatagtagactcgtgggaattatggaattcgttcagattgctatgtgaccatagtagccaactatgtgtggcacttgatatttcgagcacactgccatcaataaactcattagggcggtggtttggggagcctgtaaaggctgctattctgcaaaccaatgcttatcttacaaattcaaaaggatatccttgtttatcaaagcggcatcagagctgctaactggattttttaaccattctgttcaggtgataattcctgggagatcaaatctcaatgttttcccagcatcntgagtgctctcaggtgatgagagctgcattgaagattcccctgttcgacatgcattagctccgaccctgagtacattgcgtacctatatcagnaagatgatccacttcctgagcaagaacgctttg

SEQ ID NO: 454683 - DNA, 403 bp, Sorghum bicolor
  unsure (1)..(403): unsure at all n locations
cgtccgcccacgcgtccgctttgtaggtcatgatgaggttgttcagtccacgtaaaacaacattattatttgtaattcgtgacaaatcaaagacacctcttgaaaatcttgaacctattctaagggaagacattcataagatatgggatactgttcctaaaccccatgcccataaagaaactccactcagtgaatttttcaatgtagaagttgtggctttatccagttatgaggaaaaagaagagttattcaaggagcaggtttccaatttaagagatagatttcagcattccatgctcctggtggacttgctggagatcggcgcgggttgtcccacttcaggtttttcttttagttcacagcagttttggaaggcattaaggagaacaaagnacctgatcta

SEQ ID NO: 454684 - DNA, 471 bp, Sorghum bicolor
  unsure (1)..(471): unsure at all n locations
cgtccgcgtttggtcagagtggaatggaaagtatcgcgataccgtgcgtcagttcatcaaaggcacagatggatttgctggtgcttttgctgaatgcctatgcggaagtccacagttataccaggcaggggggaggaagccttggcacagtgtcaactttgtatgtgcacacgatggatttacactggctgatttggtcacatacaataacaagtacaacttgtcaaatggtgagaacaacagagatggggaaaatcataatcttagctggaattgtggggaggaaggaaatttgcaagtttgtcagtccgaagattaaggaagaggcaaatggcaatntctttgtttgtcttatggtttctcagggagttccaatggtctacatgggtgatgaatatggtcacacaaagggagggaacaacaatacatactgccatgaccattatgtcaattatttccgttgggataaga

SEQ ID NO: 454685 - DNA, 462 bp, Sorghum bicolor
cgtccgctgtactacaccatcaacaccacgcgccgccattaggagaagaagaagaggcagagcttagggagcgaaaaagacgcttcttcttcttgctgctgtgcttgcggatccgcggtggctgcgctcgccggcggggaagaggggtcgcgggcggcgcgcctcaagtctttcttcgcctccgtgctctttgggctctttggccaggccgaggacaacgagaacgaagagatggccacgcgcaaccacaacaacgccgtcgccgccgccgccgctccgcagctccgccaccacacaaccgaggcggtgttcccgctctcggaaagagcaaggccggcccggccgaactgacgccatgaaccggcgacccgtcctcggcgatattggcaacctcgtcaccgtccgcccagccgaagggaagcctcagcctcaggaacagcaggtcaatcgccccatcacgag

SEQ ID NO: 454686 - DNA, 434 bp, Sorghum bicolor
cgtccgcccacgcgtacgctgatcagttgacggatattgttgtgaatgcagttctgtgcatcagcaaaccagatgaaccaatcgatctttttatggtggaaataatgcacatgcgccacaaatttgatgttgacacccgcctggttgagggtctggtcctggaccacggttctcgtcaccctgacatgaagcgcagggcagagaactgttacatcttgacctgcaatgtctcattagaatatgagaaaagtgaaatcaatgcaggatttttttactcaaatgcagaacaaaggagaagatggttgctgcagagagacgccaagttgatgaacgtgcaaacggattattgagttgaaaaataaggtttgtgctggaggtgataaaaactttgttgtgataaatcagaaaggcattgaccctccatcttctgatct

SEQ ID NO: 454687 - DNA, 497 bp, Sorghum bicolor
cgtccggttgagaaggatgatgatgatgacgacgatgatgagaagatgggagatgaagaggataatgatttggatctttcctggaaaatgttggacattgctagggcaatagttgagaagaccccagataacactatggagaaagtaaaaatatattctgctcttgctgaagtcgcaacagaaagagaggacatagacaactcactcactgactacatgaaagctttatccatgttggagcatttggttgaacctgatcatcgtcgagttgtggaattaaacttccgcatatgttggtttatgagctagtttccaagattggagatgcgattccgtatgtgcaaaagcgatttcgctatgcaagtcgcgcatacagagcctgaaaagttccaaggatgctttgttggctggtaaagatggtgatgcatctgctgctaaggctgaaggaggctcagaaaactctgacgctgaaaaagagctagagcagcttactagca

SEQ ID NO: 454688 - DNA, 470 bp, Sorghum bicolor
cgtccgccagaacgtgctgttgaatacctctactctggtattccagtgacagctgaagttgctgttccaattggtggccaaggagcaaacacaactgatcgagctcctactggggaagccggtctctctgggattccaaacactgctccactaaatctgttcccacagggaggttccaatgcgggaggtggtgctggtggtggaccacttgattttcttagaaacaatcaacagtttcaagcagttcgggaaatggtccatacaaatccacaaattttgcagcctatgctgttgagttgagcaagcagaatcctcaaattctaaggttgattgagagaatcatgatgagtttctgcagttactaaatgagccctttgaaggtggagagggggacttcttagaccaacctgaggaggatgaaatgcctcatgctatcagtgttacaccagaggagcaggacgccattggac

SEQ ID NO: 454689 - DNA, 451 bp, Sorghum bicolor
cgtccgcacatttcgcctccctttccctctctcccccaattcaaaatcaaccactccccttcccttccccatcctcctccctactagggtttgcctttgcggcgtcgccctcatccatcgaccagcagcaacagcagccgacgatcgatccgtgttgggcggcgatggagatcaacatcgtggacaagtacgagaagctcgagaaggtcggtgaggggacgtacgggaaggtgtacaaggcgcaggacaaggcgacggggcagctggtggcgctgaagaagacccggctcagatggacgaggaagggatcccgcccaccgcgctccgcgagatcccctcctcaacctcctctcccactccatctacgtcgtccgactcctcgccgtcgagcagggccgcaagaacggcaagcccgtcctctacctcgtcttcgagttcctcgacaccgatc

SEQ ID NO: 454690 - DNA, 417 bp, Sorghum bicolor
cgtccgtgcttgtgttattccaggttatgttgtggaggggacccttgcgaagaccattatcaacgagcctagagaagtgacgctagctaatgggctcactgctcctcttcatatgtcagtccactatatctctttttcagctcatgccgatttccctcagacaagcaactttttggatgaacttcggccaccaaatattattcttgtacatggtgaagcaaacgaaatgtcaaggcttaaacagaaacttaaaactcagtttgatggtacaaatattgtatctcccaagattgccaatcagtagagatgtatttcacttgtgagaaaatggcaagactattggcaggctggcagaaaaagtaccagaaggtggagagtcttccggtggcttacttgtcaagaagggattcacgtatc

SEQ ID NO: 454691 - DNA, 466 bp, Sorghum bicolor
cgtccggtttgcagaacaggccagggctgctaaagctgaagaagctgagagatctgtcttcaattttatcaacagccatctagtgagccaagatgtccctgaagtttcgaccaccaaagttagaaaagggtcatcagttgagacccatggacatgctaagaaggaggacagaagatccttggttgcatacgatgaggaagtaaaggagctgaggattcgagttgagaaactggaagagatgaagaaccgtaaccgcaaagacaaggcagtctttgaagcagcctcaaggaaactgaagagactcgaaaggcactcgcggatgctgaagctacccatgctcagcgacgaatgccgttactagaaaggagaaagagaagaaatggttgaaattctgatatcaagttcatgtgccaacgcttctcttgttatgttctgacaagaatcctgccgtgatgtgtgcaacttt

SEQ ID NO: 454692 - DNA, 553 bp, Sorghum bicolor
  unsure (1)..(553): unsure at all n locations
cgtccgcaacttcaacgtataggagttcttggttctggtgatacaataagcaaacatccaacctttgatacaaactaaaaattttgtgggccaatcatggagatgcaataagcattcagtactctggaactcctgctctgaagggagattttgttcggtatgggaagcgaactacacaaggaattctgaacgatttgaggaatgcgcttgcaagatactacttgaataactttgttgatgggactaagcaggatgccatggatcttcttcaaggacattatataacgtccgttagtcgaacatggcagtgccaagcaaagcaggacttctggagagttatgcgtcttccgccttgcttttgcattggttatgggagcgctaatgttcatgatgatgtcactaaggcaagcacggaatgatgttcgccatttgttgctgtcacttatgtgggctggtctttgtattgccatcacacattttgttagagccaatggccgcacgttcactaaccggcctaggtttcaccagtcacgccatngatggacgatgcaag

SEQ ID NO: 454693 - DNA, 441 bp, Sorghum bicolor
cgtccggctcctgctcacgcacagtggcgccatctcctacgccgtcgtcgtcagcgccgagatcgtcaccgtcgggtggtacagcggcaaggaccagggcaagctgctcctcaactgctacttccgcacgggctgctccgccgcgctcctcaccagcagcgggacggcggcgccggtcaagtaccggctcgcgagcctgacgcgcacgaaccagatcgccaacgaccggagctaccgctcggggtaccgcgaggaggacgacgagggcatcaccggcttcaccctcggccagggcggggccgcatggtgagcgagctgctgcgcgcgcacctcgtgacgtcagcctgtccatcctcccatggcgccagaagctgcgctacgtgctggcgctgctcctgtcgtcccgccggcgcctaacaggcgacaacaacaacaacaagc

SEQ ID NO: 454694 - DNA, 475 bp, Sorghum bicolor
cgtccgcatcctcggcttctctccaagtcctcgatccatcctccggctgccccctccccgcggcgaaaccctagcccgtcacctcgccgcccgtcgccgcaggcttatggcgcctatgtgaccggaccagcagcccgccccatctctcccttggcccccgcgtctgatgttcctctcccgcatcgtacttcgcgacctggactcaatcgactccccggcctccatggcgtcctcgaagaaggttgtgacccgtgacgagtgggagcggaagctccgcgacgtcaagatccgcaaggaggacatgaccgcctcgtcatgaacttcctcgtcaccgagggcttcgtcgacccgccgacaagttccgcatcgagtccggcacccagccggagaatgacctagcgaccataacggatcgaatggaggtagagagcagacagtcgggtatgtcaggagcgacgagaaataacgatctacc

SEQ ID NO: 454695 - DNA, 444 bp, Sorghum bicolor
cgtccgatccctctccctgtcggatctgtgcttgttctgaatggcaatggtgctgatgtagcaaagcattgtgttccagcagtccctaccaaaaggttacactcatctgtcatattgtttttcaaaattcattgaactatttggtattaaaaaatcgaatgcgctactttctgaaacacaggatatccattacattcagaaaaatggatccagcaaagcgtccattcgattttaaagatgacccagaactgcttaaccttgcccctctagggacagctgtacaagaaactggcatatatcagatgaggcaagggcaagctacctgacgcccaaataacaaatctgagcaaatatccagaggcaagaggtctaaaggaagaacaactcctgggaaatatggaagcggcattcttggagagcagcctcctgggcatgcacaagccc

SEQ ID NO: 454696 - DNA, 454 bp, Sorghum bicolor
cgtccgccatggagaaatctatacatcgcaactaatgagccgttctataactacttcgacaagctaaggtcacacttccatatccatttgcttgatgattacaaggagctctggtcaaacactagtgaatggtacaatgagacaacaacgcttagtcagggtaagccagtgccattcgacgcatacatgagggtgattgtggacactgaggtattttacagatcgaaggcacaagttgagacattcaacaacttgacaagggattgcaaagatggaattaatacgtgcaacttgtgacacatgagtcacgttttgtttatttattggtgttcatatactcttccaggggcggcacatcagaactcagtggaacttatccaaggtttgtcttttggcataccatcgcaatgtatttcttgttatggaatgattaattggcttcatgcttatctga

SEQ ID NO: 454697 - DNA, 432 bp, Sorghum bicolor
cgtccgagggtttaaggcagcagctgtagcaaccgtcgcctctgcagttcccaccctggcgagcgtgaggatgctgccatgggcgaaggccaacatcaaccccaccggacaggcactcatcatctccacggttgccgggatggcctacttcatcgccgccgacaagaagatcctgtcgctggcgagacggcactcgttcgagaacgcaccggagcacctcaagaacacctcttaccagggcaccggcaggccacacccggccttcttcaggccttgattgaggataaacaaagcaaaccatgcaaattatttgttctactgttgtatgtgtagtaatccagctatttcatcaataatcaggcccctgcaatgcagaccagcagggaggtagcttgctctgcgagctaattagcatagcttagcttctgtata

SEQ ID NO: 454698 - DNA, 480 bp, Sorghum bicolor
  unsure (1)..(480): unsure at all n locations
cgtccgcgcaaccagcgcgccgccccgctccgctcccctcgccgctgcacggacgcagcgattagttctcgcaatggcggtaggcaagaataagcgtatctccaagggcaagaagggaggcaagaagaagaccgtggatccgttcagcaaaaaggattggtatgatatcaaggctccgtcggtcttcagcgtgcgcaacatcggcaagacccttgtctccaggacacagggcaccaagattgcctctgagggtttaaagcacagagtatttgaggtctccttggctgatcttcagagtgatgaagaccagcatacaggaagattagacttcgtgcagaggatatacaagggagaatgttctcacaaaacttctgggtatgagcttcactaccgataagctccgttcactggtgaagaaatggcagacgcttatngaggcacatgttgtgtcaagaccaccgataactacatgctacgttg

SEQ ID NO: 454699 - DNA, 577 bp, Sorghum bicolor
  unsure (1)..(577): unsure at all n locations
cgtccggctagccttgagggcaaaaagctagggtctttcaccagaatatcatctacagtccagacagctatggaggatgctcttcttcggattttgaccccaaggcgctctattgacatactgagggatgtgcacgctgccaaggagcgtgggaggccatatgtcattgttttcgttggggtgaatggagttggcaaatccaccaatcttgcaaaggttgcttattggcttcttcagcataacctcagtgtaacacttgcagcatgtgacaccttcagatctggtgctgttgagcagctgagaactcatctaggaggcttcagatacctatatttgagaagggttatgagaaaatccagcagttgtagcgagggaggctattcaggaagcaacccggaacaaatcagatgttgttttggttgacactgctggacgtatgcaggacaatgaaccactcatgagggcactctccaagctaatcaatctcaatagcccagatctagttttaattgttggagaagcatnggttggaaatgatgctgtggatcagctcactaaaattaaccagaaattagca

SEQ ID NO: 454700 - DNA, 526 bp, Sorghum bicolor
  unsure (1)..(526): unsure at all n locations
cgtccggctccacggctccaccaccgctaaaaccctagacggctagcccgcgcacggaagcgggagcggagcggaggcgagcctctcctgcctcgggttcccccggccaccgcccgccgccatgaagctgacggtgaagaccctcaagggcacgcacttcgagatccgggtgcagcccaacgacacgattatggctgtgaagaagaacatcgaagagatacaaggaaaggacagctatccatgggggcaacaactgctgattttcaatgggaaggtcttgaaagatgaaagtacattggatgagaataaagaaacgaagatgggtttctagttgtcatgcttagtaagggtaaaactctggttcaagtggaacttcatcttcccagccctcaaacactcctgcagcaaggcaggcacctnctctagatgccccacaacaagctcctcagcccccggtggcaccaactacaacttctcagcctgaaggacttnctgcacaggccntctctaacacatatgacaatgc

SEQ ID NO: 454701 - DNA, 530 bp, Sorghum bicolor
cgtccgcaagacacggccggtttcattacacttttgcgttgcgtgtggtcggagtgtttcagattcagagcagagctgagagcacttgtcgtcgtcgtctcggagctcagatcagatgatggctctgcaggcgcagcaggggaggtggatgtcgtcgctggtcctggcgatcttcttcctggcgggagttccccgcggcggcgaggcgcagccgctggtgccggcggtgctgacgttcggcgactcgacggtggacgtcgggaacaacgactacctccacaccatcctcatgccaacttccctccctacggcagggacttcgccaaccacgtcgcaccgggaggttctgcaacggcaagctcgcaaccgacatcactgctgacacgttggggttcactacctaccctgcggcgtacctcagcccacaggcgtcagggcagaaccttctgatcggtgccaacttcgcgtccgcggggtctgggtactacgaccacacggcacctatgtatcacgcgatcccgctgtcccag

SEQ ID NO: 454702 - DNA, 420 bp, Sorghum bicolor
  unsure (1)..(420): unsure at all n locations
cgtccggggaaggtgttgcaaggccgaagaaagagtttgcaaaggaggccaagaaatttgcaaacatccgtcatccaaatgtggttggtttgcgtgggtactactggggtccaaccccacatgagaagttgatcttgtcagattatgttgcgccaggaagtctcgcgagcttcttatacgatcgaccaggaaggagaggtcctccactgacctgggcacagcgactgaagattgcagttgatgtcgcacgtggcctgaactacctccattttgaccgtgcaatgccccacggaaacctcaaggccaccaacatcctgctggacggccttgacctcaacgcccgcgtcgtcgactactgcctgcaccgnctgatgacacaggctggagtcgtggagcaaatcctggacctgggtgtgcttg

SEQ ID NO: 454703 - DNA, 531 bp, Sorghum bicolor
cgtccgaaagattcccttcgcccagtcgccccgcccagatctccctcactcgcactcgctcaccgcgcccaatggcatccgctggcaccggcgccggcgacggcgcggcggcgcagccgaaggccgcaatctctcacgtaatcttcgatatggatggcctcctcctcgacacggagggcttctacacggaggtccaggagaagatcctggcgaggtacggcaaggtgttcgactggtcgctcaaggccaagatgatgggcaagaaggcgaccgagtccgcccgcatcttcgtcgacgagtgcggcctcaacggcctgctcacccccgaggagttcctcgaggagcgcgagagcatgctccaggcgctcttcccatcctgcaccaagctgccaggagtactacgtttggtccatcatcttcatgccaacggaataccaatggctgttgcgacaggatcccataaacgtcattttgcactaaagacccagaaccaccaagaaatgtttgccctgatgcatcatgttgtcatgg

SEQ ID NO: 454704 - DNA, 387 bp, Sorghum bicolor
cgtccgccgcctcaaggcgctcagtttgatccaggaggaggaggaagggaacgggggagccgtgccgccatggtgaaggacagcgagtactacgacgtcctggagatcagcactgacgcctccgtggcccagatcaagaaggcctattacctcaaggccaagctggtgcacccggacaagaatccgggcaaccctgatgccgcgcgcaagtttcaggaactaggcgaggcctatcaggtcctgagtgatccggtgaaaaaggagtcttacgataagtatggaaaggaaggacttccccaagataatatgattgatccaaccgctgtctttggaatgcttttcgggagcgattatttcgaagattatgttggccaacttgcgctagca

SEQ ID NO: 454705 - DNA, 344 bp, Sorghum bicolor
cgtccgcggacgcgtgggcggacgcgtgggcggacgcgtgggcggacgcgtgggccactttgttcccatctctggttttgaaggtgacaacatgattgagaggtccaccaaccttgactggtacaagggcccaaccctgcttgaggctctggacttaatcaatgagccaaagagaccttcagacaagcccctgcgtctcccccttcaggatgtgtacaagattggtggtattgggactgttcctgtgggacgtgttgagactggtatcatcaagccgggtatggttgtcaccttcggtcctagtggccttacaactgaagttaagtctgttgagatgcaccacg

SEQ ID NO: 454706 - DNA, 475 bp, Sorghum bicolor
cgtccgtaaaaattcccctcccctcgtcgcaatccctccttgccgcctccggagccaccgtgagatctgcccggttccgccgcccggaccctaggggactccctcccctccttgatccgttcgggcggccggccggccctccttcaaaaccggggatggtgttctacttcaaggtgcggcccgaggccggcgattacaccatcttcatgggccttgacaagtacgagaacgaggacctcatcaaatacggcttccccgaggacatctggtttcatgtagataagatgtcctctgcacatgtatatgtgagattgaataaaggtcaaacaatggatgacatgagtgagggtttgctggaagactgtgcacagcttgtcaaagctaattccattcaaggtaataaagtcaataacattgatgtagtttatactccatggtacaatttaaagaagaccccttcaatggatgtgggtca

SEQ ID NO: 454707 - DNA, 429 bp, Sorghum bicolor
  unsure (1)..(429): unsure at all n locations
cgtccgcgatctcttcagtcttcagccaccaccctcccagttggccatggtggaggatcggagccccaagcccatccattgcaaagcggcggtatgcagagccgccggcgagccactcaccgtcgaggagatcgtcgtcgatccgccgaaagcctacgagatccgcatcagggtcatctgcacctcgctctgccacacagatgtcaccttctggaaagctaaggtggcaccagtatttccaagaatattagggcacgaggcgtacggngtagtggagagcgtcggggagcacgtggagggcttcgccgcgggcgacaccgtggtgccgacgttcctgggccagtgctcgcagtgcggcagctgcacgtcggagcacagcaacatgtgccgatcggtgtctgtcgtcatcggccccgggatgcggcgcga

SEQ ID NO: 454708 - DNA, 554 bp, Sorghum bicolor
  unsure (1)..(554): unsure at all n locations
cgtccgcgtacgtatagcaagctgcgagcgggcgtggttcagcttcgggtgaaggggatggcgctgtcgtctcgccgcatggccgccgctcccttcctcgtccttgtgctcctcctcgtcgccacagagctggggacgactccggtggcggaggcgaggcactgcctgtcgcagagccaccggttcaaaggcctgtgcatgagcagcaccaactgcgccaacgtgtgccagaccgagaacttccccggcggcgagtgcaaggccgagggcgccacgcgcaagtgcttctgcaagaagatctgctagctagtgctagccttggcggacaggggcaggtccggtcgtcggcatgcaattcaaagctagccgacggcggcgaccactgttggcagtcgttggtccgctcccagcgttgctgtttttgtttactaaccgtgtttctcttcctgctcgtgctgcgctgtacgttgtagcacgcgcgtcgctggttcggcctgttgcttcctttgatctgtcccgcgaataaactccggccatgatgtnccggatatgat

SEQ ID NO: 454709 - DNA, 514 bp, Sorghum bicolor
  unsure (1)..(514): unsure at all n locations
cgtccgccatagtttaatggcttctgattcaaagtttggaacaaacaagctaaagcatccttgttttcgaccagcacaaaaatgcaattcctgttgcgtggattataacccccaattttgcacatggtgaaatacataaatggatgggtgctctttatgatcgagctcataccaaagatcctacttggcaattgggtggctttattattgatgatcccttggcagacgttcgcacaataagggaagtcttccattgccctgtgctgatcagtttatggcgtatccggcatgcttggcataaaaatttggttaacaaatgttcagacattgagaagcgttcagcgatggccaaacgtcttggagatgcaatatctagtatatgcagaggaaatggggatgttgaattattttgaggttttctgcaagattttgtcgattgtgctgggtttctagattactttgaagctagatggcttccaagacttggcagntcatgtacctttctactatcata

SEQ ID NO: 454710 - DNA, 447 bp, Sorghum bicolor
cgtccggcgtctagcacggcgccggtgccgaagccggcgaccgtggccatgcagtcgccggagccctcctcctcctccccggtcctcctcaatatagggggaaagaagtacgcaaccaccgtggagacactgacgcagcgggagcccgactccatgctcgccgccatgttcagcgggcggcacacgctcccgcagcacccaaccacggggaaggggatggtgttcgtggacagggacgggaagcacttccggcacgtgctcaattggctcagggacggtgctatccccgtgctgtcggagtccgattaccagcaactgctgcgagaggcagagtactaccagttgctcggtttagctgattacataaatgagaggcttggttggaagaaagccgacaattcagaggctgaattgacacgaaaggacgtgatcaagtgcatacaggcg

SEQ ID NO: 454711 - DNA, 526 bp, Sorghum bicolor
cgtccgctgttactggttttagcacagccagttcttttggacctcttcatcgtggttcatggtgcactccaccaagattgttcctggaagaccagttcgatgccattcctccagaggtcggcatttcacagaattcaggcagtaagaaaatcaaggaagaggaaggagcaaggagaaaaaatggagcagtgaaaatcagtccatggacattggcacggctaaatgcagaggaagtttcaaaggcagctgcggaggcaaggaagaaatccaaaatcctgaaaccaattgcaaaacatggcatctcagacaatggcagtaaaccagaccataagctcagctaccagagacgactagatagaagaggtttccctgctgagctttctcttgacccacttgcaactctatctgcaagcggcactgaaagcaactacagcgacacagcaacagaaatttgtggagtttagccccattacagctcgaagcaagaagtgctttccagcctagtactgcagcattcacaaagaat

SEQ ID NO: 454712 - DNA, 410 bp, Sorghum bicolor
cgtccgggactgtgtcgaggcgctctatgaaaacctcggtggccaagcatctgttacagcaatagggcacatttcacatagccagaagggaacttatacaacttacctgatgtttgtttcacatgcaactatggatgccaagaaccctgcagcaaaccttgtaatgcacacatattagaggattatgagcatggacgattgttttcattgtatgaacaaattgaccacaaggtagatttcattgagcaagagcttcagcattctgaacaaccaatagttttggttggtcattcaattggtgcatacataggccctgaagtcttcaaaagatttcagaataagataattttttttgtaggactatatccatttttaaagatgaacacgaattctgtaacacaatcagcaat

SEQ ID NO: 454713 - DNA, 460 bp, Sorghum bicolor
cgtccgggtcttcgtaaaattagcaagagctatcctcttgctattaccaaggttgaggagtctggagagcacactatcctggggactggtgaactatatctggattccataatgaaggacctcagagagctttattcagaggttgaggtgaaggtagcagatcctgttgttacattttgtgaaacagttgttgatacttcttctatgaaatgttttgctgaaacacctaacaagaggaacaaaattactatgcttgccgaaccattagagaagggcttagcagaagatattgagaatggtcttgttagcctggattcaaggcagaaagaaattactgacttctttcgccaacgctaccagtgggatgtgcttgcagctaggtcgatatgggcttttggacctgacaagcagggtcctaacattcttctggatgacacactttcaaattgaggttgacaag

SEQ ID NO: 454714 - DNA, 452 bp, Sorghum bicolor
cgtccggctgatggtatatctagccaactttctgttggacaaatttcttatgatagtggctatggaagtgcacaggcaaggacaactcctaccggtctggcagaccctttaagtggaagccctggagggactggtcttcattctggatttgatccatcaagaggcaatgcatatgatggttctcatgttgccaatttcagttcttcaaaaactgggacccatgatggatcaaggggtgccactggctttgactctctgaagggttctgggtatgatgcttcaaaggcacatctaattggacaggcatcagctacagcggctcatgggggccttgctggttactacgggtccaatcaggcaacatcggctccatatgcatggggacaatctgcatcgacctatggatctgtacaagtgccaccatcttacgcatcagggtcaaacacattcta

SEQ ID NO: 454715 - DNA, 483 bp, Sorghum bicolor
cgtccgggcgggcgaggtgaggtccaagcaccatggggctcttaggtatgatgggcgactcgtttggttgctcggcgaccggggagcgacttgtctctgctgcaagagatggagacatccaggaggctagagccctcttggaactcaatccccgccttgcacggtactcgactttcgggatccggaactcgcctctccattactcggcagcaaagggccaccatgagattgtctccctcctaatcgaatccggcgttaatattaaccttagaaattgcagaggacagactgctctgatgcaagcttgtctatatggtcactggaaagttgtacagattctagttctttttaaagctaatattcacaggagagattgttttagtggcgcgaccgctattcattttgccgccctaaaaggcatactcgggcattcggcttcttgtggtgatacgtgcctagttgcagagttggccattatgcggc

SEQ ID NO: 454716 - DNA, 474 bp, Sorghum bicolor
tcgaccacgcgtccgaccgacgtccggctctcttcgagctcacgctccttgaccagagcggaagggcaagcacaaggtccactcccacttcgaccgctccctggagtccgggccgtatacgctcaagtaccgcggatccatgtggggttacaagcgattctttcggcgaactgcccttgaagcatcagattttctcaaagatgattgtctgaagataaattgcactgtgggagttgttgtgtcaactattgattactccagaccacactctatccatgttccagactcagacatcggctatgattttggttcactgttggacagtcaggagaggggttgtgtcattcttaatgtgggaggagggaggtttcatgcccataagttggtgttggctgcacggtctcatgtattcagatctcaactttttgatgatgaatctgatggagagaagagggagggtaatgagacttgatg

SEQ ID NO: 454717 - DNA, 453 bp, Sorghum bicolor
  unsure (1)..(453): unsure at all n locations
tgatggacgaggtcgagaagctgaccgaggaccactacaagcgggtgcgcgagcagaggttcctcgacttcgccagcaagacgctcgcggacgccaaggcggcggagaacctggactgggagagcaccttcttcgtccgccacctcccggactccaacctcgccgagataccggacctcgacgacggctaccggcgcgtgatgaagcggttcgccagcgagctggaggcgctggcggagcggctgctggacctcctctgcgagaacctcggcctcgaggggggctacctcgcgcgggcgtttccggggcgcagcacgggcgcnntcgcgttcggcaccaagtgagcagctacncgcgtgcccgcgcccggacctcgtgagcggcctcgcgacacaccgagccggcggattattctgctgtcaggcgaccgcgtagggggctcagctgtaaggc

SEQ ID NO: 454718 - DNA, 469 bp, Sorghum bicolor
  unsure (1)..(469): unsure at all n locations
cgtccgcactgacttcatcatcagacagacttcctactgctgatggtatcagcacaaatcatatgaaggaagcagattcacaaacacctgtgaagctgaagctacagttatttccaataaatgaagctactcggaaggcattggagaaggatgaccataatcctcatctagagctcacattaagctctaggaagaaaatatcatctgtgctagaacatctaaaccgaaaatggggtaactcaaacatcgcatctggagagcttattctttttccatattgtgctaatcaagaggatttggctacatatcagaggtggacaacaagagatgctgttgcagtagctgatgtgtttctttctgtgaataagcccttctgttttccgtttaaaggaatggntgttttcccttgttgagcttggagccaggagtagtgaaatatctttaacccattttgaggattgcatgatac

SEQ ID NO: 454719 - DNA, 567 bp, Sorghum bicolor
cgtccgccctgccccaaaaccctagccgccgttcctatcaaagcgcacgagctcacaggtcgacggcggcggcggcagcgaggaggacgaaactgcagtcgtgcgatgggtagcgacacagaggccgagcaaaagagggcgccggtggccctggcacccatcgcgaagccgctcgccggcaagaagctctgcaagcgaaccctcaagctcgtccgccgagcctctgaggccaaatgcttgaagcgaggagtcaaggaggtcgttaagagtattcggcggggaaacaagggactgtgtgtgattgctggcaacatttctccaatcgatgtaataactcatgttccgatactctgtgaagaagccaatattccttatgtatatgttccttcaaaagaggatcttgcaactgctggcaccaccaaaaggcctacctgttgcgtgctggtgctgacgaagccagccaaaggggagctcgaggggcaggtcatggagaaactcaagacggactacgaccaagtcatgtctgaagtcgctgaggtcacgtcggcgatgtctaagcacccacgg

SEQ ID NO: 454720 - DNA, 535 bp, Sorghum bicolor
cgtccgtttttttttttttttttttatagagaaaataattttcagtctttactctatgaaaggaacaatttaattacaaaaacaaaactataactaatacatgtaagttaaaaaaggtacagatgtagtaagaaaagaaacacaaaccacatcagttttgattttctaacaggaaacacatgtttctcgagatacttggaataatggatgaaggcatttaccgttccagaaatttttcacatcatgtggttaaggtgccaataagtcactgatctaagaacacaatttagactgtagtcagtatgcaatccattgatggccctgaatgaagttctcctttgaaaagtgtttaacatgctgttctggtgtctgactgctccactcaacccttgctgtgttgtttgcaccaggacctcgactgtcaaattctccataatagagtgtcctgagagcaaaatcacctcgccatggaagccatccctccggcctgacaactgtccccaaataacagctgacatacaacgtcctggcatac

SEQ ID NO: 454721 - DNA, 434 bp, Sorghum bicolor
cgtccgcttaactgggatttaaggtcaagcattgccctagctgcagcccgtggtgttgagtacattcactcaacgagctcaatggcttcccacggtaacatcaagtcatccaatatcctcctgggcaaatcatatcaagcacgtgtatcagacaatggccttaacactcttgttggtccatcatcttcaccgtctcgcaccactggatatcgagcacctgaggttattgattctcggagggtttcccagaaggcagacgtgtacagctttggtgttctgttgcttgagctggtcacaggcaaggctcccagccaggctgctctcaacgacgagggcgtcgacctgcccagatgggtgcagtcagttaatcgctctgagtggggttcagaggtgtttgatatggagctgacgagacatcagactggcgaggaacc

SEQ ID NO: 454722 - DNA, 481 bp, Sorghum bicolor
cgtccgcggacgcgtgggcggacgcgtgggttttttttttttttaactgaaccgttttttttcaacgtggctacaaatatttaatccatatataaattcgcggttacaataggctcagaatgaaacaatcgcggtccaagacgtgggaaatatacacagcctttttgcatctattacctgcccatgctgctacagaaagcctaagcatccaaaacgctctcatacttattccatcgcctacaaaattaaaacaagactgctcgtcctgatctgtgcactgcgcgctttttatccagcgtcaaactgttaagcagcgtcatctctgtgtgtccaccttctccggttgattcgcttggcttgggtcagagtcactcacagcaagagccggaggagcaggagcagcagggccatcgcttcctcctgatgtagctgcgccctcacttggagtagcggcccctgcttcttgctgttgcgacgtggc

SEQ ID NO: 454723 - DNA, 399 bp, Sorghum bicolor
cgtccgcgttcccactccgccgccgccgccggctaaaaccccaattccgtcttcttcctccttcccaaatcccaacctcccctcccagcctatatatccgcgccgcctccccaagtgctatagatctataccctcgtcttcttttctattctaatcgtgcaacaacagctcgtctccagcagatcgattcgatcccctcctctcctcttccgcgccgtgttctgaggatggcgtccttcaaggtggccgacgcgtctgagtacctggcgatcacgggctggggcatctaagacgtgaagctagccaagaaggcgtgggtgttcgtcggccagcagtgcaagaagttcgacatcacccccgtcaactacgaattcgaggtgcacgccatgagctcggaga

SEQ ID NO: 454724 - DNA, 513 bp, Sorghum bicolor
cgtccgctgcttgctagaatggtcctccagatgcgtggtacaattcttccaggacacaagtgggacatcatggttgatctgttcttctacagagacccggaggaagcaaaggagcaggaggaagaagaggctctggttgctcctgactatggcgcagttgcagaatatactgctccagtgggtgagaactggggtggtgccgactggggaactggtgaagccgcagcgcctcctgctggcattccagctgctggtgcagactgggcttctgctccagctcctcctgctgatggtgtctgggatgccgctgccgctcctccagcagccaccggatgggaagaaagcgctgctcccgtggcagctcctacccctaactgggcttaaggtgtaaatcagcatggttgatggcttatagtagtcatcatcagaacttgttggtagacacttgtttgagtagtagctttgaacttttatgtgctatatactagatgagaatcaactttgtgttattga

SEQ ID NO: 454725 - DNA, 359 bp, Sorghum bicolor
cgtccggtgattttgtaactgtatgtaaaaaggtctatgttaggactcggagagtgcgattgcttggattagagggggcaggcaaaacatccctgcttaaagcaatgttaggacaagttaaagaaagaaatagcgctgttcttgaatgcatacatgtcgatttgcatggcaagggaatatcaagtggattgtgctacatagattctacaacagtaaacttgcaggagctacctttggaggttgggcggttcaaagaagaactgtcattaggactccatgatatcagcatgaagactgaccttgttattgctgtgcataacccagcacaccgaattccacagtatcaacaggccaatact

SEQ ID NO: 454726 - DNA, 525 bp, Sorghum bicolor
cgtccgcccacgcgtccgcccacgcgtccgggagaggatgcgggtactgtatgacagaaaacgtgaggagctgaaaatgttagatgagaaaggtgcagaagctcataagcttgaggccactgaactttacatcaggaagctatcaactaagattagcatagctatccaggttgtaaacactatttcagaaaagattagtaagttgagggatgaagagttgtggccacaaacatgtgagctgattcaagggttgatgaagatgtggagcgttatgctagaatgtcatcagatacaattgcatgccatatcccaagctaaaaacatagactccatgatagacactgcaaagtttggtgagaaacatatggacttgatcaagcagttagagcttcagctattggattggattgcttggtttgttgcatgggttagctgctaaaagagtatgttaaaactttaaatcagtggctgagaaatgggttatctacgttcctgaggaaactgaggatggggacgcctcttttc

SEQ ID NO: 454727 - DNA, 364 bp, Sorghum bicolor
cgtccgcagatctccgaagggacacgccggtacagctcctccttgtccaggcgcggcgtggcgacggcctgcagcggcgtgtccatgaaggtgacgagcccgggggactccaccatcctcacgtcctcgggccgtgtcccctccggcagcgtccacctgaagtggtgaaccatgtggccgatcatggacgccacgaggttgatcccgagctgcgcgccggggcacacccgccggccggcgccgaacggcagcacgcggaagtcggcgcctctcgtgtccaagttcttccgtatgaaccgctccggcctgaactcgagcgggttgtcccacaccgtggggtcccgcgccaccgtccactcgttga

SEQ ID NO: 454728 - DNA, 507 bp, Sorghum bicolor
cgtccggaagatatattaattttcttcaagctctatgatcctgaaaaggaagacctaagatatgtaggaaatttttttgtgaaagcatcaggaaaaccatctgatatagtagaaaggctgaatgagatcgccggatttccgtctgatgaagatattgagctctatgaggaagtaaaatttgaaccagcggtgatgtgtgtaccaattgagagcaatatttcgttccgttcaagtcagattgacaatggtgatataatatgctaccaaaaacgctgtttgccagattcaatggatcgataccgatatccaagtgtcccttctttctttgaatatattcataatagacaggttgtctacttcagattgcttgataaaccaaaagaagaaggcttctctctggagctttcaaaacgctccacatatggatgatgttgtgaagaaggtgctcggcaactacgtctgggacgatccttctaaaatccggcttactcaacacaacctatcgtc

SEQ ID NO: 454729 - DNA, 469 bp, Sorghum bicolor
cgtccggagaagttcatcaatgttttgaatggaaagaagcgagaactagggttcacattttcattcccagtgaagcagcgttctgttgcttccggtacgcttgtcaagtggacaaaggcattttccattaatgatgctgttggtgaagatgtggtggctaaactgcaaacagctatggagaagcaaggtctggacatgcatgtagctgcattgattaatgatgctgttgggactctggctggagcaaggtactacgacaaagatgttgtctgtggtgtaatatttggcactggcacaaatgcagcatatgttgagaaggcaaatgctattccaaaatgggagggtgagctgcccaattcaggagatatggtcatcaacatggaatggggtaacttctgctcagcctatctcccaatcactgaatatgaccaagaattagataaggagagcttaaatccaggagaacaga

SEQ ID NO: 454730 - DNA, 529 bp, Sorghum bicolor
  unsure (1)..(529): unsure at all n locations
cgtccgaggaattcttgtgcaggatctaatgagtggtgtgtcccgtgagcttgataattggcacaaatctagcaaggaagaagaagcaacaaaaaaggatcctgaaactgaacttgatgaaattttgtctcatggtacccaggatcccaaagctatttttctagataagttagacgttttgcttgcagagcacaaaatggaggaggcggttcttgctttggaagctgaagagaagaaatatttggttgcagatgaatctggtaaagaatcaaatgcagagaatacagcctttaaggcagcactgattaaaaggaaagcaattcttgaagatcagcttgttaggtattgtggacagccatctttatctatgaccgaactaaggaagtgtttgtctggtttaattaagataggcaaaagttctttagcccatctatgtacttctgaaagcttatggttcacaactgcagaaaaatggtgaggcatttcttnctaactgttcaatctacacgcagacttactctgcaacttt

SEQ ID NO: 454731 - DNA, 579 bp, Sorghum bicolor
cgtccgaatgcacgttgatatcaactcgtgctggatccctgggtatcaaccttcatgctgcaaatcgcgtggttcttctggatggatcatggaatccaacacatgatttgcaagccatttatcgggtttggaggtatggccagaccaaacctgtatatgcctaccgcctaatggcacatcgaacaatggaagagaaaatatataagcgccaggtgacaaaagaaggccttgcagcaagggtggtggatagacagcaagtttcaagaaccatttccaaagaagagatgctgcatctttttgaatttggtgaagaggaattaatggaacagaatgagaatggttctaccataattgagaagccatccacttctgacactattaaaacctctgagcctgtacctgtcgacagtctcatgctgagcctactcatggagcaaactcggtggatttcaggttaccatgaacatgaagctctcctccaagaaaatgaagaagaaaggcttacaaaggaggagaaagatatggctttgtcagaagtggagtcattgaggaaagctgcacttgattccgagagaaaat

SEQ ID NO: 454732 - DNA, 527 bp, Sorghum bicolor
cgtccgctggccttgcgttcccacatttggagctgatcaattcaatgataccgatggggaagagaaggagcagaaggagatctactacaactggtactacgtttctgtcaatggtggtttcctcttcgcgagcacagtccttgtttgggttcaggacaattatggctggggattgggttttgggattcctactgtattttcagcagttggagttgctggatttcttgcctgcatgaagctgtacaggtatcagaaaccaggtggaagcgcgctaactaggatatgccaggtcgtggtggcggccactcgcaaggtcaacgtagatctgccaacagacagctctcttctgtatgaaatgccagggaaggagtcagtaattgtggggagtaggaagctaatgcacactgatggattaaggtttttggaccgatgtttcaccatcacaaccgcggaagagaagtttcttgacacacctaatccatggaaagcttgtacggtgacgcaagtggaggagctcaagatttggc

SEQ ID NO: 454733 - DNA, 350 bp, Sorghum bicolor
  unsure (1)..(350): unsure at all n locations
cgtccgcccacgcgtccgatcgaaggagcccaagctatggcagaaggagctacagcccacgagatcgttctcctaggaggcgaagttacagcaggtcaccaccaggatctcgtgcaccaggatctcgtgacctggccaaggtgcagcgcgccgtgtgcatgatctccaactccaccagcgttgtggaggtgttctcccgcatcgaccacaagttcgacctcatgtacgccaagcgtgccttcgtgcactggtatgtgggtgagggtatggaggagggtgagttttttgatggccgtgaggacctgnctgcactggagaaggactatgaggaggtcggtgctgagtttgat

SEQ ID NO: 454734 - DNA, 490 bp, Sorghum bicolor
cgtccgacagccgacgccgccgtcgccgccctacggcccagatcttcgtcggtctcttctccggcaacgagcacccgaagatggtggtcctgcaaccagatcggttcctgagcgatctgacgagcatgtacgagcggagcacggagaagggatccgtgtgggtcaccatgaagcgatcgactctgaagagcaaggcacagttgcagaagatggagaagaaggggcaggaggttgagcacaggtgcctcgtccgcgcctctgatggcaagaagagcatctctacctcggtctctctaaaggagtacgcaaagttccaagcttcatacgcaacagtccttaaggcccatatgcatgctctgaagaaaagggagaggaaagacaagaagaaggctgcagatgctgagaaggcagttgagaccgcacccaataagcagcagaagaaagcatcttcaaagaaatcttcggggtccaagtcataagacgctcgcag

SEQ ID NO: 454735 - DNA, 499 bp, Sorghum bicolor
cgtccggtggcatcccggcggcggcgttcgtcgaggacgtcgaggcctacctccgacaggccgggctcgacgtcaactccgccctcgccttcctccaggaaaggttgcagcagtacaaaatagtggagatgaagcttctagcacaacaaagggatcttcaggcaaagattcctgatatagagaagtgcttggatattgttgcaacattacaagctaaaaaggatttgggtgaggcactcatagctgatttcgaattatctgagggaatctactcccgtgcgaaaattgaggatacccgctcggtgtgcctttggttaggtgcaaatgtgatgctggagtactcttgcgacgaggccaatgccctcttgaagaaaaacttggaaaatgccaaggccagcttagaagtccttgttgctaatcttcagttcttgcgatatcaacaaaccatcactcaggttacaattgctcgggtattcaactgggatgtacaccaacggag

SEQ ID NO: 454736 - DNA, 276 bp, Sorghum bicolor
gtccgcaaagtaaaagacatttatcacaaggactttgtcatagatgaacacagtggatggctcctgcaaggctggaaaggaaggataatctatgcgatatctacatggaagcctaagaataactaggttcttggtctcctattccattgatggtggcagctaattaacagtcctgctatgttatagcgtttggaccttgacctgtgaacctatctgatcaaggaaatggcttgaagaatggagaagggtcaacatggagctttgctagatttacat

SEQ ID NO: 454737 - DNA, 527 bp, Sorghum bicolor
  unsure (1)..(527): unsure at all n locations
cgtccgttgcgtttagagataaggattttaagactgcaattgactactactccaagctagtggcaatgatgtcaacgccttcagctacagtttttgctaggcgcagtttttcctacttgatgaatgggcaagcagaacttgctctacgggacgctatgcaggctcaggtctgcatgcctgagtggcctacagccttctacctccaagcccttgctctttcaaagctcggcatggaaaccgatgcgcaggacatgctcaacgatggagccacatttgaggccaagaagcaaaacggctggcgtagttaggaaacaaagtctcccaactactccgtgttgttggccctttagaaaaaggtacaatggcgagtgtcctccaaatcagttcactgggacgtcagttgcactactaagagtgngattgaaatgcactgttttatcgtgcaatctccgcccgaatgtcgataacgaggtggcgtgttatgatcaggagtggaagaataggtcaggggctttgaacgcatagca

SEQ ID NO: 454738 - DNA, 395 bp, Sorghum bicolor
cgtccggttcgaaaacgctccgaaaagaccccacgagttcttctcccacacccaccacccacaccgcactgctccgccgccgccgcactagccgttgccttctccccttcccttccccgttcccattcccaaggagttatcctcaccggcggatccggggcgccgcagcaagagggaggaaggaggaggagaggatactacccgaatggcgtcgcggacggcgtccaaggatatcatcacgctgcgaggctccgccgccatcgtcagcgagttcttcggatacgcggcgaatagcatcctctacaaccgcgcggtgtatcctgaggagagcttcaccaaggtgaagaagtatgggctcaccatgctgctcacgcaggacgagggggtgaaggact

SEQ ID NO: 454739 - DNA, 411 bp, Sorghum bicolor
cgtccgctctgtgctgtgatccaagcggcgggcgggcgggcggctgcacgccaggtgttcgacgaaggaccccgaccggtgcaagccagccatgagggacttcccttcctgcttcggcgagagcggcgtccagatcgcggacgcgtcgtcgtcgtcgtccagcgccggcaagggcgcggcgcagaacctggtgacctgcctctaccagacgcagttctcgggccggccctgcgtgatctcgctcacgtggagcaagagcctcatggggcagggcctcagcatcggcgtcgacgacctgtccggccactgcctctgcaaggcggacatcaagccgtggctcttctccaagaagaaggggtccaagagcccctacgtcgaggacggcaagatcgacatcttctgggacctgtc

SEQ ID NO: 454740 - DNA, 475 bp, Sorghum bicolor
cgtccgccttgtattgcctggaaaggatgctgcttttggagtcgacagtgttggtacagtatcggtagctcttgtgactagtttttccattcaaacattgaagccagaccttatcattaatgctggcactgctggtggcttcaaggccaaaggagcaagcattggagatgtattcctagcatcagatgttgcattccatgacaggaggataccaatacctgtctttgacatgtatggaattggagcacggaaaacttttgcagctcctaatatcttgaaggaacttaatttgaaggttggcaaattgtcgactggggattctctggatatgtctccccatgatgaggaggtgatactgagcaatgatgctacagtaaaggatatggagggagctgctgtagcatatgtcgctgacatgttctcaacaccagcaatctttctgaaagctgtgactgatatcgtggatggggagaag

SEQ ID NO: 454741 - DNA, 242 bp, Sorghum bicolor
  unsure (1)..(242): unsure at all n locations
cgtccgatcgtggtgccaaccttgaggtttttgtgccatccaaatgtctgatatcaatagcattcagattaacttttgtggctgtagtacaattatgttagattgcttccttttttacttaggtaaggattgccctgatcttcaacacatatggtcctcgcatgtgcattgatgacggccgtgttgtcagnaatttattttctcaagctctgaggaaggagcctttgacagtttatggcgat

SEQ ID NO: 454742 - DNA, 406 bp, Sorghum bicolor
cgtccgcgcgggctggccaagaaggcgcgggagctggccgtgctctgcgacgccgacgtcgcgctgctcatcttctccgacaagggcacgctccaccacttcgccgcgtacgccagcatggacagaatccttgatcgatatgaaaggtacttgctatgtgaagatagggatgtgacggaagattaccctgaagaatcggaggggaacatgagctatgaccacgtcaagatgaggtccaaacttgaagctctacagaagagccaaaggaatctcatgggggagcaacttgagtccctgacattcagagagttacagcagcttgagcaccagatagacagcgctctgaggaacatcagatcgaggaaggaccacatcttgctgaactcgatcgaggagctccaaaaca

SEQ ID NO: 454743 - DNA, 404 bp, Sorghum bicolor
cgtccgacagaccgagccaatctcatatgtctatcacaatggataagcattccataccctttacactggggtgcaccaacattcagagcagaccatgcattcggtatgatggctgcggcgatggatcatataatagagaccacgggagcattcaaagctgctgcacgatcggctagtgcgacaccaccaccagcatatgttctgagccgaggcatagggtggcagggcattggcaccctactagatggcctgtttggcactgggactggttctactgtttctgttgagaacgttggtctccgtgggtcaacaagggttggtagcagaagagtgatacaaatctctgctggtttcatgatcttgttctccattctaggaaaatttggagcgctttttgcctcaat

SEQ ID NO: 454744 - DNA, 425 bp, Sorghum bicolor
  unsure (1)..(425): unsure at all n locations
cgtccggccattggagctgccatctcgccgacctccgtttacaacggccggcagttcgacatcagcctgctcatatggaaggacccacaccgggggaactggtggctgcagctggggtcaggtccgctggtggggtactggccgtcgctgctgttcacgcacctgggcgggcacgccaacatggtgcagttcggcggcgaggtggtgaactcgcgcccgtcggggtcgcacacgccgacgcagatggggagcggccacttcccccgcgagggcttcaaccgcgccgcctactttcgcaacgtgcagggtgtggacggcgacaacagcctngtncccgccgccgcgctccgcctcgtcgccgaccaccccggatgctacgacatccagggcgcgtacaaccgcgcctggggcaactacttttacta

SEQ ID NO: 454745 - DNA, 366 bp, Sorghum bicolor
cgtacgctccaaagcgctcccctcgttagaactcgcgtcggcagctcctctgcaaaaccgaacccgctccaagggaagttgatcgagaagtgttggtggacatgggtcagatccagtactccgagaagtacttcgacgatacctacgagtacagacacgtcgtcctcccgcccgaggtcgccaagctcctccccaagaaccgccttctctccgagaacgagtggcgcgcgatcggcgtgcagcagagccgcgggtggatgcactacgcgatccaccgtccggagccgcacatcatgctgttccgccgcccgatcaactaccagcagcagcaggaggcggcttgcccgcagttgctcgccaagtgag

SEQ ID NO: 454746 - DNA, 449 bp, Sorghum bicolor
cgtccgctccccctgttaggttttaggagacctccgccgcccctccggcctcgcgagctcgccgaaatggtcgcccacaggttccatcagtaccaggtggtgggtcgcgcgctgccgaccccgaccgatgagcaccccaagatctaccggatgaagctctgggccaccaacgaggttcgcgccaagtcaaagttctggtacttccttaggaagctcaagaaggtgaagaagagcaatggccagatgctcgctatcaacgagatctttgagcgcaacccaaccactatcaagaactatggcatctggctgcgttaccagagcaggaccggttaccacaacatgtacaaggagtaccgtgacaccaccctgaaccgggccgtggagcaagatgtacaacgagatggccttccgtcaccgtgtgaggtccccctgcattcagatcatcaaga

SEQ ID NO: 454747 - DNA, 456 bp, Sorghum bicolor
cgtccgcagctttggtgtcgtgcttcttgagcttgtcaccggaaagaagccagtaggggagtttggggacggtgtcgacattgtccagtgggtcaagacgatgacggacgcaaacaaggagcaggtgatcaagatcatggaccccaggctgtcgaccgtgccagtgcacgaggtgatgcatgtcttctacgtcgcgctgctctgtgtcgaggagcagagcgtgcagcggcctacgatgcgggaggtggtgcagatgctcagtgagcttcccaagccagctgcaaggcaaggagatgaacctcccagcgttgatgatgatggttccgcggcgccgtctgatgctccagcatgagatggatctgttgaagcgccacatgacgaagccactaacgagcagcagccgcaaccgatctcgcaggcttcgccgactactgatctcatcagcatttgagagct

SEQ ID NO: 454748 - DNA, 447 bp, Sorghum bicolor
cgtccggtaattctcaagtgtgacatgtctgcttggcaaaaagcatactacgaacaagtcacaagcagggaaaaggttgcactaggatctgggctcagatcaaaggctctgcaaaatctgtcaatgcaacttaggaaatgttgcaaccatccctacctatttgtagagcactataacatgtaccagcgggaggaaattgttagagcatcagggaagtttgaattgcttgatcgtctacttccgaagctgcagagagctggtcacagggttctacttttctcccaaatgacaaaactgcttgatgttttagaagtatatttgcaaatgtacaatttcaagtacatgaggcttgatggatccacaaagactgaagaaacgagggggttactggcagattttaataagaaggattcagaatatttcatgtttctcctcagcacacgtgct

SEQ ID NO: 454749 - DNA, 497 bp, Sorghum bicolor
cgtccgacagagaccattttgtcaacattgccagaagaagggctttagaagcaaacaaattagcagcagcacagagtgaatcaaatgagaaacaaactaatggtttagcacatgttggttctgagatgatggatgacaagttaacagctatgcagagagagtcaaacaagatgcaaaataatgatccagcacttttcagtactgaaactctacactctggaaaatgtgatgtgaattctgattcaaagggaggtttttttgctgaccagtttgagaatatggcaaattatcgagcacattatgaatggactggtcctgagatatggaaacagactaaagggaacctgcatgcctttgttgcagcagctggtactggcggtacaattgccggagtctcacgatatcttaaggaaaagaacaggagcatcaaatgctttttaatggacccttctggatctggtctgttcaataaggttaccagaggggtgatgtacaca

SEQ ID NO: 454750 - DNA, 417 bp, Sorghum bicolor
  unsure (1)..(417): unsure at all n locations
cgtccgcccacgcgtccgaccacgcgtccgcccacgcgtccgctcttccacaatccacattccacaccgagaaaagaacaagcagccgccaccggagctcacaatcagaatcatccgccgccgtaccaagagtccatccaccttctacaatctacacacatggcgtcgcaccagcagcagcaggcgggagcggcagcagcggcggcgtccgtggacttcgaggactacctgccggtgatggcggagcgtctaggcgaggacgggctgatgcgggagctggcgagcgggttccgcctgctcatggacccggcgcgggggctcatcacgttcgacagcctccgccgcaacgcgccggttggttgggctggcggcatgtncgacgccgacctccgcgggatgctcggcgagggcgacttc

SEQ ID NO: 454751 - DNA, 555 bp, Sorghum bicolor
cgtccgcgatcccagaatccgagagagagagctccacaggccaggtccccatcgccgcggcgcctgccccccctgctcccgcccggtagtagcctcgccgccgccgctgccgagatggggttcgtctccttcgtcgggagggtgctcttcgtcgccgcgttcctcctctccgcctaccaggagtttaatgaattcggtactgatggtgggccagcagctaaggcgctccagcccaagttcaatgtgtttgtcaaaaacatctctgctcaactaggagtagctgtgccgcacattgagctgaagcatgtgattgctgctacaattggtcttaagggtcttggaagtctcctttttattttgagcagctctctcggtgcttatctcctgttgttttaccttgctttgatcactcctatcattcatgacttctacaactacgatatggagaaggcagaatttgcgcagctctttgggaagttcacccaggatgtggctctgattggagctctcctcttctttctgggcatgaagaactccatcccgaagcggcagggc

SEQ ID NO: 454752 - DNA, 542 bp, Sorghum bicolor
  unsure (1)..(542): unsure at all n locations
cgtccgctctccccggccctctccatcttgccccctcctctccgccatgggggacaagaaagtcgcgtcgggcttggggattagggagggcgagggctcgcgtgttgcctccgaagcggtcacaaaggtagtaccattgacgggctcgggctcgggctcggactcgggctcgggctcggcggaggcatcggcatcggcatcggcggtggccgaggtctccgtccaggcggcgccggcggtggccgaggtccccggcgtggggaacgacccgccatccgcagacgatctgatttcgaaaagactccgagccatacgaaagaagatcaaatatgcgacttccattgaggagatgagtgctgcagtccatgcaacaattgtcagttaaaaaggatgctgatgaagtgtttatcaagctgggctctgacaaggacttgaaaaagaaagaaaatgctgaaagagaagaacgggccaagaagtccctgagcatcaacgaattcttgaagccggctgaaggtgagaggtactataaccncagtagccgt

SEQ ID NO: 454753 - DNA, 459 bp, Sorghum bicolor
cgtccgaaagaaggtgaagaagaaatcatgtctgaaagaaagcatacagagcttcctgatgataatgcaccatctaagcaggaaagagaaccaaagcaaggtgggactaggaaaccaagtcagttggtggatacttcaaccaaagctacttctgagcaggttgctgcaaaattggaggaaagcgaaatggaaaaagaattatgtgcggaggcagaggatccttcagagttcatcactcatcgagccaaagattttgtgtcgagcatgaaggacattgaagcccggtttatgcgtgcagctgaagcaggaaatgaggtttccagaatgcttgaaaccaagaagatcagacttgacatatgtgctaaaatgccaggttcttcaggcaagctacctactgcccgatttgtgtcagcacttcgagtgtgctgcaatcgggatgttattctcaaccaggaaact

SEQ ID NO: 454754 - DNA, 497 bp, Sorghum bicolor
  unsure (1)..(497): unsure at all n locations
cgtccgcgcacacgacggtgcacgtgtgggccggcaggtcgagccccaaggctccggcgacctgcacggtggacggcggcggggtggtggcgcacgacggcaagccgcactgcaacaacgacatggggttcctgggcacggcggggagggacccgctcttctactcgcaccacgccaatgtcgaccggatgtggcacctctggtccaccaagctcggcggcaagggcttcgacgacgcggagtggctcgacaccagcttcgtcttctacgacgacgtcaagagcccgcggctggtgcggatgaagttccgcgacgtgctcgacgtcaccaacctcggctacacctacgacaaggagtcggaggcggcgctgccgtggctcaagagcaagcccacccggttctcgtccggcaagacgccgtcgtcgtcggtgccggcggcggagcccaaggtggcgtcggagttcccgctgacgctgacnaanggagcggtggacgtg

SEQ ID NO: 454755 - DNA, 436 bp, Sorghum bicolor
cgtccgcgcgccgccgccgctgccgctgccgctgctgcttcttcgtctcagccgcaacgatgccgtcgcacaagaccttccggatcaagaagaagctggcgaagaagatgcgccagaaccgccccatcccctactggatccgcatgcgcaccgacaacaccattaggtacaacgccaagcgcaggcactggcgccgcaccaagctcggcttctgagcgaggagattggccggctgcttcgtcggaactctagggtctaagagctatcttccttttgttttatcattgccacagtgtttctgtaagctagcaagtgatgccatgatgcttttgttaagattttgctgatgtcaagagaattggtactactggggtgtactcaggattacatgctgcattgctatgctaagtaaagaacccttgttaccttatcaaaa

SEQ ID NO: 454756 - DNA, 506 bp, Sorghum bicolor
  unsure (1)..(506): unsure at all n locations
cgtccggtgacagccacccaagcaacacagagctctaacacgaccaattgccatggctcgccgcctcctactccttctcctcgctttcctcttctccactgccgcgctctgctcgcccgacgcctccgccgctgaggatccgctcatcgagcaggtggtcggcgacggcgcagacgacgagctggagctgaacgcggaggcgcacttcgcgagcttcgtccggcggttcggcaagacctaccgcgacgacgaagagcgcgcgcaccggatgtccgtgttcaaggccaaccttctccgctcgcggcgccaccagcggctcgaccccacggcggtgcacggggtcactaagttctctgacctcacccccgccgagttccggcggcagttcctcggcctccgccgctcccgctccttcggacaggacctgctcaagggggtcgggcggcgcatgaggcgcctatcctccccaccgacggcctnccgaccgacttcgactggcgtgaaca

SEQ ID NO: 454757 - DNA, 549 bp, Sorghum bicolor
cgtccgactccttcatcggcctcggcctctcggtggggcagtgggtgtctcacggtggcggcctcgggggcaggatcgcaggtgctaccgcggcgtcctccaccaagaagctctggaatgtgctccttgccctggggaacattgccttcgcttacacctttgcggaagtgctaattgagatccaggatacactcaagtcaccaccaccggagaacaagacgatgaagaaggcagcaatgtatgggattggagccaccaccatcttctacatctctgttggctgcgctgggtatgctgcatttggttcaaatgctccaggcaacatcctgacggcaggcgggttgggtcccttctggctggttgacattgccaacatgtgcctcattctccacctgatcggtgcataccaggtatatgctcagcctatctttgcttcagttgagaggtgggcagcctcccggtggccggaagccaagttcatcaacagcgcctacaccgtcagcatccccctcatgcagagaggatcggtgaccgttgcaccatacaagc

SEQ ID NO: 454758 - DNA, 567 bp, Sorghum bicolor
cgtccggcgccggcatcgaactcagccagccatctctggcccgaagacatggcctgcctcgcctgcctcgacgcccaggcacccagatcagttgtctatgtggcattcgggagctttacagtcttcgacactgcaaggctccaggagctcgccgacgggctggcactcaccggacgcccgttcctgtgggtggtccggccgaactttgccaacggcgtcgatgaaggctggctggaccagttcagacgccgcgttggagacaaggggctagtcgtcggctgggcgccccagcagcgcgtgctctcgcacccttcggtggcatgcttcatctcgcactgtggatggaactccaccatggaaggggtgcgtcacggcgtcccgttcctgtgttggccatactttgccgaccagttcatgaaccagaactacatctgcgacgcgtggggcacgggcttgaggattgacgccgacgagcggtgcatcttcaccaaggaggagatcagggacaaggtcgaccagctgctcggcgatgatgggatcagaacgagggcactgtctttgaagagg

SEQ ID NO: 454759 - DNA, 439 bp, Sorghum bicolor
cgtccgcgcaggctgtgaccgtcgccaccaccgagtggcgcgcctgttgcaccatcgagcccgtcctggaggacggggagcccgtgtccaaccagaactccatgatcgagcacgaacccgagagcgactgcgacacatagttcatcgtggtgaccggcgacgaagatcttctggagaacacacaagattcatatgctcaatgctcatgtcattttctttcaaatgaggcaggcacttgcgacatacttggagaacaacagagccgttatcaccgcgttcgggttcacgctggaccggtcgcacctgcataccatcttcatgctcgagtggacgctgtttctgtggttgctcggtaagaccatcgtcttatagtgtaaaagaaaaaccattgtcaatgtagacggagaggtgtgtgcctgtgtacaacgtccgcatctcc

SEQ ID NO: 454760 - DNA, 422 bp, Sorghum bicolor
cgtccgacaagccatcctcaagtccccaagcacccaccacctccccgagaacccagcctcgatcctcatccccatggcgcccaaggccgagaagaagcccgcggccaagaagccggcggaggaggagccatcgacggagaaggcagagaaggccccggcggggaagaagccgaaggccgagaagcggctcccgtcgggcaagtccgcgggcaaggaaggcggcgagaagaagggaaagaagaaggcgaagaagtcggtggagacgtacaagatctacatcttcaaggtgctgaagcaggtgcacccggacatcggcatctcgtccaaggccatgtccatcatgaactccttcatcaacgacatcttcgagaagctggcggcggaggcggccaagcttgcgcggtacaacaagaagcccacca

SEQ ID NO: 454761 - DNA, 503 bp, Sorghum bicolor
cgtccggccccctttcccctccccatccccgcgggccgccagaggcaaattcgacctcgattcgtccccgcttcgcccggccgccagcgggattccctccgccccgcgcggatctgaccgctgcgctccgtcaccacgccgctccaatccgccatgaagggggccaaatccaagggcgccgccaaggccgatgccaagctggcggtgaagagcaagggtgcggagaagcccgccaagggcaggaaggggaaggccggcaaggaccccaacaagcccaagagggctcccagcgctttcttcgtcttcatggaggaattccgcaaggagttcaaggagaagaaccctaagaacaagtctgtcgctgcggtgggaaaagctgccggtgacaggtggaaatccctcagcgaatcggacaaggctccccgcgattccggccatggagggcgacagtaccaacctcgatgcggcgatagagtcgctcctgaatgtcgagaagcagatga

SEQ ID NO: 454762 - DNA, 481 bp, Sorghum bicolor
  unsure (1)..(481): unsure at all n locations
cgtccgagcaactccctgacgatgtaattgtgcactgtagtgaaaaaaatgcatcaatgttgactttagatggagttgacgtcatgggggaacgcttagcaaatgaggtgcttgatgtaattagtcgaaggccagaactcactaaaatttctttccttgcacactccgtcggaggattagcagcaagatatgcaattgcaaaactttgcagacatccagacagcgcatctgatggaaatactaaagggaccatctgcggtttggaagcaataaactttattactgtagcaacgcctcaccttggttcacgagggaacaagcaggtcccactcctatttggatctgttgcaatggaaaaggttgcttgccgcgttgttcattggatatttaggagaactggtagacatctctttctaactgatgatgatgaagggcagcctncacttgtgcagcggatggttgaagatcatgacgatctcta

SEQ ID NO: 454763 - DNA, 585 bp, Sorghum bicolor
  unsure (1)..(585): unsure at all n locations
cgtccgtgcacccggacccggcggcacgcccagcgccagtcaccaaccagcccaccttccagtccaacgccaccttctccctccgtcgctcgccatggcgcgcaagaagatccgggagtacgactccaagcgcctcctcagggagcacctcaagcgcctcgccggcatcgacctcaccattctctccgcccagatcacacagtcaacggactttgcagagcttgtgagccagcagccatggctgtcaaccatgaagctagtggtgaagcctgatatgctgttcgggaagcgtgggaagagcggcctcgtcgctctcaacttggacttcgatcaagtcaaggagtttgtcaaggagcggcttggagttgagattgagatgggcggttgcaaggctccaatcacgaccttcatcgtcgagccgtttgtgccccatgatcaagagtactacctttcaattgtttcagagaggctgggcagcaccatcagcttctcagagtgtggtgggattgagatcgaggagaactgggacanggtaagacgattttctgctactgagaaccaatgcacctgatcatgtgctccgtg

SEQ ID NO: 454764 - DNA, 348 bp, Sorghum bicolor
  unsure (1)..(348): unsure at all n locations
cgtccgctcgcgttaacctctcccgagtcgcttgtccccctcccaagttctcacaaacgcaaaccccaatctcgccgtcaccgcccccaatccaccccatctcgccgccgccgccgcgatgtctcgccgctatgacagccgcacgacgatcttctcgccggaggggcgtctctaccaggtggagtacgcgatggaggcgatcggcaacgccgggtcggccctcgggatcctggcggccgacggcgtggtcctggtcggcgagaagaaggtgacctncaagctcctccagacctcccgctccgccgagaagatgtacaagatcgactcccacttggcgtgcgccggggc

SEQ ID NO: 454765 - DNA, 525 bp, Sorghum bicolor
cgtccgatgaaccgttgctgaagatggagttagaaaatcctgcacttctttctggcaactggtcacaactttgtataacctgcaaaatagtcagacctgttcgttcaaaacattgttctacatgtgatcgttgtgtggagcagtttgaccaccactgcccttgggtatctaattgcataggaaagaagaacaaatgggaattcttcatgttcctcactctagaagtttttgcaatgatcattaccggctctgctgccattataagaattgtaagggatccagattctccatcatcctttggtgcttggattcattattctgcgttccagcatcctggggtggtttcatttctcgcactggattgtttccttttctttggtgttgcagtgcttacagttgttcaagcatcacagattgcaaggaacattacaacacatgagatggcaaattccatgagatatgcatatctcagaagcccaggtggcagattcaggaacccatatgatcatgggattcgcaaaaact

SEQ ID NO: 454766 - DNA, 289 bp, Sorghum bicolor
gacccacgcgtccggtaggccagcgagtcaagcggcatgacgccatatcctagtgaccgtgttactagagcaaaccaataacgatacgcactcgaatgtggtgcctcccgacgagcatccggaccttctccttaagctaatgtactagcgaagactgacatgaacagtgtgggcattggccatgtcgactatggcaaggcgaccaccactggccagctgatatacaagctcggtggtattgacaagcgtgtgatcgagaggttcaagaaagaggctgcggagatgaaca

SEQ ID NO: 454767 - DNA, 471 bp, Sorghum bicolor
cgtccgagctacgattacagtccatcgccgccaagaggttacaggagaagaactcgcagcccaagtcctcgtggtcgttatggaggccgtggtagggacctcccaactagtcttttggtgaggaatcttcgtcgggattgtaggcctgatgaccttcgtagaccatttggaaaatttggccgcgttaaagacatatatctgccaaaggattactacactcgggaacctaaaggatttgggttcatccaatactttaatcctgaggatgcttctgatgcgaagtaccatatggatgggcagatgctgcttggaagggaaattactgttgtttttgcagaggaaaacaggaagaagccttctgacatgagggccagggaaagaatgagtggcagaagccgttcttatgatcggaggttgcgctcaaggtcacctggttacagtgattcttctaggggtagatcaaggtcgcac

SEQ ID NO: 454768 - DNA, 464 bp, Sorghum bicolor
  unsure (1)..(464): unsure at all n locations
cgtccggccccaaatccactcaaacctccgctcctccgagcagctcccccgttcgtcgtcatgtcgggccgcggcaagggaggcaagggcctgggcaagggcggcgccaagcgccaccggaaggtgctgcgcgacaacatccagggcatcacgaagccggcgatccggaggctggcgaggaggggcggcgtgaagcgcatctccgggctgatctacgaggagacccgcggcgtgctcaagatcttcctcgagaacgtcatccgcgacgccgtcacctacacggagcacgcccgccgcaagaccgtcaccgccatggacgtcgtctacgcgctcaagcgccagggccgcaccctctacggattcggcggctgagcgtggctccgtcctcgtcccttcgnccacgtggnggtagctagggttcctgatggattagctgagtttgtgactttngtgttgtctgcact

SEQ ID NO: 454769 - DNA, 453 bp, Sorghum bicolor
  unsure (1)..(453): unsure at all n locations
cgtccggaacgtggttggccactgcctcagcctaagaggtggcgggttcctcttctttggtgatgatcttgtgccttatcaacgtgtgacatggactcctatggttcgcagtcctctccggaattactattcccctggctcagcaagtctgtactttggtgaccagtcactgcgtgtgaaactgacggaagtagtctttgacagtggaagctcattcacctactttgctgcacagccatatcaagcacttgtcaccgctcttaagggtgacctaagcaggacgctgaaagaggtatctgatccctctcttcctctgtgctggaaagggaagaaaccattcanatctgtgcttgatgtgaaaaaggaattcaaatctttggtgctgaactttggcaatggcaacaaggcgttcatggagatccctnctcaaaactacctcatngntacaaaata

SEQ ID NO: 454770 - DNA, 411 bp, Sorghum bicolor
  unsure (1)..(411): unsure at all n locations
cgtccgctatctcgcagttcgtccctccggctccccttcgccttctctctctctctacgccacgggcccgcgcgcatcgcagccagagccaggcacgacggcgccgtcgcgcatgcaggaggtgtccgtcgagcccggccgtcggccggcgcagcagccgcaccatcagttcgcgggcgtcgacctccgccgacccaaggggtacgccacggcgccggtgcaggaggcgacaccggcggtcaaggttgccgagggcggcgagggaggggacccgtgcccgcggtgcgcgtcgcgggacaccaagttctgctactacaacaactacaacacctnccagccacgccacttctgcaagggctgccgccgctactggaccaagggcggcacgctgcgcaacgtccccgtcggagg

SEQ ID NO: 454771 - DNA, 539 bp, Sorghum bicolor
cgtccgcccacgcgtccgcctgctgcactcaaacttttgcagaggcttttggcatttgatcccaaggataggccaactgctgaagaggcattggctgatccatactttaaaggcctcgcaaaagtagagagagaaccatcatgccagccaataacaaaaatggagtttgagtttgagcgaagaaaggtgaccaaagaggatgtcaaggaacttatattcagggagatattggagtatcatcctcaacttctcaaggattacatgaatggaactgagaaaacaaactttctataccctagtgctgttgacaatttccgaaggcaatttgctaacttggaggaaaatggaggaaagagtggggcacacacggcttcatcagacaggaagcatgtttcgctcccaaggacaaccacagttcattctaatccaatccctccaaatggaatctcccaagttcctcaaaagattcccacagctagaccaggaagagtggtggtccagtaataccatttgagaatgcaacttgctgtgatccatac

SEQ ID NO: 454772 - DNA, 486 bp, Sorghum bicolor
cgtccggctcctctccaccaccaccaccaccattgccgacgccatggccgctcctgcttgctgctgcaaggtcatcgattcccacctccacgtctgggccacgccacagcaggccaaggaggagtacccctacttcccaggccaggaacccacgctccgtggcgacgacgaattcttgctcgagtgtatgagtgaagctggagtggacggagctctcattgctcaacctattaatcatatgtgtgatcattctttggtaactagtacgttgaagaaatatccatccaagctcattgtttgctgtctagcgaatcctgcagacgatgcgagtgcgattaaacagctagaacacctgattgtacaagaaacataccgtgctgtgaggttcaacccaaactcatggccagctggtcaaaagatgaccaatgaggtcggaaggtcattattttcgaaggcaggagaacttgtagcgccagatgcaatact

SEQ ID NO: 454773 - DNA, 451 bp, Sorghum bicolor
cgtccgcagaaaatacagaggttgtcttggcagaatgcacaaaaaattttggcccttggctggtcacacatgctatggaacttctgacagctgataatgactatgcggatgttatgttgcatgaagagagacctaacttaggtggtataagcatagaggaactgcaccggctagtctatgctcaagttttgtgttctcattctttaacttggcagattgcgcctacttatctgtcctcatgtctaaaccaaggcctaggactcttggagattctacttctcaagcaacccatacaagataattgcctagtactcaagactttggaaatttgccgattgtacgaactggagaatgttagtacaatcatcatgaagattgctggcatttatcattggaagcatggacgaaaaggaactggtgtatactggttccagcaagctcatgataaaat

SEQ ID NO: 454774 - DNA, 405 bp, Sorghum bicolor
  unsure (1)..(405): unsure at all n locations
cgtccggcaccggccgcttcacgcctgcacctccctcgtttcggtgccgactagttcatctnctccgtccttcgtcgccgtgtgttgggaagcctgaactgggtgaatgtcgtcagacaggtcagtgcgattcgtgcgaggcagacggcgcagctcttgccggccgcgtcggcgatgcaggggcacctccgcacctacatgaacgcggggattcccaagcgtatcaaagaggatgaggagaatgaacagcttgcaaaagatgtcgcaaaatatctcttatcttgaaagaattcgctccatctattcctgagaagaacgttacttgcctgacccgtctggaccacaacagggctcttggccagatttctgagagactcagagtccaagttagtgatgtgaagaacg

SEQ ID NO: 454775 - DNA, 479 bp, Sorghum bicolor
  unsure (1)..(479): unsure at all n locations
cgtccgataaagcatacattcaacaagtcaagaaaaatgctcaggctttggcatcagctttgctcagaagaaaatgtagattggttactgggggcacagataatcacttagtactttgggacctcagaactcttggcttgacaggcaagatcttcgagaaggtttgcgaggcatgccacatatctatcaacaagacaccaatttatggngataacggctcgatatcgcctggtggtgtgcggattggaacacctgcaatgactactagaggttgcttagaagaggactttgacgtgattgcagacttcctcataagggctactcatattgctagcaatgttctgaaagaacatgggaaagtgcanaaggagtttctaagaggcctacagaacaatagggatattatagaactccgaaatcaggttgaggcatttgcgtcacagtttgcgatgccaggttttgatgtatgaatgtgcata

SEQ ID NO: 454776 - DNA, 516 bp, Sorghum bicolor
  unsure (1)..(516): unsure at all n locations
cgtccgcgctgattggtgcgcgggtagcggtcgtcgccccctcggcctccctggccttcggcttcggctcggccggctctactcctgccctgccctgccctgccggcaaacgcaacaacacgaagcggggcgtggggagcggtgcgggtgcggggggcgaggatcgagggcaacgtggccgtggcgtggcacggccgcgaggggggagggcgcctttgcttgcaggagagagctgctataaaaaggcgcgcgagatccagatctgggccgatgcgaccgccctcgctgctctccctcaccctcgactccgcgctcctccgcatcgcccacatcgccgacctctcccacctncctgaccacctcgtcatcgacctcttccgtgtagagaaccctcagtgctggtaagctgacagagaaagttctcaagttgtttctggcaactggctgtgaggaaatcatcttggctgttcagttgctcaacattaagcagccactcgtaccagtccttcccacaag

SEQ ID NO: 454777 - DNA, 487 bp, Sorghum bicolor
cgtccgcttggtatctcacgcaatcagcggggaaccccaaaccctaatcctctccatccgcgacgccggagacagccgtgtcggagctcggttctcggggttctgcatcgattctgttatctaggtttctcagatgggcgatctcaaggaggttttccgctccctccaagaactcttccctcaggttgatcatcgtatactgaaggctatcgcaattgagcaccgtaaagatgttgattccgcggtggttgctgtccttgatgaagtcatgccatccatgactggttcggctggagctttgtctacccatcgagaagggttgccatctatggatgattctgttgggaatttgtttgctaatcgcagcacatgtgaagtgggaagttcatcgtctgctggacatgatatacatatcgatgagattgatgtaagtgttcactctgcgcaacacacttcttctggggaggtcaaaacttgcaagcaagaa

SEQ ID NO: 454778 - DNA, 452 bp, Sorghum bicolor
cgtccggcagcagctatacgacgagatatatcgagtagctagcttagagctcatcgtcgctgctcgctcgctctcatccggccggccggcggatccaccatatcatatatatatatatatatacacctgcagcaggcagaggccgatcgatcgacttgctgcttgcttggcataaatccatgcattccatgtcgtcgtcgtcgatggcgccctgcaccatgatcatggcgagcgttgcagctgtgctcgtcgtcctttcgtcggctgccgccgcagggctggacatggatttctacagcagcacgtgcccgcgcgtggaggccatcgtcaaggaggagatgacggagatcctcaaggtgtcgccgacgctcgccggcccgctgctccgcctccatttccacgactgcttcgtcaggggctgcgacggctccgtgctactggactcgacccct

SEQ ID NO: 454779 - DNA, 539 bp, Sorghum bicolor
aacctgctggcataatgttttgcataaggcatcagaaaaatcagcacaggcaaagaaatgggctgaacctcatattgagactgccaagacgaaatggattcctgttaaggaaaaattggttgtcctcaagaaaaatgctgaaccttatgtacaaaaggtatcaacaagatcagtggagttgtatgagtcatcaagggatgctgtgacacctcatgttgtcaaagttcaagagtttgttcatgcgtactaccagaaagccaagatgttttctaggcttacatcgatcaaattgctgagatcactaacccacatgttgagaaagttagactactctgaagcctacactatgagagcagttcatgcatatggtcattcttgagtcggcacacataccatagacaggctaagcaagatcatggctactttaccagctgactacatatcattgcacgacgagtagttggtttgctctgttgtagttgctgctcattatcagcttagtggcatctgacaaagataaagctgtggtacgacatgcc

SEQ ID NO: 454780 - DNA, 357 bp, Sorghum bicolor
  unsure (1)..(357): unsure at all n locations
cgtccgacgaggccgtcgccaagcaccctttcatggtcgttgagttctacgccagctgatgtcgacactgcatgtagcttgctgcagagtatgagactgcggccaatgaacttagcaagcacaacccaccgattgttctcgctaatgttgacgctaatgaggagatgaacaggccacttgctaccaagtacgagatccaagggttcccaaccctcaagattttcaggaaccaggggaagaacattcatgaatacaagggccccagggaggctgatggaattgactgttacttgaanaatcatgttggccctgctgttcaatgagctcaaatcacaggatgatgttgcgacccattac

SEQ ID NO: 454781 - DNA, 442 bp, Sorghum bicolor
  unsure (1)..(442): unsure at all n locations
cgtccgaggcgctgcacgaccccaagcatctcttcacccagcagttcgtcgccaacggtcgcggcctcgtcgccgctgacggcatccttgtcaacacgttcgacgccttcgagccggacgccattacggccctgcgtcaaggctccgtcgtctccgacttcccgcctgtgttcgccgtggggctgctgcaaccggtgaggtttgaggtggcggagaagccggcgcactacatgaggtggctcagcgcgcagccggcgcggtccgtggtgtacgtcagcttcggcagccgcaaggccatatcgacggaccagctccgggagctcgccgccgggctcgaggccagcggccagcggttccctgtgggtgggaagagcaccgtcgtggacagagacgacgccgncgacctcgccgacctgcttggggacggttcctggagcggtgc

SEQ ID NO: 454782 - DNA, 299 bp, Sorghum bicolor
attcccggtcgaccacgcgtacgcgaggcgcacttggcaagcaccaggtacttggccgccgacaagttaacgctggccgacgccaacaacccttcttacttgttttacttaacaaaaaccccaagggttggcttggtaaccaaccgccccaatgttaaggcttgtgggaggggattcgccagccccccgcggttcaaaagaacggtggcggcattccaattccaacggcggccttcttcggttggggtggaccttccgttggtccggcgccgtcaacgaccccttccaagtggattaaa

SEQ ID NO: 454783 - DNA, 493 bp, Sorghum bicolor
cgtccgatcgtggcgagctacccacactacaccgtctacaagggaactgtgtcaactggggttgagatcgccgtggtgtacactatgattacatcgagcaaggagtggtcagagcattcagagacctgcttcaggagaaagatagacaccctgtcgcgaataaaccacaagaacttcatcaatctgcttggcttctgcgaggaggaggaacctttcaccaggatgatggcgctcgagactcgccgatggacacttatgagagttcatgctgggatttgagcacatgctggcgggatgatcggatatcatggactgcatactgatcagagatgctgactagcctctggggcacctgactcatgcagtcatacgtattaaatgtgtgaagatgcgcatagcgttgatgatgatttgagcaaacgcgaaatgcagtcacatacaaaacaggcgtagtagaggatgcatactcgtgttactgtgatatgtagaactc

SEQ ID NO: 454784 - DNA, 367 bp, Sorghum bicolor
atatccgaattcagtttaacttatgattgacagccatctttttggtggcgagtggcattacaccacatgctcataggttcaacacatcacttccaatatcacatgtcccaaacacaccttcatactccattcaaacatagcatgtactcacctacatactagagtaatactggagcaaacatgctcgataccacaaacagcacaatgtgaggctagatacttaaatctcctgaacagtcagacctggcgcgagcgactgattgagctcgctggccttgacggcgtacagaactcataggagtgtagaggtacttggagcagcgcacgctgaacttgacagcatcttggcactcttgatgcgcaccga

SEQ ID NO: 454785 - DNA, 566 bp, Sorghum bicolor
  unsure (1)..(566): unsure at all n locations
cgtccgacttggtgggagaaaagtgactggactggatataaggaattaggtgcggagaaatctgggaagaatgctgaaggtgattcttggtgggagaaatggaaagaagttctgtaccaagatgaatggagcaatcttgcaagaatagagagaagtgctgaaaaacaagcaaaatcaggtgtagaaaatgctgggtggtatgagaaatggtgggagaaatatgatgccaaaggctggacagagaaaggtgctcacaaatatggaaggttgaatgagcagtcctggtgggagagatggggtgaacattatgatggccgtggatttgttttgaaatggacagataagtgggcagagacagacttaggcaccaaatggggggacaagtgggaggagaaattctttgcaggaattggttctcgacaaggggagacatggcatgtatctcctgcggtgaacgctggtcaagaacttngtgagaagaacactttggtaacggaaaagtcataagtatggtaagagacgactggcaagagtgagatttggtgtcgacgagggacatactatga

SEQ ID NO: 454786 - DNA, 506 bp, Sorghum bicolor
  unsure (1)..(506): unsure at all n locations
cgtccgagtctgccaagctctaatggtgtattaaaatatcttgctggaaagacattaccgtcgcatgcagctatactgtgtggtttagtaaaaaatcaggtgtattctgatctggaagttgcttttgccatttccgaagatgcagctgtatacaaagcattatcacaaactattgagctattggaaggtcacacttctctgatcagccagcactattacggctgccttttccatgagcttctggcatttcaaattgctgaccggcatccacagcaagagagacaacctgcagaagtgatacctcagcagatgataggattttctgatccagctatgtctactctaaaggctgctgaatttttcgttcctgattcagctgagtccagcattattcatatggatttagatcgcagctttctgccagtaccttctgcagtgagtgcctctngttttgaaagtttgtcaggcagaacatcactgattctgaaactgatgccattcagcat

SEQ ID NO: 454787 - DNA, 125 bp, Sorghum bicolor
ggcacgaccacgcgtccgggtccttcagagatgggcacgatcatccatgcgcaagacacgcggacaagcccaaggcggcggagtccggcagtcactggtacgggcccgaccgcgtcaagtacctc

SEQ ID NO: 454788 - DNA, 412 bp, Sorghum bicolor
cgtccgcaggtggggaaagggcgtgatgttggcttgaaccaaattgcactatttgaggggaaagttgctggaggcaatggcgagcaagttctcagccgagatgtgtaccgtctagggcagttatttgacttcttccggatgctaaccttctttttcaccacagttggttattatgtctgcacgatgatgactgttctaactgtgtatatcttcttgtacggaagggtatatctggcactctctggccttgactactcaatatctcgccaagctaggtttttggggaacactgcgctagatgctgctttgaatgctcaattcttggtccagattggtatttttacagcagtaccgatgataatgggtttcattttggagctagggctgtataaggctatttttatgtttatta

SEQ ID NO: 454789 - DNA, 342 bp, Sorghum bicolor
  unsure (1)..(342): unsure at all n locations
cgtccgcccacgcgtccgtggaagtcatcaactttctttaggggctaatgttgttgctgcatcatgtgctggagctgcaacaactattgtaacaaatccactttgggttgtgaagacaagatttcagacccaaggaataagagccgggtcaatcccgtataaaggtacacttgctgccttgagaagaatagcacatgaagaaggcatccgaggactatacagtggtctggtccctgccttgggctgtatcagccatgtngctattcaagtccctgcatacgagaagataaaagcttatctggctgagcgagataatactactgtagaagccatgaagtttgg

SEQ ID NO: 454790 - DNA, 532 bp, Sorghum bicolor
cgtccgatttttcttttatctgctatgagcttgttcgcctgagtttatttattgaatcttttagttattcaaattttcttttatctgctatgagtttagttattgaatctgttagacccgacactcctctgcactcgatgaagcacctcatataggtggagccgaagaaggaggcggcgggccgagcgccatcggtgaggtcgacgtgcgacacctgcgctaccatcaccaagcttgctggtgagacacaagttcctctctttctagagtgactgaatcggtgctcagaactggttgtagtgaaggagaattgcaagcggcagggccacagcgaggtgctactagccactacaatggaacggtgtcaacagaggaagatccagcggctctccatccatgttgacctgatgaggatgaccatggtagcactgtatcggatggctgggttccagatcgacagtaccatcgagggctactatgcaccgcacaaggacgcctgccggatgtactttgatcaggggagtactccagg

SEQ ID NO: 454791 - DNA, 536 bp, Sorghum bicolor
  unsure (1)..(536): unsure at all n locations
cgtccgcggctatcccgaccgaaaccggattcgcggaccgcatctggtcacccctagcagccgaggctagcacgcggcgccctgcggccatggaggacgaggagcacgaggtgtacggccaggagatccccgtcgacggcgaggacgtcgacatggccgccggcgacgacgccaccaagctgcaggagctcgacgagatgaagcgccggctcaaggagatggaagaggaggccgccgcgctccgcgagatgcaggccaaggtcgccaaggagatgcaaggtgtagatcccaatgcaaccacatctgaaaacaaagaagagatggattctcggtcggtattcgtcggaaatgttgactatgcatgcactccagaagaagtgcagcagcacttcaactcttgtggaactgttaacagagtgacaatcctgactgacaagtttgggcaaccaaaaggtttngcttatgtggaanttggtgaagttgagctgttcaggaagcttgtaagttgaacgaatcagaatngcatggtcgccaac

SEQ ID NO: 454792 - DNA, 502 bp, Sorghum bicolor
cgtccgcattggcgagggaccgtctaggctgcttcaacctctccattgaaggccatgctgaatgtgtaaagtttgtcaagaaattcaacattcctcttctggtaactggaggtggtggatacaccaaggagaatgtagcaagatgttgggctgttgaaactggggtccttttagacacagaactcccaaatgagattccaaacaatgaatacatcgagtactttgctccagattatacactgaaagttccaaatttgaacatggacaatttgaacagtaagacctatctcagttcaatcaaagtgcaagtgatggagagtttgcggtccatacagcatgctcctggtgttcaaatgcaagaggttcctccagatttttatatcccagattttgacgaagatgaattggatcctgatgaacgcgttgaccagcatacccaagacaagcagattcaccgtgatgatgagtactatgaaggtgacaatgacaacgatcacgacga

SEQ ID NO: 454793 - DNA, 369 bp, Sorghum bicolor
cgtccgcacggagttccctcccagaagcacccttgaccccagcaagtacggtgaccacacgagcaccatcacggaggcgcacctcgagaacaagctggagggcctcaccgtgcgcaggcgctggaaggaaccgctctacatctgaccccacgacacttatgcgtcctgacagacaacactgaggcacttatacccacagaccgctgtctgcggacgacctgtgcgggcatactacctgcgactcgacgctgcacgcaagacggcacccactacacgccgagctggggactgcagctcgtcgacatacgtgcagtgagcatgtacacacgatgacgtatatgacacgagtacggcaccgcaagtctgtgc

SEQ ID NO: 454794 - DNA, 452 bp, Sorghum bicolor
  unsure (1)..(452): unsure at all n locations
cgtccggtgtttctgataaatctagtggtgcaagaagattgcaagatgccatggtctcaggatatgtgcttcaaagggctcctgggagagatgcaggcattcctgactggtactctctgtctaaaactgaaactgaaactggtgctggtccgacctcaaaaaatgttgctacaaaggaaagtgcagcatcatccagatgtattgaagactttgagatactccatggngaccttcaaggattaacagatacgatagaatttttgaagagcttatctgaacttagtggaaatgatttgaagagctccaagaagcaacgcctagagagaactgcagcatctgttcttnttgactgggagacggaaatatatgtagcaaggggcacctggacgtttggccgtcatgggtggcatngctgattattcaggaagtctcgttttgcagatgccccttcg

SEQ ID NO: 454795 - DNA, 534 bp, Sorghum bicolor
cgtccgaaagaattgcaaaccggtggcaataaaaaagctgtatgcccactacccacagagccttaaggaatttgaaactgagcttgagactgttggtagcatcaagcaccggaatctagtcagccttcaagggtactcattatcacctgttgggaacctcctcttttatgattatatggaatgtggcagcttatgggatgttttacatgaaggttcatccaagaagaaaaaacttgactgggagactcgcctacggattgctcttggtgcagctcaaggccttgcttaccttcaccatgactgcagtccacggataattcatcgggatgtaaaatcaaagaatatactccttgacaaagattatgaggcccatcttacagactttggaattgctaagagcttatgtgtctcaaaaactcacacatcaacctatgtcatgggaactattggctacattgatcctgagtacgcccgcacttcccgtctcaacgaaaagtctgatgtctacagctatggcattgttctgctggagct

SEQ ID NO: 454796 - DNA, 516 bp, Sorghum bicolor
cgtccgcccacgcgtccgtatttttgcaaatccgcaggaaaaagaaggcgaaacgaggcctccaccagctcacaccaccgccgagcggaacgaactcggcgagagagcggaagcggcgccgagcacccagtccctctcctctcctcgtccgccgccgtctcccggatcatggccatggccgcctcctcccggctgctgtgggcgtcccgcgccgccgcctacctcaggatctccaccttccccagggccttctccaccgtgctgaaggatctgaagtatgctgacactcatgaatgggtgaaggttgagggtgattcggcaacagtggggattactgatcatgcccaggatcatttgggtgatgttgtctatgtggagttgccagaagttggcatcagtgtctcccagggaaagaactttggtgctgttgagagtgtgaaggcaaccagtgatatcaactcaccagtatctggagaggtcggtgaagtgaataacaaactaagcgaggaccctgga

SEQ ID NO: 454797 - DNA, 391 bp, Sorghum bicolor
cgtccgctcgtgcgcgctctacggctgcgagagccgctgcatcatcgttgcgccaccaccttgtaacctcctgcctaccgctattgtcaagctcgtcgccgtgtatggcgacgtctgaccggctcttgcgtgctgcttactccacctgccgcgcccacagcgccgtcgctacggccatatgcgggatccagccacctcacgtcgaaggcgaagatctacaccgacatcaacatactgcgccccaaggagtcctgggactaccaggcgctcaccatgcactgccgtgagcaggctggctatcatgttgtcctgacagttagcactgcataatataccgagctctctgacggcatccatgttaacgataatgagacatgcatgacatagatcc

SEQ ID NO: 454798 - DNA, 535 bp, Sorghum bicolor
cgtccgcacgctccagatgtacctgcaggcgcagagcaagaacatcatcatcacctacctggcaatgctcaacctcggcctccacctcctcctgtcatggctcatgactgtcaagttccagctcggcgtggcgggggtcatggggtcgatggtcatcgccatgtggatccccgtgtttgggcagcttgccttcgtcttctttggtggatgccctcacacgtggactgggttctcctcggctgcgtttgctgatctcggtgccatcgtcaagctctcgctatcttctggtgtcatgctctgtttggaattgtggtacaacaccatattggtgctgctcacagggtacatgaagaatgcagaggttgcactcgacgccctttcaatatgccttaatatcaacggttgggagatgatgatttctttcggctttttggctgcaacaggagtgcgagtggcaaatgagcttggagctggaagcgcaagaagggcaaagtttgccatttacaatgtggtcatcacatctttctcgatcgga

SEQ ID NO: 454799 - DNA, 529 bp, Sorghum bicolor
cgtccgcaccgacgcccacctctacgatgaccccgacgacgcctccatccccgagctcctcgactcccgcttcgatgctgacaaggtcgacgccctcaagcgcctccttgccctcatcgcccagggcgtcgacgtcgcacacctcttcccgcaggttgtcaagaatgtggcgtcgcagtcgctcgaggtcaagaagctcgtctacctctacctccttcactacgccgacaagcgccaaaacgaagcccttctttctattaacattttccagaaggatttatcagatataaacccattggtgagggcttgggccctgcgcactatggctggcattagactacatgttgttgctccgcttgtgttggttgctatcaagaaatgtgccagggatccatctgcatatgtaaggaaatgtgccgcctatgcgctttgcaagctgtgtgacttgcttccagatgaaagcacagctttggaggagatcgtggacatcttgttcaacgacaattcccctggagtagtcggagctgcc

SEQ ID NO: 454800 - DNA, 399 bp, Sorghum bicolor
cgtccggcaaaaggccttcttgattagaaagggcaggtgactcccatactgctatctatagtaagtaaagactcatctatgctagatggactggaagatgcaagcaccgagatggatgaagctaatgctagattgcatgagactattatttcaagtgcaaaaacaaagaacgcagaagggccagtggaattttcatggatggatgatggtgcaggattgactgcaaatgcttacgaatttctgtctaagatggataagttgactaaagaagcgacttcacaagtcaagctacttgctgaaggtgaagatgaaagacttgcattgacgagcacatgttcaaaatatgaccaagcataagctcttgggaagacaactattgacgtgactcgtattgctgtc

SEQ ID NO: 454801 - DNA, 517 bp, Sorghum bicolor
cgtccggaagtaacaatatagtatacttcatttgatgccttgttatagtagtatgcaatatgcaatacatatcgcatactcatagttggagtagcaaaacatcttattgcttaaagtgagaactgtagacagcagaacagcattgtatacaagatgacatgttcttgtagctgtgctcttttttttcggtacctttttagtttgaaatctgatgctattaaatgctaactgatttctcagcagataatttgccttctgttgcgctatttttctgagcacataattgactgcctctgcctttctgtctctaggtcctcaatgctttgttcaacctatgcaagattaataaaagaagacaggaacaagcagctgaaaatggaatcatccctcacttgatgaattttgtcatgtcagactcaccgctgaggcaatatgccctgcctttgctgtgtgatatggcccatgcttctcgcaactctagagagcagttgagggttcaatgaggattagatgtgta

SEQ ID NO: 454802 - DNA, 418 bp, Sorghum bicolor
cgtccgctctctcttctcttcttctcgcctgttgcctgtccctgtgctcgccacacgcggcacaaccccccacccagccagccaggacaagaagatctccgtcgcctgctcttcgcttccgcttcgaatcggaggtcaactagccggtggtctccatatggattcagcatttagaagagctctcaatgagcctatgtgcttggaagaaactgtcgtccaacaaggaattgaaagatgcccattcctgaggaacatcaatgagcctacaagtttttccttctcgtctgtcaacttccctgttccggcaagaggagccaagggaccaattttcgaagatggacctaattttgacatggcatttcgagttttccatggtagaagatgggggtcccactttcaagaggatcattggcccaga

SEQ ID NO: 454803 - DNA, 503 bp, Sorghum bicolor
  unsure (1)..(503): unsure at all n locations
cgtccgtcccaaccccggaacagagcaacgcgacgccgcggcacctcatctccggcgaagggaaatggcaaccgttcctggggatctgatctggcaggttgtgaggaagaacaactccttccttgtgaagcagtttggcaacggcaatgctaaggtgcagttcaccaaggagcccaacaacctctacaacgtccactcctacaaacactctggcttggcgaacaagaagactgtgactatccagccagctgctggaaaggactcggctgtggtcctctcaactaccaagaccaagaagcagaacacacctgctaagctcagtcacaagtctgtgatgcgcaaggagttccgcaagatggctaaggccgtgaaaaatcaggttagcgacaactactacaggcctgatctgaccaagccggctcttgctaggctgagctcagtgtaccgcagcctccaggttgccaagtctggtgtcaagaagaagaacaggcagnccaagcact

SEQ ID NO: 454804 - DNA, 458 bp, Sorghum bicolor
cgtccggtcgaggtcacccgctccatcaccaaacataactacctggtcctcgacgtcgacgacatcccccgcgtcgtgcaggaggctttcttcctcgcctcctccggtcgcccgggaccggtgcttgtcgacatccccaaggacatccagcagcagatggccgtgccggtctgggacacgcccatgagtctgcctgggtacattgcgcgccttcccaagcctcctgcgactgaattgcttgagcaggtgctgcgtcttgttggtgaatcaaggcgccctgttctttatgttggtggtggctgcgcagcatctggcgaggagttgcgccgctttgtggagatgactggaatcccagtcacaactactcttatgggccttggcaatttccctggcgacgacccactgtctctgcgcatgcttggtatgcatggcacggtgtatgcaaattatgcagtgga

SEQ ID NO: 454805 - DNA, 481 bp, Sorghum bicolor
  unsure (1)..(481): unsure at all n locations
cgtccgtgaagcttggggccattgaggtcctcatgggtgcaggccttgtgtgccgctcatggctggcagctgcaaaggcaccagaaatttggcgttttgtggacatgactcgccataagttagttttctcgaagagcacaagtatcttgtgtgccatggcaagagtagccatagatcgctcagatggaaggatggagtcattctgggctcaacaatttgttaccgacgaactcttggattacattggaaacagggccaattatttgaagagcattcggcttgtctcatgcgcatacttttggcatatgccattggttatgatggtagataaatgtccgcttctggaggagatagaatgttcatatcaaataatgcccagaaggttttttcaggaatctaggcattgtgtgcccncagttgaagcgtctaagaatcaataatgggggagtggatgattctgatgagatctggcgtgagatga

SEQ ID NO: 454806 - DNA, 465 bp, Sorghum bicolor
ccggccggattccgggtcgaccacgcgtccgcgctcctctagccctagctagcctaccagtgcgcgcagctagctgtttggggttttcagccgccgcgccatggcatcgggctccaagccggccttgctcctcgtggccctcaacctggtcctcttcacggtggccaacgcctgcggcggcggctgcccgacgccaccaacgccaccaactccgacgccgccgtcaccttcaaccggcggcaagtgccccaagcacgcgctcaagctcgcggcgtgcgccaacgtgctgggcttcgtcagcgccaggtcggccacccgcccgccgagccttgctgcagcaatcctcgcggcctcgccgacctggaggccgccgtctgcctctgcaccgccatcaaggccaacgtgctcgggatcaccgagacaccctgcaagctcagctattgcaacactgggaagaacctccag

SEQ ID NO: 454807 - DNA, 489 bp, Sorghum bicolor
cgtccgctgatgtaattttgccagaactactcaaaatcgagacactcattttcaagggaaggcaggttgaaagagaaacactgactgctgctgaacaaattccaggcagtgagattcaacaacatatatggaataattataagaaagagatgaaatatcaatggtttatttccaatggatcaggagaagatcagtcttttgaaccactggcaaccaagtgctctcgctcatacaaagtacgctttgaggatatcggccgttgcctgaaatgcgagtgctttgtcattgatatatttggacgatctagtgaattggtatctgctgtgactgctcctattttgccaggaaggcctaaaattgaaaagctggagattgaaggaagaggttccacactaacctatatgctgttcagggtacgtatagcggaggcaaagaagggcagagtaaaataccaatggctaaagcgatggtcggaagccctgtcttatc

SEQ ID NO: 454808 - DNA, 462 bp, Sorghum bicolor
cgtccgccgcgtcgggcgacctcgtcccgctctcctacatcgccggcctcatcacgggccgccccaacgcgcaggccaccaccgtcgacgggaggaaggtggacgccgccgaggcgttcaagatcgccggcatcgagggcggcttcttcaagctcaaccccaaggaaggtctcgccatcgtcaacggcacctccgtgggctccgcgctcgcggccaccgtgatgtacgacgccaacgtcctcgccgtcctgtccgaggtcctgtccgccatcttctgcgaggtgatgaacggcaagcccgagtacaccgaccacctcacccacaagctcaagcaccacccgggctccatcgaggccgccgccatcatggagcacatcctggacggcagcgccttcatgaagcacgccaagaaggtgaacgagctggacccgctgctgaagccgaagcaagacaggtacgcgc

SEQ ID NO: 454809 - DNA, 453 bp, Sorghum bicolor
cgtccgcaagtaccttgaagctaagaatcacaagatgtctgttggtatgaggtttaaaatgagatttgagggtgacgaatctcctgaaagaagattcagtgggacaattattggtctgggaagcatgccagctaactcaacatctccgtgggctaactctgagtggagatctttgaaggtccaatgggacgagccttctgctattctgcgtccagatagagtttcaccatgggaactagaaccccttgatgcaactaatccacaaccacctcaacctcctttacggaataagcgtgcgcggcctcctgcttcaccttccattgctccagaacttcctccagtttttggtttttggaaatccccagctgagcctgcccaagctttctcattttcaggactgcagcgaactcaggaattataccattcaaaccccaattcaatcttctcgtcatc

SEQ ID NO: 454810 - DNA, 576 bp, Sorghum bicolor
cgtccggaggctacagtcaaaagttaccctccatttattgaagctatgaagagaagaggtgtggatgacatggatcttgttatggtggatgcttggtgtgctggctactacagcgaagctgatgctccaagtcgcagacttggcaagcctctcatattttgcagaactgagagtgatagccccatggagaatggttatgctcgtcctgtggaaggaatccatgttgttgttgatatgcagaataatgctgtgatagagtttgaagataggaagttggttcctcttccccctccagatcatttgagaaactatactcctggggaaacaagaggtggtgttgatcgaagtgatgtaaaaccacttatcatcaatcagcctgagggtccaagtttccgcattaatggctattttgtggaatggcagaagtggaacttccgtattggcttcacccccaaagagggttggttatctattctgttgcttatgttgatggtagccgtggacgtagacctatagcacataggctgagctttggtgagatggtcgtccttaatgggatccaagcgaaccacatta

SEQ ID NO: 454811 - DNA, 473 bp, Sorghum bicolor
cgtccgattgaaaggaggttcataaatgtaccttttggagcttcatgggcggaagttactatgcgaacatcagcttttgatactcctagaaggttctttttggatactgttcagatctgtccactgaagcggcctgttaaatgggaggctgttgttactttctcttctccatcttcaaagaatttcagttttcctgtagaaggtggcttaactttggagttgtccatagcccagttctggtctagcggaattgctagccatgagcctacctgtgttgattttgagattgtgttccatggaatatccattgatcagaaagtaactacccttgatggcgagtcacccttgcttatagttgctagatcacttctagcatcagagaagcttgttcctgttgccaccctgaacaagatcaggatgccttatcgacctgtggagtgtaatctttcttcgctgcccactgaccgtgatag

SEQ ID NO: 454812 - DNA, 493 bp, Sorghum bicolor
cgtccgcccgaactcctttccagcctttcctctccccaaccaccgccaccgcgcgcgagatcacgagcctccacgccgtgaccaccaccggcgccgctgcggcgtccggagcaggcggcgagcgagcgtcgtgcacggggatacggtaggctcggctcgccggggcggacgagatgagcgggcacgactccaagtacttctccaccaccaagaagggggagatccccgagctcaaggaggagctcaactcccagtacaaggacaagagaaaagatgctgtcaagaaagtgattgctgctatgactgtaggaaaagatgtctcatcattgttcactgatgttgtgaactgcatgcagaccgagaacttggagctcaagaaactagtatatttgtatctcatcaactatgctaaaagtcaacctgatcttgccattcttgctgtgaacacatttgttaaggattcacaagacccaaacccattgattcgtgcttt

SEQ ID NO: 454813 - DNA, 456 bp, Sorghum bicolor
cgtccgctcaggagacggagcccctcgggaccgctgggccgctggccctggcccgcgacaagctcatggacggctccggcgaccctttcttcgtgctcaacagcgacgtgatcagcgagtacccgttcgcggagctcatcgagttccacagggcccatggtggcgaggccacgatcatggtgaccaaggtggacgagccgtccaagtacggcgtggtggtcatggaggagggcaccggcaaggtggagcggttcgtggagaagcccaaggtgttcgtgggcaacaagatcaacgccggcatctacctgctgaacccgtccgtgctggaccgcatcgagctgaagccgacgtccatcgagaaggagggtttccgcgcatcgcggcggaccagggcctcttcgccatggtgctcccagggttctggatggacatcgggcagccgagggactacatcac

SEQ ID NO: 454814 - DNA, 510 bp, Sorghum bicolor
cgtccgtggtactcagaaaggtgcttctgtaatttatgaggaagtccgtagacggggcctcaaatgttctgttgttggtatcccaaagaccattgataatgacattgcggtgattgacaagtcgtttggatttgacactgctgtggaggaggcccagagggcgatcaatgctgctcatgtcgaggctgagagtgcagagaatggcattggtgttgtgaagctaatgggtcgcaacagtggttttattgcaatgtatgctactctagctagccgtgatgtggattgctgtttaatcccagagtcacccttctaccttgaagggaagggaggactccttgagttcattgagaaacggctcaaggacaatggtcatatggtcattgtggtggctgagggtgctggacaggatctcatcgcgaaaagtatgaatttcgtggacactcaagatgcttcaggaaataagctgctttctgatgttggcctttggttatcccagaagataaaggatca

SEQ ID NO: 454815 - DNA, 469 bp, Sorghum bicolor
cgtccgataaaaagcctcagtggtctgcaagctgtggatggactgaaagtaactgcatttcaactctagttttttagacattctataaaacattgggatcttatagtttgtttcttctatggtcgtagctgatgatgctagattgatggttggaattcattggtatggctatgggaattgggagaaaatacggttggatccaaagcttggcctggcagcaaaaattgcaccagcaacacttggtgagagagagacatttttaccacgtgctccaaacttggataaccgagctagtgctctcctgcaaaaggtatctcttttgaaccagaggtgaacctctggtttatttttaaatgtacatgggatcagttaactttctggacattgttcttttcttggtttcaagtgtgtgattatctaatttatggactactaatagttgaacccttctatcatgttctgatcattc

SEQ ID NO: 454816 - DNA, 517 bp, Sorghum bicolor
cgtccggagatggcgatcctgtacgcgctggtggcgcgcggcacggtggtgctggcggagcacagcgcggcggccaccaacgcgggcgccatcgcgcgccaggtcctcgagcgcctccccgacggcggcgccgacagccacgtctcctacacgcaggaccgctacgtcttccacgccaagcgcaccgacggcatcaccgcgctctgcatggccgacgactccgccggaagacggattcccttcgcatttttggaagatattcacggaaggtttgtcaagacatatggccgggctgcgctgacggctcttgcatatgcaatgaatgatgaattctcaagggtcttgagccaacaaatggactactattcaaatgaccctaatgcagatagaataaaccgcatgagaggtgaaatcaatcaggtccgtagtgttatgattgataacattgataaggtccttgaaagaggtgatcgtttggaactgctggttgacaagactgcgaatatgcaaggaaata

SEQ ID NO: 454817 - DNA, 516 bp, Sorghum bicolor
  unsure (1)..(516): unsure at all n locations
cgtccggngaaaacatatattcaaagataaaagtttaccaaagtgtatcaaatacagattttcatttatactgcacttttgttctgactttgcatgcttttaagcttgtgtcttggaacttcctggacacagcaacctttttcagaactatgaaaggtaagcatacacaggatttgtacatacgcagagattcgcatactgtcccagttgacacgttctctttcctgaacagtttccttgacaaagctgcagtcgttttgtggaatgaacatgatggttctcgcaatccatggagactttgcacagtcacacaagttgaagagcttaaaatattactgaggatgtttccaatctgggcaacaggaattgtgttcttcaccgtatgtgctcaaaactcatcgatgttcatagaacaagggatggccctcgataaccaaattggtctttcaagatccagcagcaactctgtcatccctagtgttatcagtaatggtgttcgggttccaattatgagag

SEQ ID NO: 454818 - DNA, 523 bp, Sorghum bicolor
  unsure (1)..(523): unsure at all n locations
cgtccgagacaacgaaccatcattttattcgcaaaggctagctgccttgacacctgggtttgcaggagctgacattgccaatgtttgtaatgaagctgctttaattgctgcgagaagtgagaaaactcagattaccatgcagcattttgagtctgcgattgataggattattggtggtttggagaagaaaaatagggtcattagcaaactggagcgccgtaccgttgcttaccatgaatctggacatgctgttgctggatggttcttggagcatgcagagcctcttctgaaagttacaattgttcctcgtggaacagctgctttaggctttgcacaatatgtcccaaatgaaaatcttttgatgacaaaagagcagctttttgatatgacatgcatgacattaggtggccgagctgcagaggaggtttgattgcaaaatctcaactggtgctagaatgactnggaaaagtaccaaaatgcatatgcacgggcgtgtgtatgtttagtgaaaggtggctttatc

SEQ ID NO: 454819 - DNA, 539 bp, Sorghum bicolor
cgtccgcccacgcgtccgccaatattatcccaacggagactcctccgagtgtgcagattacatctccctttatctttgccttgatgaaagtgtcaccgacgccgcggtgaaggcacaatttaagttccatttcatcgacgatgtggaggaggaggaccaaacacaggcgttgacaacagtatccgtgagaagcttcgagagcaaccaaagctggggccatcgaaggttcatcaaaagggaggatttggagaaatccaagcatctcaaggatgattctttcgtggtccgctgcgacattgccatcgccaacgagttgcgcaccgaggaggtggccatggccgaagctcctaccacgaccttcgtgtccgtgccctcatctgacttgcatcaacaccttggcgatctcctccagacagagaagggtgccgacgtggtgttcgaggtcagcggcgagacgttcaaggcgcacaggtgcgtgctcgcagcaaggtcaccggtcttcaacgcagagctcctcggccagatgaaggagagcgaca

SEQ ID NO: 454820 - DNA, 523 bp, Sorghum bicolor
  unsure (1)..(523): unsure at all n locations
cgtccggcttccaaatctcccaagtcaccaagattatcaaggagttgaggcctttacgcacttccttggggacagcagcagaagatctcttccaccatcctgagaaacgagtcacagaaggctgtggtgccaactgcgatagccccaaatgttgaaaaaccagggaccaaacttggcgagcaaaaacgcagcccactatcaagtgattaattgtctcatcctcctgatcacataatggacatttctccggatggggtaggttcgtctttgctaagcgatcagctgtccaaacccggttgtgtagtccattcctttggctcattacaatacaatgttagaattagaattattagttcttgatgaaatgaggagaaacttctgaccctctttgccaatctgtagttttattacatgttaaacttgtctactgcacatattgcctctatgtgtactcatactttgagcaattttctaagtgcatccacanattcttctaatacatttcacaatatcttcaaatgct

SEQ ID NO: 454821 - DNA, 510 bp, Sorghum bicolor
cgtccggtcaaataagcgcacaccagaggagtggtccaatgcactcgacaccctcaaggcgtctctgccctccggcacgcccggcttggacaagagcacgcacgcgctagtgaagttctgctacgacaatctggagagcgacatggtgagggaatgcttcctgacctgcgcgctatggccggaggaccacaacatcttcaaggaggagctcgtgcagagctggataggactcggcctgctccccgatctcggcgacatcgaagaggcctacaggttcggattctcggtgattgccatcctgaaggacgcgcgcctgctggaggccggggacaaccaccgctgcaacatgtacccgtcagacactcacgtcaggctgcaacgacgtcgtgcgcgacgcggcgctcggttcgcgcccgggaaagtggttggtccggcaggcgccgggctcagggagcccccacgcgaagagggcgctgggcgcgcgcgcaaacgcggtccctgatgcacaac

SEQ ID NO: 454822 - DNA, 475 bp, Sorghum bicolor
cgtccgcccacgcgtccgctcgcaaatgcgcgactatgcactgagtttaacaaaatgcttagcacaaacagcgcaaaagactttcagtgattttgaagaagcggttgaaaaggatgcaacaaagaatattcacactgatggaacagttcatcctttaacgagctatgtgatcaactatgttaaatttttgtttgactaccagtcaactctaaagcagcttttccaggaagttcaaaaaggaagatggaacaggttctgagctggcagctgtaacaatgaaaatcatgcaagccttacaaaataatttagaagcaaaagcaaaacaatacaaggatccagccttgatgcacatatttttgatgaacaacattcactatatcgtcaaatctgtccgcagatcagaagccaaggatttgttgggtgatgactggattcaaaggcaccgaaggattgtacagcaaaatgccaatcagta

SEQ ID NO: 454823 - DNA, 535 bp, Sorghum bicolor
  unsure (1)..(535): unsure at all n locations
cgtccgaacgaagctgctccacctcgcatggcacccgaccgagaattccattgcatgtgctgctgcaaatagcttgtatatgtattatgcgtagagaatgtcctacagaaaatttgttgtttttttggcttgctctcggtgaaggcccagggcccttcaactgcaacgagagggtgcaggacattgtcgtcagttccacccgttggggccagaagctgctgatgtccacaagatcacccattgctgtgctaacggactgcggcctgttgattctttagtacatgtgtaaattataattctataaacatggaaagttttgatccaactattcaatcgtggcaattgtattgagagtcggtggaaaggacatatcgaaggtacaattctgcattggacttgaggacctgcattgcaatggctgtagtatgattggcaatccttattagcatgtaatgccacctagacagggctaatgtgttttgggccttgatntcagaaagatagatagtacccagttattgtagctattcatctt

SEQ ID NO: 454824 - DNA, 504 bp, Sorghum bicolor
cgtccgggcccagatcagcggattggaaaggtcaggatccggctctctacactggagactgacagagtgtacacacatttctaccctttgctggttatacatccaagtggactcaagaagactggcgagcttcatttggctgtgcggtttacctgcacagcttgggtgaacatgatggcgctgtatggtcgtccgctgcttccgaagatgcactacacacagccgatcgcagtgatgcaattggactacctgaggcaccaggcaatgcagattgttgcagcaagactcagccgtgctgagcccccgctgcgcagggagattgtggaatacatgctcgatgtggactcacatatgtttagtctccggcgcagcaaggctaattttcatcggattacctcactgttctttggttttctggcaatgctcaagtggtatgatggcatcagaagctggcggaacccaatcacaacaatgctagtacacatgcttgtcctgatactgatc

SEQ ID NO: 454825 - DNA, 522 bp, Sorghum bicolor
cgtccgccttgatggatgatcatgtagtcacagaagatgatctgaatgcaaattttctaattcctcctgatgagagcatatatggtggtagatctcgagccgaagtttgctgcgagtctttggtagatttcaatcctatggttcgagtttctgttgaaaagggtgatccatcactaattgatggagaattccttgacaagtttgacattgttgtacttagccgtgcatctcttaaaacaaagttgtttattaatgaaaactgccgaaagagaagcaaacacattgcattttatactatagattgcaaggattcatgtggtgagatatttgttgatttacagaagcatagctatgttcagaaaaagcctggaggatcaactgaacaacaggagttgacatatcctagtcttcaggaagctatctctgtaccgtggagtaatctaccgaagaagacatcaaaattatacttcgccatgagagtactggaggattatgaattatctgaagggcgcagccctggcg

SEQ ID NO: 454826 - DNA, 317 bp, Sorghum bicolor
cgtccgacggattcgtcgaggttctagcagcaacccagaggcctggatcggagggaaagaggtggtttcagggtactgctgatgcagttcggcagttcgactggcttttcgatgatgcaaaatctaaagacattgatgatgtgttgattctttctggtgaccatctctaccgaatggactacatggactttgttcagagtcatcggcaaagaagtgcaagcatcagcatctgttgtttgccaattgatgacagccgggcatctgattttggcctaatgaaaatagacgacactgcaagagttatttcattcagtgag

SEQ ID NO: 454827 - DNA, 307 bp, Sorghum bicolor
cgtccgaccgagtcgcaacgagagcgagaacgagaaccccccaaacgagagcgagtctccggcgattacgaggagcgcgggcacgccaaagcggcgaagcgcgaaggaaggaaggaggcagcaggatcagccatggggcttgactactacaagatcctgggcgtcgacaagggcgccaccgacgacgacctcaagaaggcctaccgcaagctagccatgaaatggcaccccgacaagaaccccaacaacaagaaggaggccgagaacaagttcaagcagatctcggaggcttacgaggtgctgagcg

SEQ ID NO: 454828 - DNA, 365 bp, Sorghum bicolor
  unsure (1)..(365): unsure at all n locations
cgtccgctaaccgccaggcttacaggcagcttttgctgacaactgctggtcttggtgaatacatttctggtgctattctttttgaggagactctttatcaatcaactacagatggcaagaagtttgttgactgcttgaaggaacagaatatcatgcccggcatcaaggttgacaagggtttggttccattgcctggatccaacaatgaatcgtggtgccaaggtcttgatggtttggcttcaaggtgtgctgagtactataagcagggggcgcgcttcgcaaagtggaggactgttgttagcatcccttgtggtccatctgcattagcagtgaaggaagcagcatggggactngcccgatatgct

SEQ ID NO: 454829 - DNA, 355 bp, Sorghum bicolor
cgtccgggaaggcgcatattcgagatggtgccgctgttgtacaatacctttcttggctggataatcagatgcaggagaactatggagcttctggttacttcagtgagataaaagggtcacagaaaaaggaaaatttagcaaccaaacttactgaggtgtctgtgagtgacaaacttgaggcttccgtgcaacacaagagaactttaaaggtttgagttttcctacaatttcatctgtgggaccaaatgcagcaattattcactataaacctgaagcaagcacatgttcagaaatggatgctgataaaatatatctttgtgactctggggcacagtacttggatggtacaacagac

SEQ ID NO: 454830 - DNA, 456 bp, Sorghum bicolor
cgtccgctcagaatgtaaccgtgaagatttatgatgatgatggcattcaagaatctgaattgattggctgtgctcaagtcaggctgaaggatctacaaccaggcaaagtgaaggatgtctggttaaaacttgtaaaagatctggagattcaaagggacaggaaagatcggggtcaggtgcaccttgagctgctctattgtccatttgacatgaaggaagaagcaccaaatcctttcaaccaacagttttcgatgacttcattggagagaacaatgacaagcatggaaaatggatcagggggctctagttttgctaggctgtcttctagaaagaaaagggaaattatcatacgaggagttctttcagtaacagtgatatcccgggaggatcttgctgcgatggatatgaatggaaaatctgacccatatgtagtactttctctcaagaagacaaaga

SEQ ID NO: 454831 - DNA, 394 bp, Sorghum bicolor
  unsure (1)..(394): unsure at all n locations
cgtccgactcccgccgccggggatggaggcttcctacaagttcgggccctacaagatcgacgccagggaggtcttccacgccacgcccctctcctacgccatggtcaatctccgcccgctgctccccggtcatgttcttgtgtgccccaagcgtgaagtgaaaagatttgctgatctaagctctgatgagattagtgacttatgggttactgcaaaggaagttggtgcgcgtcttgagcagtaccacaaagcatcttcacttacctttgctatccaggatggtcctcaagctggccaaacagttgcacatgtccacattcacctcatcccaaggaagaaaggggnatttgagaaaaatgatgaaatatatgacgcgattgatgtgaaagaaaag

SEQ ID NO: 454832 - DNA, 100 bp, Sorghum bicolor
cgtccgctggagccaggcctggttgggttgggaagccctttaaactgttgtcacttgcattttaccttttcatcgctgtttattgtgagtggtcctaaaa

SEQ ID NO: 454833 - DNA, 190 bp, Sorghum bicolor
cgtccgcctcaagctcgaccaattcctacagctccaggccgcacagaccggagacactatcattcagctctacaacaatttcatcaccgactttgagaccaagattaatctgctcaagcttgcccattttgcggtgatagcttctcgccagtaccctgataaggatgctgcaattactttcttagagggg

SEQ ID NO: 454834 - DNA, 406 bp, Sorghum bicolor
  unsure (1)..(406): unsure at all n locations
cgtccgcagcgaactccgcgaaatccccccgaccccgaacccaaccgagcaaagcgcgaagccccccacctcgaatcaagccgcagaatcgatggcgcccaaggcggagaagaagccggcggcgaagaagcccgcggaggaggagcccgcggccgagaaggcggagaagaccccggcggggaagaagccgaaggcggagaagcgcctccccgcgggcaagtccagcgccggcaaggacggcgagggcaagaagggcaagaagaaggccaagaagagcgtggagacctacaagatctacatcttcaaggtgctcaagcaggtgcacccggacatcggcatctnctccaaggccatgtccatcatgaactccttcatcaacgacatcttcgagaagctcgccggcgag

SEQ ID NO: 454835 - DNA, 352 bp, Sorghum bicolor
  unsure (1)..(352): unsure at all n locations
cgtccggccaccgccttcgagtccccgacctcctcccccgccgccgcgcccttccacgacgaccctttcctccacttcgacggctcggcccccgccgccgacggcttcccggcctccccggacgcctatgcgccctcccccttcggcatgccccactccaacggcgacctccacgacgaccctttcgccgcacccgctgactccaacggtgggcccatcctnccgccgcccaccgagatggggcgcgaggagggattcctgctccgcgagtggcgccgacaaaatgctatccaccttgagaaaaaggagaagaatgagaaggagcttgggagccaaatcatcggtgatgctg

SEQ ID NO: 454836 - DNA, 375 bp, Sorghum bicolor
  unsure (1)..(375): unsure at all n locations
cgtccgcccacgcgtccgcccacgcgtccggacccacgcgtccgcccacgcgtccggacccacgcgtccggacccacgcgtncgcccacgcgtccgcccacgcgtncggctgatgaagttgtggaggaaagaattgctgatgatgatgttattctggtgaaaggcacaaagaacactagcgcggtctctataatacttagaggtgcaaatgacttcatgcttgatgagattgaccggtccttgcatgatgccctgtgcattgtgaagagaaccctggaatcaaatatggttgttgctggtggtggtgcagttgaggctgcgttgtcaagttacctggagaaccttgcaacgaccctaggttctcgggaacaactg

SEQ ID NO: 454837 - DNA, 344 bp, Sorghum bicolor
  unsure (1)..(344): unsure at all n locations
cgtccgggccagcagcgagtggatcctcgactgcatcgcccacggcggcgacatctacggcgtcaccaccggcttcggcggcacctcccaccgccgcaccaaggacgggcccgcgctccaggtcgagctgctcaggcatctcaatgccggaatcttcggcaatggctccgacggccacacgctcccgtccgaggtttcgcgcgcggccatgctcgtccgcatcaacaccctcctccagggctactcgggcatccgcttcgagatcctcgaggccatcaccaagctcctcaacaccggcgtcagcccgtgcctgccgctgcggngcaccatcacggcgtcgggcg

SEQ ID NO: 454838 - DNA, 459 bp, Sorghum bicolor
cgtccgctccagcctcccacgcgcttcctccgccctattttaggctgctcggcacgccaccggccaccgacatcccacctcgccgaatcaatcccctttgtccttcccctccctctcctcgcctcgcgttaggtagctgtagcttgctttcgatccgacccccacatctccctccggtttcgccatgggcgccgccgccaacagcaaccatgaggaggagtcgagccccctcatcccagctgccgccgccgccgcggacgagaagcccccgcaggctccggctccggcgccggaggccgccaagtgctatgccgacggggtccctgtcgtgatgggcgagcccgtgtcggctcacgcctttggcggcctcccgcgggagagctggaactccgggatcctctcctgccttggccgcaacgacgagttctgcagcaacgacgtccaagtgtgtcttcttgg

SEQ ID NO: 454839 - DNA, 417 bp, Sorghum bicolor
cgtccggccacgcgtccggtatattgctactggcagcttctcggctctgttgcatggtattaagggcgtatgtgagaagaccccattagattggaacaccatgatgaagattatacttggtacagcacgcggtatagagcacattcattcagaaggtggctccaagttcgcacatggtaatatcaagtcaaccaatgtcctgctggatcaagaacgcaacccttatgtctcagactatgggctgagctctttgatgagccttgcaatcaacacttcccgagttggcactggttaccgggctcaagagacctatgaatcaaggaagttcactcacatgtctgacgtgtacagctctggcgttctcctcatggagatgctgacaggcaaagcccgccttcagtcacagggtcaggatga

SEQ ID NO: 454840 - DNA, 311 bp, Sorghum bicolor
cgtccggaaagatttgctaagtgccaaattgttcttttacatgcttcttatccattttctaaggaagcatcctatcttgcatctgtttactcccaggtctaccttgattttggcttggcaattccaaaacttagtgttcacggaatgacatcgtccctgaaagagcttctggagcttgctcccataaagaaggtcatgttcagtacagatggatatgcttttccagagacatattatctaggtgcaaaaagggcacgggatgttgtttatcgtgtcctatctgctgcatgtgaagatggagaccttagcat

SEQ ID NO: 454841 - DNA, 434 bp, Sorghum bicolor
cgtccggcatagttctgtagttctcctttcgtgcattgtgttggttggtctatttgccttgcaacaccgaggtactcagaaggttgcattcatgtttgcaccaattgtcatcatctggctgctttccattggaggaattggtttatacaacatttttcattggaactcaaatatatatcaagctctctctccatattatatggttaagttctttagaaagacaggtaaagatggatggattgctttaggagggatccttctttctatgacaggcagtgaagcaatgtttgctgaccttggtcactttacgagtgcatctgttagggtggcctttattaccgtcatatatccatgccttatactacaatatatgggtcatgctgcatttctgtcgaagaacacatttcacatgccaacaagtttttatgatacta

SEQ ID NO: 454842 - DNA, 379 bp, Sorghum bicolor
  unsure (1)..(379): unsure at all n locations
cgtccgcatgtgccactgttttgacaaaagcaatatttactgagggctgcaaatctgtcgcggctggaatgaatgcaatggatttaaggcgtggaatctcaatggctgttgatgctgttgtgaccaatcttaagaacatggccagaatgatcagcacttcagaagaaattgcacaggtgggtacaatatcagcaaatggggaaagagaaattggtgagcttattgcaaaggctatggagaaggttggcaaagagggtgtgatcactattgcggacggtaacacgctttataatgagcttgaagttgtggagggtatgaaacttgacagaggttacatctctccgtacttcattacanactcaaaaacccagaaatgtga

SEQ ID NO: 454843 - DNA, 425 bp, Sorghum bicolor
cgtccgatgggactttcgggagtgtatggcgtgctataaataaacagaatggtgaagttgttgctgttaagaaaatgaagaaaaagtattattcttttgaggaatgtatgagtttgcgtgaagtaaagtctttgcgtcgcatgaatcatcctaacattgtgaagctcaaagaggttgtcagggaaaatgatatattatacttcataatggaatacatggagtgtaacctctaccaacttatgaaagatagggtcaagcctttctcggagtctgaagtccgcaactggtgctttcagatttttcaggctcttgcttacatgcaccagaggggctactttcatcgtgacctcaaacctgagaatctgttggttagcaaagatgtcataaagctagcagactttggtcttgcaagggaagtctcatca

SEQ ID NO: 454844 - DNA, 339 bp, Sorghum bicolor
cgtccggacaagatgtccgtattgtatgccacttcaacttgcctaagtcaatggaatccttctatcaggagtcaggtcgagctggtcgtgatcaacgaccttcaagaagtgttttgtattacggattagatgaccggaggagaatggaattcattttgagaaaccccaaaattaacaaagcacaaccgtcttcctcttcaaatgagctttctgagaaggctctagctgacttcagtcagattgttgactactgtgaaagttctagctgccggcgaaaaaagatcattgagaagcttggagagaaagtacaaccaactttatgccaacgctcatgtgatg

SEQ ID NO: 454845 - DNA, 362 bp, Sorghum bicolor
cgtccgcctacatcctcagctgcttcaccaagcactccccccagtacaaaattcttatggttggccgcgtccttggaggcattgccacttcgctgctcttctcagcgtttgagtcatggctcgtcgccgagcacaacaagaaaggatttgatccacaatggttgtcgataacattctccaaggctatatttcttggcaatggtctagtggccattgttgctgggctatttgcaaattttcttgctgataacatgggttttggtcctgtggctccatttgatgccgctgcttgcttcctagcaataggaatggcaattatcttatcatcatggggtgagaactacggagattcttctgacagc

SEQ ID NO: 454846 - DNA, 276 bp, Sorghum bicolor
  unsure (1)..(276): unsure at all n locations
gcaccgcgccatcccgcaagacggagacctacaccgacaccaagcgccgcgacgatgtgcgcggcgcaacatcgccgccgcgcgcgccgtcgccgacgccgtgcgcacctcgctgggcccccgtggcatggacaagatgatctcctcgggcgaccaggcgcaggaggtcatcatcaccaacgacggcgccaccatcctctcccgcatggcgctcctncagcccgccgcgcgcatgctcgccgagctatcccgctcgcaggacgcccgcgctgggga

SEQ ID NO: 454847 - DNA, 404 bp, Sorghum bicolor
cgtccgcatcagcccacgcggccacgccgaagcatggcgctctccgtctcctccctcgccgccgccctctcccacctctctctcccatcgacttccacctccaagccccacccggccccgctcctgcgcctgcgctccacctcccgccgcgccgtcagcctcgcgctccgcgcctccgcggccgaggccgccgagccgtccgaggcggacctgcccgtggaggaggtggtggccgtcgaggaggaggcggaggaggatgcgctgtcgggaatcgcgctgcggaagtatgtgaagcagaggctgccgggtgggttcgcggcgcagcggatcaccgccacgggccgccgcaagacggccatcgcccgcgtcgtgctccaggagggaaccggcaggtcttcatcaac

SEQ ID NO: 454848 - DNA, 403 bp, Sorghum bicolor
cgtccgatcttgcccaagtccatggatgaagcacagtcgaaatcggcattccagatgcaagttttcaagatgccaccagacctgaaccggactaagctgttcccccctgccaatttcaagattgccggtgcatcatcgctgaacccggactacacctgtggccagccggtgcctgtcagcccaactgcgttccctgacccaagcgggcttgactcgacgacacttgctgtggcaacatggcaggtggtgtgcaacattaccacaacgaagggggccaagcccaagtgctgtgtgaccttctcggcgtactacaacgactcggtgatcccctgcaacacctgcgcctgtgggtgccctgcaaacaggcgaggtccaacgtgcagcacgactgcacaatccatgc

SEQ ID NO: 454849 - DNA, 400 bp, Sorghum bicolor
  unsure (1)..(400): unsure at all n locations
cgtccggagacgtacgtgacagcgaggaggaaggaagaaaggcagggatcgacatgtcgaggcccaacaggagcgacgcgcacctctccgccgaggacgaggcgacgctggaggccgaggtgcgggggtactacgacgacgcggcgcccaagcgccacaccaagccctcccgcagcgagcactccgccgtgtacgccgacgcgctcgtcccggacgccggcggcaacacccctccggagctcgacaagttccaggagctcgaagcccacaccgagaggttggtgtacgacggcggcaatgtcngagaggagttcgtggagacggagtactacaaggacctcggcggcgtcggcaagcagcaccacacgaccggaacgggcttcatcaagaatgacaaagc

SEQ ID NO: 454850 - DNA, 323 bp, Sorghum bicolor
cgtccgacagaatctgcgctccgcttcttcccttatccgaagcctccagcctccctctcgaatcccacctccaagctccgatccatggcgtctcacgatcaccaccactcccacgagcacgagcacgagcacgggcacgaccaccaccattcccacggggacggcggtggccatggatcggggggatcgtgggtaggggaggacggccgcgtgtggcactcccacgacggcctggcgccccactcccacgagcccatctactcccccggcgacttcaccaagcgcgcgccgtcggtcgcctcgcgcaacttcgctgacccggc

SEQ ID NO: 454851 - DNA, 339 bp, Sorghum bicolor
cgtccgtgtacccatgcacatgctgctgggcaacgttggcgaatgtgacaatggattgatccaataagcaatgctatgcacgaacctgcggaagctcgagctgaggagctgctgcttgagcaagctagctatggcagtggccgagctacagatgcccttgctgaggtacatatgggtgcaggggtacagagcctctcaaacaggtcaggacctcatgctcatggccaggccatactggaacattgaatttgtgcctcccggtcccgagagcgcctatcgtgtgatggcagatggacagccttgtgttgacacccatgcccaggttcttgcgtattactc

SEQ ID NO: 454852 - DNA, 323 bp, Sorghum bicolor
cgtccgatggtccttgagtatcgcggtgagcaggttagacgaagtgtagctgatttacgggaagaaaaatatcgtgtacaaggcaaagattgctaccttttcaaaatcagtgaggaagtggttgttgatgcgacagacaaaggaaacgtggcacgattgatcaatcattcttgcacaccaaactgctatgcaaggattatgagcgttggacatgatgaaagtcgtattgttctaatagccagaaaaaatgtttgtgctggtgatgagctaacgtatgactacctgtttgatccagatgaggctgatgaacgcaaagtgccatg

SEQ ID NO: 454853 - DNA, 366 bp, Sorghum bicolor
cgtccgagcagctgttgttggtcatagcaaaggaggagatgtagtgattctatatgcttctatttacaatgatgtcagcaaaattgttaatttatcaggccgatttgatttaaaacaaggcattgaagaacgaataggggaagggtctatcgatagaataaataaagaaggctaccttgatgtcaaggacaaatctgaacatgtcaactacagggtaaccaaagaaagtttgacggaacggcttaatactgatatgcatgctgcaagtgtttccataagtaaggaatgcaggttcttaactgtccatggttcagctgacaagaccatacctgtagaagatgcccatgagtttgcgaagcatatacc

SEQ ID NO: 454854 - DNA, 492 bp, Sorghum bicolor
cgtccggagctagcgagatctttccactttttttccagactgcgcgacggggactcggggagagagagagggcaccggcgatgtcgacgacgacggaggcggcggcgaagagtggcacagccgcaccggtgaggtgccagcggatcggctgtgacgccgtattcaccgacgacgacaaccccgagggctcctgccaataccacccctccgctcctatgtttcatgacggcatgaaagagtggagctgctgcaagcaaagaagccatgatttcagcttatttttgcagatacctggatgcacaacaggaaagcatacaaccgaaaaaccaattacaaaagctgtttcaactaataaccctataaaggcaacaccaatccaggcctctaagcagggtgtgggagttgaagcgtgtgcaaggtgtcgtcaaggtttcttttgctctgatcatggatcacagcccaagccacaaaaaccatctgctactgatgata

SEQ ID NO: 454855 - DNA, 516 bp, Sorghum bicolor
cgtccgcggacgcgtgggtcagaatggccattcaaagggatatggttttgttaggttttcaaagagggagtatgctaatactgctaaaaggcaaaagaatggtattgagcttcaaggaaagaggcttgatgttgatctttcaatggatcaagatacagttttctttggaaatctttgcaaagagtggacttcagaagaatttgaagaattgattcacaagacattcaaagatgttgtttcggttgaccttgcaatggcttcaaatcgtggttcttcaaacaagaggaatatcaatcgaggctttgcatttgtgagatttacttctcatgcagctgcagcacgtgtaatccgtatcggttcaagaacagattttatgcttggcgatttgcatcctgcaataaattgggctgataaagagtctcatgtggatcctgatgaaatggccaagaataagtctgcttttgttgggaacctgccagaagatgttaacgaggagtacttgagaaagctttttga

SEQ ID NO: 454856 - DNA, 412 bp, Sorghum bicolor
cgtccggggtttcggtctctaccgccgcggaacgagccagcgaacagggatggcggcggcgcggcacctcagatccggcctccctctcctccgcgcccacctcgcatcctccgaatccgcggccgtcgcccaggtctcgaggggcttcgcgtcgcagccggccaaacccaccggcaaggacatcaaggttccagaagctctgtatggtggcacaggcaactatgccagtgcactgttcctcacagcagctaaagctaactcattggacaaagttgagtctgagattaaaactgttgtagaggcatccaagaagagcccgttgttctctctattcataaaggacctgtcagttccaaaagagaccagggtgaaggctgtaaccgaaatatttgctgacgctgggttttcggat

SEQ ID NO: 454857 - DNA, 410 bp, Sorghum bicolor
cgtccgggcgatccgatcgttctcgagcaaggtcggtggccatggctcgctgccgccgccacctcctcctccttgctctctttctcgccttggctgctgctgctccggggcgggcgcagagtcatgaggaagcctccgccgtcttcatcgacgcctcgtcgcaccgctacctgcgggaccagcaagccgacggccaggacgcttcaatgtcgttaaatgaagtttctgcggctgtttctgtcttgcttggttttgcagcgccaacctccctaccagcgatttcatcgtcgaagttgaacaaagtgcttcttcccaatccatttgatagaccgcgtgctgttttccttatgcaaattgctgggaccgatgcctcagcccctagcttcgtatctgaaggcagcaacattttc

SEQ ID NO: 454858 - DNA, 406 bp, Sorghum bicolor
cgtccgcgcaggcgacgcagctcgtgaaccaggccctggtgctcatcacgctgggcggcaacgacttcgtcaacaactactacctggtccccatgtccgtgcggtcgcgccagtacgcgctcccggactacgtccgcttcatcatctccgagtacaggaagatcctctcgaggctgtacgagctgggcgcgcggcgcgtgatcgtgacggggacggggccgctggggtgcgtcccggcggagctggcgatgcacagccagaacggcgagtgcgcggtggagctgacgcgcgccgtcaacctcttcaacccgcagatggtggacatggtgcgcggcctcaaccgcgacatcggcggcgacgtttcgcaccgcaacacctaccgctgaacttcgatacatcgaaaccc

SEQ ID NO: 454859 - DNA, 526 bp, Sorghum bicolor
cgtccgcccacgcgtccggtaggattagtaccttgtgttgtcctacttctggggcttttcttcattccagagtctccaaggtggctggccaacatagggaaagagagagaattccatgcttcattacaggagtttaggggggaagattctgacatttctgaagaggctactgagatcaaaggactatatagaatcaattcgccgattgcctaaggccaggtttcaagatttatttcagagaaaaaatatgtatgcagtcacggtgggtgttggcctgatgatttttcagcaactgggaggaataaacgccttaggtttctatacaagctatattttttcctctgcagattccaatcacattagttggggcccttctgatggataggagtggaagaagagcccttcttttggtatgaacactctaaatctgagttgtacagaaaagaaaagcagtgttgtatgtgtctagtgtctttggttttcaggtctcttcatctggaacatttcttgggtgctttctgactgg

SEQ ID NO: 454860 - DNA, 465 bp, Sorghum bicolor
cgtccgacaagatccaaaattaatgcttcattccacgaggacaaatccccaggttttgtgatatttttagtgtgtggagctgataccaatatgccatcgattccatctcagcactagcaaaggtgattcatctcttctcatgagctttgttcatttgtagaagtacaagtgcagatactagttaatttctgccagctccagagtctagacctgatacaagtatgtcaatgactccatctcagcactaggcaaggtgattgatctactctcatgccttatggttactagcttgttacctgctaagagtgtacactatcttgcagttgttaaagaaaaaaaaaatgatttgtttgcattcatgagaacgcactgctactttgattaatatatgatatatgattagcttactggtctctgatttgcatggcaacacctcagagctatttataactgatctactatata

SEQ ID NO: 454861 - DNA, 175 bp, Sorghum bicolor
ctcaccttagcacggtgcaccgagcgctcagcatctctgctggggtcgtcggagaagcccaacgtcacctataacgatattggaggatgcgacatccaaaagcaagaaatacgggaggcggttgagttacccttgactcatcatgagctgtacaagcagattggtattgatccct

SEQ ID NO: 454862 - DNA, 491 bp, Sorghum bicolor
cgtccgggatgatttgccagtcaacggcatggaactttcactcagcaggtcaacccctctcagtcaggaaatattggcactaccaacaccagaggactaccttaacagggtcttaccacatgatgaggtgaaagtaccagtaggtcctgctggtttgtttcgtttgccaacagattcgtttcccagaaatgagatggcctcaagggacggctatggttcaaggttcagtttgacctcgatgagtccatcctacgtatggtcaagctaccatgctgatcatattatgccagctctgtccttttctgactatggttctgggttgtcactggatccatactatgatcctccaagttccatgttgctatccatgcccgctgctggtgggcgtagcgtccctgtgtcagatttcagaataggggatggttccttcctccgagagttccacggcctggcaactattagggtgatgccttctggagacacaactacac

SEQ ID NO: 454863 - DNA, 518 bp, Sorghum bicolor
  unsure (1)..(518): unsure at all n locations
cgtccgcaaaagaggtttcgaagaagctaatgtcggaaaaaaatcttcttgaccaaaaagttcaaaggcttgaaagaatgaaaagtgaagagaaaagcacaatggagaaggtttatgcggatgaatgccgtaacctgaaatctcagattgctgagttggagcagaaattgaaagttgcgacacaatcgttaaatgttgctgaatcaaatcttgctgtaagaaatgctgaggttgatagcttgcaaagtagtttgaaagaacttgatgagctaagagagttcaaagcggatgtcgatagaaagaaccaacaaactgctgagattcttaaaaggcaaggagcgcaattggtggaacttgagaatctttataagcaagaacaggttctgcgaaagcgttattataatacaattgaagatatgaaaggaaaaaataagagtnttttgtcgcttgcgtcctctaagcgacaagggacgttcttttgaagagaaaaatatagtttgcagtcccgatgaatttac

SEQ ID NO: 454864 - DNA, 474 bp, Sorghum bicolor
cttgaccacaagcaggaagaacaattatttgaagatatatctaatgttctcttggagctttcacaactacatgatagccagggccatgcccagaatgaagttaatgaagtaaagcaaagttgtttgcattcatctaatgatgttgattttgctagaaagtataacgagcttgccacaaaacttcaaggcatgtgcaagtctatccgggttgccttgactaatcatgtccatagagaagaacttgaattgtggccgttgtttgacaaacatttttctgtggaggagcaagacaaacttgtaggtcgtataattggttcaacaggtgctgaggttctccaatctatgttaccctgggttacatcagctctcactcaagaagagcagaacaaaatgctcgatacatggaagcaagcaaccaagaatacgatgtttggggaatggctaaatgagtggtggaagggagctggaacaaca

SEQ ID NO: 454865 - DNA, 513 bp, Sorghum bicolor
  unsure (1)..(513): unsure at all n locations
cgtccgagcgatacgagtccctgcgacactgcaagtgggttgatgaggtcattcctgatgcaccgtgggttctcacacaggagtttattgataagcatcagattgactatgttgctcatgatgcgctgccttatgctgatactagcggagcagcaaatgatgtctatgaatttgttaaaaagattggaaaattcaaggaaacaaaaaggacagacggggtttctacttcagatctcataatgaggatcttgaaggactataatcagtatgtcatgaggaatttagcacggggctactcgaggaaggatcttggtgtgagctacgtcaaggagaaacaattgcaagttaatatgaagatcaataaactgcgggagactgtgaaggcgcatcaggagaagttgcaaacagtggcaaagactgctggtttgaatcatgaagaatggcttgctaatgcggaccgctgggttgctggttcctgggaaagttgagcaacactgncacaacatgggactg

SEQ ID NO: 454866 - DNA, 447 bp, Sorghum bicolor
cgtccggtctatgcttaatcacttgcgattctatttgccggagatgtacccaaagctacaccgcattcttttcctggatgatgatgttgtggtacaaagggatcttactggactctggaagattgacatggatgggaaggtgaatggcgcagttaaaacatgctatggatcttttcatcgatatgcacagtatatgaatttgtcacaccctcttatcaaagcagagcttaatcctaatgcctgtggttgggcatacggaatgaatttctttgatcttgattcttggaggagggagaagtgttctgaacagatccattattggcagaatcagaacgagaaccggacattatggaagctaggaacgctacccccaggcttaatcactttctactccaccacaaaacctcttgagatatcttagcatgttcttggacttggatacaatcc

SEQ ID NO: 454867 - DNA, 380 bp, Sorghum bicolor
  unsure (1)..(380): unsure at all n locations
cgtccggcccagttgtcgttcgcgtctccgccggccggcctacgaaaccctagcgaagcgagcgagggagagactagcggccatgttcgggttcaggaaggcggacccggacctcgaggccggcggngcctcgctgctgtacccggngatgacggagagccccgagctgcggtgggcgttcgtccgcaagatctacgtcatcctcgccgtccagctcgccatgacggccgccgtctccggcttcgtcgtcaaggtgcccgccgtctacaacttcttcgtctcctccaacgccgggatcgcgctctacatcttcctcatcatcctgcccttcatcgtgctgtgccctctgcactactaccaccagaagcatccggtcaatc

SEQ ID NO: 454868 - DNA, 416 bp, Sorghum bicolor
  unsure (1)..(416): unsure at all n locations
cgtccgctcgctgctgctggagacgtacatccgcgacggcgccgagaaggaccgcctcttccgcgccatcgagaccgtccccgccgtgcgccgcaaggccgactgggccatgcgctggatcgacggcggngagcgcttcgccgagcgcctcgtcgccttcgcctgcgtggagggcatcttcttctcgggctccttctgcgccatcttctggctcaagaagcgcggcggtggcttgcgccagccccggccgcgacgacgaggctacctcggctccgaccccggccccgccctcttcgccgcgggaggtggcggagtccatgatcctcgtgcccgggccgcgcgtcgtcatgtccggcctcagtctggctgattgccgttcagatgactgtgttctccaacgagctcatcttccgcga

SEQ ID NO: 454869 - DNA, 465 bp, Sorghum bicolor
  unsure (1)..(465): unsure at all n locations
cgtccggccaagcttgtggaagcagcagcaagaggtggngttagaatcaaaagaaggccacaccgaggggacaacttcaccctgatgcaggcatttgtgaaggctgatttttggcttatttggctatcacttttgcttgggtcgggatcagggctgacagtgatggacaacctgggtcagatgagccaggctattggttacaaaaacgcacatatctttgtgtcactgatgagcatatggaacttccttggtcgtgttggaggtggctacttctctgagatcattgtcagggagcataaatacccaaggcacatagcattgacagtttgtcagatcgtgatggctgttgggcatgtactatttgctatggcttggcctggaactatgtacattgcgagctngctggttggacttggatatggagctcactgggctattgtgccagctgctgtctctgagcttttt

SEQ ID NO: 454870 - DNA, 215 bp, Sorghum bicolor
  unsure (1)..(215): unsure at all n locations
cgtccggcgcgtgctactatgagcaaccttccatctattatgtagagaagcaactggtgctcctgacagcactactgcagcatgaagtggcgatgctatgaaatccggatccgangaacgaacatcaacctatattgctcatcgactcacaacctcaatgccgtgtgatcagatcattgattaggagaatgggaaggttttccaagaaggaccac

SEQ ID NO: 454871 - DNA, 417 bp, Sorghum bicolor
cgtccgcccacgcgtccgcagggggatccccgagggtgccgtcgtctgcaacgttgagcaccacgttggggaccgcggcgtctttgccagggcgtgtggggactacgctatcgtcatcagccataacccagacaacggcacatcaaggtgacgatcacactctctgccaaaaggttgcataacgggtagctggatgtgatgcgtggttagggaatggtatctagttttcttaggtggtggcgagttgtttgtgtagaattttagttagtattagtatttggactatactcgttgcattctgaaatgattagtaatgaattgtgtaagactctgattgcttttgacattgtgatgttatccgaaatatttgagactgtcactttgttttatagaaggatgcttgtgaaaacatcaaaa

SEQ ID NO: 454872 - DNA, 295 bp, Sorghum bicolor
  unsure (1)..(295): unsure at all n locations
taggcgtacgcgaaaagagagcaagttgaactggaggtgttcaacttcactggtgctggaggagttgccttatccatgtacaacactgacgagtccatccatgcctttgctgaggcttctatggccactgcttatgagaagaaatggccattgtaccttancaccagaacacatttgagaaaatgaggaggttaggcatttcagaggtcaactgtggaacaatgagtgcgcttgtactgtatgtctgtcttgactaaggagagtgtgtgaatatagatcacattatagtgtatgt

SEQ ID NO: 454873 - DNA, 401 bp, Sorghum bicolor
cgtccgcggacgcgtgggccgcaacccagcatcaacttgctccccaagaagaatcgagcgcaagaccttctcgcgcggccatccatggcgaagcgtctgatcccgtcgctgaaccgggtgctggtggagaagctgctgcagcccaagaagagcgttggcggcatcctcctcccggagaccaccaagcagctgaacgctgctaaagtcattgctgttggccctggtgatcgtgatagggatggtaagctgatccctgtatctctgaatgaaggcgacactgttctgcttccggagtatggtggaacagaagtgaagcttgctgaaaaagagtaccttcttttcagagagcacgacatactgggaaagcttgaggagtagctctggatcgtcaaaatgtcaac

SEQ ID NO: 454874 - DNA, 524 bp, Sorghum bicolor
  unsure (1)..(524): unsure at all n locations
ccggcgcttncactctcgatcgatcgatacctcgaccatatccccattctcgtccatacgcccgatccgatctcttcgacgcagtgtcaccatatggcttgaggcttcgctctcgaatccgtacgaggggcggattgtctcgatggacgaaagcatgactgacagatgagtggaggtgcatacaacgtccacatcgatcaggccagcatgcaagtcggcaacgcgtgctgggaactttactgcctcgagcacggcatccagcctgatggccaagtgcctggagacaagactgcgggacaccacgatgatgccttcaacaccttcttcagccagactggtgcaaggaagcatgtgccccgtgcaatcttcgttgatcttgagcccactgtgatcgacgaggtgcgcactggcacttaccgtcagctcttncaccctgagcagctcatcagcggcaaggaggatgctgctaacaactttgcccgtggccactacacaattggaaaggaaattgttgatctgtgcct

SEQ ID NO: 454875 - DNA, 490 bp, Sorghum bicolor
cgtccgctgttccaatgcatcattaagaaagttatggaggtttatcagccagacgtggttgtcctccaatgcggagctgactctttggctggagacaggttaggttgcttcaacctgtctgtgaagggtcatgctgactgcctccggtttcttaggtcgtacaatgttcctatgatggttttaggtggtggaggttacaccatcagaaacgttgcacgctgctggtgctatgagaccgcagttgctgttggagttgaacctgataacaagctgccttacaatgattactatgaatactttggccctgattatattcttcatatccaaccaaaaagtgttgaaaaccagaatactacaaaggacttggagaacataaagaacatgatattggagagcctgtcaaagatagaacatgttcccagcactcaattccatgacaggccgtcagaccctgaagctccagaggagaaagaggaggacatggataaga

SEQ ID NO: 454876 - DNA, 484 bp, Sorghum bicolor
cgtccggttcttcaagaattcagtgcttacaaaaacatatcacatgattgatgaggatgaaccaattctggagaaagccattggtactgacattgaatggtaccctgggaagtgcttgacacaaaaggtgctaaaaaggaagccacggaaggggtcaaagaacactaaacctatcacaaaaactgaagattgtgagagcttcttcaacttcttcagtccacctcaggtccctgatgacgatgaggaaattgatgaggatacagctgaacagttgcagaaccaaatggagcaagattatgatattggatctaccatcagagacaagattatcccacatgctgtctcgtggttcactggagaggctgctcaagatgaggactttgaagttatggatggtgaggatgacgatgacgaagatggtgatgatgacgaagaagacgaagacgacgaggatgaagatgatgatgattatgacacaaagaag

SEQ ID NO: 454877 - DNA, 479 bp, Sorghum bicolor
cgtccgcacgcctcgtgctctgctactcgtcttggcttggaggtcgccggatccacgagcgcgggcgcggggcgatgggtggcttgggaggcgctggtggcggcggcggcggcggcgaggtcggcctgccggcgctcgatgtggcgctcgcgttcccgcaggccacgccggcgtccctcttcccgcccgctgtgtcagactactaccagcttgatgatttgctgactaatgaagagaaggttctaaggaagaaggtccaaggtgtcatggaaaaggaaatcgcacccattatgactgaatactgggagaaggcggaattcccatttcatgtcattccaaaacttgcgactcttggcttagctggaggtacaacaaagggatatgggtgcccagggctctcccttacagctactgctatgtcaactgcagaagttgcacgggtggatgcgagttgctctacatttattctagcccatgcc

SEQ ID NO: 454878 - DNA, 512 bp, Sorghum bicolor
cgtccgagcaagtgagagtcctcacctcacctcaccccaccccaccccaccccgccgccgccaaggccgtcgacgccctcttcggctcgcgcctcgcccgcgacgacctcgtcctcgcggggctcgagtccgagaaggccgtcagcggcttccacgccgacaacatcgcccccgccatcctcggcggcttcgtcctcgtccgcagctacgaccccttccacctcgtcccgctctgctccccgcccgcgctccgcctccacttcgtcctcgtcacccccgacttcgaggctcccacgagcaagatgcgcgccgcgctgcccaaacaggtcgacgtccaccagcacgtgcgcaactccagccaggcagcggcgctcgtggcggcggtgctgcaaggggatgcgggcctcatcggctccgcgatgtcgtccgacagcatcgtcgagcccaccagggcacccctcatacctggcatggcggccgtcaaggcggcggccctgcaagctggagcgctg

SEQ ID NO: 454879 - DNA, 489 bp, Sorghum bicolor
cgtccggctggccgcacagagcctgatgattgtgacgattcaggaagcatcccggagtcgttctacacaaacggggggtttaagctgcgggtggtttggacaatcagctcgctgattgcagccgccgcgaggcattacttgctgcagcccatcattgctgatcacaggatgctcgagagcttggacctgacagatgctgatggccagggagtgctcaccatggacaagtgccaactgcaagagctgagggtgagaccaatatcaacatctaggggctcacaccggacgctcatgccagagcttagcatgtggttgtggtacgcaccatgtattgagctgcctggggggttagtgctgaatggcgcaacactggtggccatcaagccaagtgaggaaggaacaggggacacagtttggaatggggctgatggtgcagctttgggtgttggatgcattcgaggagccgtataggaacagcggtgaggatgc

SEQ ID NO: 454880 - DNA, 499 bp, Sorghum bicolor
cgtccgacttcaggcatcataggccaattgttgcaggagatcatgagaagattaaaccttacatttgatctccatatactttcttctggtgataaggagaagcaaagcgatctgcaggctttgctatgtggtgttctgcaggtcatcatccagaagctgaatagcacagatgcaaagtccataatttctcagactgctgatcagctgatgatgctgtttttgcgtgtctttgcctgccacaattctactgttcatgaagaagcaatgcttgcaattggtgctcttgcatatgctactggtccagattttgttaaatacatgcctaacttcttcacatacctggaggctggcttgcagaattatgaagagtaccaagtgtgttccatctctgttggggtggtcggtgatatttgtcgtgccttggaagataaaatcttgcccttctgtgatcgcattatgactgttcttctaaaggatctatcaagctctatgctcaatc

SEQ ID NO: 454881 - DNA, 482 bp, Sorghum bicolor
cgtccgggaagaaccttgacccgacaccatgctaccaatggccgagcaccccacgaccacgccgtacttgtccgcacgcgcccgcgtctcctcgcccaggcctttcacctgcctggccgacacctcgtacacccactgctatagcactggcagttagaagagcagcaggctgcgacttcgatcgctccgaagcgatgtcatcggcggcgccgccgatgccgactgcgcagaggaagaagaggttcaactaagtgatggtgtggacgcggtcgactagcatgaagcggtgaataaggtggaggtgcctgcgagacaggacccggtgctgactctgaaatacatttggatggagaagaacatcggcatagcacttgaccaatagggttctggctatggcagcatactgctaagcccatactacttctggtcatagaaagacacgtgggaggagcttataccgtacttggatgagcatgagtgga

SEQ ID NO: 454882 - DNA, 486 bp, Sorghum bicolor
  unsure (1)..(486): unsure at all n locations
cgtccggggactgggttgggatgaagctggggacatcacatataggtgaggttcaatttatataagtgatctataaatatttttcgaccaatattttaagctccatcaaacttctagagatgttcttacttgaactaattacaaaattatcttctgtggtctaggacaatttcctacaccaatcatacagttcttcctgaagctcttgaaaaatggtcacaaattgtgatgaggaaattacttccacgacacatggaaattattgaggaaattgacaagcggttcagagaattggtaatctccaaacataaggaaatggagggaaagatcgattcaaatgaaagttttagatagctcgaatccccagaagcccagagtgcgcatggcaanatntgggtgtgggtcttctcaatacgggaaatggagtggctggttgcatagcaacattttgaagcaagaactatntgcagattatgtctctatatg

SEQ ID NO: 454883 - DNA, 503 bp, Sorghum bicolor
  unsure (1)..(503): unsure at all n locations
cgtccgngagcatgattccaggattgtatgcaaagaagttacattaggacacaacgttgccggagaagacgttggcatcctgggggcgcatattacccataacaacggatagatacagaaatgtcatgtcgaccatcgcctacattccaccatcgcgggcagcgtaaattacttccctggcgtgcgcaagaacaaaggcccgcgattccgcgaggagccttcctcctcgcggccattacacggccgcttccacttcgactttctaggattcgactatgagcctggacccctcatatctatcgaggggtggattattttggtaactggcatccatgaagaagcacaggaggatgatcttcataatgctttncgggaatatgggcaggtcaagaaccttcatgtgaatttagatcgtcgtaactgagtttgtcaaaggatatgctttggttgaatatgagaagcttgatgaagcacacgctgcaattaaagcaatggatggaact

SEQ ID NO: 454884 - DNA, 469 bp, Sorghum bicolor
  unsure (1)..(469): unsure at all n locations
cgtccgctcagctccgcagcccccgagcgccgccgccgccgccgctagacgcccaccgcgcagccatggcggaacagactgagaaggctttcctcaagcagcctaaggttttcctcagctcaaagaaatctggtaagggtaagaagcctggcaagggaggcaaccggttctggaagagcattggccttggcttcaagactcccagggaagcaattgaagggacctacattgacaagaaatgcccattcactggaaccgtttctatcagaggcagaattattgctggaacgtgccacagtgctaagatgaacagaaccatcattgttcgcaggaactacctccactttgttaagaaataccagaggtatgagaagaggcactccaacattccagctcacatctccccatgcttncgtgtgaaggaaggtgaccatgtcatcattgtgcagtgcagggccgtgtcaaaaac

SEQ ID NO: 454885 - DNA, 489 bp, Sorghum bicolor
  unsure (1)..(489): unsure at all n locations
cgtccgggacgtggacctcccggagccggagttccgggagcgcatcgcggccatcggcgccgtgcagcacgagctggtggtgcccctccgcgcctactacttcagcaaggacgagaagctcctcgtctacgactacatgtccatgggcagcctctccgccctgctgcacggtaaccgtgcctccggccggacgccgctggactgggagacgcggtcggcgatcgcgctggcggcggcgcgcggcgtggcgcacatccactcgacggggcccacggcgtcgcacggcaacatcaagtcctccaacgtcctgctcaccaagaactacgaggcgcgcgtgtcggaccacggcctccccacgctcgtcggcccttccttctcgcccacacgggtgtccggctaccgcgcaccggaggtcaccgacatccgncgcgtctcgcagaaggccgcgtctacagcttcgggtcctcctgctggagctgctcacgggga

SEQ ID NO: 454886 - DNA, 464 bp, Sorghum bicolor
cgtccgcggacgcgtgggttcacctgctacctcttgaatttgagataccatcgcacaccatgtaaacataaccatgctagttctgtttaatgatagtaatcttgatgcattatgggtttttgattctgcattattgtctttaactggacatacaaaattgtttacacaattcttgtttgatgactactagtgatcagtctctgttttcacttgcaggttggtccaattgctgcctattataaactgccacttaatcgtgtcctagtggcatttgatgatatggacttgccatgtggagttctccgcttacagccaaaaggaggctttggacggcacaatgggttgaagagtgttatataccactttcgtaagaatcgagaattttgccgattaaggattggaattggacggccacctggccaagatggtcctaaagcctttgtctttcaaagttcaataggact

SEQ ID NO: 454887 - DNA, 506 bp, Sorghum bicolor
  unsure (1)..(506): unsure at all n locations
acgcgtccgccaatggtgatactttccttggtggtgaggactttgatggtgcactgcttgagtatctggttagcgagttcaagaagtcagacaacattgatctgagccaggacaagttagcactgcaaaggctcagggaagctgctgagaaggccaaggttgagctttcctccaccatgcagactgaaatcaatctcccatttatcactgctgatgcctctggtgcaaagcacttcaacattaccttgaccagatcgaagtttgagtctcttgtgagcaatctcattgagaggactcgcatcccttgtgtgaactgcctcaaggatgctggcatctctgctaaggagattgatgaggttctactggttggtggtatgactagagtaccaaaggtccaggaggttgtttctcagatattcaacaagccaccaagcaagggtgtcaatcctgatgaggctgttgccatgggagctgctattcagggaggcattttgagggntgatgtg

SEQ ID NO: 454888 - DNA, 512 bp, Sorghum bicolor
acgcgtccggaacaagcaaaattctggaagcagcatccatcactagtaaagatggaactgctgattcaggcgcatctcacgtgtgagtcattttctttgaccccagcacttcttaaagattacagacatatgcttgaacttgcacctcgtcttctggaagaacttgttaagattgcagttctaccaaggaatccccatggttttggatggctccggcctgcaattggtgttattgagctttctcaaaatattgtccaggctgtaccactaagtgcacgaaaagctagtggaggtaactcggaaggaatagcacctttcttgcagcttccgcatttcacagaagcaactgtgaaaaagattgctcgtaagaaaatccgtgccttccaagaactttgtgacatgtctgtggaggatcgtgctgcattgctcacacaagttgctgggctttctgaagaacaagccccgcgatgtggagcttgtcctggagatgattccttctaatgaagtagaca

SEQ ID NO: 454889 - DNA, 505 bp, Sorghum bicolor
  unsure (1)..(505): unsure at all n locations
cgtccgatttataggcgtcctcagatgatttatgtggtcaaacgccttcggatatttagaaaagaattaaaggacagacatgaaaattattcagaatcaattttggcatcacaccattcatggcgcaaaaacaacaagcaagagatgatcatgcccacctataattctaagatgcagattaggaagagtttgggctctttcaggaggaaccttagcaattctaagattcagtcagaacccagcaatgtgagaattttcacacaggaggagctaaaagaagtcacacataattactcgtatcgactcagcggaggtacttcaggtcaagtttacaaaggaacacttgaggacaatgcagtggtagcagtgagaatattttctgaagtactagagggctntgaaagagcgtttatcaatggtggnatgatcctgtctcaaatattccataggaacatcatcaaacttttgggatattgctctgattgcccggccntcgtgtatgagt

SEQ ID NO: 454890 - DNA, 435 bp, Sorghum bicolor
cgtccgcggacgcgtgggcgacgaggagatggcgtcggcgctgtcctccctgcgctacggcgacagcctctcggtggtgggcatctccgccgcgacggccgtgctctgcgaggccatctcctggctcctcatctaccgcaccgccacctacaactccctccgcgcctccatcgagcgccactcccgcaagctcgacgccatgaagtccggctccagctcctcctcctcctcctccggcgccggcgcctcctccgcgcagcccgcctcgtcgcgggctaagaagatggaccgcgtcgagaccagcctcaaggacgccgcgcgggagctctcgctcgccaagctcaagtcgggcgccgcgtcgccgggtgctcttcgcgtcttcggcctgctaactccctcttcgaggccgaccgtcgcaagctgccttcgcgccca

SEQ ID NO: 454891 - DNA, 526 bp, Sorghum bicolor
ccgcagcccggaccgaattcccggtcgaccacgcgtccgcccacgcgtccgcatgtatgtcgccatccaggctgtgctttccctgtacgccagtggacgtacaactggtattgtgtgggactctggtgatggtgtgagccacacggtgccaatctatgaaggttatgcccttcctcatgccatcctgcgtctcgaccttgctgggcgtgacctgactgacagcctgatgaagatcctcactgagagaggttactccttcaccaccactgccgaacgggaaattgtaagagacatcaaggaaaagctcgcgtacgtggctcttgactacgagcaggagctggaaagcgccaagagcagctcatctgtggagaagagctacgagctgcctgatggtcaggtgatcaccattggggcagagaggttcagatgccctgaggtcctcttccagccttccttcattggtatggaagctcctggcatccatgagaccacctacaactccatcatgaagtgtgatgtggatatc

SEQ ID NO: 454892 - DNA, 469 bp, Sorghum bicolor
cgtccgcccacgcgtccggtagtgacggagttgtccaagatgttgatcaaggaagagatagatgagaactccacggtgtccatagacgcttctcccagcaaagatgaactgatttacaaggttgacatgaacggaggactggtgaatgcgcagacagggcacaagtctgacatcctgatccaggttcctaatggaggtatcaacggtggggcagcacacactgtgaagaagatgaggttgatggaggatgaccaggacgatgatgacatggaagaagagtgactaggaaattttgcgacatagttgtagacaatttagtatagatcttagatgccccgagacgaactagttgaaggtgcagaagtgccaaccccagcttgtgtagatgaaagtgaactagtttgagatgtaatcgaatcctggaccttaagattccatcacatttcattccaaaaaaaaaaaaaaagac

SEQ ID NO: 454893 - DNA, 521 bp, Sorghum bicolor
  unsure (1)..(521): unsure at all n locations
cgacccacgcgtacgctcttntgacggacatcggaggaagaagaagaagaagagggagagcgagcaggggcgggcgtggttcgggaaggaatggctggtcggcgcgcggaggaggagtacgactacctgttcaaggtggtgctgatcggggactcgggcgtcggcaagtccaacctcctctcccgattcacccgcaacgagttctgcctcgagtccaagtccaccatcggcgtcgagttcgccacacgaacactccatgttgagggcaagatcatcaaggcgcagatttgggacacggcaggccaggagcggtacagggcaatcacaagcgcctactaccgcggtgcgctgggcgcggtcctggtctatgacgtgagcaagcctaccaccttcgagaacatcagccggtggctcaaggagctgcgtgaccacgccgactccaacatcagaatcatgctcgttggcaacaagactgactngaggcacctncgagctgtcgccaccgatgatgcgcagagctt

SEQ ID NO: 454894 - DNA, 418 bp, Sorghum bicolor
  unsure (1)..(418): unsure at all n locations
cgtccgcccacgcgtccgaaaggggaaatagaaacaaagacacaaaagctaggacagctgatgttgaagataggggtgaacccagtacaaaagactccactgctgcaaccatgaacattcctggagaaggccctttcataaataataaaacaaattggttagcaatacagaggcaattgacacacttggagagacagcaaactagtctcatgaacatgttgcaggatttcatgggaggatctcatgacagtatggttactttagagaacagagtacgcggtcttgagagagttgttgaggaaatggctagggaaatatcactctcgtcaggcaggagaggtggggtccagcgctgggctttgattcgtctcctggagatcatctaaatacaatggctntcatgaatattctaaattcg

SEQ ID NO: 454895 - DNA, 596 bp, Sorghum bicolor
cgtccgattttcttctcctgcctttagctcccccgttcttccagaactttctcgagacctgaatccaccctgacccagcggtccccatggcctccggcgaaggtgtagttgatcagctgtccggggcggctggcggcgaggcggaggccaagatggagacggagggggagcgggaggggccggtgctgtacctcgacctgacgagctaccagctgcacgatctgagcgaggtggagatcccgcccacgctggaggaggtcgacctcaccgccaaccgcctctcttccgtcgacccacgcatcggccaactcccccgtctccgcaagctctccttccgccagaacctcctggaagacgacgccgtcgcgccgctctcgtcctgggagactatcgccggattgcaggagttggtccttagagataacaaacttacaaggattcctgatgctggcatattcaagggtcttctggtgtttgatgtatctttcaatgagatatcttccttgactggtatgtccaaggtttccagcaaattgaaggaactttatgtttcaaagaatgaagttgcaaagatggaagagcttgagcatttacat

SEQ ID NO: 454896 - DNA, 562 bp, Sorghum bicolor
  unsure (1)..(562): unsure at all n locations
cgtccgcgccggggtagctcaagatgggattttcctcaacaaccttgaccaggagatgtttgagacgaatgtggacagtgaatctttgctagcattgtgcaagctggtggacaggtacatagctgaagttgcctctgatccaaatctgtccgtttcaagcttcgtggatttggtgacttccatgcctgaaacagccagaccaacacatgatggattgtacactgctattgacgtatttctgaagttgcatcccgggctacccaagatggagaagaggaagatctcgagcctgatggacgtaaagaagctgtccaagggggcatgcatccacgcggcgcagaacgaccgtctcccgctgagggtggtggtccaggtgctcttcttcgagcagctgcgtgccgcgggagccgccgccgccgccacgcccaacgtcagcgtggcgcggtgcatggcgcgcctggcggaggaggaagaggaggacgaccacgagcactggaaggagggccgtgcgctgccggagcccccgacccctggcgcgctgaagaggcagctggngagcctg

SEQ ID NO: 454897 - DNA, 683 bp, Sorghum bicolor
cgtccgcggacgcgtgggtccttcccctccgcgccgccgccgccgccgacgggagcacgtccccgatccagatccaggagatatgcctcgctatgatgatcgctatgggaatacacgcttgtatgttggaagattggctccccgcacccgttcccgcgacctagaatatcttttcagcaaatatggaagaatacgtgaagtggagttgaagcgcgactatgcattcattgaattcagcgacccccatgatgctgatgatgcgcagtacaacctagatggcagggaagttgatggaagccgcattattgttgaatttgccaaaggggttcctcgtggttctggtggttcacgtgaatacatgggaagagggcctccaccaggaacaggccgctgttttaactgtggaattgatggtcactgggcaagagactgcaaggctggtgactggaagaacaaatgctaccgctgtggcgaaaggggccatatagaaagaaattgccagaacagcccaaggaatctcaggcgtgagagaagctattcacggtctccatccccacgccgtggacggggccgcagccggagctacagcagaagccgtagctatagccgatccaggtccccatctggatctcccaggggtggacgccgcgaacgtgacgagaggagatcaaggagcctgagct

SEQ ID NO: 454898 - DNA, 561 bp, Sorghum bicolor
cgtccggcaaaaccctaaccccgcggcggcggcggcgcggcggagatggcagacggcggaggaggagggcctcctgcggcggcggcggcgctcaaggaccaggggaatgagcagttcaaggcggggagctacctcaaggccgctgcgctctacacgcaggccatcaagctcgaccctgacaacgccaccctctacagcaaccgagctgcagcattcctgcagttggttaagcttagcaaagcacttgctgatgcagagacaacagtcaagttgaagccacaatgggagaagggtcatttcaggaaaggttgtgttttggaggcaatggagcgctatgaagaggcaatagctgcatttcagatagctttgcagcacaattcacaaaatgcagaagtctcaagaaaaatcaagaggctttctcagttggccagggaaaagaagcgagcccttgatgtagagaacatgcgttcaaatgttgacattgcaaagaatttagaatcactgaagactgagttggctgcaaagtatggagatgcagaacagggcagagtatcttttctt

SEQ ID NO: 454899 - DNA, 520 bp, Sorghum bicolor
  unsure (1)..(520): unsure at all n locations
ccgtccggngnagtactcaccaaggaggagagactcaccaaggaggagagactcaccaaaaaggagggattccccaaggaggagggataggtcaaaatcaaggtcaccttcaagaaaacatgatacctctagacatagaaaagaacatgatagatctcggtccaggtctccccactcgagggatcatcacaggcgatctccaagaaggcattcgccaaggcgcagatcacccccaactagtcatcgccatcgttcaccaagaagacattggtcaccacctgccaacaggaagactggattgggtaagcctggaaagaatctctttattgcaggatttagctatgccaccactgagcgagatttggagaagaaatttggcaagtttggacgtgtaacaagtgcacgtgttgttcgtgataaacgaactggagattcccgtggctttggattcttatccttggagaaggatgaggatgctgatgcagcaatccgtgcttgtgacgagactgagtggatggga

SEQ ID NO: 454900 - DNA, 593 bp, Sorghum bicolor
cgtccgcagatcgtgcacaggtaccattttgcttcccacttgaagagaatgtctgttatcgtccgtatccaggagaaattttacgctttcattaagggtgcaccggagaccatccaagagagattagttgatttacctgctgcatatgtggagacatataagaaatacacacgacaaggttctcgggtcttggctcttgcatacaaattgcttcctgagatgcctgttagtgaggctagaagtttggaacgggatcaagtagagagcgacctaacatttgctggttttgcagtcttcaactgtcctataaggagcgactctggtgctgtcttaaaagaactgggacaatcttcccatgacttggtcatgatcaccggagaccaagcattgactgcctgccatgttgctagccaagtacatatatcttccaaacctgttttgatcttgacacggataaagactggcggttttgagtgggtttcgccagatgaaactgatagagctccgtacagtgctgtggaggttgcagtgttatcagaatctcatgacctttgtattaatggggactggtttgaaatgctacaaagtactga

SEQ ID NO: 454901 - DNA, 501 bp, Sorghum bicolor
  unsure (1)..(501): unsure at all n locations
cgtccggagaaggttaggtgctaccataaggacttcatcatcgacgaagacaacaggtggttactgcaagggtggaaagggcgcatcatactggcgctctcaacgtggaagccggatcacaaatcttcttcctagctccttgtgcttacatgaccgcagagcactgtcaatggagacctgttcgtggatgcttgggctgattgttcctggactgcaacatatagctatgctatgctatttgaactacttactatatagtgatgatgcgatcaagggtccctgcaagttaggttatggccgttatggtttagctttggacaggaacagttagtgcattctttgatggagcagcaggcttaggtatattagttacgcggtagacctaggattgtttcatgcatggatcagttttatggaatcttgtattatatttgttccccattaaccagtgctgtcaaagttttgggtttgtttggttcaaaaaaaaaaaaaaaaaanaaa

SEQ ID NO: 454902 - DNA, 668 bp, Sorghum bicolor
cgtccgcggacgcgtgggcggacgcgtgggcgcgctcaggctcggtcccaaggatcggatcttccgcgcgtcggcggcgtccagcgacggaggggcagtcccaggctcggcggcggcgtcggcggctccctccaccttctctcaccagtcgcctcgcgtcctcgcctgcgtcctccgcgcaccggccgacgaccctgcgtacgcacctccctttcccctcccgccgctgctgttcccgtgggagcccggccagctgcccagggtggccgggccttggctccgccagtggtaatcgcctgtgatggattacttgaaatcttgctgggggccggcatcaccggccgggcgcccccgcagaggatcggatgccaccgggcgccaagacgggctcctgtggtacaaggacggcgggcaggtcgtagatggtgagttctccatggccgtggtccaggccaataacctgctggaggaccatagccaggttgaatccgggccgctgagcacatcggagcctggactgcaaggcaccttcgtcggggtctatgatgggcatggtggcccggagcgggcgcgtacatcaatgatcatctcttcaccacctgaggagattcgcatctgagcacaggggcatgtcagcagatgtgattccgaaggcattccgagcgact

SEQ ID NO: 454903 - DNA, 654 bp, Sorghum bicolor
cgtccgcccacgcgtccgcccacgcgtccgcccacgcgtccgcggacgcgtgggttttgaagtacaaatcatttggaacttttaacattcagagaggtctgtcacaactcaattttccaagttggcattcaaaattgatgatttgacgaaatactgattcctagggcaagaaattttgggataagattacatggcatctacctgaatacagcacaccaaaatggctcactagtcactacagtatctaatgacaagatccacgataaattgcgggcatctcatccaaaaggcaacctgattacaatgctttacatcactacaaatagaatgggcagcaatgtggctactaggtgaatcaaccagcatgattgggattttgaagcaaaactgtccgggcttgcaggcccggaggccgttccacctttgctgccactggcgccagtgcttccagcgaaaatgcatgaaccatggcttggatcagttgatgttacatttgcggtgccattgaagttgcatgtaccaccactagactgtgttctgtggtaataatcgttgaaagcataagaagaaacagctacaatatcatctgatgcatagcatggttgcccaggttgaattgcactgcagtttgcagaaccagggccacatgcccaa

SEQ ID NO: 454904 - DNA, 697 bp, Sorghum bicolor
  unsure (1)..(697): unsure at all n locations
cgtccgattccccagtcgccgcccgagtcaaaaagagggaagcttcttccaccacagtcccttctcctcgaggccgccctcccatcaacgactagacgctagtcaagcagcaccaaccctagtcaccccacaaccctaggcccctccctcctccacatccncttccccttggcttcccgagaggcgaggaggaagannaccatgattcctccngcggcggcggcggcggcggaggaggaggagcgcagatcaagggtatggcgacgcacggnggccgctacgtgctgtacaacgtgtacgggaaccctcttcgaggtctnctncaagtacgcncngnccatccgncccatcggccgcggcgcctacngcattgtctgcgcggctgtcactcacagacaggggaggggagtgcgatcaagaannggttgcatgcgttcgacaaccacatcgacgccaagcggacgctgagggagatcaagctgctgcgccacatggaccatgagaacatnctngccttanaggacgtaatacgccccccaactagagagaactntaatgacgtgtacattgntactgagttaatgatacagatctccatcagatcatacgctcaaatcagccattgactgatgatcactgncagtacttcttgtatcagttgctaagagggctaaaatatgtgcactcagcaaatata

SEQ ID NO: 454905 - DNA, 698 bp, Sorghum bicolor
  unsure (1)..(698): unsure at all n locations
cgtccgatcaaatgatcatggccagaatatattctgttcttgccaaatcgagggacaagcttgatctctatcaggagctgcttgcaaggctcaaggaaagccagcgctcccttggggaagctactgctgatgccgaacttcccaagagcgcttcggatagaataaaagcaatgggacaagttttatcaaaagcaagggatctattgtatgattgcaaggaaattaccgagcgtttgagagcaatgcttcagtcagcagatgagcaggtccggagcttgaagaagcagagcacctttcttagccagctggcagctaagacaatcccaaatggcatccattgtctttccatgcgcttaacaattgattattaccttctgtctccagagaaaagaaagttccccaatagtgagaatttggaaaatcctgatctttaccactatgctcttttctcggacaatgttttggcagcatcagttgtggtcaactcaaccatcatgaatgcaaaggagcctgaaaaacatgtatttcatcttgttaccgacaaactgaactttggggccatgaacatngtggtttttgctgaatccacctggggatgcaacaatccatgtggaaaatgttgatgacttcaaatggttaaactcttcttactgccctgttctgaggcagcttgagtctgcagccatgagagattacta

SEQ ID NO: 454906 - DNA, 649 bp, Sorghum bicolor
cgtccgctcaaaactgcagggaccaccactccagcgaaagcagggtcaggctcaggcgcaacgcaacaaaaacaacacaaggcgacggcgatgagctctgcggcggcgatgacgggggcggggaaggtggtgtgcgtcaccggcgcatcagggtacatcgcgtcctggatcgtcaggctgctcctcgaccgcggctacaccgtccgcgccaccgtgcgggacaccgctgacccaaagaaaacattgcacctgactgctctggatggagccaaggataggctgcacttatttaaagctagcctgctagaagagggctcttttgacgctgcagttcatggatgtgacaccgtattccatactgcctctcccttttatcacaatgtcaaggatcctaaggctgagttacttgacccagcagttaagggaacactcaatgttcttggttcatgcaagaaagcttctattacaaaagtggttataacatcctctatggctgctgtttcctacaacgagaagccaaggactcctgaggtcacagttgacgagacatggtttactgatccacaaatttgtgaaaagactcagcaatggtatgttttgtccaagacactcgcagagcaggctgtttggaagttttcaagggataatg

SEQ ID NO: 454907 - DNA, 413 bp, Sorghum bicolor
cgtccgcgacttcttcgatccgatcatcgcccgccgcatcgaagcgcgcggcggcggtggtgaaaagattgatgatgatttcttggacgtgttgcttcagcttcactcgatgggtcaactcagcctgcaaaccatcaagtcttttcttttggatctgtttgccgctggaacggacacgaacgcgatcacggtggagtggacgatggcggagctgctccggcacccggccgtgatggccaaggtccgggcggagctccgggaggcgctgggctcgaagcctcacccggacgagtcggacgtcggcaggctgccctatctccgcgccgtggtgatggagagcatgcggctccacccgccgagcccgatgctgatgccgcacctggccatggccggcggcgcggaggtgggcggct

SEQ ID NO: 454908 - DNA, 557 bp, Sorghum bicolor
cgtccggcaacgtccaaatccagaccgctgtagtctcgtagacatgaacggatccatggcaagcgcctgcgccacctccaggcccctcgcctcggcgccctctgcatgcccgtccaacaagaccaccgccgccagattccggcgacgccagcaccggcggcgtgctgagccacaaggacggcgccttcaactgcaacaacgacatggggttcctggggacggccggcaacgacccgctcttctactcgcaccacgccaacgtcgaccgcatgtggcacctctggtccacaaggctcggcggcgggcagggcatcacggacacggactggctcgacgccaccttcgtcttctacgacgacgtcaagagcccccggaaggtccggatcaagttccgcgacgtcctggacacgcgcgacctcggctacacctacgacgccgagtacgacagggacctgccgtggctgcggcccaagatcacgaagctggtgccgcacggcaaggagagcggcgcggcggcgaggtcgtcggcggcggcgccggtgttcccgctcgcgctg

SEQ ID NO: 454909 - DNA, 630 bp, Sorghum bicolor
  unsure (1)..(630): unsure at all n locations
cgtccgaagtcccccaaagccgctccccgttcaccaaaagctgctactcatcccacctttgccacttctgtaaagaagcccattggtgcaaagaaggttggagccaagactggagggcttggtgttcgaaagcttactacaaagccaaatgaaagcctgtatgagcagaaaccagaagagccaaaacctgctgtacctgccttggctgcttcaactacagcaaaaggtggtccatccttacattcacgttttgaatacgtggagaatgtgccatcagctgatttgagaactggcggatctggatctcgtgtgactggccatgtagccccaccaaaatcatcagacttctttcaagagtatgggatgggtaatgggttccaaaaaaaatctagcaatgcctcaaaaactcagattgaggaaactgatgaagcaaggaaaaagttctctaatgctaaggcaatttcgtcatctcagttttttggtactcaaaacagagaagagaaagaagctcaactatcccttcagaaatttgcgggttcttcatccatttcaagcgctgatctttntggtcgcaatgatgtggacaattctaacctcgacctaagtgctgccgatctcatcaacagaata

SEQ ID NO: 454910 - DNA, 672 bp, Sorghum bicolor
cgtccgtcttgctctgatattggcaagcatgggacttttagatgacattcctgacaggaagggaacccctgtagcagctggtcaggcgtatttcatttgcgatggatcaccatgcaatacttttgaatttatcatcaagcccctatttcaaagtttgggttattccgttcctcaagtgaggctggacacctctgttgcccttgccatttcaagaatgtttttattcatatctacattgttctacccatggcttgatagtaaatggatgcctgagcctttaattcttcctgctgaagtgtataaggttggtgttacacactacttttcgttcttgaaagctagagaggaactcggctatgtacctatggtgaggcctcacgaaggcttagctgcaacgatctcatactggcaggagcgtaagagaagggaactagatggcccgaccatatttacttggttggctgtaacaattggaatgctggctgtgttttctgccgcttgtcttccgccagtcggcccattgaaatgggtgcttgacatccatctgtttgtttttcgctcgatgcttgtgatccggctggtcttggtgatagcaattgcactgcattttggtgaagccgtgtatgcctggttcttggcgaaaaaggttgatccaaggaatgctactggatg

SEQ ID NO: 454911 - DNA, 421 bp, Sorghum bicolor
cgtccggcctccccttcgctcgccatggccatggcgacctccaccttctccccgcgccccgccaccctcaacaagcccctgcgacctggcgccaagcccgccagcctcctacccttcccgtgccgccgtgccggcagactcgtctgcgccaccgctgccggggaggcgccgcccgtcgaggtcgagcagcgggacgaggcggagccggcccccgccgcggcctccaacggggccgccgtcaaggccgaggcgcccgccccaaaggccgtgcaggctgaggccccgccggcgcccgcgccggtcccggccttccgggacgccaggtgggtcaacggcacctgcgaccttacccagttcgacaagggcggcgtcgtcgactgggactccgtcatcgacgcctgggccagaagaaggaaatggc

SEQ ID NO: 454912 - DNA, 604 bp, Sorghum bicolor
cgtccgcacagcttcgtcaaagacacgcggaaaaagagagaagagaaagggggaggcgattcgacctaggcccggttccgatttgcgcgtccagatttaccagcaatggcatcatcttcggacccatggatgaaggagtacaatgaagcatccagacttgctgatgacatcagttccatgattgccgatagagggtctcttccacaatcaggcccagaaattatgcggcatacttcagccatccggagaaaaataactattcttgggactagactggatagcttggagtcattgcttggtagaattcctccaaagtcaatcactgacaaggagatgcataagcgccaagacatgctttctagtttgaagtctaaagcaaagcagatggcaacaagtttcaacatgtcaaactttgctaacagggaggatctgcttggtcagagtaaaaaggcagatgacatgagcagagttgccgggttagataaccaaggaattgttggccttcagaggcaaattatgaaagagcaagatgagggtcttgagaagctggaagagacagtgctgagcacaaagcatattgcgttagcagtcaatgaagaactta

SEQ ID NO: 454913 - DNA, 559 bp, Sorghum bicolor
cgtccgcaaaggagcagtctcctggacctattgcacgttcacctgtgggagggcagaactatgctatgagcagggttcataacttcctaaatggcttcaaccagggttacaacccgaacccccttggtggttatgggatgagggtggatggaaggtatggtctccttacaggtgcacggaatgggttctcttcgtttggtccaggttatggaatgggcatgaatgttgaaggtggaatgagtggatactttggtgcaagttctggttttgtcaatagttccaatgggcggcaaataggttcttacttcaatggtagttcaaacagattaggtagtccaattgggtatgttggccttaatgatgattcaggatcaatactaagttcaatgtctagaaatgtctggggtaatggaaatctgaactacacaggcaaccctacaaacacgaattcttttgctccacctggaagtggtgggggcattcctggtgatgaaattagttggggaagccttacttctgctcatgggatgggcaacatttcaagccttggatcgggaaa

SEQ ID NO: 454914 - DNA, 605 bp, Sorghum bicolor
cgtccgcgagctcttccgcatcggcggcaacgcgcccgacaccaactacctctttatgggcgactacgtcgaccgtggctactactcagtggagacggtgtcgttgttagtggctttaaaagtacgttatagagacagaatcacaatattgagaggaaatcatgagagcagacaaataactcaagtgtatggcttctatgatgaatgcttgcggaaatatggaaatgcaaatgtgtggaagtactttacagacttgtttgattatttgcctctcacagctcttatagaaaaccagatcttctgcctacatggtggtctgtctccatcactggatacattggataatatccgtgctcttgatcgcatacaagaggttccccatgaaggacctatgtgtgatcttttgtggtctgacccggatgaccgatgtgggtggggaatttcaccaaggggtgctggatacacatttggccaagatattgcacaacaattcaaccatacaaatgggctaagtcttatttcaagggctcatcaacttgtaatggaagggttcaattggtgccaggataagaacgttgtgactgtgttcagcgcgcctaactact

SEQ ID NO: 454915 - DNA, 494 bp, Sorghum bicolor
gtaccgatccgcagtgtcgagcccacgcgtacggtgctgaagctaaactcctgatccgtcttccaagctctggtatcatccctgcacactgattcaagatgtatctccagtactacatcaacgagaagggggacaaggtctacaccaccaagaaggagtcgcctcttggggtgccgacacagtctgctcacccagctcgcttctcaccagatgacaagtactctcgccagcggtacctattgaagaagagatttgcacttttgccaactcagcagccagcaccaaagtactgaagctccaactgtccaaccatgcatgttcagtttgtgtcacggtttgttggttggaatgtagaaagttattctgagaacaaaaatcaaacattgctaggcactactatggcatctctccagcacattcaagctctatatgtaatgctatgtgattgacatgttgtgtccttaatatgtacttgtgcgtggaccaatacgcta

SEQ ID NO: 454916 - DNA, 522 bp, Sorghum bicolor
  unsure (1)..(522): unsure at all n locations
cgtccgggtggatccggtcatggtgtccaccagtggtgatactctttcaggaccatctactctcgctacatatagggatgaactattttctgtggctgatatagtcactcctaacgtgaaagaagcatctaagttacttggggatgtatcattgcatacaatttctgacatgcgcaatgcagctgaatccatttacaaacttggtccaaaatatgtgcttgtgaaaggcggggatatgccagattcatcagatgcaattgatgtattatttgatggtaaggagttcactgagcttcgtggtccgcgtataaagacccgtaacacacatggaaccggttgcacattagcttcatgtattgctgctgaattagcaaaaggtgcaacaatgctgcatgctgttcaggttgctaagaaatttgtggaatctgctctttatcacagcaaagatcttggatgganatggcctcangccctttgacacctnttgagctattctcgtttacagatggacatggaagtcat

SEQ ID NO: 454917 - DNA, 366 bp, Sorghum bicolor
  unsure (1)..(366): unsure at all n locations
cgtccgcgtcctgctcggctttctggcatcatcactcccctgctcccgctcagggaattcattcattcattcaagtggaggcaatcagattctatgatggagttcaaaactggcatttttactgtggccatactagccattgtgctgtcctcaccagcagttgctcagaagagcccacctgctccatcagctacaatccttccaccagcgccagcacccgcacctgcgccacgccatgttgacctcgctgatctcctcagtgtggccggaccgttccacaccttcctggactacctgcagaagaccaatgtcatcgagaccttccagaaccaggcgaacgacacanagaacggcatcaccatcttt

SEQ ID NO: 454918 - DNA, 424 bp, Sorghum bicolor
cgtccgcccaccacgcccgagtcccgactgcgctagattccacccgaagccggcgaccatcatacccgtgcgcgctagctgggctggatctctcacctccgccgccggcaagcgagcgtggtctagcgctgcagtggtttcagcgaccttagttcggcccacgtcggctgttaacatctgcgggtgcatctgcggtcagccttgtgcgaagctgccggcgatgtcgtctctcaactcgctcttcaaccgatccaccttcggcacaaaatgtaaaacatgtttgaatctcgtcatttcgaggatcaagctgctgcgcaacaggagggacttacaactaataaatatgcgcaaagaaatggttcaatatcttcagactggccaggaatctattgcaaggattcgagtggagcacattattcgggag

SEQ ID NO: 454919 - DNA, 460 bp, Sorghum bicolor
  unsure (1)..(460): unsure at all n locations
cgtccgcagcagcagctcgagctagcttagctactacgtgtgtgcaatcagctcgatcgccatggctgcaagagcggcgctcatcctggctgtcagcctggtccttgctgcagtggcgagcgcgacctactgcccgccgccaccggccccaaagccgccgacgcccacgcccagcgggcaccactgccccagggactctctgaagctgggcgtgtgcgccaacgtgctgggcctggtgaaggccaagatcggctcgccgccgtaccagccgtgctgctcgctgctggatgggctcgtcgacctggaggccgccgtctgcctctgcaccgctatcaaggccaacatcctcggcatcaacctgaacctncccatcgacctcagcctcatcctcaacaactgtggcaagaactgccccaacgatttcctctgcgcatagatgatcaatngatcgtcgtccatc

SEQ ID NO: 454920 - DNA, 505 bp, Sorghum bicolor
  unsure (1)..(505): unsure at all n locations
cgtccggttcgaggtgatatagtgcattttctggggctctatgacttcaaaagcaagacacatcaagatgcgtgctgccctgagggtatgtgcagagctgcagtgtttgcgctgcatgtaaaggaagagctggcctcatggcctgagcagagcacccggcagaggacctggctcacggttcctgaagctgcatcaagatgccggtaccagtggatgcaagaggccttgctcacaggcttctccgactggcacgacaagtggagcagaggcggcggcggcacaaactgtgacccggcctaactgctgaacccatctgcagtcgtccattttttttcatctcctcttcccctaggctccaaccttgcataatgcaataacagtgtacttctcttgatatgctgngttgtcattgaccctngatgtcaaaatgtcaagatggttatctagttatagtgggacgaggtatatctcatcaagatgagaattctcacaaccttttaagtgt

SEQ ID NO: 454921 - DNA, 365 bp, Sorghum bicolor
  unsure (1)..(365): unsure at all n locations
cgtccgccggagcgtatcatgaactccgcgccgcgggaggtggtggtggtggtgttggagcagcagcagcgggccggggagggccgagaaatgcccggtggcgccttcctcctcaacagcggcggaggcatggctgactccggcggcggcctcaccgtccccgtcgttgtgacctgcctcatggcggcctccggcggcctcatctttggctacgacattggcatctcaggaggtgtgtcggagatggaggctttcctgaagaagttcttcccgggctagctcaagagcacggcgcgcggcggcaacaaggacgtgtactgtatttactacaaccaggcgcttacggtcttcatgttgntgctgta

SEQ ID NO: 454922 - DNA, 432 bp, Sorghum bicolor
cgtccggtggaaacaacatgggagacagccattggcaagataacatctatactggaggaacagttctctcgcatgcgtacagccagccacttccttctcataaaagattatgtcactcttctaggcgcagctgtgaacaagtacggttatcgaatcacacagttgattgaagttcttgagaaaactagggacaaataccaccagttgcttcttcttgaatgtcggaagcaggtagacgacatccttactaatgactcatatgagcagatggttataaagaaggaatatgagtataacatgaatgtgacagcatttcatctggaacatgatgatgcaatccctggatttcccatatgtgacatcattctcctcttctgttccagatgtttgtcgcattgtccggtccttcatcgaggattctgttagctactt

SEQ ID NO: 454923 - DNA, 377 bp, Sorghum bicolor
cgtccgccgcttcttctcggcgtacatggactcccttgaggagagcttcccgaaggcgagcaacgagaggctggcgctggagagggcggcggggcgtgccattgtggacctggtgtcctgcccggcgtcggagtccgtcgagaggcgggagacgggggcgtcgtgggcgcggcgcatgcggtcagccggcttctcccccgtggcgttcagcgacgacgtggccgacgacatgcggtcgttgctgcgccggtatcgggagggatggaccttgcgagagccaggtgcagacgacggcgtggcggcccgggtgttcctggcatggaaggagcagcccggtggtgtggacgagtgcgtggaggccatgatcgatcttcatg

SEQ ID NO: 454924 - DNA, 451 bp, Sorghum bicolor
cgtccgggcttccctagaactgtcactcaagcacagaagcttgatgagatgttggcaaagcaaggcgctaatgttgacaaggtcttgaactttgcaattgatgatgctatattagaagaacggattactggtcgttggatccacccagccagtggtagaacttaccatacaaaatttgcacctccaaaggttctgggagttgatgatgtaactggggagccattgattcaaaggagagatgacacagctgaggtcttgaagtcaaggcttgaagccttccacagacaaactgaacctgtgattgactattactccaagaaaggcttagtggtgaacctgcctgcagagaaaccaccaaaggaagtgactgctgaggtgcagaaagcactttcgtgatgaagtgtccactcttcaggctaagcatgacatctaccaaagtccctttggtctc

SEQ ID NO: 454925 - DNA, 458 bp, Sorghum bicolor
  unsure (1)..(458): unsure at all n locations
cgtccggccagcctttgctttgcttccagctagcagccggccagccagcagagactagctcttctcacacctgctgtgcgttgcgtgtgctcgcctttagcgaccggcccctttcactttgagtagcgagcgacaatgcagtacgcggcggcggagcaggcgtggtacatgccggcggcgacgacgatggcggagagcgcggtggcgcgcgtggagcggctggcgtcggagagcgcggtggtggtgttcagcgtgagcagctgctgcatgtgccacgccgtgaagcggctcttctgcggcatgggcgtgcacccgacggtgcacgagctggacctggacccgcggngccgcgagctggagcgcgccctcgcccgccttctcggctacgggcccgccggcgcgcccgtcgtccccgtcgtcttcatcggcgggaagctgtcggcgccatgacaggtcat

SEQ ID NO: 454926 - DNA, 469 bp, Sorghum bicolor
  unsure (1)..(469): unsure at all n locations
cgtccgcatggatcttgccatccgggccagcctcaagggttggaagtttgtctaccttggcgatgttcaggtgaaaagtgagctgccgagtaccttcaaggcttttcggttccagcagcacaggtggtcgtgcggcccggcaaacttgttcaggaaaatgctcatggagattgtgacaaataagaaagtgacgatctggaagaagatccatgtcatctacaacttcgacgagattgtggaaattggttatcttaatgggctctttgtgcttgcgcgttcaattggcctgatcgggcacaccttcgaccagaagaggcttaagcagccactctaccgtcacccatgnggaggatgtcctgtacaccaagtgagataggagccattctttgcaaggcataaagtattgtgtcgcctagagcttccagctgtctgtacacttcataaatcgagcagtccaaaaaaaggatgt

SEQ ID NO: 454927 - DNA, 504 bp, Sorghum bicolor
  unsure (1)..(504): unsure at all n locations
cgtccgcgatgcggacgacgccgcgggtgcgcgccagcgcaaggactccgagactgcatggaaggcgcagaaagcttgggaagtcgcacaggccccgttcaagaacctgatgatgatgggattcatgatgtggatggcagggagcaccgtccacctcttcagcatcggaattaccttctctgctctgtggcaacccctcaacgccctccgttctgttgggaaagtttttgaaccatttaaggacccaagggtggatactattgctcctaagttgctcttcattgccctcaatttggctgccatgggtctgggtgtatggaagcttaatacattgggccttcttccaacaaatccatcagattgggtatcttcactggctcctgctcgggaggttgaatatgctggagggagggtccccttaatttaatgaccattccactttggaactcattntactagttgaatattacatcagtactgagtgaaatttacccctgcactctg

SEQ ID NO: 454928 - DNA, 448 bp, Sorghum bicolor
cgtccgaccagagaccagacccccgatccccttccgtaatctgcaagtccctcgtcgccggtggcgtcgcgggaggagtgtggacattggcctcagcgacggcagctacgcgaggggtgccgtgccgagcggcgcatccactgggagaagcgcttggcattggacgcgagccacgcacacatttagcatttttgagtagtatattgttcttcctattgtcatctgtcatcactgccttttgttcaggagaaatggtctttgctcattgatgtgcttcattttggcttggaaattaaacaaattactattgtcgtggaatctggatgactattagtgtccctgcatgctctaaattacttcatttctgatttgcacaggtcacgtactgctgttgctccactccaacgattgaaaatcttgcttcaggtcacgtgctgctgtgctcgac

SEQ ID NO: 454929 - DNA, 439 bp, Sorghum bicolor
cgtccgcccacgcgtccggacccacgcgtccgctttcgatggtaggataggggcctaccatggtggtgacgagaggcggaggcttgagggcgaggcaggcggctactactgacccagatctatgcatggttggtagttcaatcctcatcagaatgttaggatgttagtgtttacttaaaatcttcagatctatgcgcggttggtagttcccaatcttcatcagaatgtgtggttggtatggttatctatcttcagtagtagtagtagtagagatgcccgagtggtttggtcgaattggttggccagatcttactggtctatggagatggaaaccaaactggtgatggtgcatttcgatctgtttctcaatatgtgaaatgttatcggaatcgatggttgatttgtctgccttttagggtgaaaatattaaaattaaata

SEQ ID NO: 454930 - DNA, 456 bp, Sorghum bicolor
  unsure (1)..(456): unsure at all n locations
cgtccggaagcgggtgctggcgcgccgtaccgcggcaccgcgcgccggcgagggcaaggacttcctgccgttggaaggaggccctgggaagaagctgcggaaggtgcaggagcctgaagagcctgagaacaccgccacagtcgtctacatagggcatatcccccatggcttctacgaggacgagatgcaagggttctttaagcagtttggggatataaagaggcttaggattgcccggaaccgcaagacaggaaagtccaagcattatggattcattgagtttgagagccctgttgtggcaaagattgtagctgatgagatgaataactatctcttgtttgagcacaccttgcaagtttcacttgttccgccggagaaagttcatcctaaattatggaaaggngtgcgacggggatttatacctattgatcgagttgcaattgaacggaagagaca

SEQ ID NO: 454931 - DNA, 435 bp, Sorghum bicolor
cgtccgaggagtgaatgctcagctcaagcaggaagatgagtagatccgcgactatttttcaggttcttttggttttcacaaccattgttgctcagacccaatgggctagtgtatggggcatgtactgcgaggacttgacagcaagtgtagagaggccacacagtgcctcaataacggattttggtgctgttggagatggtgcgactcttaacacgaaagcatttcagaatgcactcttctacctcaattcatttgcgaagaagggcggagcgcagctgtttgtgcctgctggaaggtggctgaccgggagttttagtctaatcagccatctcacactctcactggacaaggacgcagtaattcttggatcaacagactcctctgactggccagttattgatgctcttccatcctattgggcgtggtaagagaact

SEQ ID NO: 454932 - DNA, 400 bp, Sorghum bicolor
cgtccgatttcactcaggaattgaagttcatggtgttgaatatgcattcggagcacatgacttccccaccagtggggtctttgaggtagaacctcgccaatgccctggttttaggttcagaaaatcaatatttcttggtacaacatgcttggatccaatccaagttaggcagttcatggagcttcagtcagtaaactacaatggagatacttaccatcttatcacaaagaactgtaaccacttctgcaaggatatgtgctacaagttgaccggtaacaaaattcccaaatgggtgaatcggctcgccagaataggtgccatttgcaactgccttctcccagagtcgcttaagatctctccagttggccatgatccaaatagtcaatctgaagactcggag

SEQ ID NO: 454933 - DNA, 528 bp, Sorghum bicolor
cgtccggagccgacgcaacagccgtaccatctatgtaggcaatctccctggggacatccgtgagagggaggttgaggatctcttctacaagtatggtcgtatcttggatatcgacttgaaaatacctccaagacctcctggatacgctttcgttgagtttgaggatccacgtgatgctgatgatgcaatttatggccgtgatgggtataactttgatggctacaggttgcgcgttgaattagctcatggtggtagaggtcagtcttattcttatgatcgttcaagcagctatagcagtgcacgccgtggaggtgtttctaggcgctctgatttccgtgttatggtcactggtttaccttcatctgcatcgtggcaagatctgaaggaccacatgcggcgcgccggcgatgtctgtttctctgatgtataccgtgaggctggagaaactattggaattgtggactatacaaattatgacgatatgaaatacgcgattaagaagcttgatgacttacagttcaggaatgc

SEQ ID NO: 454934 - DNA, 474 bp, Sorghum bicolor
  unsure (1)..(474): unsure at all n locations
cgtccgcatctttcttcttgaattgaaggccttggtggagatgcatcttaaacatcctgtgaggaatgctgtgcttaccataccagttgcattcagtcgatttcagcaaaccaggattgagagagcctgtgctatggctgggctgcatgtgttgaggttgatgccggaaccaactgctgtggcacttctgtatgctcagcagcagcagcagcttgtgaatgacaatatgggaagcggcattgagaaaattgctctgatatttaacatgggtgctgggtactgtgatgcagccgtggctgccacagctgnaggtgtttctcagataagagcattatcaggatgcacagcttggtgggaggatatacttcagaacataatgcgccatgttgtcccaattttgaccaattatatgctggccagacaatggatagaatccagtcgatgagttactgcgaatggaactcaagatgcaat

SEQ ID NO: 454935 - DNA, 453 bp, Sorghum bicolor
cgtccgccgaggttgatgagaaggatgtgaacctggatgctgccttcagtgtgcatgctgggattgcccacaccaggtgggccacgcacggtgtgcctgctccaaggaacagccacccccaatcgtccggtgccggtgatgagttcttggttgtccacaacggcattatcaccaactatgaggtgctgaaagagacactaactaggcatgggttcacctttgagtctgatacagacacagaagtcattcctaagctagcaaagttcgttttcgataaatctcatgatgaagaaggtgatgtaacgtttagccaagttgttatagaagtcatgaggcagcttgaaggagcctacgcacttatctttaaaagtccacactatcccaatgaattgattgcatgcaaacgaggcagccaactgatacttggtgtaatgaaatgagtggcaacagaat

SEQ ID NO: 454936 - DNA, 387 bp, Sorghum bicolor
cgtccgatgggcatcttcacagaattgggagttctatatgctagataccgccctgagaagcttatggagcacatcaaacttttctccacccgtcttaatattcctaagcttattcgagcttgtgatgaacagcagcactggaaagaacttacctacctgtacatacagtatgatgaatttgacaatgctgccaccaccattatgaaccactctccagatgcatgggatcatatgcagttcaaggatgtttgcgttaaagttgcaaatgttgagctatattacaaggcagttcacttctatttgcaagagcatcctgatctcattaatgatatgctaaatgtgcttgcacttcggttagatcataccagagttgtagacataatgcgc

SEQ ID NO: 454937 - DNA, 405 bp, Sorghum bicolor
cgtccgcgccaaaacctccgggtgccttcccagagacccagccatggcgatctcccagatctcacgcggaaccctgtccatcctcctcctcctggccgccgccttcgctgctgccccggctgcgctcgcggacggcgacgacgtggtggccctcaccgagtccacgttcgagaaggaggtcggacaggaccgcggcgccctcgtcgagttctacgccccctggtgtggtcactgcaagaagcttgctcctgagtatgaaaggctgggtgcaagttttaagaaagctaaatctgtcttgattgctaagattgattgtgatgagcacaagagtttgtgcagtaagtatggagtttccgggtatccaacaatccaatggttcccaaaaggatccctggagcccaaaaa

SEQ ID NO: 454938 - DNA, 501 bp, Sorghum bicolor
cgtccgcccccccaaacaaggacccagcgcccttttgcagtcgccgcaatggagagcaccttcatcatgatcaagcctgacggcgtccagaggggcctcattggtgagatcatcagccgtttcgagaagaagggcttctacctcaaggccttgaagcttgtgaacgtggagaggtcgttcgccgagaagcactacgctgatctgtcctccaagcccttcttccagggcctcgtggactacatcatctctggccctgtggtggccatggtctgggagggcaagagcgtcgtcacaactggccgcaagatcatcggcgccacgaaccccctggcttctgagcccggcaccatccgtggtgactttgctgtcgacattggcaggaatgtcattcatggaagcgacagcattgagagtgctaacaaggagattgccctgtggttcccgaggccttgctgactgcagagcagccgcacccctgatctaccagaagtaatgggggat

SEQ ID NO: 454939 - DNA, 428 bp, Sorghum bicolor
cgtccgcactgaagcagcttcgattcctgtaccgaaactaaagaatgtgcataggcttcgaacagaacactatgtgtatgagcttccagatgcacatccacttttacaacagctaggacttgaccaacgggaacctgatgatcctaccccgtacttattggccatatggacaccagatggaataaaggaaataaccaagacaccaaaaccatgctgtgaccctcaaatggaaggcgatttatgcaataatgaaatgtgcaacaattgtactgtagagaaagaaaaccaatctagatatgttagaggcacaattctggttccttgtcgaacagctatgaggggtagtttcccacttaatggcacttactttcaagtcaatgaggtatttgctgaccacagatctagccacaacccaatccatgtgcaaa

SEQ ID NO: 454940 - DNA, 490 bp, Sorghum bicolor
cgtccgacccacgcgtccgcccacgcgtccgatctgatttcttcatcgagctggttggcaacattgcaaagctaaatcatccaaacctctcagagctagatggctactgctcggagcatggacagtgcttgctggcatatgaattctacaagaatggatctctttatgacctccttcacctgtcagatgggtacagcaaaccattatcttggaataatcgtgtaaagattgctctaagatcagcgagggcattagagtatctacatgaaacttgttcgccgcctatcatccacaagaacttcaaatcatctaacatactgttggatgatgatcttaacccccatatttcagattgcgggtttgcagacctaattcccaaccaggaactccaggaatcagatgacaacttgggatatagagctccttgggtgaccatgtcttggcagtattctcaaaagaacgagtttaccggtttggtgtgcatgcttga

SEQ ID NO: 454941 - DNA, 475 bp, Sorghum bicolor
cgtccgctgtccgatgtggtcttgtatatggtcattccactccatactcgttgagttgtggcatctgtgttactgaatagtgcctgattcttgttcaaaaaaaagaaagaaaagtgcctgatgcatattgttggtgctatctctagggcaaggtgacaatcactgccaagtctggagtgaagttggagattccagatggagctgtacttgagaacaaggatgtcaatggccctgaggatctttaagcgatgcttggcgtcaccagtttttcccaaggacatgtcacaggagctggcaaccctaatcacccccactgagctctatcttttgtaattttcttgtgcattccgcttccgttgtgagggttctgtgagcccgctagagaataattgtgatctttggtgcgtctgtacttctgtttttggtgcaccaagcgacgtatattttgctgaaaaaaaaaaaaaaatattcctaa

SEQ ID NO: 454942 - DNA, 497 bp, Sorghum bicolor
cgtccgcgcgaggatcctccgtgagatcaaacttctgaggctcctaaggcaccctgatattgttgagatcaagcacattatgttacctccatcgagaaaggacttcaaggatatttatgttgtttttgagcttatggagtccgatctccaccaagttataaaggccaacgatgacttgaccaaggagcattaccagttctttctctaccagttacttcgggccctcaaatacatccatactgctaatgtttatcaccgtgacctgaagcccaagaatattttagcaaactctaactgcaaattgaaaatatgtgactttggactagcccgggtcgcattcaatgataccccaacaacagtcttctggacggattatgttgcaacaaggtggtacagagctccagagctctgtggatccttcttctcaagtatacaccagctattgacatttggagcattggatgcatatttgctgaggtggtgacagggaaaccctt

SEQ ID NO: 454943 - DNA, 298 bp, Sorghum bicolor
cgtccgccagtaattgctgctctaaaggagaagggagtggcaatcattggggctgcaggttattgctggggagcaaaggtcgttgtcgagctggcaaaagttcacgagatccaggcagctgtattgttacacccgtctttacttactgttgatgacattaaagagatcaaatgccccatttctatacttggagctgaaattgcaaagcatcaccccagaagtgtgaggagttgagagatctgcagcaactctggatagagactcgtcaaatttctggcgaccatggtggctggagaac

SEQ ID NO: 454944 - DNA, 171 bp, Sorghum bicolor
acgccacgcgtgcgtcatgaattattgaatctacaaaggagccaggccttaccttcatggttgcataattagatggcattcttgggctaggcgtgcaggaaatatctgttggcaatgcgactccactatggtataacatggtaaaacaaggtctcatcatcgaccctgttt

SEQ ID NO: 454945 - DNA, 281 bp, Sorghum bicolor
cgtccgcgaacacgcaaatccctagcttattaagagctctcgctgtcgttagctactgcctactgctggtagcgagagaaatcagcacaagggtttgctgaggaggaatcgtcgatttggagaggaaagcagcctgctgcgtgggcgtgactgatcgatcgagagagatcagaccaccatgggccgcgggaaggtggtgctgcagcggatcgagaacaagatcagccggcaggtgaccttcgccaagcgccggaacggcctgctcaagaaggcctacgagc

SEQ ID NO: 454946 - DNA, 178 bp, Sorghum bicolor
  unsure (1)..(178): unsure at all n locations
gctgacattnntaaccattggttngctatgctacaacaagttaaaaagagtggagcacgggttaatttcaagagagagcatgataagaaaggttgctgcttgggcctgacctctcttattgcgcttccagctgataagattccagcagaaagcttagatcggatcttcaaagcaacac

SEQ ID NO: 454947 - DNA, 415 bp, Sorghum bicolor
gacccacgcgtccgatcatgatgctgcccaccggagcaaagcgaatgggcgacgtagagctggccatccgcttctccacgtgcgggtcgatgctggacatgctgcacgcgtacggccgaccggcgctcccggcgatgcaccaccagcggcccatcccggcggtgaaccgcgaggcgctgcggctggcggcggcgcgcatcaccgcggcgcacctggcgcggtcggcggagccgccgctgcggcgggaggtggcgacgtggatgctggacgccgcggagccgcgcgggttcagcatgcgcaagctgcgcgccaactggaaccgcgccgttgccgcgctctcctgggtcgccgacgcggcgcgctgggtgaggacacccggtcgtggcggaacccgacggcgaccgcgatggcgcac

SEQ ID NO: 454948 - DNA, 242 bp, Sorghum bicolor
cgtcggagatggagttaccgagccgaagcaacatgaacgacctgttcgagtaccagcagtaccaggacgccacgcgcaggagggcgagtcagacaaaggagaactcggactgatgctcctatgtgcggctggtcagataaatatattgctgcggctataaatattgcgtctaggggaaataaactaggggtgagtataagctaaaggcggctgtcgtggaaccagatgatgatccggtgtgt

SEQ ID NO: 454949 - DNA, 380 bp, Sorghum bicolor
cgtccgcagagatgagatcaaaggtggcagacaattggaggcgttctctattcagctaattgttcttgcaacctggaagcaagcaattcatttatgcaatacctttgtagcttcacctgcaagggagagtccctcacaggatatccctttgcttgcgacctcgaagctagctgatgatgcctgcatgcagatagagaaacagtttctctctgaagttgaatatgccgaagaactagccagcactgtgggccagatagctgatggtacagagataccagatgcaattgaaataatatttcaatcggctttacttataggaagggcgaggcggtgtgatgagatgtttgggaaagcagcggatgccatgactgggtatatga

SEQ ID NO: 454950 - DNA, 454 bp, Sorghum bicolor
cgtccgagagtattgatgtatcgagatgtaaccatgtgtcttctctgggcttagcttcactcatagatgatcaaagatttctccgaaaaataaatgttggacacagtttgcatgagatagagacctgtcttctgagcaaattatcaacaataggagaaactttaactgttttaagactcgatggccttgaaatctttgcctcaaatcttcaggcaattggttctacctgcaagaatttggttgagattgggcttagcaaatgcaatggcattacagatgatggtatcgtttcactagttgctcattgctgtgacttaaggactattcgcgtgacatgctgtcatcttcttacaaatgatgcccttgctgcaatcgccgaggattgtagaaagtatgaatgccttcgactggaatccttgcccttttatatgtgagaagggactagaacgaatcg

SEQ ID NO: 454951 - DNA, 379 bp, Sorghum bicolor
cgtccggcagtgatgtcatttctttccctcgtcttaccacatcaagcaatctacttcaattctattcgagaaatctatgatgcttgggtcatctacaatttcttttcactttgcttggcatgggttggaggtcctggtactgtggtggtaagtttgaatgggcaatctttgaaaccctcatggttcctgatgacttgctgtttaccagctattcctctagatgggcgttttatacggagatgtaaacaaggctgtctgcagtttgtgatcctaaaaccaatcttggttgttatcaccttcatactttacgcaaaaggaaaatacgaagatggaaactttagtgtcaaccagtcctatctatacattactatcatctata

SEQ ID NO: 454952 - DNA, 455 bp, Sorghum bicolor
  unsure (1)..(455): unsure at all n locations
cgtccggaacctcatccgacaataagttcacttctattgctcttagcaacttccttgctggagctgctgccggatgtactaccctggtcctcatatatccactcgacattgctcacactcgtcttgcagctgatattggacgtacagacacncgccagttcagaggcattccccacttcatccaaaccggggtccagaaaaaccggattagaggcatttacaggggattaccaacatcacttcatgggatgggcggtcaccggggcctggactttggcggcttcgacactggcaaagatgtcctggtgcctctggagacccccctgtggcagcgcttggttgcaacgcaagccgtgactttcatggcagggcttatatcgtacccactggacacggtgcggcgaaggatgatgatgcagtcgggggatggagggcagatgtacagancacactcg

SEQ ID NO: 454953 - DNA, 455 bp, Sorghum bicolor
cgtccggaccccgtgacctcggagccggagggtggaggctttgcctaaaccctcgtccaccgtcttcgtcgccggccccctttagcctcacccggtcaccccaatccggccatggtgaccgcggatccggacgggagcggaggcgcgccggacgtctccgagcttttctgccactacaactccctctactttcgcgattccctcggctcctgcgccgtctcatgggccgaggacccactacccaattctgatgtaagcatatgcgactattaccctggaggcggtggctgtataatacttctttcgaaatccttatgcggatctcataatggatctgatctgaagaatgctttgcttcatgagatgattcatggcctatattgcatcaaatacaacaacagtaaccatagtgatcatggtgcaaaatttcagaaactggtgaatacgatcaaatt

SEQ ID NO: 454954 - DNA, 445 bp, Sorghum bicolor
cgtccgcccacgcgtccgattggaattgaagtttggcaggtaaaagctggttcagttttcgacaacattctgatttgtgatgaccctgagtatgcaagaaatgttgttgaggaaacttggggtgctaatagggaggctgaaaaagaggcttttgaagaagctgaaaaggagaggaaagctagggaggatagggaaggtcaaaaggcaaaggatgatggtgggcgccgaaggcctcgtaaaaaacactacagagatcactgggatgactaccatgatgagctatgaagtccccaaagtattgcattcctcaaagcataaagctggaagttgctttggacattgtggatacttttcaataataattgattcacgaggcccgaacaacccctgagtggtttcttgctatgtgccaaaaaaaatattcaactatcaggattggagatgt

SEQ ID NO: 454955 - DNA, 349 bp, Sorghum bicolor
  unsure (1)..(349): unsure at all n locations
cgtccgccttccttttccggctccccgcaccgcgagatctccgtcccgatcccacgaccccggcggcggcgatgggcggcaaggacctgacggaggaccagatcgcctcgatgcgggaggcgttctcgctgttcgacacggacggngacggcaagatcgcgccgtcggagctgggcgttctgatgcgctccctgngcgggaacccacgcaggcgcagctccggacatcgcgcgcagagagctacgggccttcacttccggcttctgagtatgccccactaagcgagctcgacgcgtccaccctcggtctacaagacgtcgacgtatgcactcgatntactcatgaagta

SEQ ID NO: 454956 - DNA, 469 bp, Sorghum bicolor
  unsure (1)..(469): unsure at all n locations
cgtccgaaggcataaagcaaccgtggctgaatttctctccaacaattatgattggttctttgaagaattcaactctaggttgctgtcatcaaccaactatattacaaaaaggcaagctatcaagttgttgggagatatgctgctggatagatcaaatgctgcagtcatgatgcgctatgttagttccaaagacaacctgatgattcttatgaatctcttaagggattcgagtaaaaatattcaaattgaggcatttcacgtgttcaagctatttgctgcgaataaaaacaaaccgcctgaggtcgtgaacatactagtcaccaatagaagcaaactacttcggtttttgctggattcaagattgacaaagaggacgaacagtttgaagcagacaaggagcaggtcataaaggaaatatcgngccctttgagtatgtttgatgttgaattagtcattatggagatttttc

SEQ ID NO: 454957 - DNA, 404 bp, Sorghum bicolor
cgtccggacccacgcgtccgctgcggtctgcctgtctcgccccctctcgctctcggccgccgccgccgccgccctaagccaggtgctgaggctttagttggtctcttcgccggcgacgagcacccaccagggttagctaaccaagagaaggagagtgataggaggaagaaagagtaacgggaacaatggcggcagactctggcgctcgcaggcagccaaccttcaccaaggtcgatcagctgcgccctggaacccacggccacaacctcatcgtcaaggttgttgactccaagatggtcgtccagagaggccgcgacggagggccccagggaaggcagatgaggattgccgagtgcttggttggcgatgaaaccggcatcattgtcttcactgcaagaaacgat

SEQ ID NO: 454958 - DNA, 418 bp, Sorghum bicolor
cgtccgcgcaggtttagcgtttgcgatccagtcaacttaggaggccgaccaagtgattttgatgggaatctgcgctgccctggatcacctgatgaggataacatagatatggaagtgagcgatggtgcacaaatttcaccattccctcatagctacagtgcatctgcagcttctgaacaaaatgatgatcaatcaaacagctctaggtattgcttggttgccagcaaacaaatggttggcatatttctcacagtgtgggtacgcaatgaaataagagatgatgtcagaaacttgaaagtttcttgtgtgggcagaggattgatgggttatcttggaaataagggttcaatttcaataagcatgtctctgcaccagacaagcttctgcttcatatgttgccatttgacatctggggaaa

SEQ ID NO: 454959 - DNA, 442 bp, Sorghum bicolor
cgtccgagacaacctggacggacgattaatcgcgattggacgacgactaatcggacgaccagtttcctggtcgttctggccaagtcggaggccctggtcgagtacctccaaccgtccaggacgattagtcgcgattaatcgtgattaatcggacgtcttgaaaacactgctttgggttacaacacttctatttttttcttacatttaaatatctctttcttttgcatgataggatgcaaacatggataaatataacagttgtagaaccctattctttaaacggatggatatagtttgtcaagtatgacccaagatttgtaaatgttgttgagccgtgtacctatcatggccagtagtacttgcctacaacaattgtttcccagattattttgatgtcaatgtcaaggtatcgttatagttgtaacatctaatttttcaattt

SEQ ID NO: 454960 - DNA, 467 bp, Sorghum bicolor
  unsure (1)..(467): unsure at all n locations
cgtccgctcccgttctggaggagcatgtcctcgacatggcgacggcccctcaccctcatcctcatacctcggcaatcaagcgaaggaagagccagacgaagaaggtggtgtgcatccctgcgccggtggcagcgccgccaccggnggtgggcgggcggccgagcacgagcggcgaggtggtgccgtcggacctgtgggcgtggaggaagtacgggcagaagccgatcaaggggtcgccgtacccgagggggtactaccgctgcagcagctccaaaggctgctccgcccgcaagcaggtggagcgcagccgcaccgacccttccatgctcgtcatcacctacacctncgaccacaaccacccatggccgacgcagcgcaacgcgctcgctggctcgaccaggccgccttctcctctcgtggcggccagagtcataccatcccaccataccatacttcgggttgcgtcc

SEQ ID NO: 454961 - DNA, 434 bp, Sorghum bicolor
cgtccgagctcgtggaacttctggacgcaaaggcgggtgatcttatcctgtttgcactgggtgaacaatcatcagctaaccggattcttggacggttaagattatttattgctcataagctggaggtgatagacacgtctgcacattcagttctttgggtgacagattttccaatgtttgaatggaacagcgatgagcaaagatacgaggccctccatcatcctttcactgcaccaaatcctgaggatatgaatgatctaccatcagctcgtgctctggcttatgacatgatttacaacggtgtggagattggagggggaagtttgagaatctacaaaagtgatgtacaacaaagaatttttgagatcattggtatctcgcctgaacaggcagaggagaaatttggctaccttttagaatgcttcgacatgggt

SEQ ID NO: 454962 - DNA, 219 bp, Sorghum bicolor
cgtccgttatggatggcacggtctatgtaattggaggaatggacagcgacacagacgtgcttacttgtggagaagagtatgatttagatagaggtacctggcggctgatagacaacatgtatgaggggctcaatggtgcaagtggtgctcctacacttgtcgctcacggtgaaaatgagctatatgcagcacaatatgccacatagttagttagaaagt

SEQ ID NO: 454963 - DNA, 424 bp, Sorghum bicolor
cgtccggtacacaacaagttttagtgtggatgaaagttactcgaaagggagccatgttgtcctcaatatagactccaaaggccatggtgtccatgctttcctgaataatgagcttataggcagtgcatatggtaatggctcacaatcaagtttcagtgtgaaattgcctatcaacttgaggactgggaagaatgagcttgcccttctaagtatgactgttggtttacaaaatgcaggattctcttatgaatggataggagcgggctttacaaacgtgaacatctctggtgtgagaaatggaaccataaacttatcttcaaataattgggcatacaatattggactggaaggggaatattatagtttgtcaagcccgatcagagaaataatcaacggtggataccacaatctgagccaccgaaaa

SEQ ID NO: 454964 - DNA, 293 bp, Sorghum bicolor
cgtccgctttctccctcgacgatacacttctccgccgccccggatctacctcgccgcgtcggcgcgcagctcacccaccgaagcgaggaggcaatcgaggcggacaaagcgctgcaccaaattcgacgggggatcgagcaccggaggcgtagtgcaaaatgttcaagttcctcaaggaggtggtcgcgggatccggatcgggcctcaaggacttcccctacaccatcggtgagccctacgcatcagcctggggctcatggacacaccaccgcggtaccttcaaggatgatggg

SEQ ID NO: 454965 - DNA, 359 bp, Sorghum bicolor
cgtccgcaacacccgccgcctcctgcaatcctcgtagcctccgtcgagcatcgatcatgtcggcctactgcggaaagtacaaggatgagctcatcaagaatgctgcctacattggcacccctggcaagggtatccttgctgctgatgagtccactggcaccattggcaagcgtctttccagcatcaatgtcgagaacgtggaggagaaccgccgtgccctccgtgagctccttttctgctgccctggtgccctccagtacatcagcggtgtgatcctcttcgaggagaccctctaccagaagaccaaggatggcaagccttttgtcgatgtcctccctggcatcaaggtcgacaagggc

SEQ ID NO: 454966 - DNA, 127 bp, Sorghum bicolor
aaaactctcccttgaaggtcatagatgctggcttgtctgactttgtgtagccagatggaagactgaacgacattgttggaagtgcatactatgttgctccagaggtgctccacagatcttatggcac

SEQ ID NO: 454967 - DNA, 425 bp, Sorghum bicolor
cgtccgatcatggaagctctttcggaattgaatgagccgaatggttcagatatggctgcaatcctccgcttcatagaggaaaggcatgtggtgcaaccgacctttagaagatttctaacctcaaagttacggcgacttgcagactcaaacaaaattgtaaagatcgataagtcttataggctcccagattcctttgcaacaaggactccagctccaataaaagcttcagctccaaaacagaaggatccatcaaagccatcgaaggtgtcaaagaccataggattatttactgccttcagccctgcactagaagcagcgatggcagctgctgtcaaagtggctgacgcggaggcaaaagcacatgacgcacatgatcagatgatggaggcagaaaggatcctcaagatggctgaggatactgagtc

SEQ ID NO: 454968 - DNA, 320 bp, Sorghum bicolor
cgtccgctcacgcgtccgatctagcaatccaagaaaccaacacagcgacaagcaaagctgcgatcctagattcgccagcagcagcggcgagcgtgagcgagagatggacgcgaggatgttcggtctcgagacccagctgatggtagggcattagcaccttctggacttgcccgacaggtacaaatgaagcagactgcgggatctgtttaggcgctcacgcttgcagggcggatacgcgcgacttactggttttacacaggagccgagctgctatacacaaacacccaatgcattgatgctttcttgaaagcactgtggta

SEQ ID NO: 454969 - DNA, 156 bp, Sorghum bicolor
cgtccgatcgcagcacctgcaacacaggatcagtgctgaccattgctttgcagctctcatatgagaattacctacgggaaagcgacgcaggagtggccaggcaatatgtcaggactgtggttgcatcggtgcagagggtggccatggcaatagctc

SEQ ID NO: 454970 - DNA, 434 bp, Sorghum bicolor
  unsure (1)..(434): unsure at all n locations
cgtccggtcatcgcctcggccgccgagctgcaggaggctgacggagtgttgttcggcttcccgacgaggtacggctccatggccgcgcaaatgaaggcattctttgactccactgggtcgctctgggaggcgcagaagctcgctgggaagcccgccgggttcttcgtcagcaccggaacgcagggcggnggccaggagaccacagcttggacggccatcacccagctagcgcaccatggaatgcttttcgtcccgattggctacacctttggttcaggcatgttcaacatggatgatatcagaggaggcagcccctatggtgctggcgtctttgctggcgatggcagcagacaacccagtgagacagaactcgcccttgcagagcaccagggcaagtacatggcctcaataagtgagaagctagctcaccatgc

SEQ ID NO: 454971 - DNA, 411 bp, Sorghum bicolor
cgtccggggaggtctattctcagttttgcaagatgtagagcatgcagcagtcactgttcttgacagatggaagatcacaataaaggacaaccaagggaaacttatggcaccaccaaaatttatgaacaactactttggggttggctgtgatgcaaaggttgccttagatatacacaatctgagggaagagaaccctgaatggttttatagccagtttatgaacaaggtgctgtatgcaagagagggagcaaagaacattatggataacacatttgattgttttccttgggatgtcaagctcgagatagatggatccaaaattgatattcctcaggattctgaaggtatccttgtcgccaatatcaagagctacatgggaggggtcgacctttggaaagaacgaggatgatg

SEQ ID NO: 454972 - DNA, 404 bp, Sorghum bicolor
gacccagcgcgggcggggaggtctattctcagttttgcaagatgtacagcatgcagcagtcactgttcttgacagatgtaacatcacaataaagggcaggccaagtaaacttatggtaccaccaaaatttatgaacaactactttaggttcgcctgcatatccatacgatgccttatatatacacaatttcacgtaaaagaaccctgaatggttttatatccagtttatcaacatggttctgtttgcaagataggaatcatataacattatttcatacacatttcattgtttccctttctttgttaaactctatatagatttattcaaattttatatttttcatgtatttgaatgtattctattcaccttatatcacgttcttcatgtgacggtgtaattcttt

SEQ ID NO: 454973 - DNA, 401 bp, Sorghum bicolor
cgtccgcccacgcgtccgcggacgcgtgggggaactgggaagaccctattggcaagggctatcgcaagtaacattgatgccaactttttgaagattgtttcaagtgctattattgacaaatacattggagaaagtgctcgtttgattagagaaatgtttggctatgcacgtgatcaccaaccatgcatcatcttcatggacgaaattgatgccattggtgggcgaagatttagtgagggaactagtgctgatcgtgagatccagcggacattgatggagctccttaaccaattagacggatttgacgagctaggaaaggtaaagatgatcatggccacgaaccgacctgatgttctggaccctgcgctcctgcgtccctgacgttagacaggaaagatgaa

SEQ ID NO: 454974 - DNA, 451 bp, Sorghum bicolor
cgtccgatcgacgactactgtcaagtccttctccattgcatccctccaacaatataccaatagtttcagtgaggaaaatatcataagagacagcaggtttggtaaggtatatctggcaaagcttcctgatggagagctactggaaattttgaagatcgacacttctaactcaaaagtgccagttgatgcctttcttgagctagttgtgaggatttcagaactgaggcatcctaacatacttggtcttgttggatactgtgcggagtttgagcagcgattacttgtctatgagtactgtagcaagctgaccctacatgatgaacttcgtcatgtagatgactcaagcaagccattatcatggaatgctcgcctccaagttgctgcggaggcagcaaaagcattacaacatcttcatgacagttgccaaccaccagttgtacatcaaaatttt

SEQ ID NO: 454975 - DNA, 461 bp, Sorghum bicolor
gacccacgcgtgcgagggacgactactgtcaagtccttctccatttcatccctccaacaatataccaatagtctcagtgaggaaaatatcataagagacagcggggtttttaatgcatatctggcacaagctccttatggatagctactttaaatttagaagatcgacactcctaactcaaaattgccattcgatgcctttcttgcgctagttgtgaggatttcagaactgttgcatgctaacatacttggtcttgtagtatactcgtcttagtctgagcagctattactcttctattagtactgcatcatgctttactctacatgatttacttcgccatgtttatttttcaaccaatacatcttccatccattcctctctctttaatctgctgtggaggcaccaaaatcattacaacatcttcatgacagttgccaacctccagttttacatcaaatttt

SEQ ID NO: 454976 - DNA, 398 bp, Sorghum bicolor
cgtccgcggctcgaatcaaaacaatgaaaagagaacgcttatccttagcttatgctcagcgcagacaaacgggcagcagatgcagtaactggagaagcgacatgagcctggacagatcatagggcggcaccgtctcgagtggatctccgccaacacggccggttctcaggctaggacctgtgccgccgcaacaacatgctggagaagaacgggctcaagctcgccagattcaggaagaccatgacaaccatcgtggggctcggctctcacgagggagaggatcttggcgcatacacaagggcaactgaggggcatataaccgctgatgagaattgcgagaacagccagtacatggcaccaaacatctattgctgtggagcaggaactgctgatgacac

SEQ ID NO: 454977 - DNA, 434 bp, Sorghum bicolor
cgtccggctacgctgtacggctcgttacaacgacactgacaccgacacggtcacagctagcgagctcgtaactacgcacttatatacagacacctaaccaaccaccgaagggacaagtgacgattgaggacgagatggacgacgagtcggacgattacgtgttcaaggacctgatcatggtggacagcatggtggacaggaccaacctgatgagcaacctcgtgcggaacgactccaggctcgagttcaaggtcaacatcaaggtcaacatccagacgcagagcctgaacctcagcatgaacatggtcaaggccgagatctaggacaccatctggcacaagcgcttccaggagcgcatctgcgcatactaacgcggatactaacgggggctcttcggctaccacatcttctaacacttcaccttacactacatc

SEQ ID NO: 454978 - DNA, 136 bp, Sorghum bicolor
cgtccggcagtccaggcccttcagggctctggcaacgtctgcttgacctgtgaccgaatcctccaggagccattccacttttgctgcctttcctgcaaggtggaccatgtgatgatgcagggcgggggggacctgt

SEQ ID NO: 454979 - DNA, 468 bp, Sorghum bicolor
cgtccgagctcttcttccgcaacggcaaggccacacgctcctgtccgcggctgttcgcagcgcaaaccctaacggagccaacggaggcgcgcgagcggaagcatccatggacggtcgcaagagggggaaggccgacggcgccaaaggggcctccgccagcaggaagcggtcgcgagaatcggagtcatttcaaagtggcgtaggaagcaaatcgaagccatgcaccaattttttcagtacttctggttgtccctttggtgagggctgccattttctccattacttccccggtggctaccaggcagtttcaaaaatgaccaatctgggtggcacaacaattgcatctcctggaagaatgacgatggacgggccacctacacccaccgtgaagactcgcttgtgcaacaagtacaacactgcagagggatgccaaatggggtgacaaatgccactttgcacatggtgaaa

SEQ ID NO: 454980 - DNA, 452 bp, Sorghum bicolor
cgtccgcccacgcgtccgcccacgcgtccgctctcgcacctactacccgcctgctctctctctgtctgacgcgccgccctcgcgatcggtgatggcagctgcggcgtggctgtgtggactcctgtggctcctggcccacgccgccgctgtggcgtcggcggcggatggggcggagggtgggtgggagccgctgatacggatgccgacggggaaggggggtgacgctgctgctcgggcggttgaggaggatgatgaagtggggacgaggtgggccgtgctcgtcgccggctccttcggatacgggaactaccggcaccaggccgatgtgtgccatgcgtaccagatactgcggtaaggaggagtgaacgaggagaacattgtggggttcatgtatgatgacattgtccataacattcttaacccgaggtctgggggtttcatttaccattcca

SEQ ID NO: 454981 - DNA, 535 bp, Sorghum bicolor
cgtgcgctcgcccccagaaataaagcatctcctccggggggcggcgaaccacttaccatcgccaaaaccctagccccgatccgggggaggagcgctgtttccttgccatggcgagcaccactagccaggccagcctcctactccagaagcagctcaaggttcttgcgaagaaccccgtgtatgggctctcgtctgggcttgtttacgatagctacgtctctgagtggtaagtttaccatcatctgccctcctgacactctttgtgatggatgtttcttcaatgcaataatgtacctgtccccagaattattccaacagcctcccattatttagatttacttctgatatgttgcattcgtacgcttatcttgatctacgtgtttgcatatctattctttattcacctggtgaggatcccaatggttatgttctttcaagctaacttgtttcaccatctcatactgttcaaagcatatgtgttagcattcattttaattctttttagttctatcgtccagtctttacctattattgg

SEQ ID NO: 454982 - DNA, 250 bp, Sorghum bicolor
cgtccggaaggatctatatggcaacatcgtcctctctggtggtaccactatgttccctgggattgctgacaggatgagcaaggaaatcactgccttggctcctagcagcatgaagatcaaggtggttgctccttcagaaaggaagtcgtgtctggatgaagatcatctgcatcctcacacttcacagatgtgatgcagctatcatagtcgcatcagtcaagaagttatttgccaaagagcaagacattac

SEQ ID NO: 454983 - DNA, 346 bp, Sorghum bicolor
cgtccgcccaggcaggcaggtcggcgaaaagggcaggtgaggcagcaaggccgagccgcgcgggggctcgggacgggacaggcagaggagacctacagaatcccagatccttcctgcccgcccgtgcccgtcggcgcgtcgttcttgccggccgcgcccgacctccggctcctcctccaggggaatcggatacacaacaagctgcaggatggtgctgtgggtcttcggctacgggtccctgatctggaaccccggcttcgacttcgacgacagaatcctcggctttatcaagggctacaagccgcacgttaatctcgcttgcattgaccacagaggcacaccggag

SEQ ID NO: 454984 - DNA, 475 bp, Sorghum bicolor
cgtccggtaccaggtgctgggctgggtcgccttcgtcgcgtggtccttcagcttctacccgcaggtcctcctcaactacaagcgcaagagtgtcgtgggcttgaattttgattttctggtgttgaacttgacaaagcattcatcctacctcatatacaatgcagctctattcttcagcccgttcatccagcaacagtatcatgacaaatatggtgacaaagagatgattcctgttgctgcaaatgatgttgctttttcactacatgctgtagcattgacagcctttaccgtttttcaagtattcatatatgagcgaggaacacagaaagtctccaaagtttgcatatcaatttctgctatcgtctggactgccgctcttgtttgcctcattattgcttggccaaaaagtgactggctttggcttattgatgtactcaattcaatacaagttggcatgacagcaatcaagtacatt

SEQ ID NO: 454985 - DNA, 455 bp, Sorghum bicolor
cgtccggaccgattgatcagaaggaatgtcgtcggcccaaatcgcgccggcagatcatgtgtgctatgtgcactgcaacttctgcaacacagttctcgcggtgagtgtcccggggaatagcatgctcaacatcgtgacagttcggtgtggacactgcacaaatctactgtcagtaaacctgagagcactgatgcactcactcccagaacaagatcagctccaggagaatatcaaggtccatggcgtcaatggcaccttgcatgatcagtgcggccatttggagctcggttcttcttcgtcctcaaagttccgacttccaatgatgtactcgccgcaaaacgagcacctgctgcaggaacaaacactgaataatgctcgtcgtaagttgcatatctttatttggtattatttgcactgaccatgcgtgggaatctacatatatgggcatacttttt

SEQ ID NO: 454986 - DNA, 204 bp, Sorghum bicolor
acgaccacgcggcaggattttgactccactcctcactctgctgcatgcatacaaatctccatctagcatccatcatgtcgtgcttatccggaagggcaattatcagctcatcaagaatgctgcctacattggcacccctggcaagggtatccttgctgctgatgagtccactggcaccattggcaatcgtctttccagcatcaa

SEQ ID NO: 454987 - DNA, 422 bp, Sorghum bicolor
cgtccgttccaatcccccgtctgctttgcgacgctctcacaggaactcgctcgacccccaaacccctcttgccctagcgctccgcgccatgcggccaccgagagggcgcggcggcgggggccgtttcggcggcggcggaggccggggtggcggcggcggccggttcggcggtggaggccgcggtggcggcggaggccggttcggcggcgggttccgcgacgagggcccgcccgcggaggtcgtcgaggtgtcgacgttcctgcacgcgtgcgagggggaggcggtgactaagctcatcaacgagaaggtgcactacttcaacgcgcccatctatctgcagaacaagacccagatcggcaagtcgaggagatcttcggcccatcaacgaatcctattcctttggaagatgatggatgggatca

SEQ ID NO: 454988 - DNA, 336 bp, Sorghum bicolor
cgtccggtacgccaagctgacggggcgtccgttccgggtgttcagcctggacacgggtcgtctcaacccggagacgtaccagttcttcgaccaggtggagaagcactacggcatccgcatcgagtacatgttcccggacgcgagcgaggtgcaggagctggtgcgcaccaagggcctcttctccttctacgacgacggccaccaggagtgctgccgggtgcgcaaggtgcggcccctgcgcagggcgctcaaggggctcagggcatggatcaccggccagaggaaggaccagtcccccggcaccagggccagcatccccctggtccaggtcgaccc

SEQ ID NO: 454989 - DNA, 402 bp, Sorghum bicolor
  unsure (1)..(402): unsure at all n locations
gacccacgcgtccgaccctctacatggtctccgtccccgtcgcaccctcctccctctccctctccacccggggccgcacctcctccgtatccttacccgctaagaagggaggaatcggtcatggtggcttgcggatcgagtgcatccgtattggtggtgttgagattccaaaccacaagagggtggagtactcactgcagtacatccatggcattgggcggtcacgctcacgtcagatcctcttggacctcaatttcgataacaagatcaccaaggacctctctgaggaggaggtcatcaccctccgtaaggaggttggcaagtacatgattgacggagaccttaaacgtntcaaccgtgtggcgatagataggttgaaggagattaggtgctacaagggca

SEQ ID NO: 454990 - DNA, 487 bp, Sorghum bicolor
ccggaattgaccgaggcgatccactgaacctgatacaccttccggcgctgctctacctgtcttactaccgtcaactacaggccaagggctgcagattagtgcacaactaacgcggcgtgatggccagatatactatgatatatctttcgagaatggcacccagggtgtcctagatggatttatgattcagtttaacaagaacacatttggtcttgctgctggtgaagcacttcaggttactccactgcaaccaggccaatcaacaaggacacttttacaaatgatcccgttccagaatatcagccctggtgcaccaaactcgctattacaggttgctgtgaaaaataatcagcagccggtgtggtacttcaatgacaaaattccactgcatgttttctttggtgaagatggaaaaatggagcgagctggttttcttgaggcctggaaatctttacctgatgacaatgaatttacaaaagaattccca

SEQ ID NO: 454991 - DNA, 527 bp, Sorghum bicolor
  unsure (1)..(527): unsure at all n locations
cgaccacgcgtccgggacattttgatagcagctatggaagattcatctatttttattatcgaggaagaaaatgggaaacttttgaaccccaacccagttcagactgacaaacccactaaagcccttcttctgcagatgttagagttattgcccaatgacacaccaggagtttcagataaccacgatacagtatccaaggaatcattgctgttactttgcactgaaaatgcgatccgcttattttccttgagccacgcaattcagggcacaaagaagataatcaataagaagaaattgaacagtagttgttgtttcgcctctcttattcatagttcttctaatgacattggacttatacttgtcttctccaatgggaaaatngaaataagatccctggcagacttatcgttgtgaaggatgcttttttacgaggtttgtgttctcaagaaacttgaattcaactagttccatagcatgttcatctgatggagaaaccatcttgttaaatggagaagagacctattttt

SEQ ID NO: 454992 - DNA, 422 bp, Sorghum bicolor
cgacccacgcgtccgtgaggcttatgggtcgtgctgcttctcacattacattggaatgcgctttgcaaactcaccccaatgctgcactcattggggaagaggttgctgaaaagaagcaaacccttaagaatgtcacaaactacatcactgatatcatctgcaagcgtgcagatctcggttacaactatggtgttatccttataccagaaggcctaattgatttcatcccagaggttcaaaaactcatcgcagaattgaatgaaattttggcacatgatgttgttgatgaggcaggggcctggaaaagcaagcttcagcctgaatcaaaggagctgtttgagtttctgcccaaaactattcaggagcaacttatgcttgaaagggatccccatggcaatgttcaggttgcaaaaattgaaact

SEQ ID NO: 454993 - DNA, 399 bp, Sorghum bicolor
aagagtccatcagaaacgtgaagaagcacttgcccctgcatttagcacagcacaactgaagcgttatatttcttttgcaaagtctttgaaacctcagctgagttcagaagcaaagaaagttctggtggagtcgtatgttacccttcgtagaggggacagtactcctggaactagggttgcttacaggatgacagttcgacaattggaagcattgattcggctgtccgaagctattgctcgaagccatttagaaagagttgttctcccagctcatgtccgcctggcagttaaattgctcaagacatccatcatcagtgttgaatcaagtgaagttgatctctctgacttccaagatgctgaagatggaacaaatgtaccttctgagaatgatgctggaca

SEQ ID NO: 454994 - DNA, 423 bp, Sorghum bicolor
cgtccgatggaaagcgtttcagatgcaggatctaaagctggttgtcagtgatgagtaattttgtgttttgctagagaatttgctttcaaaactttgtgtatgttatatatattctaacatgtttttaacagtgtccgatgaagatgcaatatgtcaccggatggtattggtatgtgggacatcaacatgccacatggctgtttcaaagaacagattgtttatacctggtgtctgggggccgttctggtctgcaatggtacctgagttttggctcacagaaggtggccaaagtgcaactggcgctctactcgattacattattgaaaaccatgttgcctctcctcttctttctaaccatgctgcttctcaaagtatatccatatttgagctactgaacaagatgttgctttctatgtcacatga

SEQ ID NO: 454995 - DNA, 449 bp, Sorghum bicolor
cgtccgggaggtcttttactaaacatagttcagtttcttcgggaggcgagaacttaattaggaggcttcagaaagatagtgtggtccaggttggtagctcaaatcagacacgctggatgcaatctgatccacatatattgaccgaaggcgaaattattgaaattggatctcaaatggattggcatgctgaaccagatagtggaattgttgtggcaaacaaaagacatgagactgtctcgggagaaggtttgtcatcacagaatcaagaaatttctcaaggaggaaaaatggtgaataatggagatggtcgacaaaagaacattgtgagaggcaaggtatctcttgctcatgttattaaccaggcggaagcttgttcccaacaaggtggctggtctagacacaaagctatatcaattgcagaaaagctggagcaagataatttgagattg

SEQ ID NO: 454996 - DNA, 467 bp, Sorghum bicolor
cgtccggtgctcctgtccgtctagattctgatctcagtgagagtgacctatttttcttgcttgccaatgactcagatgaatttaacagatgggaagctggccaagttttggcacgtaagttgatgctcagtcttgtagctgatttccagcaacagaaaacactggccctaaatccaaaatttgttgatgggattagatcaattctgcgcaacacaagcttggataaggaattcattgcgaaagcaataactttgcctggtcaaggggagattatggatctgatggaagttgcagatcctgatgcagttcatgctgtccgtaactttattaagaaggagcttgccttgcaactcaaagatgatcttcttgcagctgtgaaaagcaacaggagttctgaggcttacacatttgaccatgatagtatggcctcgcgtgcattgaaaaatacatgccttgcataccttgca

SEQ ID NO: 454997 - DNA, 427 bp, Sorghum bicolor
  unsure (1)..(427): unsure at all n locations
cgtccgccacaggaagaaacgggcagaatgcccaaactgtcgtgccgggtgctctgcgcggctcttctcatcgcttcgctagccgctctgctcgtccggttcccgatccataggctcctcagtccccacgccgccatggaccccgactccgagctcgagttcgagatgcccggcgtcttgcgcgtgtacaagacaggccgcgtcgagcgcttcgacggcaccgagaccgtcccgccgtcccccgacggcgaccccgccaacggcgtcgcgtccaaggacgtcgtcctcgacgccgccgctggcatctccgcgcgcctctacctccccgccggagtggatcccgggaagaagctccccgtcgtcgtgttcttccaacggcgggcgttcatggtccacaccgncgcctncccgctctaccacatctact

SEQ ID NO: 454998 - DNA, 433 bp, Sorghum bicolor
cgtccggcagctccgtctccggcggccccccaagagcgcgcggcgaggatgaacgtgaagggcggcggccggattccggtgcccccgccgggggccagcgcgctggtcaaggtggccgtgttcggcggcgccgccgtgtacgccgccatgaacagcctctacaacgtcgagggtggccaccgcgccatcgtcttcaaccgcatccagggcatcaaggacaaggtataccccgaagggactcactttatgattccatggtttgaacggccaatcatttatgatgtccgcgctcgaccgaatcttgttgagagtacttctgggagccgggatcttcagatggtgaaaattggtctccgtgtcctcacaaggcctatgccagagaggctaccacatatctacagaactctgggagagaacttcaatgaaagagttc

SEQ ID NO: 454999 - DNA, 364 bp, Sorghum bicolor
cgtccgcgcagaagcaaaacccccccaatctctgcgccgccgccgccgtcgttccctgtcgttcttcgccctcctccgccgttgcagtcgcggcctcatcgtcgcctaccgatctccaccgcccccattgccaccgatcccaccagaggtgtcgacatgtctcagaacaacccgtcccagctcctcccctcagagctgatcgaccggtgcatcgggtccaagatctgggtgatcatgaagggggacaaggagctcgttggcaccctctgcggctttgatgtctacgtcaatatggtgctggaggacgtcactgagtatgaatacactgctgaaaggcgccgcattacaaaactcgaccagatcc

SEQ ID NO: 455000 - DNA, 362 bp, Sorghum bicolor
  unsure (1)..(362): unsure at all n locations
cgtccggtaacgaggtggagctgatcgccaagctgcagcaccgcaacctggtgcgcctgctgggctggtgcgccgagcgcgacgagaagctactggtgtacgagtacctncccaaccgcagcctcgacgccttcctcttcgatcggagcaagagcgcgcagcttgggtggagcacccggcacaacgtcatcctgggcattgcgcgcggcctgctgtacctccacgaggactcgctgctcaagggggtccaccgggacctaaaggccagcaacgtgctcctggaccacaaaatgagccccaagatctccgacttcggaatggccaaaatcttcgaggacgactccgacgggatcaacacgggc

SEQ ID NO: 455001 - DNA, 438 bp, Sorghum bicolor
cgtccgcgcaaacctctctccctcgtctggtatcgtctctcccacacccaaaaaaaaccctcgaaaagcggcggcggcgcgacatggcggaggtcgaggttccagctgctgcggtcgcgacgacgatccctgaggcggcggaggctaccgagggcggagccgctgcggaggcgaagggtccgcacaagctgcacaggcagtggaccttctggtacgacatccagtcgaagcccaagcccggcgctgcgtggggcacctccctcaaaaaggcctacaccttcgacaccgtcgaggagttttggagcttgtatgatcaagattttcgtccaagcaagttgtctgggaatgctgattttcatctgttcaagggctggagtagagccaaaatgggaagacccagagtgtgcaaatggtggcaaatggactgcccatgcaaca

SEQ ID NO: 455002 - DNA, 428 bp, Sorghum bicolor
cgtccgggtatggggtatgacaagaacttgttagtggaatcaatccaaaacaggctgcaaaatgaggcgactgttgcttattacttactgttggacaataggcttcgcacaaccagtggctatcttggagctgaatgtcaagaagctatggactcctcattttcaaacatagcatcatatgaaacaccaagttcagcacgtggtaatcgacaacagatatttatggagtctccagttggcttgagaccgcatttcccagctgagaggaaatgggctcttgggcttcagtcacgagcacatccaagagaaataatgactgaagtgctgaaagctctgcaagaattgaatgtttactggaaaaagattggtcactataacatgaagggcagatggagtcctggctttcctggtcaaattcataacaatca

SEQ ID NO: 455003 - DNA, 508 bp, Sorghum bicolor
cgtccgcccacgcgtccgcccacgcgtccgaccgcggccaagaagcctcctccagcttgttgcccattaatttctctggactcgccaaggctgtgacaccgggggcaacaatattcgtgggacaatacttgttcactggcagtgagactacttcagtttggttggaggtttctgaagtgaaaggagatgatgtggtctgtataatcaagaacacagccaccttggctgggtcactgttcacactgcattgctcccagattcacattgacttgcccaccctgtctgatgaggataaggatgttatcagaaaatggggtactccgaataagattgacttcctttctctgtcttacacaaggcatgcagaggatgtgcggcaggcacgggagttcctgtcaaaattgggcgatctaagccaaactctgatttttgccaaaattgaaaatgttgaggggcctgaaccatttgatgaaatactggctgaggcagatggtatcaatttgtcaag

SEQ ID NO: 455004 - DNA, 516 bp, Sorghum bicolor
  unsure (1)..(516): unsure at all n locations
cgtccgctcttttttgtgtactccgtccgctgtgtgtgtgcggtggcaacgtgcgacagccgctgataggcagcagagagaagagagagatgacgaagcaagtggtggtggtggacaccgcgctggtggcgccaagcgaggagacgccgcggcagcctctgtggctgtccaacctcgacctggccgtgccgcggacgcacacgccgctcgtctactactacccggcaccggcgcagggcggcgccgccctgggcacgggctccttcgcgccggaccggctgagggccgcgctggccgtcgctctggtgccattctacccactcgccggccgggctcgggttggcccggacggcaggttgcagatcgagtgcaacagcaacggcgcgctctttgtcgtcgccaacgcggaccttaccgnggngccgacgttttgacgactatcgagccgtcgggcggaggtcaggaaccacttttgtggccggtagcggacttccggcgatgcgaccaagcacccca

SEQ ID NO: 455005 - DNA, 353 bp, Sorghum bicolor
cgtccgggcatgagcttatcgaacgtgttgaagagtctggagtggatgctcttgagattaatttctcatgtccacatggcatgccagagagaaaaatgggtgctgctgtggggcaagactgtgatttgctagaggaagtttgtggttggattaatgagaaggccactgtccctgtttgggcaaagatgactcctaacattacagatattacacagcctgcaagaatatctcttaagtctggatgtgaaggagtttctgcaattaacacaattatgagcgtaatggggattaatctcaaaacattgcgtccagaaccctgcggtggagggtattctacacccctggggttattc

SEQ ID NO: 455006 - DNA, 399 bp, Sorghum bicolor
gcgtccggaatattttggagacatagtcattctgccatttatggaccggtatgagctggtggttctgaaaacagttgcgctgtgtcaatacggggtgcaaaatgtcactgcagattacatcatgaagtgtgatgacgacacctttgtgaggctggatgtagtattgcaacagatcgctgcctacaacagaaccttacctctgtatctgggcaacctgaatctctaccacagtcctcaaagaagcggcaaatgggctgtcacctttgaggaatggcctgaagcggcgtatcccccgtacgccaacggacctggctacgttatctcggccgacattgcgagagacatagcatcccggcatacaaatcactccctacggtgttcaagatggaggtgtgagca

SEQ ID NO: 455007 - DNA, 544 bp, Sorghum bicolor
  unsure (1)..(544): unsure at all n locations
cgtccgccacatgccgccgcagccacggtgggtcgtcatcccgtacccgccgccgccgcctanggtggccgcgccaccgccgccggcgccgcagtttgccaagcactttgctgctgggcctcccccgccgccccaagctgcggccgggcgccgcacgccgaccccacccgcggccggatccggcgggaacgggtgcgaggagaataagaccatttgggtcggcgacctccagtactggatggacgagaactacctccacagctgcttcgggcccagcggcgaggtggttacaataaaagttatccgcaataggcaaacaggacagtcagaggggtatggatttgttgagttcttttctcacgcatcagcagaaaaggctcttcagaattttactggtcatgtgatgccaaacactgaccatgcaattaagttgaactgggcatcatatagcatgggtgaaaagcgatctgaagtagcttctgaccactcaatatttgttgggatctagctgctgatgttactgatgaaatgctgctggagcttt

SEQ ID NO: 455008 - DNA, 454 bp, Sorghum bicolor
  unsure (1)..(454): unsure at all n locations
cgtccggcgccgagcagattctcctccttcgcggcgctcaggctcgggccctcggcgacggaggggcagtaccaggctcggcggcgacgtcagcggctccccctcccgcctctcgccagtcgcctcgcgccctcgcctacgtcctccgcgcaccggccggcgatcctgcgcaggagacactttctattgtatgagaggatcaatgtccaattattatgatgactacgatgacattgatgagatggaggatgaatatgatttggatgatcctgctgatgacatggtagatgagcagcgagggattagggattctgatgcggaggataatgattatggacaaccaaatgataagatcccagatacttcatcagtggacgcaagaaaaggaagggacattcaaggaataccctgngagcagataaacataacccgtaaaagatacagacagtccaga

SEQ ID NO: 455009 - DNA, 388 bp, Sorghum bicolor
cgtccgatcccttcgtccacgctccccgcagccgccgcccaaaccctagcaacccgtcctccgccatggccgacgaccactactcctccaagcggaagtacgacgacccctcgccgccgccgcggcgcacgggcttctcctctggcccgccgcctgcctcgccgccgctggcggcgccccttcgtacaacagcgtgccgccgccacccgatgagatccagctcgcgaagcagcgcgcgcaggagatcgccgcgcggatctttaacgccgcagaggccaagcgccctcgcgtcgacaacggcgacgatgacgtaggcggctacgggggaggggcaccctgggcggcagcggtggcggtgggcgtggccgcatcggcggcggaggactcg

SEQ ID NO: 455010 - DNA, 433 bp, Sorghum bicolor
cgtccgtgatcttcctcaataatcttctcagctggcagaagtctgagagcacgctacaatggcgaatatgggagctgctattctggtctgcatagtggttttagccctggatgtcacagctggcatactaggaattgaggcacaggctgctcaaaacaaggttaaaaaggtgacaattctcttcatccaatgtgagaaaccagtttacagagcataccaacttggccttgcagctgcagtgcttctggtagttgcccacgcgatagccaacttccttggtggctgtgcctgtatctgctctcagctggagttcatcaaggcgtccattaacaggaaactggcagccactaccatcattctctcatggattgccctgattgctggattctcgctgcttgctcgcggtgccatgtccaactccaagtcccagaca

SEQ ID NO: 455011 - DNA, 408 bp, Sorghum bicolor
cgtccgttctacatcagtcatgcacagaacatcccttttattgagaacatagagaagagggtccaaggtgctacaaaactgcttgatggtagcttggagcgctgctttgtggatggtctggaacaccgtgatgctaaagttatatacaactgtttgcgtgcttatgctgcaattgacaatacatcatcagccgaagagcttttccgtacaacagtggtgtctccattgattcagaaaatagtccctcaaaattatgcgagggctgttgctggggcatcatctgatgaactggaagatgattatcaacagataaaagaatgtgttaaaaaagattgcaaattcatattggaaatatcttcatcagaaaactctggattgcatgtttttgattttctgggcaattcaata

SEQ ID NO: 455012 - DNA, 476 bp, Sorghum bicolor
  unsure (1)..(476): unsure at all n locations
cgtccgggcgtacttgcgatgtctcgggcatttggcaatcgtctcttaaaacaatttgttattgcagaccctgagattcaggaacaagaaataaatgatgagttggagtttctaattatagctagtgatgggctgtgggatgtggttccgaatgaggacgccgttacacttgtgaagatggaggaggaacctgaggcagcagcccggaagctgacagagacggctttctcccgtgggagcggtgataacatcacgtgcatcgtggtgaagttccagcatgacaagccaggtagcagcggcggcggcgatcccccctcttcgcctccaggcgacaagagttgattccatttgttggtggttatacgtgttgttgggtccttttaacctgagccggattttgctggccccatncatggtggcccccgcggctggtacttaagaaaaggagtggttcatgttcgttgcctgctatatat

SEQ ID NO: 455013 - DNA, 442 bp, Sorghum bicolor
cgtccggaggagtacatcaaagcactagaccgtgctaaaggtgaactgtactataatcattcactgggtatgcagtacagcaagataacagaacaaatatttgttgggtcatgtattcaaacagagaaagatgtgaagatgttatcagaaactatgggtattactgctgttctgaatttccaaagtgaaagtgagcgcattaactggggaatcaattctgagacaatcaacagttcttgtcgtgagaataacatcttgatgggtaactatcctatacgagaggttgattccgtggacctaagaaagaaacttgctttctgtgttggacttatgatgcgtcttattaggaagaactaccgtatatatgtgacttgtgccactggatatggtagatcaccttcatgcgtgatatcatacttacactggggtcaagatacacgtt

SEQ ID NO: 455014 - DNA, 443 bp, Sorghum bicolor
cgtccgcaaattttggtggctcatcatccatcaaagaggtgtcgaagaggatctgctgagctacttattgactttgatgatcactggcatacaaacctctcaagtttgcaagacagttctacattgttgaaaagtgcaggagagaaaatatgtggaaatggggtgccacgtggatactggattttctgccgaggaagtaaaaaggaaacgagaggatttagctgtggtctatgggttttgctgcattcactaactgtccgaatcggagatggagagagccaaacaacatttacatcaatttgtgatttcatccacaatttcttcatctgtgaggaatgccgcacacacttctatgaaatgtgttcaagtgtatcagtccccttcaaatctgcccgtgaccttgctctctggctatggaccgcgcataacaaagttaatgagag

SEQ ID NO: 455015 - DNA, 500 bp, Sorghum bicolor
cgtccggtggtgaagaaccacctgtcgatggtggccttcaacaacatcacgcggctggccttcgggaagcggttcgtgaacgcggccggcgagctggacgagcaagggcgcgagttcaaggcgatcgttcacaacggcatcaaggtcggcgcgtccctctccatcgcgcagcacatcccgtggctgcggtggctggccccggtcgacgagcaggccttcaaagcccacggcgaccgccgcgaccgcctcaccgtgaagatcatggaggagcaagccaaggccctcaagcagcacggcgcccagcagcatttcgtcgacgcgctcttcactctcagggacaagtacgacctcagcgacgacaccgtcattggcctcctctgggacatgatcaccgccggcactgacacgacggtgatctcggtggagtgggcaatggcggagctgctgaggaaccccagggtgcaagagaagctgcaggagggagctgaacgacgtcgtcg

SEQ ID NO: 455016 - DNA, 389 bp, Sorghum bicolor
cgtccggtcatttgttgcacctgtgttggtgctggagatcctcgtctttcaaacttccgtttccgacaagttcttattgatgagtccacacaggcaacagaacctgaatgtcttattcctttggtgcttggtgtcaagcaggttgtccttgtcggagatcattgtcaactgggtccagtcatcatgtgcaaaaaagcagcccgtgcagggttagcacaatctctctttgaacgcctcgttatccttggagtgaagccattcaggttacaggtccagtatagaatgcatccttgcctctcagagtttccatccaactgcttctatgaaggcacactgcaaaatggagtgactgtaatgagaggcaatcgtctggaatgattttcttggct

SEQ ID NO: 455017 - DNA, 365 bp, Sorghum bicolor
  unsure (1)..(365): unsure at all n locations
cgtccgcccacgcgtccgactccttctaattattttgaagaaggaagagtagatggtgactcacagttataccagcctgatggtgatgctttacctggtattgaggggtttcaaattgctggtgaacctagaccaggatttcaactaacagcatgtggtttccctacaaatggtactaccctntgcaatttccagtgggttcgccatcttgaaaatggtaccaggcaatctatcgaaggtgccacgatgtatgactatgtggtcactgcggatgatgttggcacccttcttgctgtagactgtacgcctatggatgataatggccgccagggtgatttggtgacagaatttgctaacaatgggaa

SEQ ID NO: 455018 - DNA, 449 bp, Sorghum bicolor
  unsure (1)..(449): unsure at all n locations
cgtccgtctccttccacccctcctcgccgccgcagacgaccgccgccgccgccgctgcagcgaacccttgcgaatcttcgttgtccgggctgtggggggcaggcatggcgctccggaggctgctgcaggggagtgtcctgccgcgggtaaccggcagggctttggcaccggccgtggcgccgttttcaacggagtccggggagaccatccgtgccacgctctttcccggcgatggcatcgggccagagatcgccgagtctgtcaagcaggtattcaatgttgcagggttaccaatagaatgggaagaacactatgtcggtacagaagttgatcccagaacagagagttttttgacttgngaaagcctggagtcggtgcgtagaaacaaagttggcttgaaaggacctatggctacacctatnggaaagggtcatcgatctttgaatctt

SEQ ID NO: 455019 - DNA, 408 bp, Sorghum bicolor
cgtccggcaacgccggcccggaccccattagcctcaccaaccagtcgccgtggataaccaccgtgggcgcgagcaccatggaccgggacttcccggccacggtgacgctcggcaacggcgcaaacatcaccggcgtttcactctacaaaggccggcgaaatctttcgtccaaggagcagtatccgttagtgtacatgggcggcaactcgagcatccctgaccccaggtccctgtgcctggaggggacactccagccccacgaggtcgctggaaagattgtgatttgcgaccgcggcattagtcctcgggtgcagaagggtcaggttgtcaagaacgccggtggcgtgggcatgatactcgccaacacaccggcaaacggcgaggagcttgtcgccgacagccaccttc

SEQ ID NO: 455020 - DNA, 330 bp, Sorghum bicolor
cgtccgcgatgtggcacatgatgtacagcagagccagaagattccccaggatcctagtactttacatgactttggagggatgacaaggcttactgcttcagacgtccaaacttctgattactggctcctaacagagggggatgttagcatgactgatatttggagaacagaacgtatccttgataatcattcattaagctagtttaaaatcatctgttctgttacgcagttgttgttacagcttgaagttcttaacatggaaaatagaagaagtgcagtgggaccagatggatttcttgtctgaagatgttgtcacccctcgagcccata

SEQ ID NO: 455021 - DNA, 342 bp, Sorghum bicolor
tccgcccacgcgtccgcgcaagatcctcgagcgctccggcctcggcgaggacacctaccttccccccgccgtgctccgggtgccccccaacccgtgcatggacgaggcgcgcaaggaggcgcgcgccgtcatgttcggcgccatcgaccagctgctcgagaagaccggggtcaggcccaaagacattggcgtcctagggtaactgagcctgtcaaccgacgcgcgtgcagcatggggaactacagtgggggaattgggctacactcgggatggtgacgtggtgtgcatgactgcaggctgtgaggcacaattatcctgtgacgagggacatacactgatgtc

SEQ ID NO: 455022 - DNA, 472 bp, Sorghum bicolor
  unsure (1)..(472): unsure at all n locations
gtcgacccgcgtccgagggagtgcatgatgtgaaattaggagatgctgatgattctagtgttgcctcattggcaaatgataaccaggcacagccctcatctggttgcagtacaaaaaatgcgtctggcaggggattggatgctgctgaatttagaagtccaagcacatttggttcacggngtgcaatgtcgtttgctgcagctgcaatggctggattaacttcagtaggtagtcgtggtattagaggtagccgagatcggagtggtcttccattgggtgctcgtacaaccgagcattacaacaaattgatatttacagctggtgggaagcagcttaacaaacatttgactgtatatcaagctgttcaaaggcaagttgttcatgatgaggatgatgaaagatcagttaggtggatccgatttacctgatgatggtaaccacttctggggtgatgtattcactataacatatc

SEQ ID NO: 455023 - DNA, 449 bp, Sorghum bicolor
cgtccgcccacgcgtacgatttcccaaagcaaaggattgttgttgctggcgcaggcagtgctggtattggagtggtgaatgctgcaagcagaaccatggcaagaatgttgggaaacaacgaggttgcttttgagagtgcgaggagtcaattctggatagttgatgcccttggcctaataacagaagaccgagaagatatcgatccagatgcacggccttttgctaggagaaaaagtgagcttggtcaccaaggccttaatgagggggcaaagttagtttaaagggttaaaaaggtgaagcctgatgtcatacttggattatctgctgttggtgggttgttctcagaggaggttctagaggcactaaaagattcattctcttcgaggccagcaatttttggcatgttcaattcaactaagaacgctgagtgtacacctggggaagcattt

SEQ ID NO: 455024 - DNA, 326 bp, Sorghum bicolor
  unsure (1)..(326): unsure at all n locations
gtcgacccgcgtccgctgaacttcattntgcctgatatattctcgtcacatcaagaatttgagtcatggtttgatttttctgggaaaggaaatggagaaaaagatgaagaaactgatgagaataaaaggctgcatgttgtttcaaagcttcatgctantttacgtccattccttctaaggcggatgaaggaggatgtggaacagctgcttccacggaagaaagagataatcatttatgccaacatgactgaacatcagaagcaaatccagcatcacttggttgaaaaaacatttgacaactacttgaatgaggaatcggatattat

SEQ ID NO: 455025 - DNA, 517 bp, Sorghum bicolor
acccacgcgtccggcggcggcgcgtgcgagacccatccgccgccacgccatggccaagttcaacgtggtgcagaagaacaggcgccagtggaagcaggaccgcaagcgcgccgcgcatggggagcccggcaccggcaagctcaagcagcgtaccgcgcccgtctccatgtccggcaagcggaagcgcaagctcgagcgccgcctcaaccgggagcagaaagaggctgcgatgattaaggcgctggagaacatgggggatgtcgacatggtctctgctgaagagtcttcagaggctgcaaagggcaagtctcaagtgaagttcagtgtgaagaaaaactcaagaatacagatcaagagattgaagggcaaaggcaggaagaaagccaaaaatgcaaaaccacctgcgaaggagaaagttgatgccatggtagaatgaccgacaatactgcatcactggaattattgatatgaaccttgatgttttctcagagcttgcagcaagggctgcagggactga

SEQ ID NO: 455026 - DNA, 467 bp, Sorghum bicolor
  unsure (1)..(467): unsure at all n locations
acccacgcgtccgtaaggacatgaccatgtccccacccggtccctctgcagtgaaagatgcatactgcttgctgaacttcggggacagcattactacagagcacatttcacctgcaggaagcatacacaaagacagtcctgctgccaagtatttgatggagcgtggtgtggaccggaaggacttcaactcttatggtagccgtcgtggtaatgatgaaataatggcgaggggaacatttgcaaacattaggatcgtgaacaagtttttgaatggagaagttggacccaagaccattcatgtccctactggggagaagctntacgtttttgatgcggccatgagatacaaatctgagggccatgctactataattctcgctggcgctgagtatggaagcggcagttctcgtgattgggctgccaagggtccgatgctctctggagttaaagctctgattgccaagagc

SEQ ID NO: 455027 - DNA, 411 bp, Sorghum bicolor
  unsure (1)..(411): unsure at all n locations
cgtccgcgttcagcggcatcgccatcggcagggangcctccggcggggtgcgcgacgtcctggtggaggactgcagcatcttcgacagcggctgcggcatccacatcaagaccaacgtcgggcgcggaggctacatccggaacgtcactgnnnnntacgtgcgcatgagcggcgtgcgcatcagcggcgtccgcatcgccggcgacgtcggcgaccaccccgacgcgcacttcagccagctcgccgtgccgctggtggacgccgtgcgcatcagcaacgtgtggggcgtcaacgtccagcacccggggtcgctggagggcatcaggagctcgcccttcacgcggatctgcctctccaacgtcaagctcttcgggtggcggaagaacgacccggcctggaggtgcaaggacg

SEQ ID NO: 455028 - DNA, 464 bp, Sorghum bicolor
  unsure (1)..(464): unsure at all n locations
cgtccgccgcaagacgctggtgaacaaagggtacgaccccgaggtcatcgacatcaggtcgctcaagccgttcgacctgcacaccatcgggaactcgatcaagaagacccaccgtgtgctgattgtggaggagtgcatgcggacgggtggcattggcgccagcctcaggtcggccatcattgacaacttcttgggactacctggatgccccccatcatgtgcctgtcgtcgcaggacgtgccgaccccgtacgccgcaacgctggaggacgcgactgtcgtgcagcctgcgcagatcgtggccgctgttgagcagatctgccaataatcgtgatatgactgcttttggtgagttacctgatttgtggattcatgtatccgngttttgttcgatgtcacatagtgactgccattgtgccgtagacattctatnntgcaacgcagaagccatattcatacgaatgc

SEQ ID NO: 455029 - DNA, 398 bp, Sorghum bicolor
tgtaaagccgttgactaaggaacttgttgattaccttgaagtgagtgatcaagatttcaaggaagacctcactgctaagatatgctcaatagttgaaaagttttccatggacaagctatggtacttagaccagatgttcagagttttatctctggctggtaattacataaaggatgatgtatggcatgctcttatagttctaatgagtaatgcatctgaactttaaggatattcagtcaggtcattatataaggcattgcaagcatctggtgaacaggaaagtttagttagggtggctgtttggtgtatcggtgaatacggagaaatgctggtcaacaatcttagcatgttggacatggaggaaccgattacggtaacagaatctgatgctgtggatg

SEQ ID NO: 455030 - DNA, 448 bp, Sorghum bicolor
  unsure (1)..(448): unsure at all n locations
cgcgtccggaaagttgctaagnatggaatgaaagttcctcagctgaccccttcaaggatcaggctgctctcatgtaacagcacatcaagaacatggtgagcgcatccaccctgttcttcttcaacaccctgtatgacccctaccgcgagggtgctgactatgtgcgtggataccccttcagcctcagggagggtacccacactgctgtcttccatggcctgtggctgaacatccctgactatgatgctcccacacagctggtcaagcctaaggagaggaactagaggtatgttgatgctgtcatgacaatccccaagggaaccttgttccccatgtgcggcatgaacctctgcttcgacagggatctcattggcccttctatgtacctttggtctcatgggtgatggccagcccattggtcgctacgacgacatgtcggcaggatggt

SEQ ID NO: 455031 - DNA, 481 bp, Sorghum bicolor
  unsure (1)..(481): unsure at all n locations
tccggaatgaatgaaaaagattggctatcactngttgcagngcatagtgattcttggctaatgtctgttgcattttattttggagcaaggtttggatgtgacaaggaagccaggaaacgtctcttcaccatgatcaataaccttcccagcatatatgaggttgtcacaggaactgctaagaaagagcccaaagaaaaaactcataaaagcaacaataagactaacaaatctggctcaaagccctcgcgccaggcggaacccaacaactcaagggtcccaaagatgccacctccaaaggactaggaggagagtgaaggggaggaaggggaaccacaggaagaccatgagactgcgctgtgcggcgcatgtggcctanngtatgacgactnctggatctgctgtgacttatgtgagacatggttccacggcaagtgtgtcaagatcaccccggcttaagcggagcacatcaagcagtataagt

SEQ ID NO: 455032 - DNA, 282 bp, Sorghum bicolor
  unsure (1)..(282): unsure at all n locations
tccgctcattngaagatcacctgttgnggcaccctgactgcaacacanacaacatatacattacaagtgatcaagatctcattatttcatactgcaaagctgactcaactgattcatcttcagaggaaaatgctggctctataaatatcagcagcatactgactggcaatgcttgcaaaaataaccctgaaattaagcaagcaaaaaagctggggtccagatcagctcgaggcttgagcatacagttgactatacaaatctatagactaatgcaccgctggc

SEQ ID NO: 455033 - DNA, 425 bp, Sorghum bicolor
  unsure (1)..(425): unsure at all n locations
cgcgccgnccgcctcgttccgcgccgccgcacgcgagcaaccttctgaatccacacgcgcagctcggacaggcagctcagagctcgcgaaccagacatggcgaacggggactcggcccttgaggcccgccgggaaaccggaaggaagaaccctccgggcccccaggtttggacgttcgcggggctgggtatctgcgcggagctcgtggaggcgtgcgactccatggggtggaaggagcccaccaggattcaggccgaggccatcccccacgcgctccaagggaaggacctgatcgcgctggcgcagacggggtccgggaagacgggcgcgttcgcgctgcccatnctgcaggagctgctcagcaaccgccaggctgagcagtctttcttcgcttgcgtgctctcgccaacgagagagctggcgat

SEQ ID NO: 455034 - DNA, 491 bp, Sorghum bicolor
  unsure (1)..(491): unsure at all n locations
tcgacccacgtccgtacttcttggtcctgacgacggtgcgttcagaccagtgacgacgacgttgtgaggagagggcaaggaagcaaacctgccagggaggtggcgatggagaggtacgaggtgatcaaggacatacgatcgggtaacttcggggtggccaagctggtccgggacgtcaggaccaaggagctcttcgccgtcaagtttatcgagcgggggatgaagattgatgagaatgttcaaagagagatcatgaaccacaggtcgctgaggcatccaaacatagttaaatttaaggaggttgtgctaactcccacacatttggccatagttatggaatatgctgctggcggtgagctatttgaaaggatctgcaaagctggaagatttagtgaggatgaggcaagattcttcttccaacaactgatttcaggagttagctattgtcattcaatgcaaatatgtcatagagattngaaactagaaaacac

SEQ ID NO: 455035 - DNA, 347 bp, Sorghum bicolor
cgcgctccgcaccctccaggcgtttctgaccatgatgtgattaaacaggaggatgactgcaacgcatgtagaatatgcagaatgctgaggacggaaactctgtttcattgttcaaaatgcggatgttgctctgcaattggtctgcagaatagctatgcatgatttgaagcgctgatgctatatgactgttcaatttgattttatcttattcaagaatataatgattgtttttttttttttggctatacataaatgttaattcataaaaaatgaggagcactgcagtttgatgcctccttgctccaagtcgggttgtgacatgtcaaaggtatgggagagacttgata

SEQ ID NO: 455036 - DNA, 350 bp, Sorghum bicolor
acgcgtccgtcctaaaagaggctggtggagaaactgcaaaacagcaagtacatcctccgaattccgcgaagcaactgaagcaaacagtcagtgatattagacatgatgtccagtcccagatcaagcaaacacgtcagaccaagatgcaagtcaatcaaatcaagaagaggctcgaaaagcttcacattggcgggctggacaaccccattcacttccaccaccgtggttgttgtcttaatcgccccagccgctttggccgccttattcacggtccccgaaaccttgggggaggatttgacccaggcgcctcccggcatgtccttggggcaggcgtccgtggcgagcaaccc

SEQ ID NO: 455037 - DNA, 344 bp, Sorghum bicolor
cgtccgatccaaaaatggtcaatcccctcttcatcttcctccccctcctcagcgtcgccgccgtgccccgcgccgccggcacggacgggccggacccatgcgcaggccggcggatccacatccgcagcctgcctccgcgcttcaacaccgacctcctccgccactgcggggccgacgccttcccgctcgccgacccgtccgcggcggccacctcgaccccgccctgcgagtcgctcgccaaccacgggctcgggcctcgcactcacccacgcagccggtcttggtaccgcaccgacgcgcggcttctggaggccttcttccaccgccgcatcctggagcgggac

SEQ ID NO: 455038 - DNA, 462 bp, Sorghum bicolor
cggtcgacccacgtccgtgactgctggcgtcagtactgtgatccaaatactggatgtaatagcagctacctgtattgcagtaataatcatccgggcagctatactagttggcttaatagtaatagtactcaagtattcagcatgtgcaatggcaatcaatcttatgctttcaactttggcatttatgagcaagcactggtctctggaatacttggtccaggaaattttatctcaaaattatgttattgcttctggtggggactgcaaaacctgagtacactagttcaaggggcctatgacaagcacatacactggagaagtgttattctctattgcaatatgtgtccttggactaattctttttgctctcctcattggtaacatgcagagctacctacaatcttgtgctatacgccttgaagagatgagagttaaagaacgtgatgcttagcagtggatgca

SEQ ID NO: 455039 - DNA, 427 bp, Sorghum bicolor
acgcgtccggagtcttactggacacctatgtgccggaatcatacaccatgacttaaaacacagccagggccacgggcgagcccaacgcagtgctctatcaagcgggataagacgagctctacagtctacctctaccttggcttcacaagctcacctgagggtaaagggaagtgtctcatggctgctacaagaattaggcgatgctcccatactgagtacattatatctcttggatcagaggacttatcacaagggcgccatgcatacattgggcaactgagaactgatttctgggggacaaacctgaaaatcatacatagccagccaccattttaaggtgcttaagcattaagtcgactatctaggcgactcttcgggagcatgaggatcagtccccaagtatcagctggtaactatggagactgac

SEQ ID NO: 455040 - DNA, 266 bp, Sorghum bicolor
  unsure (1)..(266): unsure at all n locations
cccgggncgccacgcgtccattggacagcgggctgagagtnnaggattcagggcacttgttttgacagttgacaggcctgtgcttggtaggcgtgaagctgatatcagaaacaagatgatttctccacggtttgtaaacctcgaaggtttaatgtcattagacaaggacatacacagtgctgaaggcggctccaagctggaacgattctcacggaagacgctggatccatcgttgtcgtggaaggacgtggagtggcttaagttca

SEQ ID NO: 455041 - DNA, 591 bp, Sorghum bicolor
acgcgtccgcggacgcgtggggtaatcattggcgagccaggagttggcaaaacagctattgctgaaggactggctcaacgtattgtacgaggagatgttcccgaacctctaatgaatagaaggcttatttcattggatatgggagcactacttgctggagctaaaattcgtggtgaaattgaggagagactaaaggctgttctaaaggaggtcactgcttctaatggacagaacatcttggtcattgatgagaaccatactggtgttggtgcaagagccgctggtggagcgatggatgctggtaacctggtgaagccaatgctaggccgtggagaactccgctgcattggagcaacaacattggatgagtaccggaagtatattgagaaggatgctgctcttgagcgtaggtttcaacaagtttattgcggtgagccagcggttgaggataccatctccatactgcgtggtttgcgagaacgatatgaactgcatcatggtgttaagatatcagatggagctcttgttgctgcagcagttctatccgatcgatacatcactggacgtttttggccgacaaagccattgatc

SEQ ID NO: 455042 - DNA, 304 bp, Sorghum bicolor
accttctttaagcgcaaaattatattttatatgacatacatgtgtgagaagatagggtactggaggtgcataacaatatttatggacatcaaagcgaacccacagtagtaggcgtgccctattttcaaatacttataaaactggtgccttcacgagaacaagaacggtgactacttctctgctctgctcaaggatgagccgcagctgctcaatgattggaaggacgcgctgctgtcaccgctgttctgcctctcgtagaatgagaccatgttcctgaatgactgctaacgcactgctttatatg

SEQ ID NO: 455043 - DNA, 430 bp, Sorghum bicolor
tcgacacgcgtccgggaggatagacttcagcatgcaaatggagctgttgttctggcaacaattaaagtttttctccatttgacaatgtctatgactgatgtccatcaacaggtttacgaacgtatcagagcacccttgcttactctggtgggtgctggcagtcctgaacagtcatacttcgggcctatgccatctacatcttcgggggagccgggctccaaggtaattttcctcggcctataaaagtttttactgccaattaagggatccttcgtatgtgaagaagttgaaactggagatgttgactgttatagcaaatgaaggcaccacatatgagatggtcactgaactatgtgaatacgctggaaatgttgatgtaccaattgcaggagagtctatccggccagttggaaaaatagcactacagcag

SEQ ID NO: 455044 - DNA, 420 bp, Sorghum bicolor
  unsure (1)..(420): unsure at all n locations
cgtccgcacgtattgttctctccatgtggcattatgtatgaagctctntgagcacaaacctttcgatgcaaggaccgtcatgggatttggagtgctcaatggcatatcgattggacttcttaacttgagtctgggtttcaattctgttggtttctatcagatgacaaagctggctattattccctgtactgttatattggagacccttttcttcaagaagaaatttagtcggaatatcaaactctcccttagcgtgctccttgttggtgttggtgttgcaactgtaactgatctgcaactcaacactgtgggatctgtactgtcactgctggcaatcatcacaacctgtattgctcagattatgacaaatacaatacagaagaagttcaaggtatcttcaacgcagcttctgtaccaatc

SEQ ID NO: 455045 - DNA, 537 bp, Sorghum bicolor
cgtccgacttgctcgagcaaaagttactgcaaatagggttgctgttgtggtcgcaaatgagtggaaagatgctaatgacaaagtaatgcctgttaaacagtggcttgaagagcgaaggttcctgcagggtgagatgcagcaacttcgggacaaacttgctattgccgagagaactgctcgatcggaagctcaattaaaggaaaagcttcagttgcgcttaaaagttttagaagaaggtttgaggggccctccaagtggttctagtcgtcctcctatggaaggaaagagtttaagtaatggacctccccgtcgactttcactaggtggtgttgacagtatctccaaaatctctccgaacggtgtgttaatgaggaggtctccgtctttcaattcaagatcctccctctctaccagcagttgtttggtcctgaagcatgcaaaaggaacttcaaagtcattcgatggtggtaccagatcattagaccgaggaaaagttctcgggagtgggcctcattcactcaatagatctacggatgc

SEQ ID NO: 455046 - DNA, 479 bp, Sorghum bicolor
  unsure (1)..(479): unsure at all n locations
ccggtcgacccacgtccgngcttcatactactatattagctacacaactatngagcgttttagttctatgctgacccagaagactaaggtgaaaggactcctagagattctagcatctgcttcagaatatgcagagcttccgggtcgtcctggtgaggaagaattcattgagaggcttgttcgccaccagaggttctctatcgagaaacccaagtatggcgatccacatgtgaaggccaatgctctgctgcaagcccatttttcaaggcacacagtggttgggaacctggcagctgatcagcgcgagattctcctttctgctcataggttgctccaggcaatggttgatgttatatccagcaatggttggcttagtcttgctcttagtgcaatggagctgagtcagatggtgacacaaggcatgtgggatcgggattctgtgctgcttcaagttccacacttcacaaaggacttggctc

SEQ ID NO: 455047 - DNA, 446 bp, Sorghum bicolor
gtaatgtgcagacctatttacagtcagcttctgtgcgtatagaagaaatgagagtgaaaaggcgtgatacagagcagtggatggcacataggttactccctgagaatctcaaggatcggattatgcaccatgaacaatataggtggcaagaaacaagaggggttgacgaagagggccttcttaaaaatcttcccaaggatcttagaagagaaataaagagacatctttgtttgtcgcttctcatgaaggttccaatgtttgaaaacatggatgaacaactgttggatgccatgtgtgatcgtctgaagcctatgctgtacacagatggaagctgcatcattcgggaaggtgacccagtgaatgaaatgctcttcatcatgagaggaacactaaagagtaccacaacacatggtggacaaactgggttcttcaactctaatgttcta

SEQ ID NO: 455048 - DNA, 541 bp, Sorghum bicolor
  unsure (1)..(541): unsure at all n locations
ggtcgccacgcgtccgtgaagaaagctgaagtgaagatgcttctgaggatgcttcaagcttactacaatcatgtccgtgcatttgaggataccttagtgacaaagttctttggcctacattgtgtgaaatctggagcacaccagaagaaggttcgttttgtgataatgggaaatttgttctgctctgatcatactatccataggcgatttgatctgaaaggatcatctcttggccgtataactgacaagccaccagcagagattgatgagtatacaactctgaaagaccttgatcttaactttatctttcggttacagaaacattggtaccaagagtttcaaaggcaagtggacaaggactgtgagttcctcgagcaggagaagattatggattacagtctatnggtgggtgtacattntagaggtgccattgacattgatggtgacaaacctgcaacactctgtgtttcaagatgggacagggatctatttcgntctgatccaaatagatggtcaaaaataaacttggagcaaacatgct

SEQ ID NO: 455049 - DNA, 136 bp, Sorghum bicolor
cgtccgaaggccttccgcaacctccctggcgttgatgttgccaatgtcgagcgtctcaacctgctcgacctcgctcctggtggccaccttggccggtttgtcatctggactgagtccgcgtttaagaagctcgatg

SEQ ID NO: 455050 - DNA, 507 bp, Sorghum bicolor
cgtccgcaccactacaccatcaacagctcaccaccccccactgctcttctgtcctgcaatggctgctccacgcctcgccctggtggtcgcgacgacggtggcggtcctggcggcgctgctgctggcgtcctcggagccggcatcggcggcggtgagctgcagcgacgtgacatcctcggtggcgccgtgcctcgggtacgcgatgggcaccacggcgtccccctccccggcgtgctgcaccggggtgcgctcgctcaacagccgcgcgtcgtcgacggccgaccgccaggccacctgcgcctgcctcaagagcatgacgagcaggctcggcggcggcggcggcgtcagcatgggtaacgccgccagcatcccctccaagtgcgggtctccgtcgggtgcccatagtcccacgtcgactgctcaagacgacgcctcctagctgagtttcacctgccaatgataaaatgcgccatgcatgatgatgccaggatataggattttgtatga

SEQ ID NO: 455051 - DNA, 447 bp, Sorghum bicolor
cgtccgaggctctcggcccgcacgccgcaccccctcctccgcgttgatctccccgatccggccaccgctcccccacctctctcgcatctcacgccaacgcccaccggcgtcctcgtccctccgtgccggcgagcggcggggagggagctttccacctcgtctcaggcaggcaccctctggcgtcctccctccgtgtcggcgagcggcggagatccgccgttctgacctcgtctccttccctctgctgacttgtgaacaaggcagcagcatagttcagtttagaaacatgtcatcaaagaagatagagttggatcacaaggacattgtccatgattctgccattgactactatggcaagcgccttgccactgcttcctcagactctaccgtgaagatcgtcaacattggtgcagcaaatgccccatcccaggtcctggcaacgcttag

SEQ ID NO: 455052 - DNA, 421 bp, Sorghum bicolor
cgcgtcgcggacgctaccatgatccgcgactgccttaacgctgaccctaagcagtaccgcatgacgaatgagaggcttgtctgcctctctgaggagacgaccaccgtagtcaagaggctctaccagatgcaggagaccggcaccctcctattccctgctcttaacgtaaaccactgccccaccaataacaagtttgacaacgtgaaaaccttgccgtactccatctttattggcttgctgagcatcacagtttctccaattggtgtaatagctaacgtggtctgtggatacggtgatgttggcaagggctgtgctgctgcactcaagcaggctggtgcccgtgtcatttagactgaaatcgaccccatctgttccctccaagctctgatggagggtctttacgtccttacattgcatgatg

SEQ ID NO: 455053 - DNA, 495 bp, Sorghum bicolor
  unsure (1)..(495): unsure at all n locations
cgtccgcggacgcgtgggggctggtttgccaagttcccgcagtacaagggcagagacctgtatattacaggggagagctacgctggccactatgttccacaattagcccagcgcatggttgagttcaacaagaaggagaagctattcaatctgaaaggcattgctcttggcaatccggtgctggaattctccacggatttcaactcgcgcgccgagttcttctggtcgcacggcctgatatcggattccacctacaacatcttcacgacggtgtgcaactactcgcggtacgtgagcgagtactaccatggttccctgagcacggcctgtgacagggtgatgagccaggtgacgagggagaccagcaggttcgtcgacaagtacgacgtcaccctggacgtctgcatctcgcngtgctcatgcagtcccagatcctcgccccgcagcagggagccggagcttgacgntgcgtggagacgagcgatgactacctga

SEQ ID NO: 455054 - DNA, 561 bp, Sorghum bicolor
  unsure (1)..(561): unsure at all n locations
cgtccgggccgccgccctggccgcgcgcaccgtgcggctcacctgggcggagacgctcggcaagtgggccctcggggagctcgccttcgggatcaagtactacatgcggcaacagggtaatctgcagcatgagtatgctggaagtgattctgtactactggatgggcctgaggtaaggcaggagctgatttcactactcggatatctgaaccaatgcatgtatttctcgaagaagccatacaacgtgtttttggagtatggtggttatggccagaatgatgtgcttataaagaaatctaaggcgagggtgcctcctgaagcctgctttcacaattgttcgtgacagaagtagccaatgctttctccttttcattaggggggctatcagtgttaaggagcggttgacagcagcaactggtgcagaggttccatttcatcacgttgtggtccaggaaggtcatgtttccaaacctagtgttgggctatgcccactgtggaatggtgtggcagctcgatggatngcaaaacaagccattccttgcctgagtaaacaatggagca

SEQ ID NO: 455055 - DNA, 549 bp, Sorghum bicolor
cgtccggagagaacatacaaaacgctagctagttgttgtcccgccgtccgtcgtcgcctgctaggctgctactccggcgagaagagcagctatagcagggcagtttagtcttctccatcagccggcaccgccgcgccggcggcagctagctagctagccgagatcggggaggggtgcggtgtcatctctcctgaggaaccggcgcggcgatggccggggggcaggcgcccgaggcgtcgcccgggcggtaccagcgccgccgcgacgagatcgacgacgacgactgcgccgacgtgctcggcatcgacgtgcgtggtcccgacgctgacccgttcgacatccccgccaagcgcgcccccgtcgagcggctgcggcgctggaggcaagctgcgcttgtcctcaatgctaatcgacgattcagatacacacttgacctaaaaaaggaggaggagaaggaacaaataaggaggaagataagggcccatgcccaagttatacgggctgctttacttttcaaagaggctggggaaaagcagaatcctgacacag

SEQ ID NO: 455056 - DNA, 520 bp, Sorghum bicolor
cgtccggcccgaaagggaatcgggttaagatttcccgagccgggacgtggcggttgacggcgacgttaggaagtccggagacgccggcgggggcctcgggaagagttatcttttctgcttaacggcctgccaaccctggaatcggttcaaccgctggaccttcgaggatgtccaggtcaacgacatctcgctgaacgactacctggcggtgtctgcgacgaagcacgcgacgttcctgccgcacaccgctggccgctactccaagaagcggttccgcaaggcgcagtgccccatcgtagagcgcctcaccaactccctcatgatgcacggtcgcaacaacggcaagaaggtcatggccgtccgcatcatcaagcacacccttgagatcatccacctgctcactgacgccaatcccatccaggtggtcgttgacgcgatcatcaacagtgggcctcgtgaggatgccacccgtattgggtctgctggtgtgtgaggaggcaggctgtggatatctcacccc

SEQ ID NO: 455057 - DNA, 581 bp, Sorghum bicolor
cgtccgcagcatgttcgcctgcttgattcagaccatcagatgttgactgcccttgcaaatactggaatagaagtgatggttggggttccaaatgatcagctacttcgtgtgggccaatctcgttccacagctgctgattggattaataagaatgtcgctgcttacactccggcaactaacataacatatattgctgtgggcaatgaggtccttactaccattcccaatgcagcacttgttctcgtacctgcactgcaattcctccagtcagcacttttggctgcaaacctcaatactcaagtgaaaatttcgagtcctcattcaatggatgtgatctcgaaggcgtttcctccctctgctgccactttcaattcgacatggagctcaataatgtctcagtatcctgagtttctcaagaataccggatcttcgtttatgctgaatgcccaaccatactatggctatgtcggagggcaagggcgtattccccttgagtatgcactattccgctcacttaatccgaacagtcaaatttcagatcctaacaccaatctctttataccaaaatgttgatgctataa

SEQ ID NO: 455058 - DNA, 526 bp, Sorghum bicolor
  unsure (1)..(526): unsure at all n locations
cgtccgcccacgcgtccgcaaaaaagaagggtgacaatgcttttcgacagaaggattttactactgccattgattgctattcccagttcattgaagttggtacaatggtttctccaaccatttatgctcgacgctgcctgtcatatctgatgaatggcatgccacaggaggcattgaatgatgcaatgaatgctctggtaatatctccgacatggtcaacagcattctatcttcaggcagcagcactattatcacaaggcatggagaatgaagcccaagaagcactcagggatggttgtagcttagagcaaagtagcagtggtggacattgagtgtgacaaatttgtagtccccaaaatgcacataatttcaggtgcttgtttgaagagagtattattggctatggttcatatgccgaccaacattccaccgcctcctggccaaactcagtttatgcctggccaccacgcacgtttgctatgcccncatcatcgcacatgccgcccatggtcaatcccattggaat

SEQ ID NO: 455059 - DNA, 454 bp, Sorghum bicolor
cgtccgcggacgcgtgggcttccaccatcagtactggacttcaattgtcgtagtccacaggagttgctaaaaagggtggcagttgagatatttggcaaaatggagtccttgcatgtggaggtgtctgaatttcttcaccgtactgaattgaacattgtaaatgaggatgaacctgtgaaggaatgcgttcaaaggcagattattgagatgaaggatttgcttaaaatggaaagaaatgaatatgagatattgcttttaccagtcatgagggaaagcaatcaccccatgcagacatcaattgatattctggagctcaaccgcttgaggcgtggtcttcttcttgatgcctacatttgggatcggaggctatgtcatgttgattcagttcttaaagcacatggccatatttcaaaaaccaatccaaatagtcttgataatctcctatacaccagac

SEQ ID NO: 455060 - DNA, 496 bp, Sorghum bicolor
cgtccgggcagattccagcagcaactggtcctgcggattggcgtgaagctctcgagatagttgcattgggtttgcctgagcagtccgttgaaggtatgaaagttatatgccatgagctaacgcaggcagctgaccctgaaagcacggtgcttgaagatcttattaaggaagctgacagattagtgtcatgcttggctgttatggttccaaaaaccttcaattttagcttatctggggcttcttcaaggtcttgcaaatatgttttaaatacactcatgcagacatttcagatcaaacgtcttgctcatgctgtgaaggagggtactcttgacaaccttattacggagttactcctttggcttttagatgaaagggttcctcttatggatgatggcagccaattactcaaagcaactaatgttttaatgcttaaaatcctgataatgctgagaagacatcctcgtttgtgtgctaataaattgctgaggccttggat

SEQ ID NO: 455061 - DNA, 552 bp, Sorghum bicolor
  unsure (1)..(552): unsure at all n locations
cgtccgatgatttccgtgaagcttatgcatggctgagccataacacagatgttgatgacaaggttgcttcctggtgggactatggttaccaaacaactgcaatggccaacagaactgtgattgtagacaataacacctggaacaacactcatatagcaacagttggtacagcaatgtcgtccccagaaaaagcagcttgggaaatcttcaattctttagatgtcaaatatgtgcttgttgtctttggaggacttgttggataccctagcgatgatatcaataagttcctttggatggtacgcataggaggtggtgtgttccctcacatcaaggaaccagattatcttagggatggtcaataccgtgttgatgctcaagccaccccaactatgctgaattgcctcatgtacaagctttgttattacaggtttgtggagaccgatggaaaaggttttgatagagtaagaggatatgaaataggaaagaagcatttcaagctaacacnatttgaggaggattcacaacccaaccatggatggccgatatataact

SEQ ID NO: 455062 - DNA, 390 bp, Sorghum bicolor
cgtccggccggagaaggtgtgggatccgatgatcgcttttccggcgaccgtgcaggtggtgccggagccgctcggggtcgtcctcgtgttgtgctgctggaacgttcccttgggtctggcgctggagccgctgatcggggcgatagcggtcgggaacgccgcggctatgaagccgtcggagatctcgccgtgcaccgacaggttcctggccgacaacatcggcaggtacatggacccctcgacggtgaaggtcatactgggcggtccggaggtcgttgaacagctgatggagcaccgctgggacaaggtcctcttcactgggagcccgcgcatggcgcgcgccgtgatggccgcggagtacaggcacctgacgcccgtggcgctggagct

SEQ ID NO: 455063 - DNA, 523 bp, Sorghum bicolor
cgtccggaatctgaaaagtgaaaatagtcattgccttaaatatgccatgtttttcttgtctagtaatatgttaattccatccatgtgtcattccatcttgagtccaaaattttctttaaagcaaagtacaatcatacatcctttcaaattgaatgtgatcacaccttaaaagcctgctttacacggtatttctgtgttgttttcagcttctggagaagcttgcaatgatattatggcatactccctaatattgtcctgctgctgttatacatgctgtgtaaggagaaagcttcgccaaaagttggacattgcggtaaatatttaaggatatgttactagtagattttgtatttctccttaagtagaaatgcccatttcttaacttggcactgaactacctctgggattgaccataccatatgcaagtgacttattaattgctaaaaccagaatatccagaaaaaatagcttttgattatcttgatgaaattaacttatacagcacgtctattttacccactac

SEQ ID NO: 455064 - DNA, 517 bp, Sorghum bicolor
cgtccgaataacttcaataatcctttttagtaattatctagggataaatagaatattagaattacctttatctaacctcttgtgttcaagaggaatagcttaacccttgaactttgagctgtccactgttcaattcatctctgttactctgtatggcattcaagcagagtgttaaagctgaaggtcagagaatattttttcacttatcccatatttttgtttaaaaaattgtatgctgtattgctgtgtgcattagttgtgttgcttccgggtattggttgtggcatgttattttgttaatatagttttaatatgatatacagatcttgacttccatatcaacagttgatgatctgaattaccctgaaaagacagagacctattatgtagtcaatgttccgtacatattttctgcttgttggaaggttgtgaagcccttgttgcaggagaggacaaaaaagaaggttaaagttttgactggctgtgggagagatgaacttctgaagatatggactac

SEQ ID NO: 455065 - DNA, 450 bp, Sorghum bicolor
tcccggtcgaccacgcgtcgagccgctcacctcggctcgtccatctcttgatctagccgcggcgccgcgcgacctcgaggcaggaaggagagcctagcctaaggtcgtaagatttgggcgtcccagtttcagcccatttgctagatgcctccccacaacattgaaaccgggcaccaggacgtggtgcacgatgtcgccatggattactacgggaagcgcatcgcgacggcctcctcggacaacaccataaagatcgtcggcgtcagtggcacctcgcaccagcagctggccaccctgagcgggcaccaggggccggtctggcaggttgtgtgggcacaccccaagtttggctccatgctcgcgtcctgcggctacgatggctgtggatcatatggaaggaagggggcaggcctgacgagtggttcaggctcatacatcaccgagcacaag

SEQ ID NO: 455066 - DNA, 504 bp, Sorghum bicolor
cctggctctccggttcggttcggttcgggttcgtcaggttcttcgggggttccggttcgtgggtgagcggaagagatggcggcgtcggacgttgagtaccgctgcttcgtcggcggcctcgcctgggccaccgacgacaacgccctccactccgccttcagcacctacggcgaggtcctcgagtccaagatcatcctggatcgggagacgcagaggtctcgtggcttcggcttcgtcaccttctcgacggaggaggcgatgcggagcgccatcgagggtatgaacggcaaggagctcgacggccgcaacatcaccgtcaacgaggcccagtcccgcggcggccgtggaggcggcggcggcggcgggtacggcgggggccgtggaggcggtggcgggtacggccgccgtgatggaagttggggggctacggcggtggcggcggcggctacggcggtggccgtggaggctacggcggtggcggtggcggctaatggcggtggcggc

SEQ ID NO: 455067 - DNA, 477 bp, Sorghum bicolor
cgtccgcggacgcgtgggatcgaggctaagaaaaggtttgaatttttggaggctgttagtgggacaatggatgctcatcttcgttatttcaaacaaggatatgaactactacatcagatggaaccgtatatcaatcaagttcttgcatttgcacaacaatcaagagaaaggtctaactatgagcaggctgctcttcttgagaggatgcaagatttcaaacggcaaattgatcgtgaaagtcggtggtcaccaaatggaatgaatgattcccctaatggtgatggtatacaaacaattggtagaagttcgcataagatgattgaggaagcaatgcaatcagcttcaaagggcaaggttcagaccattcggcaaggctatctctctaagagatcttcaaacttgagaggtgattggaaaaggaggttctttgtcctcgacagtcgaggaatgttatactattatcgcaagcaagacagt

SEQ ID NO: 455068 - DNA, 392 bp, Sorghum bicolor
cgccgccgcctacctgctgtacaacgccgaccgagtcgctgagtggcccgatctgctgcagatggccgttgtggatctcatccgcaaggtctgccgatcccagaaccgcgccaacaagggaaggtatatcaccatcattacctcgctgctctccacgcccagcactgcggttgtttatgaatgtgctggcgccctggtgtcactctcttcggcgcccacggccgtgcgagccgctgccaacacctactgccagttgctctcgtcccagagtgacaacaatgtgaagctcattctcctggatcgcctcaacgagctccgcatctcgcaccgggatgtcatggtgggggtgggggaatgagtgcttcgtgcactggccagccccaacttagatg

SEQ ID NO: 455069 - DNA, 580 bp, Sorghum bicolor
cgtccgcggacgcgtgggcttctgaagcacttgcattgcgtgagcaagcagaatcattaagatcattggtagctaaaaagattgaggaacacaagaagatatccgataaatacaactcacaagtaattgagatcaagtccctcaaggcattggtcgaggagttggagcaggaaaagcaggagctggagtttattgcagatatgtacgctaaagaaagttccttgtcaaggacacttgctgatattgaagaatcagaaacccgagctcgcaatcaagctgaatatttgaggagcaatctagaggagcatagtcttgagcttcgggttaaagcagcaaatgaagctgaagctgcatgccagcaaaggctttcctttgctgaagtggaactagaagagttaaggaccaaagtagatgcatcggaaagagatgttgtggaacttaaggaggcaataagaataaaagaggctgaaggagatgcctatatttccgatattgagacaattggtcaagcatatgaagacatgcaaacacaaaatcagcatcttcttcaacagcttactgatagagatgacttaacata

SEQ ID NO: 455070 - DNA, 447 bp, Sorghum bicolor
tctggcgacaggcttcattgacgttctagacatttgcaatagagttttggataaagtcccggacaatgctggcccgctgatcctaaggaagggccatggcggggcataccttcctctcatgtaaatatttcccttttcttttttagatgcattgggttcagaactttttggcagttaggctatcttgaaaggcacatgaatcttgcaagattatatcagttttcgttggttcggcatcttgacagaagcttggctgtagtcttcgacttggattctcatcgatgatgccatggaagacttttctgattgtatgtacagcagtttgagggaagccggcataggtcggatttttttcagcttcatccggcaggtgttttctcacacataatatactggatgcttgtaatttttttaccggccccaatattaaatttggagcggttggtc

SEQ ID NO: 455071 - DNA, 368 bp, Sorghum bicolor
gcgcccatggccgcggaagccaagacgccgtccctcgctgaggaggatgtacttccaccacaagaagttgcagtggaaaaggcagctgaggagaagccctctagtggtactgagactgaagctgctccctcaaccaatgatgaagctcctccatctgtagaagacaagaatgaaacttctgaagtacaagatactgctgaaaagtcagaagcagaagaaactaacactgctgcagaggaaacacctgctgcagaggaagcaagtgagaccactgaggaggaagaggctgagaaacctgagatcaagattgaaacagcttcagcagatttttgtttcccacaacaaattaaacgaggcactgttttaca

SEQ ID NO: 455072 - DNA, 545 bp, Sorghum bicolor
cgtccgctttaatgcctcccacatcacggcggatccctactgggtggctgccagggccacttggtatggtgcgccaaccggcgctggcccctacgacaacggtggcgcttgtgggttcaagaatgtgaacctgcctcctttctcggccatgacatcgtgcggcaaccagcccctgttcaaggatggcaagggctgtggctcgtgctaccagatacgatgcgtcaaccaccccgcgtgctctggcaacccggagacggtgatgatcaccgacatgaactactacccagtcgctaagtaccactttgacctcagcggcacggcgtttggtgccatggcacagcccggccgcaacaacgagcttcgccacgccggcatcatcgacatccagttcaggagggtgccctgcatctaccccgggcagactgtgacctttcacatcgagcacggctcaaaccccaactacttagcagtgcttgtcgagttcgaagacggcgatggcgatgtggtccaggtggacatcatggaggccaactccgggtggtgga

SEQ ID NO: 455073 - DNA, 344 bp, Sorghum bicolor
  unsure (1)..(344): unsure at all n locations
ttcgaatcattgatgatgacatgcccctagctcaatttgctgttgctttcaatggagcatcatgggtagatcctgattctgttgcactgatggttatgcaatcaatgcttggttcatggaacangagtgctggtggaagaaagcacatgggttcagagcttgacagaggcacaataatgacatgtgaaggtatggattaaacaataaagatctgctttgtgttctgtgaagtatgtgatattgttgattctaaacaatgtcgttgaaatttcgccatatagctatcatcttagtactttgagatgcgatgtactatgcaatcacttactttcagatatcttatc

SEQ ID NO: 455074 - DNA, 405 bp, Sorghum bicolor
  unsure (1)..(405): unsure at all n locations
cgtncgcaacaattggaatggtgctgtttatgatgtcaatataggtggattcaataacaatttgcactgcctagcaaggtgtgtaagtgctatagttgggggaagcgaatacaccagggtcgaaagggagcagcgaataaattctctttcaaatggacatacagatgagctccaagaggctgagttaccaagccgtgtctcagcagaagcaaatattaaatcttctatgcaaatctacgtcaaattgtctgcagggatcgtcctggattcatggaatgacactagcangccacacatcgttccaaaactgatattcctggatcaactctgcgagctgtncccctaccttccaaagagcaccttagaagttcacataccatacaccattctgcgctcaatatacca

SEQ ID NO: 455075 - DNA, 450 bp, Sorghum bicolor
cgtccggaggaaatggaggtcactgggatatacacaaataattttgacttgtctttgaatacaaagaatggtttccctgtttttgccacagtggttgaggcaaactatgtggcaaaaaagcaggatctgttttctgcatacaaattaactgatgaggataagacagagattgagaagttgtcgaaggatccaaggattggagaaaggattgtcaagtcaattgcaccatccatttacggccatgaagatatcaagactgccattgcacttgctatgtttggtggacaagagaagaatgtgaggggaaagcatcgcctaagaggcgatatcaatgtcctcctcctgggtgatccaggcactgcaaaatcacagtttctcaagtatgtggagaaaacaggacacagagcagtatatacaactggaaaaggagcctctgcttgtggtcttact

SEQ ID NO: 455076 - DNA, 420 bp, Sorghum bicolor
  unsure (1)..(420): unsure at all n locations
cgtccgattntagaaactatgacagcaaatggatttgaaattgatgttgtcacatatggaacactcattaacggtctatgcaaggctggtaggactcaggttgctttgaagcttttaagaggcatgcgaattaaagggattaggcctactccaaaagcttacaaccctgtgatacagtctttgtttagacggaataatttaagagatgcccttaatcttttcagggagatgactgaggtgggtgagcctcctgatgccctcacatataagattgttttccgtagtctctgtcgtggtggagggcctatcaaagaagcttttgattttttggtggagatggtgaataagggtttcatgcctgagttttcatccttccgtatgctagctgaaggtctattgaatctgggcatggatgattat

SEQ ID NO: 455077 - DNA, 437 bp, Sorghum bicolor
cgtccgggcaggtacagtcatgaagaggaagaagaagaggaaaatcagcgatcattgctaaggagaacaacaatcgggaatggccctccagaatcgttatatgactggacccgtgaaaatgatttgggaatatcaaatcagggaagccctgaccaagttttctctagaggacactggcgccttgtcagatgccagaatggcaagaacttatattttgctcgtaactctgtttctctgctgtgtaactgggttgctcctctgatgtggtgttgatttcttcaggcctccgcatttttgaggagctccaagatgttgattaccttgcaagaagctgtagcagagcaatgaaggctgttggtgtggttgaagcctcctgtgaggctatatttcagcttgttatgagcatggatactactcgttttgagtaattctttctt

SEQ ID NO: 455078 - DNA, 295 bp, Sorghum bicolor
cggtcgaccacgcgtccgctcgaatcacaccatctacaatgccgcgctgggcaagaagaagatacatattgtcgagtatgggatacagtacggcttccagtggccgtgctgcctgcggtggatagcggatagggagggtgggccaccggaggtgaggattactggcattgacctgccccagcctggattccgccctactcagcgcatcgaggagacagggcgacgtctcagcaagtatgcccagcagtttggtgtgccattcaagtaccaggcgattgcagcatccaagatggag

SEQ ID NO: 455079 - DNA, 279 bp, Sorghum bicolor
  unsure (1)..(279): unsure at all n locations
cgtccgcacacatcccccaccatccccgccgccgcaggcgagaaacctcaggtaagggcgggcggcagccgccggagccgggcgcgcctgccaagatgcagatcttcgtgaagaccctgacggngaagaccatcacgctggaggtggagtcctcggacaccatcgacaacgtgaaggccaagatccaggacaaggagggcattccgccggaccagcagcggctcatcttcgcggggaagcagctggaggatgggcgcaccctggccgactacaacattc

SEQ ID NO: 455080 - DNA, 351 bp, Sorghum bicolor
  unsure (1)..(351): unsure at all n locations
cgtccgcccttcgcgaagaaaccaactccgcgagaggtgatgcggagcagcaagcgggacctgacgaatgctacgcgagggatcgagagggacattgcgtcattacagcaagaggagaagaaactcgttgctgaaattaaaaggacagcaaaaactggcaatgaggcagcaacaaaaattctagcccgtcagctgatcaggttaaggcagcagatttctaatttgcaaggtagccgagctcagattcgggggatggcgacacatactcaggcaatgcatgccaacacttctgtggctactggtttacaaagtgcaagcaaagcaatnggagcttttgaataagcaaatgga

SEQ ID NO: 455081 - DNA, 502 bp, Sorghum bicolor
  unsure (1)..(502): unsure at all n locations
cgtccggccacgttggggtttgaggactacattgaaccactcaaggtgtacctgcagaagtacagagagatggagggtgatagtaagttaactgcaaaaaccggcgatggctcaattaaaaaggatgtccttggtcatgtgggaggaagtagctcagctgcacaagggatgggccaacaaggagcatacaaccaaggaatgggttatatgcaacctcagtaccataatggggatatctcaaactaatgaagatctggaccttttctgcgacagctgctcttccctgaggtgcatatttggtcatagttatttactgagacaccttgcggtgaccattaaagagtaaccaatcacccccgataggtccaagaactgatgaaggtccaagaactgatgaggcagctttgctaggtgtaaattgctttcctgggaatangttcggttgtgagctagcgccgttgttgtatgtatattattaagaataactntatgattggtcttt

SEQ ID NO: 455082 - DNA, 444 bp, Sorghum bicolor
cgtccgccccccgcgccaccatccccctccttcctctctctatctcctgtctctttctctctctacaaactccccctcgcgaacagccgccgctgcagctgcgttggtttttgagagagagagagagagaaagcgagcaagggagggagagagagggacagcaactccctgggtcgctttcgacggcctggatctccccgcacgcgggatcgtacggccggcacgctgctgtcgctttccaccgcatagtaaattgccaaggctgttgtaatgggggtcaatggtcatcatgaacctcgcagaggatgtaatggcaccgtctgcaatggtagtgtaagaccactcgatcattttggtgatgtagatccatggacggcatgggcatacaagcctcgtacaatctcgctcttgctgatgggaacatgctttttaatttgggcaagt

SEQ ID NO: 455083 - DNA, 216 bp, Sorghum bicolor
aaatgctagaggatgcaacaggtgctgagaggatgtgcatgcctgcaccttctgttgaacagtttattgatgcagtacaacaaaccgttctagcaaataagagatggattccttctactggtaaaggttctttgtatattaagcccttacttatgggaagtgggactggtcttggtcttgcacctggctcagaagatacattcattatatttggct

SEQ ID NO: 455084 - DNA, 403 bp, Sorghum bicolor
cgtccggccaccccaccaccagagcacacagccgccaccaccaccaccgcgcgccgtcgtcggcgccatggcggtgagcaacaacatcacggcgtgcgtgacgctgctggcgctaatctgcgcggtgcccgtgatcgcgtcggggatctggttcgcgtcggcgcagggcgaggagtgcgcgcgcctggcgcggtggcccgtggcgatcctgggcggcctgctcctcctggcggcgctggcgggcttcgtcggcgcgtactggaaccggcggcgcctgctggcgttctacctcttcgcgatggcgtcgctcgtcgtgctgctcatcgcgctgctcgtcttcgccttcgccgtcacccggggatccggcgcgtacccggtgctcggccgcgcctacgacgactac

SEQ ID NO: 455085 - DNA, 325 bp, Sorghum bicolor
acgcgtccggttcttaaaccagacatacttgcacctggcaatcttatatgggctgcatgggcacctaatggaacagatgaatcaaattatgctggtgagaggatttgcaatgatttctggaactagcatggctgcaccgcatattgctggcattgcagcactgataaaacagaagaacccaaaatggagcccctcagcaataaaatctgccctgatgacaacggccaatacactggacaaagggagccatcctcttagagcgcagcagtacactgcatcagaaatgatgacactctcacgggccacaccatttgattgtggtagt

SEQ ID NO: 455086 - DNA, 479 bp, Sorghum bicolor
  unsure (1)..(479): unsure at all n locations
cgtccggcagcatatgcactagctgttacatcatctgaggcaactgatttagctgggttgcttcatctggttaagttctataaaagccgccgctttgatgcagatattggaatgcccaggccaaacgactttcatgatgtcccagagtactttgttcttgaggcaatcccccatgcggtagctcttgttagatcatcggacaagaatagcccaaaaggagccattgagtttattcttcagctactgaagtacaatgataacaacgggaatatttactctgatgtgtactggctatctgcaatggtccaggcaataggcgaactggaatttggccagcagggcatgggcttnctatcctcccttctcaaagcgaatgatcggctcttgcaatttgacaactttatgcctggttataacggngtctngactgtcagctgcattcgtacccttgcacgaatagctaggaggtgtcatcttct

SEQ ID NO: 455087 - DNA, 459 bp, Sorghum bicolor
  unsure (1)..(459): unsure at all n locations
cgtccggaagctctttacgacatctgcttccgcactctgaagcttgctacacccacttttggtgacctgaaccatcttatttctgcaaccatgagtggtgttacctgctgcttgcggttcccaggccagctgaactctgacctccggaagctagcagtcaacttgatacccttccctcgcctccatttcttcatggttggttttgcaccactgacatcaagaggatcccagcagtaccgagccctcaccgtccccgagctgacccagcagatgtgggatgccaagaatatgatgtgtgcagctgacccacgacatgggcgctacctgacagcatcagccatgttccgtgggaagatgagcaccaaggaggtggatgagcagatgctgaatgtgcagaacaagaactcatnctacttcgtggagtggatccccgacaacgtgaagtcgagtgtgtgcgac

SEQ ID NO: 455088 - DNA, 422 bp, Sorghum bicolor
cgtccgaatagctctgaggtcactcagaacaactgccgcactgacagagccaatctgatctcttctgccccatggattaagattccttacccgcggcagtggggtgcaccaaccttcaatgctggccagtcatttggtatggtgtctgctgttttggtctcgctagtagagtccactgccttttacaaagctgctgctcggcttgcaagtgcgactccacctccggctcatatcctgagtagaggcattgggtggcagggaatcggcatccttcttgatgggctctttggaacggggactggatccactgtctcagtggagaacgttgggttgcttgggtcgacaaggatggggagccggcgcgttatacagatctcagcttgcttcatgatatttttctccatactgggggaaattggagc

SEQ ID NO: 455089 - DNA, 342 bp, Sorghum bicolor
cgtccgtctgtcgataacatcgacatggcactgagagaaataaagcgagtcttaaagcccgacggtctctatgtgttcattgaacatgttgcggcaccagatggtacgttgctccaatttgttcaaggcgcgcttgatcccttgcagcaatttgtagccgacggatgccacctcacgaggaaaaccggacaaagcatcagggatgttgggttctcgagcctgagcctggatagtgtccggctgtcaaatgcctacatcattagccctcatgtttatggcgtagcctgcaagtgaagttatacaccatctttcgaaacctttgtaaatgatgccctcctgtat

SEQ ID NO: 455090 - DNA, 492 bp, Sorghum bicolor
  unsure (1)..(492): unsure at all n locations
cgtccgcccacgcgtccgcagccctctagtaacactagctagctagcagccgacgctggtgcgatcttccctcaactccgaccccaggaacgcgcaggcgctgcgcccagcctacctgcatccagcccacatgcttcatgcccaagctcttcggccagaggagcaagaagagcagcggcggcggcagcgccaagaaatccaagggcgccgagccctgcaggcagcagcaggcgcccaccggcctgccggagctcgtcgtggagccgaccggtgcgcgctccatgtcgttcgtgggcacgcacgagtacctggccccggagatcatcaagggcgagggccacggcagcgcggtggactggtggacgttcggcatcttcctgcacgagctcatgtacggcaagacgccgttcaaggggcagacgaaccgcgccacgctgttcaacgtcgtcgggcagcagctcaagtcccggactgncccgcacgagcacgcca

SEQ ID NO: 455091 - DNA, 454 bp, Sorghum bicolor
  unsure (1)..(454): unsure at all n locations
cgtccgccgtatgaggcagctcgtgctcgttcgagactgagaggcacccccgcagccgcctcgcaccgcgcagatctcgccgccgacgagatgctccggcgcggcgtgctcctccaggcggccgtccacctnctcctcctcctcgccgtcgcacgctcgcccctcgcgtacgcctcggaggccgaccacaagtataaaacagaagaaccagttaagctatgggtaaacaaggttgggccttacaataaccctcaagagacttacaactattacagtctcccattttgtcaaccatctgaaaacccttcacataaatggggtggtctcggagaggtccttggtggaaatgagctgattgatagtcagatcgatataaagttcataaaaaatgtggacaaggaagccatttgcacaattgaacttgatgctcaaaaagttgaacaatttgctaatg

SEQ ID NO: 455092 - DNA, 405 bp, Sorghum bicolor
  unsure (1)..(405): unsure at all n locations
cgtccgattgttttcttccccttctggcttctggccttctccttctacacagtctagaggcgtctgctcccccaatcccttccgcccgccccgcctgctcgacgcgatcccgccggcggccatggatccgtacaagcaccgcccttctagcgggagcaactccagcttctggaccaccaactccggcgcccccgtctggaacaacaactccgcccttaccgtcggacagcgaggacccatcctccttgaggattatcatctaatcgaaaagcttgctcagttcgacagggaacgtatccctgaacgtgttgtgcatgcacggngagccagtgccaagggtttctttgaggtcactcatgatatctctcaccttacatgtgctgattttctccgggctcctggggt

SEQ ID NO: 455093 - DNA, 449 bp, Sorghum bicolor
cggtcgaccacgcgtgcgggtggttgatttaactcgagaggtcttgatggcatccaaggaccagtttatgtgggaactggttgtgttttcaacagaacagcggtatggggttatgagcccccaattaagcaaaagaagaagggtggtttcttgtcatcactatgtggtggcaggaagaagacaaacaaatcaaagaagaagggctcagacaagaaaaagtcacagaagcatgtggacagttctgtgccagtattcaatctcgaagatatagaggagggagttgaaggcgctggatttgatgatgagaaatcacttcttatgtctcaaatgagcttggagaagagatttggtcaatctgcagcttttgttgcctccactctgatggaatatggtggtgttcctcagtctgcaactccggaatctcttttgaaagaagctatccatgttat

SEQ ID NO: 455094 - DNA, 243 bp, Sorghum bicolor
  unsure (1)..(243): unsure at all n locations
cgtncgcggacgcgtgggccgagcccttcttcctaccctgtccccgatccactcccggcttcccgctccgatcgatctgattcgccaccaccgcgcccatggcggaccagctcaccgacgaccagatcgctgagttcaaggaagccttcagcctattcgacaaggacggggatggttgcatcacgaccaaggagctgggaactgtcatgcgttcactagggcaaaccctacagaggctgactc

SEQ ID NO: 455095 - DNA, 368 bp, Sorghum bicolor
cgtccgaagcgattcaaattggaacaaacaagtcaagctgatcccttgaccttgctcaaggaaataactcaaaatgggatatcacaagatgtttgtgttaatgacctagagcctccagcttttgaggtgttaccttcacttaagaggttgaagaaacgaattattgcagctagccgggatgattatagtgctgtttttatgtcaggaagtggaagcacaattgttgggattggttccccggatcctcctgcattcgtgtatgacgatgaagactacaaggatgttttttggtcagaggcttgcttgctcactcgcgatgagaacgagtggtacagggaaccaatctcgtccaatgccacgtctagcaa

SEQ ID NO: 455096 - DNA, 481 bp, Sorghum bicolor
cgtccgcgtgactccagtacccagaatcggcggctgacgcaaggccgagcaggcgacggccgcagcggcgtcaatggggcacccttacgcgccggccgaactggatctgccgggcttcgtgccgctgaagctgtcccaggccgagatcctcgtgtcctacctcggcgcctccctcttcgtcctcctcgccgtctggctcgtctccggaagatgtggcagattgtccaagaccgaccgtctgctcatgtgctggtgggcattcacagggttgacccacataatgatcgaggggccctttgtcttcactcctgatttcttcaagaaggagaaccccaatttcttcgatgaagtttggaaagagtatagtaagggggactctaggtatgttgctagggacgccgcaactgttactggtgaagggatcactgctgtattggaaggccctgcatcactgcttgctgctatgctattggatcccgga

SEQ ID NO: 455097 - DNA, 558 bp, Sorghum bicolor
cgtccggtttcaaccagtcataattttcagctttagtagaagagaatgtgagcaccatgccatgtctatgtcaaaacttgatttcaacactgaggacgaaaaggaatgcattgagcaggttttccgtaatgctattggttgtttagttgaggaagatagaagtttacctgctatagagttgatgttgccgcttcttaaacgaggtattgcagtacatcattctggacttcttccaataattaaggagctggttgagttgctctttcaagaaggtcttgtcaaagctctctttgctactgagacatttggcatgggtcttaatatgcctgcaaaaaccgttgttttcacctctgtaaaaaaatgggatggtgataccaaccgctatattggatctggagaatacatacagatgagtggaagagctggccggcgtggcaaggatgaacgtggtatttgtgttataatgatagatgagaagatggaaatgagtgttatcaaggacatggtgttaggcaaaccagcacctcttgtcagtacttttcgactgagctattacac

SEQ ID NO: 455098 - DNA, 455 bp, Sorghum bicolor
  unsure (1)..(455): unsure at all n locations
cgtccgcctccccatcctgactgatttcctctccccaattcgcaaacttccccctcacttcgctgcatctcatcaccacgggcctcatcgcgaggacaggggcagcgctctctccctcgctccgcctttactgctgacggcgacgactggacgagctctgcctccgcccctacgccaacgtcaggtgcccaggtcttcgtcgggcccttcgccaggtcttcctcgggcacttcacccgcgacgagcacccatcaggagtaaaatggatgagactgttcctgctttggttaccggccaagcttcaactgatgccgtgacggagcaanctgtgaatgtgtacatatgggacatggatgagacactaattttgctcaagtcacttctggatggctcatatgctggggcttttgatggccctcaggatcgtgaggaaagtactgaaatagggaagcgat

SEQ ID NO: 455099 - DNA, 575 bp, Sorghum bicolor
  unsure (1)..(575): unsure at all n locations
cgtccgagatcctggaccgtgcaaaacaaaagatgggtattgatgcaaaagttatccaggctgggttgtttaacacaacttccacagcacaggacagacgagcattgctgcaggagatcctcaggagggggacaagctcgctgggaacagatatccccagtgagcgtgagataaatcgtttggctgcacgaactgatgaagaattctggttgtttgagaagatggatgaagaaaggaggcttagagaaaactacaaatctagacttatggatgggaatgaggttccagattgggtgtttgccaacaatgatttacccaagagaactgtggcagatgaattccagaatataatagttggtgcgaagcgacgtagaaaggaggttgtctattcggactcttttggtgatcagtggatgaaatctgatgagggantttgagacgttccaaaggcaactccaaggccgaagaggactgcttactcatctgacctncaagttgagtttagtgaaaggaggaaaagggctaaggctgtagaaaacagcgcagatggtgcgagcaacccaacgtggacacct

SEQ ID NO: 455100 - DNA, 450 bp, Sorghum bicolor
  unsure (1)..(450): unsure at all n locations
cgtccgcaaatcagctctcagatccagcaccgacaccatcgaaataaacccattcgtccaaccaccatccctaccgacgagcacacacccgncacgggcacctccggctgcagggccgtcgtcacctnctnctncgccaccgncgccgncggtgggctactgggagagccgtgtccggaagcctgacacgtccaaagaaacacgttcgccggcactgtcgccgccaccccaagctgcaaacttcaggagcgtncctgcacccaccgacgcgttcccaagccggctgcccgagagctccgaccaaggcgacaagtccgaggacacgacaccacngccgaagctgaagccgctgcactgggacaaggtccgggccagctccgaccgcgtcatggtgtgggatcagctcaagtccagtcattcaggtaacgagagatgatcgagacctgtcat

SEQ ID NO: 455101 - DNA, 329 bp, Sorghum bicolor
cgtccggagagcgtcgacgtcgacggggtgctgcattggccgcaggaacgacggctcggacagctccgagtactctgcgtcatcggacggcgagtgcgaggacgaggaggacctcaaaaagagagggagcttcatcggccggagcaccccgcaggagcatggcggcagcaagaagcacagtctgccccagcagcagcaggcagcccccgcgcctgcgacgctggtgacggtcgacggcgacggcgagctcgagatggaaacgctgctcaaggcgtcggcctacatcctcggcgccacgggctcgagcatcgtgtacaaggccgtgctcg

SEQ ID NO: 455102 - DNA, 409 bp, Sorghum bicolor
  unsure (1)..(409): unsure at all n locations
cgtccgtggagctatgcatcagcgtggtgttttcagctgggaaaatcgcatgaaggttgtaacaggcactgcaaaagcgcttgcttacctccatgaagctatagagccaaaagttgtacatcgtgatataaaatcaagcaacatattgattgatgatgaatttaatggcaaggtatctgactttggattggctaaactcttgggatctgacaaaagccacattactactagagtgatgggaacatttggatatgttgcacctgaatatgctaatactggaatgttaaatgaaaagagcgacgtttatagttttggtgttctcttgttggaaactgtgacagcaaggaatcctgttgactacagccgatcttncaatgaggtcaatcttggtgaatggctcaaaacaatg

SEQ ID NO: 455103 - DNA, 569 bp, Sorghum bicolor
  unsure (1)..(569): unsure at all n locations
tgcgtccgaaaccatatatacagcaacaactgatgcagcagcgaacattggtgcagcagatgattcagttccagcaaagacacgtgcaccaactgccccagcctcacataatgcaaaggggcttcctataagaccaggtgaagtggattgctcgttttatatgaagacaggcagctgcaaatatggttctgttcgtcgcttcaaccatcctgatcggccagctgtggatatagcttttgtggctccactgcttccttgtccagcatccactgtccctggagtggtgctgaatccggctgcaaatttcctgcaaagctttgattttcatgcaagtcacgtgccggttgagcctgcgccgatctatcctcaaaggcccggagaaattgtttgtgatttttacatgaaaacaggatcttgcaagtattctcagaaatgcaagtttcaccaccctattgaccggtcggcacctcatttcaatgaaaacggngaccctcagccgcctgttacacttggctttccaaggagagaggacgctgaggcctgtgccttctacatgaggtctggcacgt

SEQ ID NO: 455104 - DNA, 708 bp, Sorghum bicolor
  unsure (1)..(708): unsure at all n locations
cgtccggggccaacaggggcaggttttacacctcatcttatttttgtaaaagccggagaggacgtatcggcaaagatcatgtccttctctcagcacgggacacgcgcggtttgcatcctttcagcaaatggcgccatatcaaatgtgacccttcggcaatctgctacttcaggtggaacggtgacatacgagggtcgtttcgagatactgtctctgtccgggtcgtttcttctgtcagagaatggcggccatcgcagtcgaactggtgggctcagcgtttcgctagcaggcccagatggccgtgtcctgggcggtagtgttgccggacttctgacagctgcttcaccggtacagatcgtagtggggagcttcgacgccgatggaaagaaggagccgaagcggaagaagcttgctccgtcaccgtcagacccatcgccggcgccactaaagctcgcgccggcgacgacgggcgtggcggcagggccgagcagcccgccgtcgagagggacactgagcctgagcgagtcatccagcggcgccccgagcccgccgcacgcaggggccagcggcggcggcggcggccatgggcagcagcagcagccaggggtcttctccggcctgtcctggnaatgaccagatcccggataccgtctgaatctgaccgtggtagaactggcagaaagaagagtgtttcagcggctgaaggat

SEQ ID NO: 455105 - DNA, 584 bp, Sorghum bicolor
  unsure (1)..(584): unsure at all n locations
cgtccgtgatgttgtttgctgtttagtaatgtcaaggcatagattgaatagtaatgcaaattcttgttttttttctacaggttggggcccctgcccgtgttggtctggttgctccagttgatgttgttgtgccccctggcaacactgggctggatccctcccagacctctttcttccaggtgcttaacatccccaccaagattaacaagggtactgtggaaattatcacccctgtggagctgatcaagaagggtgacaaggtgggctcatccgagtctgccctgcttgccaagctgggtatccgtcccttctcatacggtcttcaggtcaccaatgtctatgaggatgggtctgtgttcagtcctgaggtgcttgacctttctgaggaggacctgattgagaagtttgccactggtgtctccatggttgcctctctgtccctggcaatctcatacccgacccttgctgctgtgccccacatgttcatcaatgggtacaagaatgttcttgctgttgctgtggagacggactactcgtacccacatgctgacangatcaaggagtacctaaagggtatatatacg

SEQ ID NO: 455106 - DNA, 531 bp, Sorghum bicolor
  unsure (1)..(531): unsure at all n locations
cgtccggctgctgctcaccgccgcggcggctgggctgcccggcggccggacgctggtcttcatcctggccgggcagtccaacatgagcggccgtggtggcgccaccaacggcacctgggacggcattgtcccgccggagtgcgcgccctcggggcgcatcctccgcctctcccccgcgctccgctgggaggaggcgcgtgagccgctgcacgacggcatcgacgtgggcaacgtcgtcggcatcgggcccgggatgcccttcgcgcacgccgtgctggccgccaccagcagcggcagcgactccgtcgtcgtcgggctcgtgccgtgcgcgcagggcggcacccccatcgccaactggacccggggaacggagctgtacgagcggatggtgacgcgcgccagggcggccgtggctgagtgcagcggacgcggngagctcgccggcgtgctctggttccagnggggaggctgacaccatgaggcgcgaggatgccgagctctaccggcggcggatggagactctcgtgcatg

SEQ ID NO: 455107 - DNA, 566 bp, Sorghum bicolor
  unsure (1)..(566): unsure at all n locations
cgtccgcacgaattcatgatgatgcacgcataccccaacctccaatggatggtgtgaagacgatcctctgctccggtgatcaccacctgacaaacttctgcgcgccttcgaagaagtccagcatgtagtcctcgaggtcctcgaggctgcacttgacgtgcctcgccgggtgccggctgccctgcccgaggaacgcccggtacgccgggatgagccgctccgacaccgcgatgcgcagctcctcccgcagctggacgtccgccaccttccacgccgtctgcgtccggtacagctcctggaacgccgcgttgaagctcttcgccgacgggcccgacggcgccctgtgccctgccggcggcctcgccgacgcgccgtcgtccctcctcagctgcgacagcacggcggtccaggacgcccgcaggtagccggtctcgtactgccggatctggccgcggtgccgccggagccagtcgtcgccgacgagctcccgcagcgccggngactcccgcaccttctgcaccacgtagtagagggtgttcatcaggaagatgttctgcagcccggcg

SEQ ID NO: 455108 - DNA, 554 bp, Sorghum bicolor
cgtccggggaaaacagaaaccaggctagcaacccaggccctttactggaacggcctggtgataaaagtgagttggtcactggccttgatgaaggttgctatgtgcatgctgagcagccacctgtgatgggatggactgttggacctcagatgcttcatcctaaatatggtgttttagtagaagagagccaatttgagtcaaatattgccgacaatcatttaaccaggaagcctatttccataaaaaacattccaaggaatccactcgttgacgctgttgctgctcacgacagaagctcgatgagaaaggtttcagagcttgcaccatcaactgacaagctgaagcctaatgagagaaacatgttgctagaacagataagaagcaagaccttcagcttgaaaccggttgctcctgctaagccaacagccatgagatcacctgctagaaccagtactagaaacttgaaggttgccgctatcatagaaaaggcaaatgccatccgacaggttgtctctctgcgcttaacttcagcttcatttgcgcgacaggttagc

SEQ ID NO: 455109 - DNA, 582 bp, Sorghum bicolor
  unsure (1)..(582): unsure at all n locations
cgtccgcgagaaagagcttgatgggtggggtgagaatgacaggggtgtttcctacacatttggagctgatatagttgccgagttccttcagaaacatgatctagatttgatctgcagggcccaccaggttgtggaggatgggtatgaattttttgcaaaccgccagcttgtaacaatattctcagcaccaaactactgtggagagttcgacaatgctggtgcactgatgagcattgatgactccctagtatgttcgttccagattctcaagccttcagaaaagaaaggaaaagcaggaacttccaacatgtcaaaacctggaacacctcccaggaagataaaaataagtgttactcgaatttagccagattctcgatatcaaattggatttgagaagttgtgattaagtgctcccccaaacttgttatggtagggtttttggtggtcttaacatggtgttaaactgtggactgccgtgcctcatgtctctgatcaagtctgatgcgaatgtatcctggtgtggactgccgtgcctcatgtctctgnatcaagtctgatgcgaatgtatcctggtgttttgcc

SEQ ID NO: 455110 - DNA, 600 bp, Sorghum bicolor
  unsure (1)..(600): unsure at all n locations
cgtccgcggacgcgtggggtctgcctgccggcgcacactgcctctgatccaccgaccccgcgcggtccgacattgccgtgccccagccggcgacctgagaccagctcgccaccgccgggagccgagaccaaatggggtccttcaacggccacgtgctgccggggacgctgttcctagcggtaggcctgtggcgagtatggtccgcggtggcgcgcttcgccgccgacccaccttccttccgcgtccgggcgtggtgccccctcgagctccccaccagagcgccccgcctcctggagctctacgtggtggccggcggcgcgttcctcgacatgtgccttgagctcggcggcggcgtcctcgccggccgcggcggaggcgtcgccccggagtccagcctcatctacctcgagcacgctggcatgctcctcatgttcttcctcttcggcgcgctcgctctcctctcccagaagtgcaccaggtacctgcctctgaccgacggcgagctgtgcctggtggcggcgacggcgttcacatctgaattcctgctattctnctaccactccgncacccacatgggcttggaaggctactaccaccacc

SEQ ID NO: 455111 - DNA, 507 bp, Sorghum bicolor
  unsure (1)..(507): unsure at all n locations
tgcgtccgaatgggccctctagagccgccgccgtcgtcggagccggaggaggacggcgacgacgccaccgccgtcacgaggtcgcggtcgcggtccaagtccaagtcgcagcacctgacggtgatgaaggcggccggcacggtggggtacatggacccggagtactacgggctgcaccacctgacggtgaagagcgacgtgtacgggttcggcgtggtgatgctggagtcgctgacggggcggcgcgccatcttcaaggaagccgagggcgggagccccgtgtccgtggtggactacgccgtgcccaccatcgtgggcggngagctcgccaaggtgctggacccacgcgccccggagcccgcgccgcacgaggccgaggccgtggagctggtcgcctacaccgccgtccactgcgtccggctcgagggcaaggaccgacccgccatggctgacatcgtcgccaacctggagacggccttcgcgctctgcgagggtagcgccggcagc

SEQ ID NO: 455112 - DNA, 622 bp, Sorghum bicolor
cgtccgcccacgcgtccgggctcttccccctgtgcttctttgcgccggtgttttctcttccttcctgccgcggcgatggcgtcgggtgacaacagcaagcagaggagcgaggaggagtggcgcgccgtgctctcccccgagcagttccgcatcatccgccagaagggcaccgagttacctgggacaggagagtacaacaaattctatggcgacggggtttataactgtgctggctgcgggactcccctgtacaagtccaccacaaaatttgattctggctgcggctggcctgcattctttgaggggcttccaggagccataaaccgaacaccggatcctgatggtaggaggacagagattacatgtgcagcttgtggtgggcatctgggccatgtgttcaagggagaaggcttcaagacacctactgatgagcgccactgcgtgaacagtgtttctatcaagttcagtcctagctcctagctagatcatcttccccctggatgagattctcgtgcctggaactgtgggggagcacagcgaaacgatgaataagatctattcagcacatgtgttatctgattgagagatggatctattaccataatcagttgttactctacgt

SEQ ID NO: 455113 - DNA, 678 bp, Sorghum bicolor
cgtccggcttatggagataactgagtcaactcagtgcagatcaatcaaactggcggataacatgagaacaagcaagatctcgagattgatttacacaaattctggtcttgctatcttggctttaacttcaagcgctgttcatctactctggaaatggccacgcagtgatcgcaattctggaaaggcgaccgcgagtgtgtctcccaccctatggcaaccaccaagtggcatcttcatgactaatgacacaactgataataatcctgaagaagctgttcactgctttgctttgtcgaagaatgattcatatgtcatgtctgcttctggagggaaaatctctctgttcaacatgatgaccttcaagacgatgacaacatttatgcctgcaccgccagcagcaacttttcttgcatttcacccccaagataacaacataattgcaattggaatggatgactcgaccatccaaatctataatgtccgaattgatgaggtcaaaagcaagctcagaggtcactctaagagaatcacgggtcttgccttttcaaatgtgctaaatgtgctagtctcttcaggagctgatgcccagttatgtgtttggaacacggatggatgggagaagcaaagaccagatttttgcagataccatcaggtcgccaatccatatcttggacactc

SEQ ID NO: 455114 - DNA, 571 bp, Sorghum bicolor
  unsure (1)..(571): unsure at all n locations
cgtccggcctcctccatgtaaggaagaggaagcgccacctccactgatagaggatcacactgcagttagtaccgggccacctgtgaaaaagaggcagcggggccggcagcagaaccggcagcctaagtcaccaaagcctaaaaagcctaagaaggctgctgttccagtggaggatggagcacccaatgggcatgcgccccgaaggaggggacctaagaagactgtggggatggtgattaatggtattgagctggaccttgccaacataccaacaccagtctgctcgtgcaccggatctccccagcaatgctaccggtggggtgcaggtggctggcagtctgcatgctgcacaacttctatatctatgtatccacttccaatgagcacaaagcgccggggtgcacgtatttctggaaggaagatgagccatggtgcattcaaaaaggtgcttgagaagctggctggtgaagggtacaaccttgctaatccaattaacttgaagacgttntgggctaagcatggtacaaataagtttgtaacgatcaggtaaagaaataggcatgctatgttt

SEQ ID NO: 455115 - DNA, 680 bp, Sorghum bicolor
  unsure (1)..(680): unsure at all n locations
cgtccgcgctcgcctacaaatcacggcgccgtgaccacgcgccgctgctctctccccagtcctccacctcgcaccgccgttcccatttccggcctcgccggtgcgtgcatgcgcgcgcgagggacggcaagtgagctcagctccagcacgcaatcggcagcagagtgagctcaacctctccctccgtcgctgctccgcggcctattgaattatgttcacagttcggggatcaagaccatcgggccaaactattccaaagaaattttcagacatgagatactccaatgtttcctggacattccttctactgctatgttttgtttcgatggcagatgcagagtacatgaagtacaaggatccaaagcagcctattaactctagaatcagggatcttattggtaggatgacccttgctgaaaaaattggccaaatgacacagatagaacgccaagttgcatctgcaaatgtcatgaaaaagtactttataggaagcatcttaagtggtggtggaagcgttcctgctccccaggccagtcctgcaatttgggtgaacatggtcaatgaattccagaaaggtgccttgtcaacgcgtctaggaattccattgatttatggaattgatgctgntcatggtaataataatgtctacaacgccactttattccctcataacatcgggc

SEQ ID NO: 455116 - DNA, 583 bp, Sorghum bicolor
cgtccgggacgagagatgaagggtggcaatcaagcagccatacctcagactttggatggatgcaaatggcagagccagtgatgaatctttatacagaatcaactgatggatcctatattgagaccaaagaaactgctttggtatggcatcatcaggatgctgacccaggctttgggtcttcccaggcgaaggagatgctggatcacctggaaagtgtactagcaaatgaaccagtcgcagttaagagtggtcagttcattgtcgaagtgaaacctcagggagttagcaaagggcttgtagctgagaagatactcacattgatgaaggagaaagggcggcaagcggattttgtattatgcatcggtgatgacaggtcagatgaggacatgtttgaaaatatcgctgatgtcatgaagagaaacaatgttgctccaaagacaccgctatttgcatgtacagtggggcagaaaccgagcaagccagggtctaccttgatgatacatttgaagtagtcaatatgctgagcttgctagcagatgcttcggaacctgaccctgtaatagagttggaggaggatgacttg

SEQ ID NO: 455117 - DNA, 462 bp, Sorghum bicolor
  unsure (1)..(462): unsure at all n locations
ccaatctcaagttctaactgctgctcgttggctgcttccgatccgtaccgatcacaggacgcgacgcagccacagcccacaggcacctgcaagcacagcgtgctattcctggggctcgctgctcagaccgggcagggcaagagcagcaggcagcgagcatgacggcgaaggatgccaacccaagcgggccatcatcggaggtgaccgccgccggcggcggcggctgcggctttggcgaggagcaagaggcgctcgtgctgaacgcgtggaacgccatgaagggcgagtcggcatcgtttgcactcaagttcttcctcaggatctttgagatcgcgccgggcgccaagcagatgttctncttcctgcgcgacgacgccggcggcgacgcgcccctggagaaccaccccaagctcaaggcccacgccgtcaccgtctttatcatggcttgcgagttcgcgacgc

SEQ ID NO: 455118 - DNA, 372 bp, Sorghum bicolor
  unsure (1)..(372): unsure at all n locations
acccacgcgtccacgcgtgcggcaggtcaaacctttagccactacagcagctataagcaaccaaaggatatactttttgcttctggcacgaatcacactggtcatgcagcaaaacttataagccatctaggacgacccaataatgagagtttctcacggcaccacctttgttcttcaccacaaaacatcagtaagcgaaggtctaaccttagctntaggccacgagctcaaacgataagcagtgagcctggaatccacatgctgagcccctgggaaatccttaggagggacaggatcccccctagctttctcttcagtgctgccactgcatcataccaaactgaaggtgcttggaatgaagatgggaagggg

SEQ ID NO: 455119 - DNA, 320 bp, Sorghum bicolor
cgaccacgcgtccgatcgggctggagacggcgcgtgttctggcgttgcgcggcgtgcacgtcgtcatggccgtccgcaacgtctctcgccgggcgtcgaggccagggaggccatcgtggccaagatcccccgcgcaaggattgacgtcctggagctggaccttagctccatagctttcgttaggagattcgcctcccatttcgactctctgaacttgccccttaacattctcatcaacaacgctggagtgatgacaaggaactgcacacgttcctgcgacggtctggaactgcattttgtgacaaatcacattgttgtgt

SEQ ID NO: 455120 - DNA, 463 bp, Sorghum bicolor
  unsure (1)..(463): unsure at all n locations
gacccacgcgtcgtattgagcattccgtcctgtccctcctgactcgcatggcagataaacggataacgttgaggatcggcaggctcgggccaggcgcctcaagcaggatgcagctcgcgcgcaacgaccccttataccagganacatgacctacatgtcaagtatgacaccggcacggcctgaagcacaggaaatcaccctaaggactccaagacccttctttcgtgagaagccgtcaccgtctttggcatcaggaaccctgaggagatcccgggggtgaggctgggctgactattcggnagtccactggtgcttactgacaggcaaggctgctgcacattgaagggtgtgccaagaagttgttatcttgcccaagcaaagatgcacccatgtttgttgtggtgtcaatgaggacaagtacacctcggacaataacattgggtccaatgctagcttgaccacg

SEQ ID NO: 455121 - DNA, 393 bp, Sorghum bicolor
cgtccgatctgctggtgttaggctagaggatatgtctaatcaactgagaaaacgaataatgaagaagcgcagagtcaaaactctttcatttgcgattacaaatgatgtgtgcatagaagtgaatacatatgcgctggtccgtcctactactccagggacaatcacatggcttgattcactaagtaaccttccattaaaggctgagaggtctttcatatgcaatgatactggggctctacttcaggatgcacagacacgtttccagatgtacaatgacacaactgtcaaattttctgtacgtgaactctctgaggttaaaagggttgcaagccatcatcttcgccttttaggtttcaagccattggattgcttgaaagattatcataacttaag

SEQ ID NO: 455122 - DNA, 536 bp, Sorghum bicolor
  unsure (1)..(536): unsure at all n locations
cgtccgcataactgaaaaacaagctaaaatggggctagtttgtcgtgttcactcaaacgataagagcaaattcaagttgctttattttgagcttgaagaaaatggtgggcttagtcttgcactacaggaagacagtgtgaaggttgggaaagttactgctgcagggatgtatttccttggttttcctgtgtaccgttttgaacaaaataacctggcagctgctgcaaaggattctgatggtgcattctttaaaagattggatagctttcagccatgtgacatacatgaactgaaacctggaacccacttctttgctgtctatggtgacaatttctttaagaccgcaagttatactatagaggttgtatgtggtgaatcttttcctgccgaaaaggagatgctacgaaatgtggaggcaaagatactcacanaacgagctgaactttccaaaattgagtcagaagtttagggaggtttggcaaagttcactgaaatgaccagcaaatacacacaagaaatgcaagcgatttgatgat

SEQ ID NO: 455123 - DNA, 416 bp, Sorghum bicolor
cgtccgggcgcgccacctggaagagcgcctcgccgacgccgccatgggacgcgccttcctcctccagggcggcgactgcgctgagagcttgaaggagttcaacagcaacaacatccgcgacaccttccgcgtcctcctgcagatgtccgccgttctcatgttcggcgcccagatgcccgtcgtcaaggttggtaggatggccggccaattcgcgaagccaaggtcggatccgttcgaggttagagatggcgtcaagctgcccagctaccggggcgataacattaatggcgaggcattcgacgagaagagccgtgttccctacccacagaggatgatccgcgcgtatgcgcaggctgtcggatcgcttaacttgctccgcgccttcgccaccggaggctacgctgtcatgcagcgcg

SEQ ID NO: 455124 - DNA, 477 bp, Sorghum bicolor
cgtccgcgtgaacgagcggtaatgtgctacactaattaaaatagtcatttctatggatacatctatgttcctggatactacctgagctggactgagactaaaatgttttgttgttgttgatgatgttgtggatgcttgtatgttcctggttaaattttgatttaagcattatttttaggataaagaaattgcaatgcttgttttttattagtttcctgtactcacaggcaaaggctttggctgagaagaatgaactagacatgcagcaacaaagagagcaggctgtaagacataggcttgcggaaacactgtactttgagattaagcgctgggctgttgtaaaagatagcaatttgcgtgcattgttatcaactttacaatatagttctttggccagaatgcggatggcagtctgtatcccttactgatttgatcactgctgctgctgttaataaagtgacaaaaaagcaacatttt

SEQ ID NO: 455125 - DNA, 460 bp, Sorghum bicolor
cgtccgcgccgcggctctaccctaaccctccccaccaccatggccggcgcacaggagaccctggtgctcgccggcgtgatgcgcggccacaacggcgtggtgacggcgatcgccacccccatcgacaactccgatctcatcgtctcctcctcccgcgacaagtcgctgctggtctgggacctcaggaaccccgtccaggccgccggggacggcaccaccaccgccgactacggcgtcccactccgccgccttacaggccactcccacttcgtccaggacgtcgtcctcagctccgacggccagttcgtgctctcggtgtcctgggacggcgatctccgtctcttgaatctcagcacgggcgagaactacctgccgcttcgtcggccacgagaaggacgttctcttcgtagtcttctccgccgacaaccgtcagatcgtgttcgcgttccgtgatcgcacc

SEQ ID NO: 455126 - DNA, 356 bp, Sorghum bicolor
cgtccgggcgctggccgaggaggaagggctggtgccgtgttgcaacgacagtcccatggtgccgaacgacaaccagtggtgcgtcgacgcgctgggctccgtgctggagaagcgcgtggtgaacctgactcaccgcaacaccacgtgcgacacctggctatgcttatgcgggatacggctccatgagatcgggtcgctgcggtgtcccttcgtgttggcagacatgactggcgccaccagcaataacgccacgcccactgtcggcgctaatgacctgattaagagctagcggaacgccttctacatcggctgcttccggagcgtgcagtccctgcaaaagctgaaaggagaacgtg

SEQ ID NO: 455127 - DNA, 506 bp, Sorghum bicolor
cgtccgcaggagcttattgcacgggatattcatgatgtcgagtggaaattcaggcatatcttccgaggccagcccaaaagacacctgctgactactggctggagtgtgtttgtcagtgctaagagacttgttgctggagattctgtgctattcatatggaatgagaaaaaccagcttttgcttggaatcagacgtgccagccgtccacagactgtgatgccctcttctgttctttcaagtgacagcatgcacattgggctccttgcagcagcagctcatgctgctgcaacaaacagccgcttcacaattttctataatcctagggcaagtccatcagaatttgttatacccctttcgaaatacatcaaggctgtttttcacacgcggatatcagttgggatgcgattcaggatgttgtttgagactgaggaatctagtgtccgcaggtacatggggacaataacagaagtgagtgatgctgacccagtgcgttggcctagcttcta

SEQ ID NO: 455128 - DNA, 446 bp, Sorghum bicolor
cgtccggcaaatagacaatctgcagcacggtcaaaggaaagaaaagctcgatatataacagaattggagcggaaggttcaaactcttgagacagaggctactactctttcagcgcagctaacactgttccagagagacacaactggactttcggcggaaaatgctgagctcaagataaggttgcaggccatggagcagcaggctcaactgcgtgatgctctaaatgatgcactgaagcaggaagtggagaggcttaagatagcaacaggtgagatgtcgaagtccaatgaacaatttaatatgggaatgcagcacatctcgtacagcccttcattctttcagctcttagagcaacacacagttcagcagcatggaaatattcagctggcacatcatttccaacagccgccaccgaatgttccgagtcaccagatgctattccaccc

SEQ ID NO: 455129 - DNA, 433 bp, Sorghum bicolor
  unsure (1)..(433): unsure at all n locations
cgtccgggtgcacaaaaccttgtgctatccacagtagaatcagctgctcagcttcaaattcccagttcctggggaacatggcgcaatatgcaaagcattgtttcaggtgtccagctaccacctttgcggcaagaggaagaccactgagtgtctcagcaattttccttccaatgttctccaattttgagttgatggtatgttctgtctcatcaaacacagaagtctttaccagggaccaacagtcattaacttgcaaggtctccaaactaattatataggatgattgcagcatctctgctactatacttgaccgagttgtcagaagtatcttgctcccaattgctcctttgtttagaggggctagcagcttctgccagttctcttgttctattgctattgntctgttgtcattgttccaaacatcatctaagac

SEQ ID NO: 455130 - DNA, 461 bp, Sorghum bicolor
  unsure (1)..(461): unsure at all n locations
cgtccgccaggaagcattcgctccagactcctggaaaagaaggtggtcatgatgggttggtttttatgaatgacacaatctacattgaccctgcgatatctgatgagatgaggaaaaagatttctgatgctgctacgagagaaggtgcaaagttgctggagcactggtttattggctgccctgccacgtatattgtctgtgaggatgcttctgttaagagatatgtaggccactcagataacattgtaactccactttggatcttgaaaacagtgaaggagaaaaacttgcagcgccttgtccatttgtcttccgacctagctaggcatgttgccatggttctggaaaatgtccagacatctgaagagaataggaaactttgaagtgttccttctataagcacaagctcctgtggtcgtccatcaacccaagaggagatngatgaagtccatcaagagaga

SEQ ID NO: 455131 - DNA, 577 bp, Sorghum bicolor
cgtccggtctctgatgagttctactttgttggaagacttggagaaagaagattgcacccctccaagcagaagtttcatggactacccagggagaccagaaacatgtcaaagaagggtacctgcactgaactatgatgcagagagtgaaactttatccagagcaggatcaatgctatctgaaattatcaccacgagggatggactgaagggaaacagctctgttgctggtgatacagaatttgttgctggcataggtgaatttgtcgcggagctaaaagaaatggctcaggtacagtatcagaagcaacacggtgatcagggtgataatggagaattggccgaagggaccataaggagcgtgggtctggatcccattatggatgccttgcaatcgccttctcgctggccattagaattcgagaagaaacaacaagagatcattgacctgtggcatggatgcaacgtttccttggtccacaggacttactttttcctgcttttcaaaggggacccagccgacgccattttacatgaagtggagcttatgaggctatcattcctcaaaaataccacatat

SEQ ID NO: 455132 - DNA, 533 bp, Sorghum bicolor
cgtccgaaagcttgaaaagggtttgagatactattatccagcaatgtgctcaaatcaccaagatgaaaattctgctcttctgcactatattcagactcatcaggataatgtcaagcaaaatgttctacttcaactacttgctcttgttggcaagcagccagcttttcatcaattgcgatcagttgagcaacttggctacatagcgcttcttaggcaaagaaatgattcaggtgttcgtgggttgcaatttataatccagtcaactgttaaggatcctgccaatctggatgccagagttgtaaattttctcaacatgtttgaaggcactctctacaatatgtctgatacagagttcaagagtaatgtaagtgctcttattgatatgaaactggagaaatacaaaaatatacgcgaggaatcagctttcttcttgggagagatttctgaaggaaccctcaaattcgatagaaaacaagaagaggtgctgcactgagggagctcaagaaagaagaagtgtagacttcttcaatgat

SEQ ID NO: 455133 - DNA, 580 bp, Sorghum bicolor
  unsure (1)..(580): unsure at all n locations
cgtccggaggcgacttcccccccggaggttttgcatcttctctcacgagtcctcacctcgtccctcgcagaagcatcttcattcctcactcctcttctctcctccgcattgttcttggaatcgaagactggaagagcaatgagcaacgaattcgattacctgttcaagcttctcttgatcggcgattcctcggtgggcaagtcctgcttcctcctccgtttcgctgacgactcctatgtagacagctacatcagcacgattggtgttgactttaaaatccgcacgatcgagatggagggcaagaccataaagctgcagatttgggacacggcagggcaggagcggttcaggaccattacaagcagctactaccgaggagctcatgggataattattgtttatgacatcacagacatggagagcttcaacaatgtgaagcagtggcttagtgagattgatcgatacgccaatgacaccgtatgcaagcttcttgttggcaacanatgtgatcttgctgagagcaagactgtcgatacttcagtagcacaggcttatgctgaagagataggcatcccgttcc

SEQ ID NO: 455134 - DNA, 616 bp, Sorghum bicolor
  unsure (1)..(616): unsure at all n locations
cgccgccgctgctgccgccatggccgacgagatcgacacgaggccggcctccgcgggctcccggggccgccccgcgcacgctacggaggacgacgacagggaggagggagagatcgccgacgacacccccgcgcccgccctccccgtcacgcacccgctcgagcactcatggaccttctggttcgacaacccgcagggcaagaacaagcaggccgcctgggggagctccatccgacccatccacaccttctccaccgtcgaggacttctggggcctttacaataatattcatcaccctagcaagttggtcattggagctgacttccattgcttcaagaacaagattgaaccaaaatgggaagaccctatttgtgctaatggcggtaaatggaccatcagctgtggaagagggaaatctgacacactgtggctgcacactctgttggctatgattggcgaacaattcgactatggtgatgaaatttgtggagcagtcgtcagcgtgcgtggcaagcangaaagaatagctatctggacaaaaaatgctgctaatgaagctgctcagattagcatcgggaagcagtggaaggaattcctggattacaaggacttcatt

SEQ ID NO: 455135 - DNA, 413 bp, Sorghum bicolor
cgtccggccattcgtgatgccaatgctgctctagagatcaacccagactctgcaaaaggctataaaactcgtggaatggcatatgccatgcttggcaaatgggaggaagccgctcgtgatctgcacacagcatctaacatggattatgatgaggagatcagtgctgtgctcaagaaggtggagcctaatgctcacaagatagtggaacatcgcaggaagtacgagaggctgagaaaagagagggaggaaaagagagcagagcgtgatcggcttcgtcgacgtgcagaggcacaggctgcttatgacaaggccaagaggaaggagcaatcttcaagtcgctcatcatgaggtgcatctcccagaggtttccctggagggatgcccggtggaggtttccctggagggatgcccgg

SEQ ID NO: 455136 - DNA, 371 bp, Sorghum bicolor
cgtccgatcgagaatatgcagtatgctgttactgtagacgttcttcatactgtgttctcatcatttggtacagtccagaaaattgctatttgtgagaagaatgggggaacacaagctgattcagtaccctgatgtaaatacagctgctgtagcgaaggaagcattggaagggcattgcatctacgatggtggctactgtaagcttcacctgtcatactctcgtcatactgatctgaatgtgaaggcacatggtgacaagagcagagattatacaattccagctggcgtaacccaaggagtgccacaaccacctggtgtacaagctacatcctttgggtggcaaggtaaccttcaagctgctggggcatatg

SEQ ID NO: 455137 - DNA, 470 bp, Sorghum bicolor
cgtccggaaacctctacacttctgctgaactgccagcaggtttatttcgtgtgagagttcgatcaaagacctacattgtatcagtagatttgaagaagcagctgccattaagtcaactctcagagttacctgtgcctagagaggtcttgcagggtcttgatgttgttgtgcgtgaggcctccagatggcgcaagattatccttggtagaggattttactcaccaagcagcagtgtagacattgggcagggtgctgtagctatgaaaggaacccagcagacccttaaatacactcagcaagggctgatcctatgtgttgactattcagttatgccattttacaaagctgggccggtgatggatattgttcagaaattagtaccccaccttgattaccggacaacactgaacaagaggcaactggaaaatctgattgaggagctcaaaggccgacgtgtgactgtggtcatc

SEQ ID NO: 455138 - DNA, 558 bp, Sorghum bicolor
cgtccggagcctgttgcaaaaagtaggtgggagcctgttgcagaggaaaatgttgctaacaatgtggaaatttctaatgagttggcaaaaattaatgtctgcagtagtttcgaacccactaaaagaacgagtaacaattgggatctgaggaagcatgtccaatgccaagctcctttaagccaattcagtcataggcctactaaaatgcagcgaactggtggtgatgcaagtcttactgaaaatggaaatgccttaagtgatgctgacaaggagcaggatctaatgaaatattacactagttcaattgcacaagcaaattcacctgaggaaaagaaacggcgggagcatagatctaagcgatttgaacagagtcaaggcacaccatcaaaatctagaagttctataccagataaggttgccacagacaacatatatacaagtagagctatgtcactgcttttcaatagaagtaatggagatagtgctggtttggcagtggaggattatgattgggatgcactgacaatcaagggaacatgccagcaaattgagaaacaa

SEQ ID NO: 455139 - DNA, 517 bp, Sorghum bicolor
  unsure (1)..(517): unsure at all n locations
cgtccgagagtacaatttattttgttataaaattntaaagcacttcagtcgtcctcctaccttacacatcactttttgaaacatctaccttacacattatcatcaagtgttaatttctcattctcatcaggtacttgaagtaccacgacctacacggaggtgaacaagaatcgaggaaatcaaattacactgatttggtgaataagtactatgatcttgccactggcttctacgaatatggatggggcgactcattccattttgctggcagatatccaggtgagactttccgtgaagccatcaagcggcatgagcattttattgcactacaattggggctcaagaaggggatgaaggttctggatgtgggatgtggaattgggggacctttaatagaaattgccagattcagctcagcaatgataactggattgaactacaacgactaccagattctaaggggcaagggttttattttaacctttctttttggaataaaaaacctttttggcatttt

SEQ ID NO: 455140 - DNA, 493 bp, Sorghum bicolor
acgcgtccgcggacgcgtgggccaaggtcatgaagggcggctggctgcccttcgccatctcgctcgtcctcgcgctcgtcatgttcacctggtacgacggccggcagcggaaggcggagtacgagatggccaacaaggtgacgccggagcggctgggcgagctgctcgccgggcccgacgtgcgccgcgtcccggggctctgcttcttctacagcaacatgcaggaggagtggcggtggctcacgccggtgctggcgcactacatcaagaacatgcggtcgctgcacagggtcaccgtcttcgtcacgctccgctacctgctggtggccaaggtggacgccaagagccgcgtcgtcgttcggcggttgggttcccgtggggtgtacggctgcacgatccactactgttacgccgacccgctggacgaggaggagggggacggtctctcggggcaagtggtgctgggcgtgcgcgagcacatttaacgggaggc

SEQ ID NO: 455141 - DNA, 369 bp, Sorghum bicolor
cgtccggtcattggtaccctcaacatgctgggacttgcaaagagagttggagctaggattttgttgacatccacctctgaagtttatggtgatccgcttgagcatcctcaaaccgaggcatactggggcaatgttaacccaattggtgtcaggagctgttatgatgagggtaagcgtgtagcagagacgctgatgttcgactatcacaggcagcatggcattgaaatccgaattgccaggattttcaacacctatgggcctaggatgaacattgatgatggcccggttgttagcaacttcattgctcaagctgggcgtggtgaacccctgacttgccagaggcccgggacacaaactaggagcttttgc

SEQ ID NO: 455142 - DNA, 403 bp, Sorghum bicolor
  unsure (1)..(403): unsure at all n locations
cgtccgccgcctccgcgtcgcgctcgcgcccaagcaagtgctagcaggctagcagcaaagcaagccttccctgatggctctggtgccctcaggctcgggtgccgaccaggtgatcgccgaggtggcgatgaacggcggcgccgacccgaacgcgaccaccgtgcgcgctaccgtcgtgcaggcgtccaccatcttccacgacacgcccgccactctcgataaagcagagagattgatagcagaggctgctgggtatggttcacagttagttgtctttccggaagctnttattggaggctatcctcgtggatccacatttggcttcgggatcagtattagtattattaatccaaaagacaagggaaaggaagcattccggaggtatcatgcagctgctatagat

SEQ ID NO: 455143 - DNA, 429 bp, Sorghum bicolor
cgtccgaaaagctagaggctaggaagtatatcagaatttttatccagagctttacaatcacctgaatctctatcagtacaaaatgctattgaatatctcaaagtcattggagcttttgatcagaatgaagagttgacggttcttggaaagcacttgtctatgcttccagttgaacctaagttaggaaagatgcttatttttggggctatttttaattgtctggaccccatattaaccatagtttctggacttagtgttagagatccttttttgactcccttcgataagaaagatcttgcagagtcagctaagttgcagttttcatgccgggactacagtgatcatcttgcacttgttcgtgcataccaaggatggagggaggcttgaagagacccggctggttatgactactgctggaaaaattttctc

SEQ ID NO: 455144 - DNA, 345 bp, Sorghum bicolor
cgtccgcgcagcatctccacgccgtcacacctcgtcgcgtcgccaccggcgagatgatggtcgttccgtacctctacgccgagatcggcaagaggaccaaggatctgctgtacatggtctacctatctgaccacatattcatcctttctacctacaccttctatgtcgtggctgtcactgcttctagcacaaagaatgttgttctgatctttggtgtgatccaatctcatatttatatcatgaacattaccgttgatgtgatatcatactttgagtcaaatttcattacctcagtttcttgtgatgagattgcatcatcaggtctgaaatccatcttttgttttg

SEQ ID NO: 455145 - DNA, 410 bp, Sorghum bicolor
cgtccgcatttctcaatttcggtttcttgagcgacttcttgtcgtccatgggcattggtgctacaagagaatcgcccaaatgatttgctacttgttttacaagaatattgcctttgggcttacaatattttactttgaagcattcgctgggttttctgggcaatctgtatacgatgattggtttatgctgcttttcaatgttgttcttacctcgcttcctgttatatcgctcggagtatttgagcaagatgtttcatccgaaatctgcttacagttcccagcattataccagcaagggccaaagaatcttttctttgattggtaccggatccttggatggatggggatggcctctactcctctctggccatattcttcctcaatctctgcatattctatgatcaggcaat

SEQ ID NO: 455146 - DNA, 444 bp, Sorghum bicolor
tcccggtcgacccacgcgtccggcggagcggcggagccacggcgaagctgccacggctgcggtatggctacatcctgtggcgctacgtcgtgcggacgcttcggcgcgttgaggcgcgcgtcaccaaccgctgggtgcggcggagctacctggagcagtggaacaccagcgttcagctcgatcccatgctccccttcgccttcaccagcctcgatgacattgtctctccatgcgccactgccgacgggcacgacatctccttctgccctatctgcgactgcgaggtgaagctgcgtagcaagcactgcatgacctgtgagcgatgcgttgatggatttgatcaccactgcaggtggctaaacaattgcattggaagatggaactatgcaacatttattcggctcatgttctttgtcccgctgatgcttggcattgagggaggaa

SEQ ID NO: 455147 - DNA, 490 bp, Sorghum bicolor
cgtccggtcccatcccaccaccctccgcctccgctgccgattcgaaagcgcccctccccccggcctgtcccctcgcaaaaaccctagctccagccaccagcaccatgaagggcaaggccgacacctccaagaaggatgagggcaggctccgggccggcggcggcgccggaaagcgcaagaaggccgctgcgagcggcaagcccaagcgcccgccctccgccttcttcgtcttcatgtctgaattcaggcaggagtaccaggcacagcaccctggcaacaagagcgttgcggccgtgagcaaggcagcaggggaaaagtggcgtgctatgtcagagcaagagaagcaaccatatgtggaccaagctgggcagaagaagcaggactatgagaagactaaggcgaactttgagaagaaggagagcacaagctcaaagaaggctaagactgatgatgacgattgctcaaagtctgaggttgacgatgaggatga

SEQ ID NO: 455148 - DNA, 472 bp, Sorghum bicolor
gcaagggagaaggcccaagctcatattaaagagcttgaagaagaagtgaagctgctcaagaacctgtctcaccccaacatcgttaggtatcttgggactgttcgggaggaagatacgctaaacattttgctggaatttgtccctggagggtctattcagtcacttttggggaagctcggttcattcccagagcctgtcattaagaaatacactaagcaaattttgcaaggattggagtatctgcatagcaatgcaataatacatagagatataaagggtgcaaacattcttgttgataataaaggtagcatcaagcttgctgattttggggcatctaagcaagtggcaaaggtggctactgtgacagcagccaaaacaatgaaaggcacaccgttttggatggcaccttgagtcattggtgggagtgggcatagcttctctgcgatttattgagtgtaggggcacagtaatt

SEQ ID NO: 455149 - DNA, 383 bp, Sorghum bicolor
cgtccgtttttgatgaaatgtgcaagaagggcttgaagcccaacgccaccacgtttaccactgctctggctggtttctacaaggaggagaggtttgatgacgtcgggaaggtattagagctcatgaagaagaatggatgtggtgagtccctgccggtatacaatgtgagggtgcagagtttgtgcaaactcggtcggagtggtgaggcgagggcattagtggacgagatggtgaagaagggcacaaagccaagctgggtgacctacaatcatctgatttatggattctggaaggaggaggatttggaggaagcataacgtctgtacaaggagatgggaaggaaggtgcttgttggagaaatcaatttctatattatgcttatt

SEQ ID NO: 455150 - DNA, 343 bp, Sorghum bicolor
cgtccgcccacgcgtccgagaaggacatctactacatcaccggcgagagcaagaaagccgtcgagaactcgccgttcctggagcggctgaagaagaaaggatacgaggtgctcttcatggtggacgccatcgacgagtacgccgtcgggcagctcaaggagtacgacggcaagaagctggtgtcggccaccaaggagggtctcaagctcgacgacgacgacgaggaggccaagaagcgccgggaggagcgcaagaagcagttcgaggatctctgcatggtgatcaaggacatccttggtgaccgcgtcgagaaggtggaggtgtcggaccgcatcgacgactc

SEQ ID NO: 455151 - DNA, 419 bp, Sorghum bicolor
tcccggtcgacccacgcgtccgaaccaagcaacgcaacacaactcgctagtgtaccgtgtacgtacgtccctgcgcagcgcagccatggcatcctctggaaatggaagcatcgccgccggcatcgccaagaggtggcgcgagctccatggcgagaactcgtggaagggcctcatggacccgctggacctggacctccgcaagaccatcatctcctacggcgagctcgccgaggccacctacgacggcttcaacacggagcggcggtccccgcacgccggcgcctgcatctacggctactccgaccttctggccagctccggcgtggcggcggccggccactacgaggtcaccaggttcatctacgccacctcagggcagcccctcccggacgccttcctcgtccggccactggcggcgc

SEQ ID NO: 455152 - DNA, 523 bp, Sorghum bicolor
  unsure (1)..(523): unsure at all n locations
cgtccgcgcaagcattctgccacgtggtgatcagactatcaagggccctgttgttcgtctcttcaaaccatttgacgagctctttgctgattcacgggattttgatacggatgctcttgaaaaattcattgacgtgtctggtttcccagcagtagttacattcgatgctgatccaaccaaccataagtttcttgagagatactacagcactcctagtgccaaagcaatgcttttcttgaacttcagtgacgacagagtggaggccttcaagaatcagattcaagaagctgccaagaaattcagtgctaataacataagttttctaattggtgatgttgaagctgctgaccgtgccttccagtactttgggcttaaagagaacgatgtgcccctcctttttgtgattgcacagggtgggaaatatctcaatccaactattgaccctgatcaaatcatcccttggttgaaggagtacatatatggaaactngacaccttattgtaagtcagaggcaatcccaaag

SEQ ID NO: 455153 - DNA, 473 bp, Sorghum bicolor
  unsure (1)..(473): unsure at all n locations
cgtccgggtatttatcctgaggactacgagattgaaagggatcagctgatttacttgtgggtggcagaacgtattgtgacgagcaagtctcctatgcaagatgtaaaggatgtagcagagagctgtttcaatgaacttgtcaataggaacatgattcaaccagaatcctattactacagagtacatgatatgatgctcgatctaatcataaagaggtgcagagaaggtaattttgtaagtgttgtgcacagtgcacaggtggtggtagaacggcaagacagggttcatcgtctgtcagtcagcttgagtgatgttccagatgatgactccatatttcagctggccactaattgctgccgatcacaagttcgttctctagtcttccttggagcatcaaaatggatgcctncactggtagagcttaagtcttctcgggtgcttttccttcaatttccgaagcacctgaagacaat

SEQ ID NO: 455154 - DNA, 413 bp, Sorghum bicolor
cgcgtccgccacgcgtccgcccacgcgtccggacctggcaagctcaaatttgtttttgagggaaaagaagagcaagttgaactggaggtgttcaagtgcactggtgctggaggagttgccttatccatgtacaacactgacgagtccatccatgcctgtgctgaggctcctatggccactgcttatgagaagaaatggccattgtaccttagcaccaagaacacaattctgaagaaatatgatggcagcgttcaaggacattttgcaggaagtcgacgaagctggttggaaaaccaaatttgaagctgccggcatatggtatgagcatcgcctgattgatgacatgggagcatatgcactcaagagtgaaggagggtctgtctgggcttgcaagaattatgatggagatgtgc

SEQ ID NO: 455155 - DNA, 365 bp, Sorghum bicolor
cgtccgaactcctcctacttcgtggagtggatccccaacaacgtcaagtccaccgtgtgtgacatcccgcccacgggcctcaagatggcctccaccttcatcggcaactccacctccatccaggagatgttccgccgcgtcagcgagcagttcaccgccatgttccgcaggaaggccttcttgcactggtacacgggggagggcatggatgagatggagttcaccgaggccgcgagcaacatgaacgacctcgtctacgagtaccagctgttccaggacgccaccgccgtcgaggagggcgagtacgatgtcgtacaggaaggagaccttcatgactagatgcctacctgatcggctgccgagct

SEQ ID NO: 455156 - DNA, 479 bp, Sorghum bicolor
  unsure (1)..(479): unsure at all n locations
cgtccggtaatagctgaatgccgtaagagctatgggctgggaacccgtcaggggacaaatcttggtcctacattggacaaagcacaagctgcaaagatacaggagcaggaaggcctacttagagcagcagtaaactatggtgaaggattacgggtacctggagatcagaggcagccacaatctcttcctagccatctgatagaagtgcttcctttaggagacggtgcacaaaattttggtgatagttctggtagttatcccaaaaatacgtcaacatttgcacctaataatgtcaacaaccagggaaatcaggcatccggaggacagttacttggaagacctgcgccatcacctggaaccacaggaacccctaatttcgagaatgtgtccactccttcgatgccatatgctaactctnctaggcaggcaccaatatgatgaataccccgtccccccagcagcatctaacaccacaacag

SEQ ID NO: 455157 - DNA, 480 bp, Sorghum bicolor
cgtccgattatcgccatccatagagaccctcgacaacatccgcaacttcgatcgcgtccaggaagttcctcatgaaggtccaatgtgtgatcttgtgtggtctgatccagatgatcgatgtggttggggtatttctccacgtggtgctgggtataccttcggacaggatatatcagagcagttcaaccataccaatagcctaaggctaattgctagagctcaccaattggttatggagggattcaattgggctcatgagcaaaaagttgtgactatatttagagcacctaattattgctaccgctgggggaacatggcatcaatcctagaagtggatgattgcagggagcatactttcatccagtttgagccagccccaagaaggggagagccagatgtaactcgtaggacacctgactatttccttggatgcaaaagtgatttggatctgcatgcaaggtttgataggtaggtgcagtt

SEQ ID NO: 455158 - DNA, 415 bp, Sorghum bicolor
  unsure (1)..(415): unsure at all n locations
cgtccgcttcacagcacctcgccgagatgggtccataacttctacctcgccgcactcgcctcattctatgccaagaaggtggaggctggactgaagaaatacaagccagacatcataattagcgtccatcctctcatgcaacacattcctctgtgggttctcaaatggcaaggcctacagaacagagtagtctttgtaactgtgatcacggacctcaacacatgccaccctacatggttccatgctgatgtgaacagatgttactgcccctcagaagaagttgccaagcgggcagcactggatgatctacaaccttctcaaattcgcgtgttcggtcttccaattcgaccatcattctgccgtgcagntcttgttaaggatgatttgaggagggagcttgaattggatcctgagc

SEQ ID NO: 455159 - DNA, 409 bp, Sorghum bicolor
cgtccgaccaaatctcgcagcggctgcaatccccgagcccgaagcgcggatcagcggaggaggacgccagattctgatctgcggccggcgcgacccacagaaaaccggagatgcagcagggcgacggcacggaggcgcaggtgacgtgggaggaccagcagaacatcaaccgcttcggtcgcctcaacaaccgcctccacgagctccaggacgagatcaagctcgcgaaggaaacgaatgagaaccttgatgatgctgggaatgaactcatcttatctgatgaagatgttgtacgctttcaaattggggaagtgtttgctcacatgccaagggatgacgtcgagactaggctggagcagatgaaggaggatgcggctaagaagctggagaggttagaggaggagaagga

SEQ ID NO: 455160 - DNA, 154 bp, Sorghum bicolor
cgtccgcacaaggctcgagcataatgatcctgtgcctgccactgcccatgtgccaagtcgtgctcctgccttggtcaccctagcagcaggggcgtgtcgtctgcacgttcacgatgaccagctctctattgatgagacgatggctactcgccac

SEQ ID NO: 455161 - DNA, 339 bp, Sorghum bicolor
gcccacgcgtccgtcgacccacgcgtccgctgcaaggcagtcatgctcgatgagattatcaactatgtgcagtcattgcaacgacaagtcgagttcttgtcaatgagaacttgcaactgttaaccccgagcttggctttgacattgagcagatcatatccaaacagatgatgctttcacaagacagacaatttgctttctatggagtcgatccaggatcaagcaggctcactgctccattcaaccaaggaatcatgcagccagaaatgatgtgcaacattttcaaacctggtgatgttttgcacggaactattcacgacttgtcaacaatgaaccagat

SEQ ID NO: 455162 - DNA, 311 bp, Sorghum bicolor
gacccacgcgtccgcccacgcgtccgcactcgcccactcacccccgcgccgtctttgctctgcctcaccgcgccgcagcagagcatggcgtccctacgccggctccccgtcgccgtcctcctcgccgaggcggatccgctcctctttctttgtccggcagaggcggggacgtggggcgtgaactacggccgcgtggcgaacaacctgccgaatccggcggcggtggtgcagctgctgaagcagcagggcgtctggcaggtgaagctgtacgacgccgacctcacctagctgtgcgcgctggcctacaccgg

SEQ ID NO: 455163 - DNA, 495 bp, Sorghum bicolor
cgtccggttgggttcacgccgtattcctggggggagagagggcgccgccgccgcgccggtgagacgcccagccatggcattgccgggggcggtggtccgcctggcgctgctgctgctcgtcgcgctgccattctgcggcgcacatcccggaccgggaggcttccctgcccctcgtcactcccagaggcccgcgctccactctgatggatttggcttgctggcaaggaggtcaattgctgaagctcctactgacatcaacgtcactacgaatagctcctttgtattggcggcagataggacatatcgaaaggatcccttgaatggtttcaggaaatacccgggcggctggaatatcagtgaagtgcactattttgcttccgtcggatatacagccattccgctgttcgctattgctctggcgtgagttgtgattctttttcctggtatgcttgagattgctgccgatattctgttgccgcatacacctacaagtat

SEQ ID NO: 455164 - DNA, 426 bp, Sorghum bicolor
cgtccgcccgtctctctccacgcccgctcgcggattcgcgactcgcaagcttctagcgtcttggttttcgattgctgcaggaagggaagaggcggcggcaatggcggggagagccaacatcccgaccaacaactctgcgctaatcgccatcatcgccgacgaggacacggttactggctttttgttggctggagttggcaatgtggatctgagaaagaaaacaaattatcttattgttgataacaaaacaacagttaaacaaattgaagatgcatttaaggagttcaccgccagagaggacattgcgattgtactcatcagccaatatgttgcaaacatgataaggttcttggtagatggctacaacaaaccttgtcctgctatactggagatcccgtccaaggaccattcatatgatccagcgca

SEQ ID NO: 455165 - DNA, 432 bp, Sorghum bicolor
cgtccgcggacgcgtgggatcagctgcagtttatggatctcccagaaactcaccttgcacagaagagtttcctctgactccaaacaatccatatggcaaaacaaagcttgttgttgaggatatttgccgtgatatctaccgttcagatcctgaatggaagatcattttacttaggtacttcaatccagttggtgctcatcctagtggatatcttggtgaggacccacgaggaattcccaacaatcttatgccctatgttcagcaagttgcggttggtaggaggccagctctgacagttttaggaaatgactatgcgacaagagatggaactggggtccgagattacatccatgttgttgaccttgctgatggacatattgctgcattacagaagctttttgagaactctagcataaggtggaagcatacaac

SEQ ID NO: 455166 - DNA, 505 bp, Sorghum bicolor
ccgtccggattcccggtcgaccacgcgtccgcaaaacaattgatgaaatagaagcccagttggatcgacttggtaggccaatcggaggtgatgctggggctcagttgtacactatcttggatatgtgtcgtgcatttgaccgtgtctttaaagagcacttagatggcgggcggccaggtggagatcggatttatggagtctttgacaaccagttacctgcagcactgaaaaagcttccatttgaccgacatctgtcaatgcaaaatgttcgtaaagttatttcagaggctgatggttaccagccccacttgattgcccctgagcaaggatacagaatgcttatagatagttctctaagctactttatgggtccagctgaagcgtctgttgatgcggtccatttggtcttgaaggagcttgttcggagatcgattgcagctacagaggagttgaagcgatttccaacactacaatcggatatagctgctgctgcaaacgatagcct

SEQ ID NO: 455167 - DNA, 479 bp, Sorghum bicolor
cgtccggacgatatggctaactttgcgcttatgggtggtggagcaggcctcctgaggggaaacaatgtgaacgcattcggccagcctgacaacatttggaggcctcaaagagggcttcctgagcgtgcagtgtctgtgcttcgctcgtggctgttcgagcacttcttacatccgtatccaactgatagtgacaagcagatgctggctaaacagacaggcttaacaaggaaccaggtgtcaaattggtttatcaatgcaagggtgcggctctggaagcccatggtggaagaaatccacaacctggagatgcggcaggtgcagaagaacacatcggtggacaagaatcaacttggcatgcagcagattcagcactcgacggacagcagtgggaagctttctgacccttcaaactctcagcgtgggcaaagcagcggcatgacaaggaacctcagctcttcggcatcacgccatattcaaga

SEQ ID NO: 455168 - DNA, 317 bp, Sorghum bicolor
cgtccgcccacgcgtccggagcattctgcagcattcagtaacattctcggaagggatttctcccttgctgcttctgcggatttctgtgagaagggtcagcgggattcggcgaagcagaggaagatcctcccatggagatgactgacatgaaaccggaggagatgagccaccctcccatggaccagctgctgggaatggagtactgcatagactcaaacccatcctggggaggggctgttttgctgggcttccagcatttcatcctttgtttggggacagcagtgatgatccccaccttgctggttcccctcatggga

SEQ ID NO: 455169 - DNA, 415 bp, Sorghum bicolor
acgcgtccgatttcaggcatcgcagccgcacgtgctttgtccaatgcttcatttaaggtcacactcttggagtcgagggaccgagttggtggccgtgtgcacactgactattcttttggttgccccattgacatgggagcttcatggttgcatggtgtttgcaacgagaattctttggcgccattgattaggatgcttgggcttagattatatcgcacaagcggtgataactctgttctgtatgaccatgatttggaaagttatgctctatttgataagcatggtcagcaagttccccaggagatagttagcaaagttggggagacatttgagaaaattcttaaggagactgtcaaagtaagagatgaacatgcaaatgacatgcctcttattcaagccatggcaattgtgctta

SEQ ID NO: 455170 - DNA, 427 bp, Sorghum bicolor
cgtccgaacgccttgaagttttatgcttctgttcgctagaacatcaggcgtattggtttggtaaagaaaggtgaagagacaataggtaggcagattgctgagaagattgtaaaaaacaagcatgctccacccttcaagaccgcacagtttgagcttgaatttggaaaggggatatgccgcagttctgagcttttcgaactcggattgaagcacaagcttatcaaaaagactggtggtgcattttatagtttcaatgatatgtctttctgtggtaaaaataaccttaaatcttaccttgatgaaaacaagagtgttgcaaatgatctggagatggtactaatgagattgatggcaactgaagcacctatagagcatgtggcagaagatagttcaccgtgtgatgtgcctgaagagattgtcacacctg

SEQ ID NO: 455171 - DNA, 315 bp, Sorghum bicolor
cgtccgcaccattcccaccactcaacttctcgcgcccagagcccccaaatttttctccactcgaccgcagcagcagcaagcagccatggacgccagcggagccggtggcaaggcgaagaagggggcggccgggcgcaaggctggcggccccaggaagaagtcggtgtcgcggtccgtcaaggccgggctgcagttccccgtcggccgcatcggtcggtacctcaagaagggccggtacgcgcagcgcgtgggcaccggcgcccccgtctacctcgcagccgtcctggagtacctcgccgccgaggtgctggagct

SEQ ID NO: 455172 - DNA, 296 bp, Sorghum bicolor
  unsure (1)..(296): unsure at all n locations
cgtccgagaaatgcttcgaatattgacaacaatgctaccatagcaaaaggtccatctgcagccaaagtagtacaacctcttttctctttgctttctaaggcggacatgggtcctgaagggcagtatagcacattgcaggttcttgtgaatattttggagcatcctgaatgccgtgctgattataacttgacaccacgccaaactattgagccagtgataaccttactgaattcatctncaccagctgtgcagcaattagcagcagaactcctatcacatcttcttctagaagacca

SEQ ID NO: 455173 - DNA, 416 bp, Sorghum bicolor
  unsure (1)..(416): unsure at all n locations
cgtccggtcttagccacagaaaacttttgcgtcagcttatcatgagtggggatatcgactctgcattcaaaagacttggggagtggtatccacaagtgataaaggatgagaaatcggttatttgcttcctactccattctcaaagattcatagaatatatcagggctgaacaactggaggatgctgtgaaatatggtcgtgctaacctggcaagcttcttgacacacaaagcttttgagggactgctgaaggatagtgtggccctacttgcgtatgagaagcctgcagaatcatgcatgggatacctgatggactctccccagcgtgaattcgtggcggacgcagtgaacgcagctgtcctgtcgacaaaccccaccatgaaggaccctgagagctgnctttactcgtgtctcgag

SEQ ID NO: 455174 - DNA, 437 bp, Sorghum bicolor
cgtccgatggatttcaaggggttctgggagtccagattcgggggcaagaaggagccggaggagcagaacgggcacgccaacgggagcgtgccgaagaggacctccgatttggcggtctacgagcagttcgagcagcaggccaggcagacccaggtccgagccgccgcgattcgcgatggaaacgctgatgtgatccagaagccccttctaccttcatttgagtcagctgaaatgcgtaatcttgcagagacattgttgagggatattattcgcgggagcccagatgtgaaatgggagagcatcaaaggactggaaaatgcaaaacgccttctaaaagaagctgttgtcatgcccataaagtacccaaaatacttcactggtcttctttctccctggaaaggcatcttactttttggccccccagggacaggaaagac

SEQ ID NO: 455175 - DNA, 515 bp, Sorghum bicolor
  unsure (1)..(515): unsure at all n locations
cgaccacgcgtcggggtgttcctagtctgcaactccgaatctcttctgaaagaagctatccatgttataagttgtggctatgaggacaagactgaatggggaactgagattgggtggatctatggttctgtgacagaagatattcttactggattcaagatgcacgcacgaggctggcggtcgatttactgcatgcctaagcggccagctttcaagggatctgctcccatcaatctttcagatcgtctgaaccaagtgctccggtgggctcttggttctgtggaaattcttttcagccggcattgccccttatggtatggctatggaggacgcctgaagttcttggagagatttgcttacatcaacaccaccatttacccgctcacatctatcccacttctcatttattgtattctgcctgccatctgtctgctcactggaaaattcatcattccagagattagcaacttcactagnattgggtcaattctctctttatttcaatttttgcactg

SEQ ID NO: 455176 - DNA, 400 bp, Sorghum bicolor
  unsure (1)..(400): unsure at all n locations
cggacgcactcgcccgctcggctgcaaaggaggttcgtgaggctggccttgtgggtacggccacaggccttgccaagtcagccattgcccgcgcggagccaaaggccagggagctctacacccgctatgagcccgtggcagagcgccgtgctgctgaagcttgggtggccctgaaccgcctcccgctggtgccttcagtcaccagggctgtcctccccacagccgcgcagctctcagccaggtacaattcagcggtgcgtgatggtgccaagcgcgggaacactgtggccacctatctcccgcttgtgcccactgagcggnctcgcccggtgttcccgtaccccatggctgatgttgccccagcaccagagatgcagcctattcccctccagtagaagat

SEQ ID NO: 455177 - DNA, 388 bp, Sorghum bicolor
  unsure (1)..(388): unsure at all n locations
cgtccgcggacgcgtgggtctagatctgagccttccgtgaccagatgatggccgacgacccgccgcggcgtccgccgtcggcgctagccaggaagagcgcgccggcgcagccgtggtcgcacgtcgagaccatgcacctcatcgacgcgtacgaggagcgctggacggcgctgcgccgcggccagctcaaggcgcaccaatggggggaggggcggcccntggtcgtcgcccgctgcgccgccacaccggnggtcgtcgcccagcgcaagacgggcacccagtgccgccacaagctcgagaagctccgcaagcgttaccgcaacgagggcgcccgccccgtcacctagctctggccctactttcgccgcatggatcgcctcgaacgggg

SEQ ID NO: 455178 - DNA, 435 bp, Sorghum bicolor
cgtccgagctgcttctgcgcaggaagaggatactgttttgctcggaggacgaggttttgggacagccatgtctgctttaattgagtacctaagttcagaatatggttctacttttgctttagctcgggtttttgcttttctgtctggtgctcctgattatggagctggtctgctagataccaggagatatggggagcaatatgctagtaaaggggtagatgctgaccttgcattactccctgaacagatacctttctacagagacctagcagctgttgctgttcaatcaggagtatgcgtagacatatttgctgtaactgatgaatacactgatttggcttcactgaagtttttaagtattgaaagtgggggatctttatttctttatgcaaatacagacgattcaacgcttccccaagacatataccgcttgct

SEQ ID NO: 455179 - DNA, 327 bp, Sorghum bicolor
gacccacgcgtccgcccacgcgtccgcccaagctctagctttcgcccatgggcgcgccgctgctccgccgccgcctcctgctgtccctcgcgctcctggcgcggctgctgcgccgcggtggggacagcggcggcggcgaaagcgaaagcgcccaggctgtcgcccaactactaccgccacagctgcccgcgggtgcagcggatcgtgtcggacgtcatcgcggcgaagcagcgcgccaacccgtcgacggcggcgggcacgctgcggctcttcttccacgactgcttcgtcaacggctgcgacgcctccgtgctggtctccccgctc

SEQ ID NO: 455180 - DNA, 422 bp, Sorghum bicolor
cgtccggcttggatacactaagaagcaagaggagagacattttcgaggcgtcattgtcctggaggaatgtaacctggaagagatagaggaggaagaggtctctaagaattctaaggattcaaagaaggcaaatggacaagagaaagggccaagtcttgtttttaagattactaacagggttgcctacaaaagtgtcttaaaagctcacagtgccgttatattgaaggctgagagtatggctgacaagattgaatggatcaagaagataaaaggtggtatttcaaagcagagggggctctgttaagggtccaactgaggatggttctatgcgacaaagccgttcagatggatcccttgatacaatggcccggaggcctgctgatcctgaagaagaacttcgatggatgtctcaagaagttcgt

SEQ ID NO: 455181 - DNA, 432 bp, Sorghum bicolor
cgtccggccgcttctcactcactcagatcaggcgtctcaccgtgcccgccgatttagcaccaccgccgcaaccgcgccccctgcccccgcccaaaaatggagaacggcaccagcaacggctccaccggcggcgccgcctgctgcaacggcaacggcgccgtccgcgggccgcacgtggcgatgctggcgacgccggggatgggtcacctgatcccgctcgcggagctagcgaagcggctggcgtcgcggcacggcgccacggcgacgctcatcacgttcgcgtccacggcgtcggcgacgcagcgcgcgttcctggcgtcgctcccgcccgcggtgacctcgctctcgctcccgcccgtcgacctctccgacctgccccgcggcgccgccatcgagacgctcatgttccgagagtgcgcgcgctctgtcccg

SEQ ID NO: 455182 - DNA, 304 bp, Sorghum bicolor
acgcgtccggaagaacctgaaaagggtatttattttatgaagttagatgagacaaatatcacaacccaaaagggtgctaaagataaaagaaaggaaacctttgcagaaggcaacgctcaggaggaatgcaagtattattcaacatctggaggatgcaaatttggtaaagcttgcaaatacctccaccgtgagggaaaagaagcgaaaacagaggttgaaaaagctgagctgaactttctaggtcttccactgcgaccaggtgaaaaggagtgtccatactatatgcgcactgggagctgcaaat

SEQ ID NO: 455183 - DNA, 418 bp, Sorghum bicolor
cgtccgatcgcgaattcgtcgcaccatcggcacgcagacgaacgaagcaaggctctccccatcggctcgtcaagatgcagatctttgtgaagacccttactggcaagaccatcaccctcgaggttgagtcctcggatacaattgacaacgtcaaggcaaagatccaagacaaggagggaatcccgccggatcagcagcgtctgatctttgctggcaagcagcttgaggatgggcggacgctcgctgattataatatccagaaggagtctaccctccacctcgtgctcaggcttaggggtggcatgcagatcttcgtcaagaccctcaccgggaagactatcactctcgaggttgagtcctctgatacaatcgacaatgtcaaggcaaagattcaggacaaagagggaatcccttcaga

SEQ ID NO: 455184 - DNA, 367 bp, Sorghum bicolor
cgtccgggaaggctttccttcctgtggtctacaatatatttaatcttcatggtgcaacactaatggcaagggagaatgaccgcttcttgaagcaaattgcttttcatcttctgcggcttgctgttttccgaaatgattcgattagaaaaagagctgttgttgggttgcagattcttgttaggaactcattcaactatttcaagaacactacaaggttgagggtcatgttgacaattactttgtcagagttgatgtccgatgtgcaagtaactcaaatgaaatccgatggttctcttgaagaaagcggtgaagctcgtcgccttaggaaatcactggaggaaatggctgatgtgagaagcaaggatct

SEQ ID NO: 455185 - DNA, 381 bp, Sorghum bicolor
ttattctaccttgagtggcaaggccaatacctattcaaagtttgaaactagtgcgataggcatctttcttatgcaggacatttgtgatgtgtgcccagagaagttgccaaattacgaggctaagataaagaatttctttgaagaacacttgcgtactgatgaagagatacgatattgtcttgagggtagtggctactttgatgtgagggacgaaaatgatcagtggatccgtgtagcagtgaagaaagggggcatgattgttttgcctgcaggaatgtatcaccgctttacattggataccgacaactacatcaaggcaatgcggctctttgtgggcgagcctgtgtggacgccatacaatcgtccccatgaccatcttcc

SEQ ID NO: 455186 - DNA, 457 bp, Sorghum bicolor
  unsure (1)..(457): unsure at all n locations
cgtccggcttgctgctcttgctcttggagatcttttccaaaatgaaggtctggctcgttctactgatgctgttgcagcatgccgtgctctagtcaatcttcttgaagaccaaccaactgaagagatgaaagtggtagcaatttgtgccttacagaatctagtcatgtacagccgagcaaataagagagcagttgcagaatccggtggtgtccaggtcctgctggatcttatcagttcaagcaatcctgacacttctgttcaggcagcaatgtttgtcaaacttctgttcaataatcacactatccaggagtatgcgaccagtgaaacagtcagagttataactgcttctattgaaaaggatatatgggcttctggaagtgctaatgaagagtatctcaaagcacttaatggcttgcttagtaacttncctcgtctgagggtcactgaacctgccaca

SEQ ID NO: 455187 - DNA, 420 bp, Sorghum bicolor
gaccacgcgtccgctgctgttgcattggcttatatgttctggattcttgggtacagtctcaatgagggacatcagctgctgcagagtaaaagggcttgctttccgaagttggaagccattaagttggccactgctgacattgattatcaaaaaacacaatcactttaaagtgggaagatgatggttcttcctctgttgaaatttctgggctcgacattggctggggccagagaattcctttgacatatgatgaggagagaggagcttggtttcttgagaaagagttgcctgaaggacggtatgaatacaaatacatagtggatggcaagtggctatgcaacgagcatgagatgttgacgaaaccgaacgctgacggtcacgtgaacaactatgtccaggtctccagagacggtaccagtg

SEQ ID NO: 455188 - DNA, 454 bp, Sorghum bicolor
cgtccgaaagggtgaatactgagtcttgcccttctaggcaagaagaatcaactgtgcagatgtgtgaatcaacaaacccagatgatgtctggtacaagaagatgaaggcctgtgtgacaccccttccagatgtaaaagatgaaagtgaagtagctggaggagcaatcaaacccttcccagccaggctcaatgcagttcctccaagaattgctaatggttagatcccaggggtttcgtctcaggcctttcagaaagacaataaaatgtggaagaagcatgtgaaggcttacagcagtgtgaacaaatatctgcttactggtagatacaggaatattatggacatgaatgcaggattcgggggattcgctgcagcaatagagtccccaaaatcttgggtgatgaatgttgtgccgaccatcgcaaagatgcccaccctgggggctgtgtatgagcg

SEQ ID NO: 455189 - DNA, 460 bp, Sorghum bicolor
cgtccgggccgccgccgtcgccgccgctgctccaagcccgtgttccgctcctagccgcgccgtcgccgcagcgaagcgctccagagaacttccgtcaacatggggaagacacgtggtatgggagctgggcgcaagctcaagacccaccgcaggaaccagcggtgggctgacaaggcatacaagaagagccatttgggcaatgagtggaagaaacccttcgcggggtcatcccatgccaagggcattgttctggagaagattggtattgaggccaagcagccaaattctgctatccgtaagtgtgctcgtgttcagcttgtgaagaatggcaagaagattgctgccttcgtgccaaatgatggttgcttgaactacatcgaggaaaatgacgaggtgttgattgctggatttggtcgtaagggtcacgctgtgggagatattcctggtgtccggttcaagg

SEQ ID NO: 455190 - DNA, 502 bp, Sorghum bicolor
cgtccgcaatacgctacccagaccccctcatcaaggccaacgacaccatcaagatcgacctggagaccaacaaaattgttgacttcatcaagtttgatgttgggaatgtcgtgatggtgactggtggaaggaacactgggcgtgttggggtgataaagagcagggagaagcataagggcagcttcgagaccatccacgttgaggattcccttggccaccagtttggccacccgcatgggcaatgtgttcaccattggcaaggacaagaaaccgtgggtgtctcttcccaagggcaagggtatcaagcttagcatcattgaggaggcaaggaagcgcaatgctgaggctgctgctgaggcttgattctcacaacttagctacagataaaccattgctgtaagcattttccatggtgcagacatgagactaatggtgcactagtgttattatgtggacttgtttgaacaccgaagctggtgggtcacattttttttttccccct

SEQ ID NO: 455191 - DNA, 387 bp, Sorghum bicolor
cgtccgcaccaagaacggtgtgcgcgtacggaccaccaggagtggcggtggcggcttcgcccgcaaggtgaagttcgagagcatcgtgatgaggaacgtcaccaaccccatcatcgtcgatcaggggaactccgaccatctgccagcttcatctgaagcagtagcaccggctgcaagcgacagcagtgcaggtagagaagatcaactacattgacatcacgggcacgtcggcgtcgaagcacgcggtgacgttctcgtgcagcgacgccaagccgtgtaggcacctgtcgctcgtcaacgtgaacctgacccaggtggacgggaccaaggcgttgtcctacttgcgcaaggcgtttgggaggagcatccgcaccggcattccggagt

SEQ ID NO: 455192 - DNA, 216 bp, Sorghum bicolor
cgtccgaggagcggtccccatgaaataagtatatctataaattgaagcgagttatcatgcacaaaagctgtactttgtcatgtccctttgagtacgcatcagtatcatgcagttggtaatgtctgagtagtggtcggttttaggtggtgtagtcatgggaacgcgacatcagatacctggtttcttttgattgtgatgttatcttgcattattgcg

SEQ ID NO: 455193 - DNA, 503 bp, Sorghum bicolor
  unsure (1)..(503): unsure at all n locations
cgtccgtgaataatgttgccagcctgtggttcatgtcactctttatttgcatttttgctacaagcatcctagaaatgagatggagtggtgttggaattgatgattggtggaggaatgagcagttctgggtcattggaggtgtgtcctcgcacctctttgctgtgttccagggacttctcaaggtcatagctggtgttgatacaagcttcactgtgacatcaaagggtggagatgatgaggagttctcagagctgtatacattcaaatggactaccttattgatacctcctaccactttgctcctattgaacttcattggtgtggttgctggtgtttccaacgcaatcaataacggatatgagtcatggggtcccctctttgggaagctcttctttngcatttgggtgattggccatctgtatcccttcctcaaaggttnggttggaaggcaaaacaggacaccaacaattgtcatcgtgtggtccattctgctggcttcaatc

SEQ ID NO: 455194 - DNA, 382 bp, Sorghum bicolor
cgtccgcccacgcgtccgatgcacatgtttcaaactatgtcagcaaagcagagcaaaccccagactctctggatcctgtcattgtcgccaagctgaaggcagctgcaggattagccaacttggaaacaaagaaatacaaatttgctgctcgtaagtttgttgagacaggaattgaactaggaaacaactactctgaagtcatagctcctcaagatgtagcggtctatggtgcactttgtgcacttgcttcttttgaccgttcagacctgaagagcaaagtcatcgacaatatcaacttccgtaactttctggagctggtgcctgaagtaagggagctggttaatgatttttatgcaagtcgctatggatcttgcttgggtca

SEQ ID NO: 455195 - DNA, 402 bp, Sorghum bicolor
ctctcccctttctttcctcatccaccagagtttcgctagctagggtttccaccaatggcggcgcccaccacctcccgccgcggccccggcggcgcgcgcaacatggacgacgagaacctcaccttcgagacctccccgggggtcgaggtcgtcagcagcttcgaccagatgggcatcaaggacgacctcctccgcggcatctacggctacggcttcgagaagccctctgccatccagcagcgcgctgtcctccccatcatcaacggccgcgacgtcatcgcgcaggcccagtccggtaccggcaagacgtccatgatctccctcaccgtctgccagatcgtcgacaccgccgtgcgcgaggtgcaggcttgatactctcgctactagggagctgttccaaca

SEQ ID NO: 455196 - DNA, 538 bp, Sorghum bicolor
  unsure (1)..(538): unsure at all n locations
cgtccggacaactgctctatgcaacttgtttcaaagccagaacaatttgatgtcatggttacacctaatctttatggcaatttggtggctaacacggctgcaggtattgttggagggacaggcatcatgcctggaggcaatgtgggtcaggactatgctgtctttgagcaaggtgcttctgcaggaaatgttggaaatgagaacatcgtggagcagaagaaagcaaaccctgtcgcgctgcttctgtcatctgctatgatgttgaggcatttgcagttcccatcatttgctgaccgtctggaaacggcggtgaagcgcgttgttgcagaaggcacgcacagaacaaaggatttgggcggtaccagcaccacccaggaagttaccgacgctgtgattgccagtctggattagatttctggtgcacacctgaaaaaaaaagtaattctttgggtgactagtggctagcttgctnctgatgtattatctctacataattaatgcttacattcagatacaggatctgtcaattgtaaatata

SEQ ID NO: 455197 - DNA, 450 bp, Sorghum bicolor
cgtccgcaatttgctgttgagagtccgcgttggcttgccaaggttggaaggttcgatgatgccaaaaaggttgtagagagcctttgggaaccttctgaagttgagaagtccatggaagagatcaaagccgttgtggtaaatgatgattcacggggcagctggtcagaccttctggtggaaccacataacagagttgcattgattggagggtcccttttctttctgcaacagtttgctggaataaatggtgttctttacttttcatcgttgacattccgtgatgttggcattacaagtggtgctttagcaagtttatatgttggaataaccaactttggaggggcactagttgcttcaaatttgatggacaagcaagggcgaaagaaacttttgataggaagctaccttggaatgggctttgcaatgttccttatagtatatggtattagc

SEQ ID NO: 455198 - DNA, 523 bp, Sorghum bicolor
  unsure (1)..(523): unsure at all n locations
cgtccgatttgacaaagaaaaggcccaagagcgtttatcaaagttatctggaggtgttgctgtactcaagattggtggagctagtgaagctgaagttggtgagaaaaaagatagggtaacagatgctctaaatgctgcgagagctgctgtggaggagggcatcgtgccaggtggtggagttgcccttctttatgccaccaaggagctcgacaaaattagcacatcaaacgaggatgaaaagattggagttcaaattatcaagaattctttgaaggctcccttgatgaccatagctgcaaatgctggcattgatggagctatagtcatagggaagctgattgaacaagaggacctcagtttgggctatgatgcagctaaaggggagtatgttgacatgatcaaggctggcatcatcgatcctgtgaagggatccgcactgcacttcaagatgcttgnagtgtttccctgctgatgacaaccacggaggctgctgttctgagctcccggcaacgaaggccagaat

SEQ ID NO: 455199 - DNA, 458 bp, Sorghum bicolor
cgtccggctattgcatacatatatacactgatttttgtaactgttccttcaatggcttctgtctacaatgaatatgccttgaaaagccaatatgacactagcatttatctccagaacttgtttctgtatggatatggagcaatattcaacttccttggcattctcgggactgccttattccaagggccagaaagttttaacattcttcgaggacattcaaggccacaatgttctcatatgtaacatgctgacaaggcatctatcttattcttcttaaaatcagatcaatttgaaaatattctaactgtgcacaatattactggctagctttgtgattcttggcatccttgccataatttctcttggcatatcagtgggttatttaatgcaccagtcttctctcacttgctaaagtcaaagatgacaaaccagctgacttaatagagttggaagataca

SEQ ID NO: 455200 - DNA, 299 bp, Sorghum bicolor
cgtccgccttcatacagaagcactggtcggcgcagcagctgcggcgcgccgagaagcagtgctggcggccccagcgcggcctgccggagaagtccgtcgccgtgctcaaggcctggatgttcgagaacttcctgcacccgtatcccaaggaccatgagaaggacgtgctggctgcaagaagcggcctcagcaggaaccaggtgtcgaattggttcataaacgcacgagttcgtctgtggaagccgatgatcgaggagatgtaccaggacctgaaggggagctcgggtgcaggaggagga

SEQ ID NO: 455201 - DNA, 388 bp, Sorghum bicolor
cgtccgcccacgcgtccggcttaacacctttgccaattgtactggcctgaaggtaaactatagaaaatccatgatgttaccagtcaacttgtctgaggaaagacttgatcacttatctagaacttttggctgctccaaggggactttaccattcacttatttgggtttgcctttgggtttaaccacctctggtcagtaaatgtgagagaagattgttaagtgtatccaattttctaactcaggctgggaggttagagctaacaaatgcaagtttttcagctctacccacattctacatgtgctcgttggaactcccaaaaacagtaatcaagcaaattgataaatatagaaaaaattgcctttggaggggatcagacatcaatggaag

SEQ ID NO: 455202 - DNA, 173 bp, Sorghum bicolor
  unsure (1)..(173): unsure at all n locations
gcgtccggcctcgctctcactcctgctcttcctggccgtgcggttccttctccctgatccttctttggcttcgcggttcatggcgatgtggagggccgccgctaggcagctggtcgaccgggcgctcggttcaagcgccgcacacacgtntgcaagcagcagaaaatcgtggg

SEQ ID NO: 455203 - DNA, 301 bp, Sorghum bicolor
cgtccggttcttccgctccccattcctagtccaggaatgggagatgaaagtgagcagtggaaagaaaaaggaaactctcaggcttgatctggtcgagcaatcgtcattgaagtacaaggatgcagactttctcattttcaatactgggcattggtggacacatgagaaaacttctcttgggaaggactactatcaggaaggtgaccatgtgtataatgagctaaacgtcatggatgcctttcataaagctcttctcacctcggccaagtggattgatgccaatgttaaccccacaaaaact

SEQ ID NO: 455204 - DNA, 214 bp, Sorghum bicolor
cgtccgactggttgtgtatgaaatatttggtcagtcatatagaggggctataacttacatcttcatcaccgtatccatgtggttcatggtgggcacttggctctttgcacccttcctgttcaatccttctggatttgagcagcaatgatgttcctttggcgaccactctgctgatcaaacatttgtttattgctaaagaggatgctagatctgt

SEQ ID NO: 455205 - DNA, 267 bp, Sorghum bicolor
cgtccggcatgctcatcctcaaccaagacacctacttcaatctcatccacctcgcttggtcgatcgtctgcttcaggtggaacttggagaggcctgctatcatcctgaagtgcatcttgatcctctccgacgcccggctcggcatagtcatgtccagtctggctctgtttatggctctggcgccacggatcatctcctgcggtaacaaggtggacactttcgccatggccgtgctgatcctcacctgccccgacgttatggccgccg

SEQ ID NO: 455206 - DNA, 458 bp, Sorghum bicolor
cgtccgagataggttatcagattggttgaagaagaacccaacaaaagagccaacagattgtaaggacaagttggaagaagactatggcatcaagctgaagtattcaaaggcttggtctggtatgatggctgccttagataaaattcatggtaaatatgaagaaagcttccaattgttgttcaattgggctgctcaaataaaaatggtgtcacctggtagcattgtagaggtagaagtagaaaaaattggtaagaaatacaggtttaagaggatgtttgttgccctcaaaccttgtattgatggattcattgctggttgtagaccatttttgggagtagatgcatctagtttgaatggtaaatacaaagggcaattggcatcagtaaccagtgtagatggacataattggttgtatcatgtagcatatggtatttttgattcagaaactgaggaaaact

SEQ ID NO: 455207 - DNA, 288 bp, Sorghum bicolor
cgtccgagaaaaatctacattgaggcgcttcagctggcgctacataattattgatgaagctcaccggataaaaaatgagaactctcttctatcaaagactatgaggatttacaacactaattatcgtctcctcatcacaggcactccactccagaataatctccatgagctctgggctctcctcaacttcttgttacctgaaatatttagctctgcggagacctttgatgaatggtttcaaatttcgggggaaaatgatcaacaagaggttgtccagcagcttcataa

SEQ ID NO: 455208 - DNA, 364 bp, Sorghum bicolor
cgtccggtttacgatgaagacaaacttcagcaagacaagaggctgggtgtggcaaaactagcagtgaaccctcttgaacctgagatcacccaagaattcactctgaagctgctacattcactggatccaattaaaaatagggacaccaaggatagaggcacattacatcttaaggtaaagtatcacccctttacaaaggaagagcagctggaagccctagagatggaaaagcaagccatagaggagaggaagcggctgaaggaggctggagtaattggtagcacaatggatgctgttggcggtgccgcatcactagttggttccggtgttggatttgtgggcactggcattggtgctggcattg

SEQ ID NO: 455209 - DNA, 425 bp, Sorghum bicolor
  unsure (1)..(425): unsure at all n locations
cgtccggtgaaatgctcattggtttatatggactttgaaggtcgctctgatgggcgttctgtaaaatcagttattgctcatgtggctccactgaaacttgttctggtgcatggatcagcggaagcaactgaacatttgaaaatgcattgcacaaagaatttagaccttcatgttcatgctcctcagattgaggaaacaattgatgtaacatcggatttatgtgcttataaggtccaactttcaaagaagttaatgagtaacatcatttctaagaagttgggtgagcatgaaattgcttgggtggatgcagaagttggaaaagaagatgagaagcttattttgctccccccatcatcaacaccgncaccccacaagccagntcttgtgggtgatttaaaattgtccgattttaaacaagttttgga

SEQ ID NO: 455210 - DNA, 314 bp, Sorghum bicolor
cgtccgcggacgcgtgggtccagatcactcgcaatctctcattggatggagttcttgattttctgaactcaaagaagatgacagatgctggcgcactagatctcattgacgatgaagacagtgatgttgaagaaggaattgatcgacaggctagaggaaacttaaggcttggtttacctggatcaatggcaaatcgtggaagacccatagctcggacaaaatgtgttaagtttgctccaactggaagatcatttgctgcagcaaccactgatggtgttttattgtactcaagtgatgaatcatttatttttgat

SEQ ID NO: 455211 - DNA, 338 bp, Sorghum bicolor
cgtccgccagtaaatgccagtgatcttagtggccatggtaatattagtccaaatttaagtccattagcaggaacatcacaagaggacagaaacagtaaactggcaccagaagtatttagggatagcaggatgcaacacacttttctgagtaatgaaaagttacaggaatcctcagatgtgtctaatgttgctatttcccagggaagtaacattaaatcattgattttagaagaacttaaagaatctgatgtatgtgatgctttcacgaggggacctaatagaattgagcaggaagctgaaacttaatggagagaaaaattcagctttagtgatggatc

SEQ ID NO: 455212 - DNA, 366 bp, Sorghum bicolor
cgtccgcctacgtcactctccggagcaccccaccctttcctcacccagccatggcggagcgcggcggtgagcgtggcggcgagcgcggagggttcggccgtggcttcaggcgcggtggacgcggcgaccgtggcgggcgccgcggcggccgtcgtggcccgcgtcaggaggaagagaagtgggtacccgtcaccaagctcggccgcctcgtcaaggagagcaagatcaacaagatcgaggagatctacctgcactcgctccccgtcaaggagcaccagatcatcgagaccctcgtcccggggctcaaggatgaggtcatgaagatcactccaagccagaagcagacctcgtccgggcagtgcaccc

SEQ ID NO: 455213 - DNA, 317 bp, Sorghum bicolor
cgtccggtcgtgaggaaagaggctgagaactgcgactgcctgcaaggcttccaagtttgccactcccttggaggaggcactggatctggaatgggcacccttctcatctcaaagatcagggaggagtaccctgatcggatgatgctcaccttttctgggttcccctcacccaaggggtcggacactggtggggagccataccatggcacactggctggtcattaagtgggtgaaaatgctgatgaatgcattggtcttgaccaccaggggctttatgacctttggtttccaacttttgaacttaccacaactaactt

SEQ ID NO: 455214 - DNA, 283 bp, Sorghum bicolor
cgtccggtggaggaggaggaagacgagcgcggcggcgccggcgggcgcgggccgcaccgctccaagaagctccgcctctccaaggagcagtcccgcctgctggaggagagcttccgcttcaaccacacccccacaccgaagcaaaaagaggccttggctggcaagctccagctgcggcccaggcaggtggaggtctggttccagaaccgcagggctaggacgaagctgaagcagacggagctggagtgcgagtacctgaagcggtgcttcggctcgctgaccg

SEQ ID NO: 455215 - DNA, 261 bp, Sorghum bicolor
cgtccgctggctctgaattgactgccgttgcattctatgatgccccattgcatgttgtgagcctgaacattgtgaaaaactttgtattatttggtgatattcacaaaagcatatattttcttagttggaaagagcaaggttctcaattgaatctgctggccaaagattttgggtcacttgattggtttgcaactgagttcttaattgatggaagcaccctgagccctgtaggttcagattctgaccagaacctgccgaatt

SEQ ID NO: 455216 - DNA, 251 bp, Sorghum bicolor
cgtccgcggacgcgtgggttgcaaaagagctacaataaaaacttgtctcagaaggacctacaattaatagcatcttcggtcttacttgctgcactatctgtggcaccttatgaccaaaagtatggtgcatctcatcttgagacagagaatgagaaggaacgtaacatgcggatggccaaccttgttaacttctcacttgattccaagcgtgaaaatagggaaatgccttcaagagcatctcttctatctga

SEQ ID NO: 455217 - DNA, 342 bp, Sorghum bicolor
cgaattcccggtcgaccacgcgtccggccacaagtacacagtatgctgcattgatttgtgctcacgcacaccggcaagagctcattcacgacctttacaaaacatggcaggatcactcagagaggcactgtgacaagcagcatgatcaggtagctcttaatatccttaaggaaagccactgtgcagatgccattgataataatattctacagggactgtgttagtgaaggccatatctaccatatgcctccattacgagttagatgccatccagaaggcatgtgccttcctataaccaaattaccagcctactgtaacatatgtggaattgcaaaaactcat

SEQ ID NO: 455218 - DNA, 266 bp, Sorghum bicolor
cgtccggaggatcaaatggccggaaggtctgccacaagacttaaactcggaaatgctgtgtctgagggaactgtgaacaatgagacccttggctacttcattggaagggtctaccttttcttgacacaacttgggattgacaaagatcgtctccgtttccgtcaacatctgccgaatgaaatggctcattatgctgctgattgttgggatgcagagattgaatgctcctatggttggattgagtgcgttggaattgctgataggtc

SEQ ID NO: 455219 - DNA, 242 bp, Sorghum bicolor
cgtccgccaacactgatggaatacacctgcaaaactccaaagaagtcagcattcaccacactaacctggcttgcggtgatgactgtgtttccatacagacaggatgcagtgatgtaaacatacataacgtgaactgcggaccagggcatggaatcagcattggtggtctaggaaggtacaacacaaaagcatgtgtattcaacatcaccgtaagagatgtgaaaatgttcagaacaatgact

SEQ ID NO: 455220 - DNA, 287 bp, Sorghum bicolor
cgtccgcggacgcgtgggttcgcagccacgcgacgacgaaaccctagcctcctcctctcgccctcctccgcgaagatgccgaagaacaagggtaagggaggcaagaaccggaagaggggaaagaacgaggccgacgacgacaagcgcgagctcgtcttcaaggaagacgggcaggagtacgcgcaggtgacccggatgctcggcaacgggcggtgcgaggccatctgcgtcgatggcacgccgccgctctgccacatccggggcaagatgcacaagaaggtctggat

SEQ ID NO: 455221 - DNA, 158 bp, Sorghum bicolor
cgtccgaaggttttgacttactctgctcaagacagcacttacaaggtgtttgatttgaaaaactacacactactgtattcggtgtctgataagaatgttcaagaaataaagatcagccctgggataatgctattgatttatacaagaacaagcagctc

SEQ ID NO: 455222 - DNA, 370 bp, Sorghum bicolor
cgtccgctcatttctcccgagccccgccgtgagcctccactcgccgccgccgccgttcgcccgttccagcttcgtccatggcttccctcaccggatccgctctctcctttgcgaggcccgtcaaggcaatcagcattaagtcttcctctttctctggtttaaggaaagataatgtagccttccgcctgcagccagtgccacaaagattcgcagtctgctgtcctgctaaaaaggagaccgtggatgaggtttgtaagattgtcaagaagcagcttgcacttgctgagggcactgatgtttgtggctcctctaagtttcaagaacttggtgctgattcattggacactggtgagattgttatgggccttga

SEQ ID NO: 455223 - DNA, 238 bp, Sorghum bicolor
cgtccgagaggtccgactacccgtcccgccgcctcatcatcctcggttccatcaccggcaacaccaacacgctggccgggaacatcccgcccaaggccgggctgggcgacctccgcggcctcgcgggcgggctgcgcggccagaacggttccgccatgatcgacggctccgagagcttcgacggcgccaaggcgtacaaggacagcaagatctgcaacatgctcacgatgcaggagct

SEQ ID NO: 455224 - DNA, 465 bp, Sorghum bicolor
cgtccgaaatgtcgtcgtcctcggcgatgccgccgccggcgtcgccgcgggagcacgtggagaggatccggcgggagcgctactacatcgggcgcggcgagcagaacccgctggcggaggacatgcaccaggccgtcaactacctctcgcaggaactctactccaaggacgtccacttcctcatggagctcgtgcagaatgctgaagataatgaatacccttctgaagtagcaccttcgttggagtttctcattacatcaaaggatattactggatgtggtgcatcctcaactttactcatcttcaataatgagaggggattctcttcaacaaatatagaatcaatttgtcgtgttgggaaatcaacaaagaaaggaaacagacatcagggttacatcggagagaaaggtattgggttcaaaagtggtttcttgatatcaaagtagccccacatattcagcaata

SEQ ID NO: 455225 - DNA, 268 bp, Sorghum bicolor
cgtccgcggacgcgtgggtgagtttgatgatgacttatcatgcattttcaatgatgataatgcggataagctcatcctccgtatccgcatcacaaatgatgaagctccaaaaggagaaatacaagatgagtctgctgaggatgatgtcttcctaaaaaagatagagggtaatatggtgacagagattgcgcttcgaggcattccagatattaaccaagtggtcaataaagaagggaagggcaatactttttattcagaccaaaggttc

SEQ ID NO: 455226 - DNA, 501 bp, Sorghum bicolor
  unsure (1)..(501): unsure at all n locations
cgtccgcccgcttcgccgccccgccgccgctgccgtccccgcccgcagccaaaatgccgttcaagaggttcgtggagatcgggcgggtggctcttgtgaactacggcaaggagtatggccgccttgtcgtcatcgtcgacgtcgtcgaccagaacagggctcttgtggatgcccctgacatggtccgttgccaaatgaacttcaagcggctttccctgactgatatcaagattgacattaaacgtgtcccaaagaagactacattgattaaggcaatggaggaagctgatgtgaaaaccaagtgggagaatagctcatggggcaagaagctgattgtgcagaagaggagagcatcgctcaatgactntgacaggttcaagatcatgttggcgaagatcaagaggggtggtgccatcaagcaagagcttgctaagcttaaaaaggtggctgctgctgcttagattgctttggtggttttgatttgtacctttatgcttcgat

SEQ ID NO: 455227 - DNA, 386 bp, Sorghum bicolor
cgtccgagaagatggcgctcttgaccgcggaggagaagaagacggcggcggagatcgtcgccgctctggatctgcagcgccaccccgatggcgggttctacctggagaccttccgtgacccctcaatcgcactccccacgtccggtctcccaccccgctataaggttgaccgtgccgtgagtagtgccatctatttcctactgcctgctggggagattgctaggttgcaccgtatcccttgtgctgaaacctggcattactacctaggagaacctctcacggtatttgaggtgcatgatgatggacaaatcaagacgactgtcgttggtcctgacctgcgacagggccagagaccacagtacacagttccttcaaacatatggttc

SEQ ID NO: 455228 - DNA, 376 bp, Sorghum bicolor
  unsure (1)..(376): unsure at all n locations
cgtccgaaggtttcaatcctgaaagtgccaagaagaggttttttgagatatatcttgacaagtacgcaaagccaaattctggcatcggattccctggggctctggagctcatcatggagtgcaaaaattctggtcttaaggttgctgttgcatccagtgccgacaggattaaggtggatgccaatctggctgctgctggtttgcctgtgtctctatttgatgctattgtttctgctgacgcgnttgaaaatttgaagcccgctccggacatatttctggcagcatcaaagaacttaggtgttgacacanacaagtgcattgtgatagaagatgcacttgctggtgttcaagctgcaaaagctgcggaaatgagatg

SEQ ID NO: 455229 - DNA, 457 bp, Sorghum bicolor
  unsure (1)..(457): unsure at all n locations
cgtccggttaatagacttgagactgctaagttgtgaaggaatcacatctgcttccatggctgcaatagcttacagccgtctgcttgaggcactacagcttgataattgcagcctgttgacatcagtgtctttggacttgccacatcttaagaatataagtctcgtgcacttacgcaagtttgctgatttgaatttgcgaagccctgtgctttcttacatcaaagtttccagatgttcagcgctccatcgagttagcataacatcgactacgcttcagaaattggtgcttcaaaaacaagagagcttatccaatttgtcattgcaatgccacaacttgattgatgtggatcttagtgactgcgagtcattaacaaatgcgatttgtgaagtatttagtgacggaggtggttgtcctatgctaagatcatngatccttgacaatngtgagagtttgagc

SEQ ID NO: 455230 - DNA, 264 bp, Sorghum bicolor
cgtccgcggacgcgtgggcagaaccttctttgttatgagcttgttcccaatggaagcctagaggcttggcttcatggtgcactaagtgctagctggcccttggattgggacaccaaggataagataacacttggtgcttgcaagggaataagaataccttcaataaggatcaaaagcctggcgaaatcaaaaggaatttaaaagcatttaatatatggctggaaaatgatttcaatgctaaagggtccaattttggttgggcaa

SEQ ID NO: 455231 - DNA, 382 bp, Sorghum bicolor
cgtgcggtgagcttcatgatggcacgaaaattgctgtaaagcgcatggaggctggtgtgatgggtaacaaggggctaaatgagtttaaatgcagagattgctgttttgaccaaggttcgtcaccggaaccttgtctcactgctgggctactgccttgatggcaatgaaaggattcttgtgtatgagtacatgccacaggggacactgagccaacaccttgttgagtggtcagagaacaatttgcggtctttggaatggaaaaagcgactaagcgttgcacttgatgtagctaggggtgttgagtaccttcacagccttgcccagcagacctttatccacagggatttgaagccatcaaactttcttccttggcgatgacttg

SEQ ID NO: 455232 - DNA, 364 bp, Sorghum bicolor
  unsure (1)..(364): unsure at all n locations
cgtccgcccacgcgtccgacaaacttggtcagtttggatttgtacctgaacaacttcactggttcgataccagattcattgnggaagctattgaagctgcggttcttgcgtcttaacaacaacagccttactggttcaattccaaaatcattaactgctatcactgcactccaagttctggatctgtcaaataacaatttgtctggagaagttccatcaactggttccttttcattattcacccctatcagttttgcgaacaaccctaatttatgtggtcctggcactacaaaacctngtcctggtgctcctnccttttcttcacctnctccatacaaccctacaacccctgcgcaatcaccag

SEQ ID NO: 455233 - DNA, 195 bp, Sorghum bicolor
acgcgtgcgattgtccttatggggaagggtgccctcaaatgcatggagatctgtgtgcaacctgtggaaaaatgtgcttgcatcctcatcggcgtgatgagagggaggagcatatcaaggtatgtgagaaaaatcacaaacgccttgaagctctgaaacgcagccaagaaatagaatgcagtgtatgtttgtatc

SEQ ID NO: 455234 - DNA, 185 bp, Sorghum bicolor
cgtgcgggaaggcgcaggaggaggaggaggagcatcagcaggcggcgcccaggatcggcttactacccagagcttgtaaccatggctaggggattgaataaacatatcaagaggctcaatgcgctcaaccattggatgctgaacatgcttcgcacaacttatatcttcaagctatcctattgcac

SEQ ID NO: 455235 - DNA, 199 bp, Sorghum bicolor
cgtgcgcggacgcgtgggcaaaactgtgcttgatgcgaatatttatgctgtgatatccccacagatgggaaagcaagttgttgcttttcttgctgccatggaaattatgtcagagcaatttcctggtgcattttctggttacaaactggaggtcatggagtctcatcaagcaacaaaattggacatttctgggactggc

SEQ ID NO: 455236 - DNA, 510 bp, Sorghum bicolor
  unsure (1)..(510): unsure at all n locations
cgtccgccttgagtctctggaagctcttgctgatgagaatacttgtgcgatggtcattataaatcctagaacccttgggggagggtatcctcatatgatcattgggcaaaatgcagagactgcaaggaaacttggaataataatcatagctgacgaggtatatgaccatttggtttttggcaataagccttttataccaatgggtgtctttgcggatatagttccagtgatcaccttgggatctatatctaaaagatggcttgtgcctggttggcgacttggttggatagcaacgtgcgatctgaatngtgtgctaaaggaagctcangtngacaaattgattgaaaactatataaatatcacaaatgatcctgcaacatttatccagggtgcagtccctcaaataatagccaacacaaaggaggattacttcaacaaaatacttaatcttttgaggaactctgcagtattattgtataataaaataaaggagactaggggcattacatg

SEQ ID NO: 455237 - DNA, 393 bp, Sorghum bicolor
cgtgcgcctcgaccttccgcagaactcgctttagtgccacatggtcgcacactttctgcctctctctgtccctacgcatgcccggtcgatccgttcagcggccatgacgctgggaagcttcggctcctgatctagcgtcgtctttcctcggaacttcaggctattagaagagcttgagcgtggagagaagggcattggtgatgggacagtgagctatggaatggatgatgcagatgacatctatatgcggtcatggactggtaccatcattggccctcacaatactgtacatgagggtcgcatctaccagcttaagttgttttgtgacaaggactatcctgagaagccaccatctgtcagattccactcaagaatcaacatgacatgtgttaa

SEQ ID NO: 455238 - DNA, 196 bp, Sorghum bicolor
cggccgcggacgcgtgggctctagaggagatcgccacctccccgggtgggccctagatcccgatggcctcgcgccgccgcaccctgctcagggtcatcatcctcggcgacagcggggtttgtaagacgttctttatgaaccaatatgtgaacaagaagttcagtaaccaatacaaggctactattggcgcggattt

SEQ ID NO: 455239 - DNA, 331 bp, Sorghum bicolor
cgtccgcggactcttgggcggacgcgtgggcacatcagagatgagaaagtcaaggttctgcaatctgtgaaccctattaagcctgaagaggtagtccttggacaatacgatggctacaatgattaccctacatttcctttatgattcatatactttaactatttcatttgaattttttttatccatatataaagatgatttggttatatttttatatttttttattatatttttttttaattttgtattttgtctttctttaaatatttttttataattttattatttatttttttattttacgagaattttttgattttatatttttttt

SEQ ID NO: 455240 - DNA, 324 bp, Sorghum bicolor
cgtccgctagccgccgccgttcggtgctcccgccctctcttcagatctctattcgcagccgccggccagggaccccttcacagcgaggaacatggctgatcaggaggccccagtcgctgttgaggcaccgaccccaattcttggagagccgatggatttgatgactgctctgcaactcgtgatgaagaaatcaagtgctcatgacggacttgtcaagggtcttcgtgaggctgccaaagccattgagaagcacgctgctcagctttgtgtgcttgctgaggactgtgaccagtctgattatgtcaagctggtgaaggcgctctg

SEQ ID NO: 455241 - DNA, 349 bp, Sorghum bicolor
cgtgcgatggactcttccaagatggcagaacaattatccaatgagaaggccataagaatggtagctatgttcgataatgaggaggtgggtgcagattcaatgcaaggggctggtgcaccaaccatgttccaggctatgagacgaatcattgattccttgatgcatcagtcgatgggggagggagctctggaacgtgcaatacattcttcattccttggttcggcagacatggctcacgctctgcacccaaactatgccgaaaagcatgaagagtgccacagaccagaactacagaaaggacttgtcatcaagcacaatgctaaccaacgttatgccacaagtgctgtta

SEQ ID NO: 455242 - DNA, 470 bp, Sorghum bicolor
  unsure (1)..(470): unsure at all n locations
cgtccggagaagggctcggaatatgctatcacattcagcgctgcccggacatgtgcgcaactggagtcactgaatgtttctgtgctaggtggcatatcccagacagtagacttgcagacattgtacaacatagaaggctgggacgcgtatgcactggcttttcaggcgacggaagagcaggcacatcttcaattcatgaaccctggcatggaggatgatccaacttgtggtcctatcctagacaacgttgccgtcaagaagctcttcactccggacaaaccgaaggataacgtggtgctgaatggagaccttgaggagggtncatggatgttccccgacacgagncttggcgtgctgctcccaactaaccttgacgagcagacatctgccatacctggttggatgatcgagtcaaaccgcgctgtccgctacattgactctgatgagtacaaggtttccccaggggaagc

SEQ ID NO: 455243 - DNA, 456 bp, Sorghum bicolor
cgtccggctttgtctgcttcagcacagcgagaagattgctgttgcattcggtttgatcagttgtacatcagcaataaaaccaataaggatatttaagaacctccgtgtatgcgctgattgtcattcagcactcaagtatgtctctaaggccactggtagggagataattctgagagatagcaacagattccacaggatgaaggatggggaatgctcatgcggagaatactggtaacaagcaagctggctcacgtagtcacatttagctgaagagccatgtacagagtctggcgcaccataacattattgactgtgagtgaccatgttcatagtttttgtagcaccttcacaaaatcataggttatacaaagcatgagttggtgggataagttatactatgggtatagaaatttgacaagtgtatgcaccataaatacgaaatgttttgagacttgc

SEQ ID NO: 455244 - DNA, 541 bp, Sorghum bicolor
  unsure (1)..(541): unsure at all n locations
cgtccgggggaagaaaagaagaaggcaaacttcctttctgctgatgattttgagccagcacttatcccatccaagaccattcctgagcctcctccattcccagataaatatcatccttttgcatctgattgagctgtttctgtggctgtgcaagagaacattatttagttgtacacacaaacaaaaagtgggagtattttccagagtttagaagagggctgtttgtgagcactgaaggcagagaaaggcaaaaagctttagcagcggcaatgctctggtcaatggacccgcaggtgaccgtccatggngactgggtgtcagccgtggtgccgctgatgaagctgctgtgcctgacggtcatcggcctgctcctcgccaaccctcgggttcaggtcgtgcccagggccaccttcaagctgctgagcaagctcgtcttcgcgctctttcctccctggctcatcttcgtccacctcggcaagtcgggcaccataaacaacgtcctgcactggtggtcaatcctgtcaacgtgctcataagcact

SEQ ID NO: 455245 - DNA, 294 bp, Sorghum bicolor
cgtccgcccaaggccatggtacatttccaattgttcctgcgtctagtcaaaagtatagcgttattgatggttttggctggtctggtcctggcaattttgtttacggaactcagtatcggagacgtttttgcttcgattctagcatttgtgccaactgggtggggaatcatttcgattggcatggcatggaaacctgtcgtgaagaaattgggtttggggaaaactgttcgtgccctaacttggctggtttatgcttgcacggggattatcattttcatacccatagccctttgc

SEQ ID NO: 455246 - DNA, 300 bp, Sorghum bicolor
acgcgtccgtcgacttcctagcgcaagcgttcggcctgccgctgctgcagccgtacctgcagtcccgcggcaaggacctccgccggggcgtcaacttcgccgtcggcggcgccaccgccatggatccgcctttctttcaggagatcggcgcgtccgacaagctctggaccaacctctccctcagcgtccagctcggctggttcgagcagctcaagccgtcactctgcagcttctcaataaagtgcatggagtacttcagcaagtccctgtttctcctcggagagattgtgggaaactact

SEQ ID NO: 455247 - DNA, 194 bp, Sorghum bicolor
gacacggagtcatttcaaactggtcaatcaagcaaatcgaagccttgcaccaagttttcagtcccattgggtgcccatttggtgagggatgccattttctgcactttgtccctggtggttacccagcagttgcaaaaatgctcaatctaggtagccctgctgtatctgcggccatcaagaaactcatgtgggat

SEQ ID NO: 455248 - DNA, 334 bp, Sorghum bicolor
cgtccgggcctcaccggcagcataccgtcggagctgggctacctcaagagcctcagttctttggacctgtcgaacaacgcgctcaccggtgagataccggcgagtttctccgagctcaagaacctgacgctgctcaacctggtccggaacaagctgcgcggtgacattcccgacttcgtcggcgacctttccaggctcgagggcctggagctgggggagaacaacttcaccggcggtggggcacgaaggcttgggcggaacgggcggcttcaggtggttgaacttttgttcaacaaggttaacgggacccttgcggcggaggttttggccgggg

SEQ ID NO: 455249 - DNA, 183 bp, Sorghum bicolor
cgtccgaagctggtgattccgatggtgccacaaatatattcatcaagatgaccatgcatggcttgaagccaaatgagtttacaatgtctagtgttattgatgcttgtgctagtccgacagctggagttgacctgggtaggcagttccatgctatttctatcaagcatagatgccatgatgcac

SEQ ID NO: 455250 - DNA, 364 bp, Sorghum bicolor
gtccgattcccggtcgaccacgcgtccggttgtgcatgctcgagttgtgaccgaccgtgtcagtgggttttcgaagggatttggctttgtaaggtatgctacaactgaagaggcaactaaaggaatagaaggaatggatggaaagttccttgatggatgggttattttcgcggaatatgctagacccagagcaccgccggagcaagcagagatgaattcgccgccacagcaatcatggggtgcttcaccaggatcttggggttcacagtagatgaagtaatatcatgagagcccctatccagcctggggctcagggctcacagcaggttgagaggctgacaattcagcatctaattcatagata

SEQ ID NO: 455251 - DNA, 365 bp, Sorghum bicolor
cgtccgtgctcgccagaggaatatgaacaacttaaatctgagaagacaaatttggagggagaactagcgaagtgcaacgaaataatagaagaaacaaaggttagattaagtgatatggagaaaaacctggaagacctcagatctaagttggctgacagtgagaaatcaaatagcttgagtgagacacagctgaagtgtatggctgaatcttacaagtcacttgaatcaaggaaaattgaattagaaaatgagatagaagtgttacggtccaaaatagatgctttaacagctgaactctctgatgaaagacaaagtcatcaggagggcttagttaaatacagagatctcgaggggaagatggaaag

SEQ ID NO: 455252 - DNA, 464 bp, Sorghum bicolor
  unsure (1)..(464): unsure at all n locations
cgtgcgcgctctccctccctccctcctcgcctcgccgccggcgacgagctcgagctcgagctggttcctcgtatagaagacggccaccgcggtatggagcccatgaacgtagacaacggcggctgcggcggcctggacgcgcagatcgagcagctgatgcagtgtcgcccgctcgccgagcaggaggttaaggcactgtgcgagaaggccaaggagatattgatggaggaaagcaacgttcagcctgtcaagagtccagtgacaatatgtggtgatatacatgggcaattccatgatcttgtagagcttttccgaattcgcgggaagtgtccagacaccaattacttatttatgggggattatgtagatcgnggctactattctgttgagaatgtcactcctgttagttgcactaatagtgaggtacccacatcgaattccgatcctttgtggaaacctcgaga

SEQ ID NO: 455253 - DNA, 463 bp, Sorghum bicolor
cgtccgaccaaggcaacagctggtctaagattaatcggagatgagaaggcagaggagattcttgaagcggttagagatcttgtccacaccaagagcaaatttcagtacaaccccaaatggatcactgttctcgagggaacgcaagaaggatcttacctatgggttgctctgaattatctgttaggtaagttgggaggggactactcgaagacggttggagtgatagatttgggaggtggatcagtgcaaatggcatatgccgtttctgggaatgctgctgcaaatgccccagctgtacctgatgggaaggatccatacattacaaaggagtacctcaagggaaaagattataacctatatgtttacagctacgtgttcatattgtctgtctggttgttcgagtttagattctgtttggattgattgggtcatttagccactgctttttgatcgggttcagggg

SEQ ID NO: 455254 - DNA, 448 bp, Sorghum bicolor
  unsure (1)..(448): unsure at all n locations
cgtccgaataaaaagatcttaccacttcctggtgatgtggatgtcatatgtggaggaccaccatgccaaggaattagtggctacaaccgcaatagagaatttgatgcaccattcaactgtgagagaaataagcagatcattgtcttcatggatgtaatgcaatttttgaagcccaaatacatttacatggaaaatgtccttgatatactgaagtttgctgatgcaacacttgcaagatatgctctaagtcggctagtttctatgcattatcaagcaaaactaggggtcatggctgctggatgttatggcctcccacaatttcgaatgcgtgtcttttttggtgggctgtcatncaagggagaaattacccccgtttcctctacctactcatgaggcaattgtgaagaatggttgcccccttgccttttgagcgtaaatttaattggat

SEQ ID NO: 455255 - DNA, 273 bp, Sorghum bicolor
  unsure (1)..(273): unsure at all n locations
gtaccgtccgtattcccgttcgacccacgcgtccgccttgccccgcttcgtcggtcgtcgcctgccccagagagcaggagccgcctcgtccctcccggccccgcccccgccccccgatcccgtccgtggtcatgaatcccgagtacgagtaccttttcaagctgctcctcatcggggactcangtgttgggaagtcttgcctgctgctgagggtcgcggatgatttacacctggagaggctacataggtctattgggagttgatatttaaatt

SEQ ID NO: 455256 - DNA, 296 bp, Sorghum bicolor
cgtccgaacgagaccgctgatcaatccgctggtcatggcgctgctcatggaacccgtcgctgaacccctgactgagagcgagcatgccagcgtggccggcatcctcgccataatggagtccgttgcgcacgaattcaaggagcatgggaacgagctcggacagatgggccggcagcactacaccgaggccgactcctggtacacgtagggcatcgcccaggtgggggcccagttcgcgctcgacgcatctgtcgacgccgacgccttcgttgtcttcgtcaaacgattacacatca

SEQ ID NO: 455257 - DNA, 302 bp, Sorghum bicolor
  unsure (1)..(302): unsure at all n locations
cgtgcgcaaagcttcagcagtcagaagctaaaatgatagagcacaaagcaagcatggctgtgttaggaaaggaagcagcagctgcacttgcagctgttgaatctcagcagcaacgagtgacccttcagaggctggttggcgtggtanaagcagaaaagttattccatctgagattagctgctatccttgatgacgttgaagcagagatgtcctctgagaagcaaaagagagaatcagcaccacctattatattttttcataagcgtgctgagaaagcccagtactttcttgctgaggtgaaa

SEQ ID NO: 455258 - DNA, 371 bp, Sorghum bicolor
caaaatttcccgagacctcgagcaaaatctggtctggtttggttcaaattcgcctttcttttggggcgttcttacgggccatgtcgcagcacgacgacgacctcgccggagttcattcggaagaaggagaccgccacggcgttgtaatggatgactccgactacgaggacgatgagttggaccaatctactagtaaagcgactgaacacatcacggctatggatgtgaagaaggggaaggatatacaagggatcccctgggacatgatggcgactacaagagacaagtacaggcagtcaaggctgcagcggtatgccaactttgagaacgtacctaattccggaaggatttcagagaaggaatgcatgcct

SEQ ID NO: 455259 - DNA, 389 bp, Sorghum bicolor
cgtgcggctcatctcttctgaactgcatttgtctgtggcactcagctgcgcctgccgcccagcacaatggagagggccgcctcgttcctctcctcgctcctcggcgtcgccggcggcgattccggggcaccggcggcaacggtgaagtccgtcctcgtgtaccccatcaagtcctgcagggggatctccgtggcccaagccccaatcaccgccacggggttcaggtgggatcgccagtggatgctcgtcaactccaaagggagagcgtacacgcagagggtggagcccaagcttgctctggttgaggtccagatgccgccggaggcctttgccgaggactggcagcccacgccggacgaccacatggttatcagagcacctggaatgga

SEQ ID NO: 455260 - DNA, 533 bp, Sorghum bicolor
cgtccgaagcagtgaaaatattagagaaaaggttaatatagaccagaataagggcaatgttgagaaggtctttttgaatagttatattcgaactgacaaatctcatggttttcgagctttggttgtaatggaggatcattcactcttgttaattcaacaaggtgaggttgtttggagtagagaggatgggctggcttcaattgttgatgtaacaacatcagaattgcctgttgagaaggatggtgtatcagttgctgatgtggaacacaatctctttgagtggcttaagggacacatgctgaaactcaaaggaactctaatgcttgctaatgctgatgaagttgctgcaatccaagcattgagactaaaaagctctgagaaaaataagatgacaagagaccataatggatttcgcaaactacttggtgtattgacaaaggctggcaaagtgattgctctgcacactggaaatggacgcgttatcttgtcaaacttgctggcatctcttctggccttcaagattgggggaatgc

SEQ ID NO: 455261 - DNA, 431 bp, Sorghum bicolor
cgtccggaagagattgcactccaagatgaatacgagggatctgaggatggcaactctactgtacactttcgctttattgaaaaggccctcccttcacttgtaccgatgctgctagaaactttattgaagcaagaggaagatcaagatcaagatgataatgtttggaacatttctatgagtggtgggacgtgccttggactcatttctagaactgttggtgatgcagttgttcctcttgtgatgccatttgttgaggccaacatcacaaagcctgattggcattgtcgcgaggcagctacttttgcatttggttctatccttgaaggcccctctgttgaaaaacttgctccacttgtccagggtggtcttgatttcttgcttaacacaatgaatgatgcaaatagccaggtaaaagatactactgcttggac

SEQ ID NO: 455262 - DNA, 411 bp, Sorghum bicolor
cgtccgttttttcttcaagccgattccccatctccgccctgcctgccggagagcacgagcacgagcaccaccgtcccggcagcgcggagcgcggtccgctccatccgcgcacggcctcagacgagcggggggcgcacggacgctgcgaccgggatggatctcaaggatagcctctccagatttaagcaacagcaggagagatgccagtcatctttggcgagcatagctgcttcgagctcaaagccaaagcacagggcccaaccagcacatgctcccaacgttccagcaaggccatcacaacctgttaagttttcgaatgatacagaaaggctgcagcacatcaattcgattaggaaatctcctgtcggagcacagatcaaacttgtcattgaactgctttacaagacaaga

SEQ ID NO: 455263 - DNA, 207 bp, Sorghum bicolor
cgtccgcggacgcgtgggcttcggccacgccaagtcgctggagcaggccaagaagctgtttccaaacacatatcttcttgttggatgctgcaatgatgagttgacacacaaattcaaaggaagaactgtaatgactgaggatgagcgatatgagtcacttcgtcattgcaagtgggttgatgaaataatttcagatgctccatgggt

SEQ ID NO: 455264 - DNA, 384 bp, Sorghum bicolor
cgtccgcccacgcgtccggtgggacaataccttcatctctaactaagctgaattttctctccaagtttgatgtgtcatacaacaatttgactggagatatccctaccggtgggcaattctccacattcgcacctgaggattttgatggtaaccctacactctgccttcggaattcttcatgcgcagagaaggattcatctttgggagctgcacacagtaagaaaagcaaagctgcccttgtcggccttggactgggaactgcagttggggttctcctttttttgttctgtgcttatgtgatcgggtcaaggattgttcattcaagaatgcaggagcgcaattcaaaggctgttacttaatgctgaagactctgattttaactct

SEQ ID NO: 455265 - DNA, 400 bp, Sorghum bicolor
cgtccgctcaagattcgcgtctgctttctgaaatacaagagcagcagaatttgttgaagacctatgaggtcatggtaaagaaattccagtcccagatccagactagagatactgagataacccatttacagcagcaaattgatgaagctaaacttcggaaatcaaagttagagaagaaactgaaacaaaggggcctacttaacaagggatcagagggatctgaccaagaagaaaactacctcttcattggattgacacccaagttggttacctctggtggcgattaccccttccaagtaattcatgacttttcaaaggctttgatcaacatgattgaaggctgcaggttgggatcttgatggggctgctaatgcgattgaacctggtgagtttacacaag

SEQ ID NO: 455266 - DNA, 266 bp, Sorghum bicolor
agtattctcgattgtttcgcgctcaatcacaccgtcaagagctcatttatgacctttaccaaacatgttatgatccggggatgaacactgtaacatgcgatatgatcacttagctcttaatatcactcatgaaggccactgctcacaatccatttagaattatattctacatgtactgtgttagtgtacgccaattttaccaaattctcctttacgagttagatgccatccattatgtatgttcatttcctttaactaacttacca

SEQ ID NO: 455267 - DNA, 510 bp, Sorghum bicolor
cgtccgccttagccaagaaaacagtgctgctcatctgcaggctgaaagtctatttgagacagggatgcagacaagatatcgcagtgttgcatctgtttccactccaggtggttcttctgtccagatgcaggagtcaaaggagcatgaacttggatcagattgggaaactgcagaggatgcaactatatcgttagacatgaaaacacctcttagccattttcctcctttccgctttggggttgaattcgaggatgtgcacaggcttgctgatggtcaggtgaaacactcgactgaagtgttttatgcaggctctctatggaaggttagtgtccaggcattcaatgatgaggatcctcatgggcgacgcacccttggactttttctccaccgacgcaaggctgagttgttagatcccttgaggaaggctaacttgtacatcgacccccgggaaaaggtcactgctcggtatcagctcatctgtccatcaaagagagaggtcatgatatttgg

SEQ ID NO: 455268 - DNA, 419 bp, Sorghum bicolor
  unsure (1)..(419): unsure at all n locations
cgtccgagcagctatccaaggtaaggcaccccaacctggtgtgcctattcggctactgtgacgaggagggagatcagtacctggtgtatgagtactgtgccaatggaaaccttgcccagaacctactgagaagtgactctgcgctaccatgggaaacaagagtgaagatcctgagggactgtgcatctgtcctgaggtttcttcacacacaccctgatggatgcattgtccatagagacattaagctcacaaacatcttgctgacagaggacaaggtgccgaagctggccgatttcgggctggcaaaaatgctagaaatggaggagaccaaggtgttcacagacgtgaggtgaaccattgggtacatggatcccgagtacatnacacactccaagctcacttgtgccagtgacatatac

SEQ ID NO: 455269 - DNA, 534 bp, Sorghum bicolor
  unsure (1)..(534): unsure at all n locations
cgtccgccaactctagcgcttcccttctcttttcctcttcttccccgaggcgccggctctggtcaggtcgggccttgccgccatttcgggactcgtacgtagcttcttcctggtcggggttgctgcgcgtcttgcgtaccctgggttgagcatcattgggagtggaagaaaggaatcatgttcaggagaaagcatgcttctcatttcaactcaaatgatgctgagcagcaagaagcaaagataaatgaattaaaatatgcactnggtcctttgtctgcccatgacgagaagtactgcagtgacacatgtttcagaagatatcttgaagcccggaactggaatgttaccaagtcgagaaaaatgcttgaagaaagtctcaaatggagggcaacttataagccggaggatattcgctggcctgatgtnttctgtgaagcggaaaccggaaaaatgtacaaggcaagttttcgagatagagaagggagaaccgtaattattatgagacctacaaaaggagattcaacgtcccatgac

SEQ ID NO: 455270 - DNA, 306 bp, Sorghum bicolor
cgtgcgcggacgcgtgggcccgacgaggccatctacctaaaatcaaaccttctgcctggttgggcatatgtggaaagcgaagcattgggcactcttattacttcgagcgctaccgccgcgagatcccttgcgctttcaaagcttctggttttggagaaaacaaggaggcaaaccttcctgtactctcgatcgttactggaggagaggttataactgaagagctaggaatgaaccttgagaatgttgaacctcacatagggccggagctcttacccttccggcagcaggggccccgttggcgcgcac

SEQ ID NO: 455271 - DNA, 448 bp, Sorghum bicolor
cgtcacgcgtgcgcgctaattgtatgaagaagaagggtatcggtatgttcatttgtggatggataattgatggtgattaccatgaactagctgaggatgcaaagactgcctgccaccaactggatgcttacatggactacaaactgtttgagcatattgcggccatcactgtaagtcctactatgtgtgatggcttccgtagcattgtgcagacaatgggcctaggaatattgaagccaaacattgttgtgatgcggtaccctgagatctggcggcgtgagaatttgacacagataccgtcaacatttgtcagcataataaatgattgcattattgctaacaaggcagtagtcattgtgaagggactcgatgagtggcctaatgagtaccagcgacagtatgggactattgacctctactggattgtaagaaatggaggattgatgct

SEQ ID NO: 455272 - DNA, 262 bp, Sorghum bicolor
  unsure (1)..(262): unsure at all n locations
cgtccggtggaggggaagcgcaagaagaaggcattcatacccctctcgatcacagcttctgagctcaccaccaccgctcctgatgcccctcgcctctactctgttctgctcagcactcctctgaaacctggcgatgcaaccactctagaagtgttatacatgctcactcactctntggagccctttcccgctgagattagccagtcagagtcccagctgggttactaccgtgacagtgcagtgcttctcttcccctaccatg

SEQ ID NO: 455273 - DNA, 413 bp, Sorghum bicolor
  unsure (1)..(413): unsure at all n locations
atgtgctgaggtacctgacgttcactttgaagtgtgtactgctgagacacaggctctgctatgagtcatgccggcggagttggagacncattgttaggaggagctcctattttcagccactgtcctggaacctacgaatgaaaatngcccttggagcagctaaaggtcttgcatatctccatagcgatgaggccaaagtcatctaccgtgatttcaagacctctaatgtccttctagatgcgaacttcaatgcaaagctctctgattttgggcttgcaaaggatggtccaactggtgacaagagccatgtctccaccagggtgatggggactcatgggtatgcagctccagaataccttgcaacaagtcatctgaccaccaaagagcgatgtgtacagcttttggagtagtac

SEQ ID NO: 455274 - DNA, 471 bp, Sorghum bicolor
  unsure (1)..(471): unsure at all n locations
cgtccgtctaaatgcattggagaaaccatcatgcttgtcctccagttccagttgcaacctgtgactccagtctctggagcgtcctcagatttgtaccgatcgtccgccattcccaactttaatgggctcagagtcctccttgcggacagtgatgacaccaaccgagctgtaactcacaggcttctggagaagctnggttgccgagtcctttcagtcgcttctggtgtccaatgcatgagctcncttgctgccgagtcatcctttcagctggtgattcttgatcttgccatgcagacgatggacggattcgaagtagcccgcgcgatcaggaagttcagtagcaatagttggctgccgttgattgttgccctagcagcaagaatcgacgacaacatncgggatcgatgccagaggtcaggaataaatggcctgatccagaaaccagtcacactagctgcactgggagatgaa

SEQ ID NO: 455275 - DNA, 490 bp, Sorghum bicolor
  unsure (1)..(490): unsure at all n locations
cgtccgccggcggcgcggcggcggcagcgatggcggcggtgacgaacgccgacgtggaggtggtcgacttcgacctcgacgacgacgacctcatggacgaggacgccgggccggatccagcgccggnccccgcccctgccttccgccttcgcttcaccatcgcgggcgacgacgcgccgcgtaggaccaaaggccgcggcttccgcgaggaccctaacttcttcgcgcaccgngactcccgctttggcgcggggggacgcgccgacctcgactcgctcggcggcccgggacccatccaatcaattgaaggatggattgtgttggtcactggagttcatgaagaagctcaagaagatgaccttcaaaatgctttccaagaatttgggcaggtcaaaaacctgcatttgaatttggaccgtcgtaccggatttgtcaaggggtacgctttgattgaatacgagaagtttgaagaagctcacgctgcaataaa

SEQ ID NO: 455276 - DNA, 510 bp, Sorghum bicolor
  unsure (1)..(510): unsure at all n locations
cgtccgcgccgtcttcgtctacctatcgacacgccatgtgcacggtgactatgtcaatggcgcccaccaggacctccgcgcgctgctctccttcaaggcgtacaacccgaacgccacggccctggcgtcgtgggtcggccccaacccgtgctccggcacgtggttcggngtcaggtgctacaggggcagggtggcggnggtcttcctggacggcgcctcgctgtccggcgccgtggcgccgctcctcgggctcggccggatcagggcgctcgccgtcaggaacaactccctgtccggcaccctcccgccgctggacaactccacggcgagcccctggctgaggcacctgctcctctcccacaacaagctcagcgggagcctncgcatcttggctggtgctctgctcacccttcgagcagagcacaacggctttcgtggagggctggaagcgctgcccgtcccgatgcttaggagcttcaacgtgttcgggaacaagctcgccggggagat

SEQ ID NO: 455277 - DNA, 441 bp, Sorghum bicolor
agtgcgcctgccgtcggtggagctgttgttcgggaggtgcgtcatggcgactctcttcggcgggatgaagccgaagaccgacatccccatcctcgccaagaaatgcatggacaaggagctgcagctggacgcgctggttacgcacgagctaggactgcaggagatcaacacggccttagacctgctcctgcagggcaaaagtctgcgctgcatcatctggatggacaaggacaacaagtgatggacaacaggggcggcgcgccccggaccaaacctgtggctctgaataaatttgccgtctttcagtttggcgatgcgatgcgtcgctgaaaactggtgctacaagcgaccaggagtatctgttcctgaaagcccacgttactctggtgtatcagtttcgtttcgttgtctgaaatgattaattataacgtatttgtactc

SEQ ID NO: 455278 - DNA, 452 bp, Sorghum bicolor
  unsure (1)..(452): unsure at all n locations
cgtccgatgcgtttggttaatacttttgaaaatgaatttcctgatgatatctggagtaaactcaccaaaaaaagttgctgcaaacatgtctcgtattgttgtctctcttgcttcattcaatggagaataacggagttttgcttgcacaggaatatttgtaggcaatcaatctgacacaaggatcctgacttcagcaagtttggttagaatntctgatgatgaaaacaagattaatgataacttgaagattgttgtacaccttccaaacaaacaacaaactgtagggacattgcaacattatcatctgcattacaatgttgctattgtcagcatcaaaggtttccgttgtcttcgtacagaagaatttcatgatccagggcaaattaagcgtaaggaggtattatctgtaggacgtatctttcagtcaggcaaataatggccacaggtgggat

SEQ ID NO: 455279 - DNA, 330 bp, Sorghum bicolor
ccggactataattcccggcaccacccacgcgtggggatggagggagacgctaaactgctcatcatcagcgcccagcgcaggagggagaaggaggacaagcactacgtgtggcaccgcgtggagcgcagcagcggccagttcacgaggctcttccgcctgccggagaacgccaagacggaggaggtaaacgccgccctagagaacggtgtgctcacggtcaccgtgcccaaggctgaggtcaagaagcccgaggtgaagagcatccagatctccggttgaagagccatgggggcggtgagagctcgcggcgtcggatctccggtttcagtt

SEQ ID NO: 455280 - DNA, 432 bp, Sorghum bicolor
cgtccgcccacgcgtccgcccccatccaccccgcccatgggagcccccacccctcgccgctgacccgtgggcccactgccccctgctccctgggcccccgcccccgcccccgccccggctgctgctgctgctgctgctcgcccacgcaaaccctaggctttgctgctagaagagctccagcgaccgaggaggagaagagaataaagctcaaatcttggatgcaccgtaaccgatggcgacacctgctgcagagaagccggaagatgtagagatccgcgaggtttgggcggacaacctcgaggcagagttcgccgggatccgcgacatcgtcgacgactacccctatgtggccatggacacggagttccctggcgttgtgtggccgccgctcggcacttacaagacggcggccgagttcaactaccccacacc

SEQ ID NO: 455281 - DNA, 241 bp, Sorghum bicolor
ccacgcgtccggcacagacagctccttggacaggctgtggctgaagaagaaggctgagatcaagcagtagatcttacatgtagtttaccaagaattggacactttgagggaccctgcataagctatgttgcgattacatatcaccatatgcaatgttgtgatttcagttggtatcttaaatctaaagacttggtatctatgctggatcataagatacataccaaaggtactagtaggggct

SEQ ID NO: 455282 - DNA, 266 bp, Sorghum bicolor
gccccacgcgtccgctcctcctcctttgtatctaatctatctccactccacgggtccgtcctccactcgttagggttagctttcctctgcagcgatggcgatcaagcggaccaaggcggagaagaagatcgcgtccgataagaagctgtgcgccctgctggattagtacaccaaggtgctcgtcgccctcgccgacaatgtcggatccaagcagctccaggacatccgccggggcctaaggggcgactccatcgtgctcatgggga

SEQ ID NO: 455283 - DNA, 253 bp, Sorghum bicolor
  unsure (1)..(253): unsure at all n locations
cgtccgcgcggcggagatccgcgacccgtggaggaagacgcgcgtgtggctgggcacctacgacacccccgtcgaggccgccatggcctacgaccgcgccgccgtcgcgctgcggggctccaaggccaggctcaacttcaccgctgggcgcggngcctgcccncgcgccacgcccgtncaggctcgcccgttcccactctcgcacccggcggcgccaggcggccacttcgtcggcgggctcgacgtcacccac

SEQ ID NO: 455284 - DNA, 180 bp, Sorghum bicolor
  unsure (1)..(180): unsure at all n locations
cgtccgcaggaatggcacctgagggttctcagttcgatgctaagcactatgattctaaaatgcangagctgctgagcactggtgagactgaggagttcttcacttcatatngatgaagttttgagagtttngatgacatgngtctncaagagaaatctctgagaggcatttatgcttatg

SEQ ID NO: 455285 - DNA, 564 bp, Sorghum bicolor
  unsure (1)..(564): unsure at all n locations
cgtccgattccggtcgccacgcgtcgcacgcgtcggccgtcggcgtgacgtggcggcacctggtcctcgcggcaccaccgccatggtgaacatgtgggccataacccacgacgccagcgtgtggcctgagccgacggagttcaagcccgagaggttcgtcgccgccggcggcggcgaggacgtcgtcccgataatgggttcggacctccggctcgcgccgttcgggtccggcaggcggagctgccccgggaagtcgctcgcggtggccaccgtcgggttctgggtcgccaccctgctgcacgagttcgaatggttgccgtgcggcggcggcggcggcggcgtggacctgtccgaagtgctaaagctgtcgtgtgagatggctgcgccgctggaggcgagggtggtgccacgtcgtcacgcggtgtgatgatgacgaggcagctgagacacacgtggacgtggcttgggagaggggacggagtggctagcttntactactactactaccttaccaccttctagcagaacgtaacgtggccccggacgacgatcgatgagcgagat

SEQ ID NO: 455286 - DNA, 364 bp, Sorghum bicolor
  unsure (1)..(364): unsure at all n locations
gcggacaccagctagccacgccacactcccaatccccgccgcagctggttccctgctccgttcgtctgatccagcggctgaatccgcagaccaccatgggattcgacaaggaggcgagctcctcgtcctcgcggctcgacgcggcgccgctgctcccgcagcacgggctgcacggcggcggcggcggcgggcacctgtcgtcgcagcccaagacgttcgccaacgtcttcatcgccgtcgtcggctcgggcgtgctgggcctnccctacaccttctcccgcacgggctgggcggcggggacgctgctcctcctcgccgtcggcgcgctcaccttncactgcatgatgcttctcgtcggcacacg

SEQ ID NO: 455287 - DNA, 300 bp, Sorghum bicolor
cgtccggccatggagggcgacagcaccaacctcgacgcggcgatagagtcgctcctcaatgtcgagaagcagatgaggctggccggcgatgtcgccggcacgcggaaggccgtcatcgacatcgtcgagctctgctacaaggccggcgcgtggaagacgctcaacgaccagatcgttctcctctccaagaggagaggccagcttaagcaggccattactgccatggttcaaaaagcaatggactacattgatttgacaccagacactgacacacgcatcgagcttatcaaaacactgagc

SEQ ID NO: 455288 - DNA, 412 bp, Sorghum bicolor
  unsure (1)..(412): unsure at all n locations
cgtccgccacccgtcgccgacgagcagcgcgatccggtgggagaaagggaggagaaggagaagatgggtggcgggatggaggtgcacaagaacaagtggatcgaggagtggaacgccggccgggagaacctcgagttcaacttccgctggacgcgccgcagcctcgccgtcgtcggcctcttcggcctcgccgtccccatcctcgtctacaagggcatcgtccgcgatttccacatgcaagatgaggatgcaggaagaccaccgaggaagttcttgtaacctgcaggttcatactcgtttgtttcaagaaataagcaatactgccagatgtgggaatgtcaacctgacaaacataatgctactcggntctttgtaagcactttaaggtgctatgtatgctatgttccagatg

SEQ ID NO: 455289 - DNA, 328 bp, Sorghum bicolor
cgtccggtgcttattgattgtgtacgcaaccctgcttttcttgattgggaggtcaaggaacagattttgaggctaaaggcagagcttgtgaaatcatcaagtaatcctgaaaaattccttttggaggctcttcattctactggctattctggtgctttagcaaacccactaattgcatcagaatatgcaattagcagattgaattcagatgtcctggagcaatttataattgagaactacactgctccccgcattgttctagctgcatcaggtgttgaccatgaagaattggtatctattgctgggccccttctgtctgacattccca

SEQ ID NO: 455290 - DNA, 300 bp, Sorghum bicolor
cgtccgcttgaagcttgtgaacgtggagaggtcgctcgccgagaagcactacgctgatctgtcctccaagcccttcttccagggcctcgtggactacatggggtatggccctgtgagggccatggtctgcgagggcaagagcgtcttcacaactggccgcaagatcataggagccacgaaccctctggcttctgagcccggcaccatccgtggtgactatgctgtcgacattggcaggtgagatcccaatcccgtattgtagcatatgggttatattaactggcattcatggctgggatg

SEQ ID NO: 455291 - DNA, 282 bp, Sorghum bicolor
  unsure (1)..(282): unsure at all n locations
cgtccgaccatggttatacctctaagagtcctgcaattgtcaattttcttgagatcatggcagagtttactcctgagcagcaacatgctttctgccagtgtgtgactggtgctcctcggcttccacctgggggtttggctgctctaaatcctaagttgactattgttaggaagcactcatctgcngcanataatacttcaaatccaactggagcgacagagtctgcagatgatgatttgcctagtgtcatgacttgtgccaactatcttaaactaccaccat

SEQ ID NO: 455292 - DNA, 286 bp, Sorghum bicolor
cgtccggcgctggcgtcgaggctggcgcagctgcaggccaaggcgtgcgaggcgacgcggttcgtggcgcggcacgggtgcgagtaccagcggtccctcgtggagaagaacaagaagtacgtcgtggagccgcccaccatcgagaagtgccaggagctctcaaatcagctcttctacacccgcctcgccagccttcctggtcgctatgaagcattctggaaagagcttgatcaagtgaagcagctgtggaagaacaggaacgatcttgaagtcgagcacgccggtg

SEQ ID NO: 455293 - DNA, 287 bp, Sorghum bicolor
  unsure (1)..(287): unsure at all n locations
cgtccgcccacgcgtccgtccaggaggttgaccgcgtcatcgactacgccgaccgcaatgacaagcgcctcatcccgcttctaaggggtgctaaggaaaactttgagctggctttggagattgataatgataatacacatgcgaggtattgggctggcanaatgcatttcaagtatcatgttcctggagctngtaaggcagttggtgctgctttgttggtgaagctgcaaatatgggtgatccagatgcacagtatgaactggatgtcgactaaaaattgagatgac

SEQ ID NO: 455294 - DNA, 320 bp, Sorghum bicolor
gcgtcacgcgagaccgaacacgaagaagaagaacgccagtacgcgtccgagatgtacgccgtcatctacaagaactggaacttcaccgagcaggctctccctgacgacctaatcaagaggggcatggcggttgccgatgcatcgagcccgtacaaggtgaagctgctggtggaggactacccatacgcgtcggacgggctggcaatctggcacgcgatcgagcagtgggtgacggagtacctgggcatctactacctcaacgaccgcgtgctgcaggccggacgtggagctgcatgcatggtggaaggaggttccccgag

SEQ ID NO: 455295 - DNA, 338 bp, Sorghum bicolor
  unsure (1)..(338): unsure at all n locations
cgtccgcccacgcgtccgctcaagtcgctgcgcctcaggatcgggctggtgcagcaggagcccgtgctgttcgccaccagcatcctggagaacatcgcgtacggcagggacggcgcgacggaggaggaggtggtggaggcggccaaggtggccaacgtgcacggcttcgtgagcgcgctcccggacgggtaccggacgcccgtgggcgagcgcggngtgcagctgtccggcgggcagaagcagcgcatcgcgatcgcgcgcgcggtgctcaagggaccccgccgtgctgcttgctggacgaggcgaccagcgcgctggacgccgagtccgagtgcgtg

SEQ ID NO: 455296 - DNA, 407 bp, Sorghum bicolor
cgtccgatgggtggtcagataaactttgtcagccgaccacaagttgggagtacattcacatttactgcagttctccaaagatgtgacagaagcgctattggtgacagtaagcctgttatgttgcaccctcttccatccagtttcaaaggtttatctgcactattggttgatacaagaccagtaagagctactgtaactaagtatcacttgcaaaggctgggaattgcctgcgatgttgttgctaccattgatttggctcttggtgtgctgtcagggcgaaatggcagttccctaaccagcacgaagcaaccatgcatgttattgattgagagtgattcatggggcttcaagattgatgtttctttaagatctagactcctggagatgaagcaagatggtcacacaaa

SEQ ID NO: 455297 - DNA, 379 bp, Sorghum bicolor
cgtccgcggacgcgtggggactgtacctttgcttgctcaaagactgccattttcctcaggttatagagatgtaccatccgctggctttgagaatgttcttacttggcacacactacaggtccccaattaactacacaatagaacaactcaatgttgcatcagacagattgtactacacatatcagaccttgcgtgattgtgaagagagttgtcagcagcaaggaagcaacactggaaattcattgcctcctaataccttaaattacatccaaaaacttcatgatgaatttgagacctcaatgtcagatgatcttcacacttcagtggcattggctgctatttctgagccattgaaagttatgaatgatctgttgcacac

SEQ ID NO: 455298 - DNA, 406 bp, Sorghum bicolor
cgtccggaatgcatctgcaaagggaattcaaatggaggaaccttttgatgtgtttgaagagagcccctctatgaggcgtgcacccgtgtcgagaagagtggatgatatgtttgggcagataaaatcaaaacttcctggagctcctaggttcctcatgtgccttctccctgagaggaaaaattgcgaagtctatggtccttggaagagaaagtgcctggccgagtttggtattgtcacacagtgtctagctccaacaagagtcaatgatccgtacctgcttaatttgctgatgaagattaatgcaaagcttggtggtctgaattcgttgctgcaagttgaagcatctccatcaataccccatgtgtcggaagtacccaccatcatctttggttatgatgtgtctcat

SEQ ID NO: 455299 - DNA, 374 bp, Sorghum bicolor
cgtccggatgaatggagacattgatcttgaggaccgagcagaggagttgttggtgtcgcttgatccatccaaggcaaaccccaagaagctcccaaccccacctccaaagaggcgcctgggaattaacatgcttgatgggaggaacaagctagtagagtacaggctgccaccaaagattgaaaagaaggtggtcaatgaacagaggtacgtcccagacacaagatatgtgctccatgacattgatcaggaggccaaggaacaggcattgctgtaccacagtgagaggctggcaatcgcttatggtctgattagcaccccagcaaggactccacttcgcatcattaaaaacctgaggatatgtggggactggcaca

SEQ ID NO: 455300 - DNA, 365 bp, Sorghum bicolor
cgtccgccgcgtcccgccgccgccgcaaaagacgaggaagaggttcccggcgccgaccaccatgtcgtcgatgatgaacgcgctggcgaactggctggtgaacccgcgccgcaacccgctcgcgcgcctccacatgcacgccgtctcctcgcgcctcaggaaatacgggctcaggtacgacgacctgtacgacccctacttcgacgtggaaatcaaggaggcgctcgggaggctgcctagggaggtgatcgacgcccgcatccagcgcctcaagcgcgccatggacctctccatgaagcaccagtacctccccgagcacgtccaggcacagcaggttccattcagaggatatttgagtgacatgt

SEQ ID NO: 455301 - DNA, 342 bp, Sorghum bicolor
cgtccgatttgaaacctgctgtggccggcttccttatgcagaaggaacttgactatcttgttggcgctgttgccaacccaaagaagccattcgctgcaattgttggtggatcaaaggtgtccacaaaaataggggtgattgagtctctattggctaaggttgacatcctaatccttggtggtggtatgatattcacattttataaggcccagggatatgctgtaggcaaatctcttgttgaggaagacaagcttgaactggcaacttcacttattgagaaagccaagtcaaagggggtctcactcctgcttcccactgatgttgtagtggctgacaaatttg

SEQ ID NO: 455302 - DNA, 453 bp, Sorghum bicolor
cgtccggcacaactcactaacctgggaattgtttcttggatgtcaagctgtgttgccaagctgcttcagtcattctcgttgagttggccagtggcattttgtattcttgagggctcctactttctgatccactacctatttgcaagccaaactggacatgttggagccttatactctgcgtttctggctatgcatatagcggccggtgttcctcgtgcactgtcagcacttgctttggcatttaacacaaatctgttcggtgcaatcactcattatagtagtgggcaggctgcagtatactttggagccgggtatattgagcttccagatgttttcaggctgggttttataacagccttgattaacacgttcatcttggggagtgttggaaccatttggtggaaatttttggggctgtactgacagtggctgacacttagttgaccaaaattt

SEQ ID NO: 455303 - DNA, 342 bp, Sorghum bicolor
  unsure (1)..(342): unsure at all n locations
cgtccgcccgcagcaccgccgccccggacaagggacaaccatggcgtcgtcgaagctgcagctgccggctgacgacagcgtcctcctgctcgtcacccactccaatctctccaccttcgcagccgacatccgcgtctcgcaacagaccaccgtcgaggcgctcaaggacaagctctggcgcaagaccggcaccgccgtcgcctccatgcgtctccagctccgcgacgacaccggcgccaagatcgccgacctcgatgacgacgccgcgccgntcgcgggctacgccccctacaacggctaccggatccatgttggtgatctcgatccttcctcactcacctc

SEQ ID NO: 455304 - DNA, 365 bp, Sorghum bicolor
  unsure (1)..(365): unsure at all n locations
cgtccggaggctctcctacagctccatggctccaatcattctcaaccttatccaatggatggattgcagctgctccttgtcatacacgctccctagttaccttggactgcttgaggttcttgtctacaaggtttatgttgatgaagatgcctctatatccaccatagaaaggagagcaagcctgaaggagttctatgctatcatataccctttcttgcaacaacttgagggtaacttgatggataaggactgcaaggacaaaggatggtgtaaggagtctgcagcgggcggnggtcggaagcttgttgccgatgatgaccaggaggatgagtgtggcatttgcttggagacctgcaccaaagatg

SEQ ID NO: 455305 - DNA, 385 bp, Sorghum bicolor
cgtccgatccaaagatgttagtgctcgtgagatggcccttggtgcaagggagtcttcaaggcgtttgcagaatttgtcatctgatgagcgcaagaaaatattgttggacgttgcagatgccttggaagagaatgtggatttaattagaactgagaatgaaatagatgtatctgcagcacaagaggcaggatatgaaccatctttggttgcgagattgactttgaagccaggaaagatagcaagccttgcgaaatccattcgcactcttgcatatatggaagacccaatcaatcagataattaaaagaacagagggtgctgaagatctggttctcgaaaaaaacatcttgtcctctaggtgtgcttattgatcgtttttgagtcca

SEQ ID NO: 455306 - DNA, 407 bp, Sorghum bicolor
cgtccgctgaaggaagctaatatgtctcaaatatctggtctacctggtattggagatgttactgagagagattcactgcagcctccaagtggagattcattaggtcctgttcgaaatgctgctcaagctgctgcgcagatataccaagttttcagggtgcaatccttccagagaaagcaagcagctcaatatgaggatgataaaggtggaatgtctgatgagcgtgccctctcacttctttctgtcaagccacccaagtcagggcagcttgatcctctgcattctgctgcaactcgcatacagaataagttcagaggatggaaggggagaaaggaatttcttcttattaggcagcggattgtgaagatccaagctcatgtgcgaggtcaccaagtgaggaagcatta

SEQ ID NO: 455307 - DNA, 432 bp, Sorghum bicolor
cgtccgcccacgcgtccgtgatgttgctgatctttctgaggatgctcctgatgacattgagggcatggatgcctcagcagcacatgttgcgaatttgttgtcgactgaacctgctgacatcaaacttggtgttggtggctttagtatgggtgctgctactgctctgtactctgcaacatgctttgctcatggaaaatatgggaatgggaatccataccctgtgaacctaagtcttgccgttggacttagtggctggcttccatgtgccaggaccttgaagaacagaattgaagcctcaccagaggctgcacaaaaggcttcatcaatacctcttttgctctgtcatggaaaagctgatgatgtagttctctacaagcacggggagagatctgctgatgccttgaaggcaaatggctttttcaatgtgctatt

SEQ ID NO: 455308 - DNA, 436 bp, Sorghum bicolor
  unsure (1)..(436): unsure at all n locations
cgtccgcaccaggttgttcacatactggactagtgatgcataccaggccacagggtgctacaacatgttgtgctccggtttcattcagataaacagcgagatcgccatgggggctagcattttccccatctcgaactacgcaggctcccaatatgatatcagcatcctgatctggaaggaccccaaggaaggcaactggtggatgcagtttggcaaggaatacgtcctgggctactggccatccttcctcttctcctacctcgccgacagcgcatcaatgatcgaatggggcggggaggggtgaactcggagcccgacggcacgcacacgtcgacgcagatgggcagtgggcacttccccgaggaagggttcggcaaggcgagctacttcaagaacattcangtggtggacagcagcaaccagctcagcaccccca

SEQ ID NO: 455309 - DNA, 428 bp, Sorghum bicolor
cgtccgcccacgcgtccgcccacgcgtccgcccaaatccccaatccccaaaccctaggcgagcttcgtcgcggcggcgatggcggcggcgggcctgcggaaggggaacgcgcgcctccctccggaggtgaaccgggtgctgtacgtgcggaacctgccgttcaacatctcgagcgaggagatgtacgacatcttcggcaagtacggcgcgatccggcagatccggctgggcaacgccaaggacacgcgaggcaccgcctacgttgtctacgaggacatctacgacgccaagaacgccgtcgaccacctctccggcttcaacgtcgccaaccgctacctcatcgtgctctactaccagccagcgaagatgtccaagaagtcggatgtcaagaagaaagaggacgagatcaccaggcttcaggagaagta

SEQ ID NO: 455310 - DNA, 348 bp, Sorghum bicolor
cgtccgggaacaagtagcagtttgcagttagctccgccggtagaaccgaagatgatcggaaagataatcggagacatcacgggcagcaacaagcatgcgcagctcaagggcaacgtggtgctcgtgcgcaagaccgtgctcggcttggacgtcaccagcatcgccggctccctcctcgacggcgttggcgagttcctcggacgcggcgtcacctgccagcttatcagctccaccgtcgtcgaccccaacaatggcaaccgcgggaaggtgggcgcggaggcgagcctggagaagtggctgctgaacccgccgccgcttctgtccggcgagaacaagttccacgtcacc

SEQ ID NO: 455311 - DNA, 433 bp, Sorghum bicolor
cgtccgcaaagttaaagagtttgttcatccctactaccaggaagccaagatgttttctaagccttacattgatcaaattgctgagatcactaagccacatgttgagaaagttagaactactctgaagccatacactaagagagcagttcatgcatatgggtcatttcttgagtcggcaaccacataccatagacaggctcaagcaagcatcatggactaccttcaccagcatgacataacaaaatcatttgcaacgaaggagttagtttggtttctggcttctgctttgctagctctgcctgtcttcattatatacaggcttctagttgagacattctgcaccaaaaagaataaaagggcctcgtggtggtaacggtaaccatggccacaagagacagaagcggcgacacgcttacaagtagatcaatttact

SEQ ID NO: 455312 - DNA, 421 bp, Sorghum bicolor
  unsure (1)..(421): unsure at all n locations
cgtccgcggatgggttccaaactgtgacacacttcatgctctgatccgtgaatacagagatgccaggaagattttcttgaatcaggagcacaaacttatgttggcttttgcacccgattatgatcacttacccctcattgcaaaggtggaagtgtttcagcatgctttgcaaaacaccgagggaaatgaccttgcaaaggttctgtggcttaagagtcgaacttcggaagtctggcttgagcgccgcacaaactacgctagaagcctggctgttatgagcatggttgggtatttgcttggtttaggagatcgtcacccaagtaatcttatgttagatcgctatagtggaaaaatattacacattgactntggagattgctttgaggcttcaatgaatcgagaaaagttccctgaaaaagta

SEQ ID NO: 455313 - DNA, 409 bp, Sorghum bicolor
cgtccgcaggctccaaatgccatggaaaatgctcctcagcctgctcccgccaagcctcttcacgatccgtttggcgtccgggacatcggtctgcgcaagcttctcgagattcctgacgtgctccgacgacatgatcttcctccggccggagctgctgtccgtgagatgcatcaccgtcgacagcaggaaccgcttcgccggcgtgggcttctcctcgtcggggcccagcagctgcagcacccgcgccacgtcgcggtcctcctggacgaaccgcttccggttgcggtgcacggacaccagggcgcagagcgactcggccgccatctcccgcgcctcgtgggacttggacgcgccgaggatgctcaccagctccggcatgaaacccggcgtcgccatcggcttcttggtc

SEQ ID NO: 455314 - DNA, 370 bp, Sorghum bicolor
cgtccgcgagcgcgcacgcttgtttctctctccggcttccgtgacctcgcgcaagagtacctgccgaccatcgccgtggtgtgcgcccacttgaagagccttgacttaagctacaccgcggtcaccccgaatcagattctcatgttcattggccaatgctacaaccttgagacactatgggtacttgactcggtgcgtgacgaagggctcgagtccgtgggaatgtcttgcaagaagctccaatctcttcgtgtgctcccgttgaatgcacgtgaggatgccgacgagttggtatcagaggttggccttactgccatctcacggggctgccctgctctccgttcgatattatatttttgccagacgatga

SEQ ID NO: 455315 - DNA, 476 bp, Sorghum bicolor
cgtccgcccacgcgtccgatcgcaaaattagcaaaagatactgatgatgagctaaatcagatcaataggaagctggaggaactccggaaaatggtggttcacagatgcaggaaaatgaccacagatgagaagaggaagctgggtgcagggatctgccacttgtctccagatgatcttaacaaggcgctagaaattgttgcacaagacaatcctagcttccaaactaaagcagaagaagtggatcttgatatggatgcccagagtgagacaaccctatggaggctgaaattctttgtgagggaagcactggaacgacaggccaacgttgcctctgggaagatggacgaaaacgccaaaagaaagagggagatatgcaatgctctggccaaaacagcatcgaaacggatcaagaagcaaccctagccatctttcagatctttgactcgcgtccttctgtgattggttagaagtttttt

SEQ ID NO: 455316 - DNA, 395 bp, Sorghum bicolor
cgtccgcgacatggcctccctcatgctcgcctccgccgacctgctcctcacctccccgtcacgcgtcgcggacaaagatctggagtgcgttctctccgtcatctgcagcctcgtcaccaaggccggatccgaggacgaggcactacagatcaccaacctcatctgcagcaagctcatccagcagcctggcgacaagccagcgttgcgcctcaaagttcttttcagcttgtacaatcttcttctgagcccctatggcaaggcatttgtttacaagaaggctcttgagctcgccacggctggaaaagctgccgagtacatcattccatctttcaagaacatcgacagctttgtcagtgagtggggtattggcaatttggagcaaagggagctatacc

SEQ ID NO: 455317 - DNA, 363 bp, Sorghum bicolor
cgtccgcggacgcgtggggttgcacgtggcattgcaaattttgcaaaatgtgaatctagagcagctactcaaggaaataaggtgggaaaatcactattaatcgatgacggatcacttccttggattgtaaaaaatgctaataacgaagctgccccaattaggcggcacattgagcttgcactgtgtcatttggcacaacatgaagtaaatgcaaaagatattatcaatgaaggtgccctatgggaacttgttcggatttcaagggactgttctcgagaagatataaggaaattggcatatcggacagtgacgtccagccccactcttcaagcagagataaggagattaggaataaaaatgtga

SEQ ID NO: 455318 - DNA, 349 bp, Sorghum bicolor
  unsure (1)..(349): unsure at all n locations
cgtccgaaaaaaaagagaggaaaccgaggcgacaagcaagcaatgggtgtcaagggattcgtcgagggcggcatcgcctccatcgtggccggctgctccacccacccgctggacctcatcaaggtccgcatgcagctgcagggtgaagccgccgcggcgccgcagccagcgctgcgcccggcgctcgccttccacgccggtggccacgccgtcacgctcccgcaccacgacatcccggtgccgccgccgaggaagcccgggccgctgaccgggggcgcgcagatcctgcggtcggagggcgcgcggggcctcttcttcggtgtctncgccaccatgctgcgccagacgc

SEQ ID NO: 455319 - DNA, 392 bp, Sorghum bicolor
cgtccgcccacgcgtccggtgatgggcgcagccaagactggctctgggaagactcttgcattccttataccagctattgagctgctctatcacctgcgtttctcatcgaggaatgggactggtgttattgtggtttgcccgacacgggagcttgctatccagacacacaatgttgccaaggagttaatgaaatatcactcgcaaactcttggatatgttattggtggtaataatcgaagaagtgaggctgatcagcttgcaaagggggtcaatttattagttgctaccccaggcaggcttttggaccatctacaaaataccaagagtttcatatacaaaaagctaaagtgccttgtaattgatgaagccgaccgcatacttgagcaaaattt

SEQ ID NO: 455320 - DNA, 308 bp, Sorghum bicolor
cgtccggtgggcgggcccaagatccgggtggccaaggccagggaggcgttcgccggcgtcgcggacgccagcgggtaccctttcgccgtgatgccgtccgccaagggccttgtgccggagcaccacccgcggttcatcggcacctactggggcgccgtgagcaccacgttctgcgccgagatcgtggagtccgccgacgcgtacctcttcgccggccccatcttcaacgactacagctccgtcggctactccctgctgctcaagcgggagaaggccatcatcgtgcagcccgaaccgcgtggtggtcg

SEQ ID NO: 455321 - DNA, 395 bp, Sorghum bicolor
cgtaccgcttaggtttgcagagacatgatagtgtctagagatcgccgagatcatgttacaggtgatatttgaccgatcggacgctgcgcgtatgagcgggatgtctgacaaggcctacatcagatcattcaacgcgctccaaaatggtcttggtgtcaagacgactttagatgtgcgtgaattgggcatccagtttggttgtgtcatgctgataccttttgctcagaagggtttgtcactctataaggagcgctttcttgctgaattgccaccttaacgccgggcaagcactgactttggtcgagcagagtttactgcagcagcattctacttatgtgcgaagaggcacaagctcaaggttgacaaactaaagctgatagatctatgtggcacat

SEQ ID NO: 455322 - DNA, 327 bp, Sorghum bicolor
  unsure (1)..(327): unsure at all n locations
cgtccgggcagagatctaaagtgatacatataagattatgcctggacacgatatggacacaagggccacagaagaactgacaacagagacacactggcaggtggtaccttcgatgtctcacttctcaccattgaggaaggcatctttgaggtcaaggccacagctggtgacacccatctgggtggtgaggactttgacaacaggatggtgaaccacttcgtccaggagttcaagaggaagaacaagaaggacatcactggcaacccgagggctctcaagaggctgaggactgctngtgagagggcgaagaggactctatctttcact

SEQ ID NO: 455323 - DNA, 425 bp, Sorghum bicolor
cgtccgctgccctccagccaccgccgccgcttcgctcttctcacggccacgccgtccatcgaggcgaggtaaggtcagcatggtgagggtcagtgtgctcaatgatgcactcaagtccatgtacaatgctgagaagcgggggaagaggcaagtcatgatcaggccgtcctccccctcccccttgaaatctttgaaggaggtttcgatctcgaaaccgcccagggctcgccccgcaagtgcatggcagtgagcttcctggccaatgaggtgtcggacctgtgcatcggcaagccggccgtgaggtcgctcccgctctccgccgccgccggcgaccttgccgccgcgctccggagggtggcccgctctggcgccgcagcctgcgtcgcggtgaccggaccagcgcgcgccgtcgtcggccgggtcgg

SEQ ID NO: 455324 - DNA, 321 bp, Sorghum bicolor
cgtccgagcgtgaaatatatgatcagcttggaccagaagcatacgagcgtcaagcatcaggtggtgaccctggagggccgggttttcctcagggtaacccatttggtgacatctttggcgatatctttgataatgcctacagaggtggccaagatgtcaaggtttctgttgaactatcattcatggaagctgtccaaggttgcagaaaaaccattacatatgaagctgatactttttgtggaacttgcaatggaagcggtgtcccccctggaactgtgcctaaaacatgtaaaacatgtcgaggctctggtgtgatataca

SEQ ID NO: 455325 - DNA, 221 bp, Sorghum bicolor
cgtccgttcgtctcatcagactaaaaaactttacatcgaaggtgcagccgcaaccgatccactctgctgccgcccgacgagcagcgtgacagttgcctgcagccatgggtaaggagaagactcacataaacattgcggtcattggccatgttgactctggcaagtcgaccccactggtccctgattaaagcttggggattgacagcgggatcaaggtcaga

SEQ ID NO: 455326 - DNA, 186 bp, Sorghum bicolor
cgtccggaacgcgctgacccgctgctccgccgtgatctccaactcgcccttcatcctcaacctggactgcgaccactacatcaacagctcgcaggcgcttcgcgccggcatctgcttcatgctcggccgggacagcgacacgggggcgttcgtgcagttcccgcagcggttcgagggcgtggaccc

SEQ ID NO: 455327 - DNA, 299 bp, Sorghum bicolor
cgtccgcagccagcaacaccactgcaaaaacataaaaaggcggcagggcagggagagagagagcagagcagagctagttggagtagcagtagtgcgtggtggtgattggccggtgaagatgctgctgggcgggatcatcgatgggctgacgggggcgaacaagcatgcgcggctcaagggcacggtggtgctcatgcgcaagaacgtactcgacctcaacgacctcggcgccaccgtcatcgacggcatcagcgagttcctcggcaagggggtcacctgccagctcattagcttcaccc

SEQ ID NO: 455328 - DNA, 345 bp, Sorghum bicolor
tcccggtcgaccacgcgtccgcccacgcgtccgcccacgcgtccgaactgacatctgtgacttcttagagaatccccagatcaatcgagaaatgatggagctgattgagactttgcaacgcaaggctgttgaagaaggcaaggtggcttcagatgatgctgaggaatgtggtgatggtgactcggaggaaaatgatggtgctttggtgaagggagaggaggatgatagcggcttgaatgaggaagagcaagacagtgcagatgctgatgctaatgctgatggttctgtgaagaatgtggtgaaatcaaggaggaggaaaagatgataaaaagtcagagatgggtg

SEQ ID NO: 455329 - DNA, 171 bp, Sorghum bicolor
cgttcgcggacgcgtgggaaaatttccccccaaccaaaaaccctctctcccaaaccctagctaccttcggatcccgatggcgaaccggcgcgtgttattcgacatgacggtcggcggcgcggctgctgagcggatcgtgatggagctgtacgcgaacgaggtgcccaagac

SEQ ID NO: 455330 - DNA, 333 bp, Sorghum bicolor
  unsure (1)..(333): unsure at all n locations
cgtccgggcagtcaatgctcgcagagaaaagagtggtctaccagcattggggccccttgagttttactcagttgtatcgtccaaagtgtgatgccttgaagatggacccaaagttccttgatcgcaatgtgaatgaaggttttagcggcggtgaaaggaagcgtaatgagatattgcaactttcagtcattggagcagatttagcgcttctggatgaaatagattcaggattagatgttgatgcacttgaagatgttgctaatgcagtgaatgggcttttgacaccccaaaactctgctatgatgattacacactaccaacgtctnttggatc

SEQ ID NO: 455331 - DNA, 234 bp, Sorghum bicolor
cgtccgacaataaatagcagtagctgcagcagcggcagcggtagagaatcctttttggaggtaagcttgatgtcgtcgtcgtcgctgtctccggcggggacggtgaggacgtccgggtcgtcggacggcgactcggcgtcggcggcggaccgcaccggcgcgagaagcggggctgtcaaccgcgagtcgggcggggtcgcgtgctgagcacacacctgtacactgtgcagagtg

SEQ ID NO: 455332 - DNA, 359 bp, Sorghum bicolor
  unsure (1)..(359): unsure at all n locations
cgtccgcccacgcgtccgatccacagccgccagcccgcctcctctacctgcagactaccacgcccaaatccacctcaagcgcgagggagaagaccggatccgcgttcgggataggatggcgacgatccagcacaagccggctccgacggcgccgtcgacgacgacgggcggcggcctgcgcgccatggacctgtacgagaagctggagaaagtcggggagggcacgtacgggaaggtgtacaaggcccgggagaaggcgacgggccgcatcgtggcgctcaagaagacgcggctccccgaggacgacgagggcgtgcccncgaccgcgcctgcgggaggtgtcgcttgctgcggatgct

SEQ ID NO: 455333 - DNA, 301 bp, Sorghum bicolor
cgtccggaggaaattaacaagctctccaaggtgaaagcccacctatcggatgtcaaggggatcatgatggacaacattgagaagatattggatcgtggtgagaagattgagcttttggttggtaagacagagaccttacagtcacaggctgacagcttccacaggcatggcagagagttgaggcgaaagatgtggcttcagaacctgaggtttaagctgatggtgggtggcggcatcttggctctgattctcatcctttggctgatggtctgcaggggatttaaatgttagagcacacaaa

SEQ ID NO: 455334 - DNA, 212 bp, Sorghum bicolor
acgcgtgggcaatgtgctgtccattgctctgggagacacactgtacctgtgggatgcgtcgagtggatccacatccgagcttgtgaccatcgatgaggacagcggtcctattaccagtgttagctgggctcctgatggtcggcacatcgccgtggggctcaactcgtccgacgtcagctttgggacaccagctccaccgctgtggacactaa

SEQ ID NO: 455335 - DNA, 282 bp, Sorghum bicolor
cgtccgaacaaagtatgaccttgtgtacatgatcaacaaagaagtcggggacgctgcaccttcctcgctcgcggacattaaaaagtttgctagtgccgtttccgttgatactagctctgtcttccctgaaacccactacttcacagtgtatgaaaccaatcttgtccagacactgcagtcggcaggcctctcggtctacgtttatactcttatgaacgagtttccgtctcagccatacgacttcttctcagatgctacagcgcagattaatgcctatgtcaa

SEQ ID NO: 455336 - DNA, 167 bp, Sorghum bicolor
cgtccgcggacgcgtgggcggacgcgtgggcggacgcgtgggcgcgcctctgaaagttccgagccgccgaccagtcctgccttcctgtgcgggtgcggtgcccaaggccaatagttttgaagtggtaatggccgaccaagctaaccaacccactgtccttcataagc

SEQ ID NO: 455337 - DNA, 427 bp, Sorghum bicolor
  unsure (1)..(427): unsure at all n locations
cgtccggngccaccgaacgtgccgagggagcatgaccatggcatggacaagagaactcctgatgatgctggccatgatcaaaaagttggagccaaggagggtgtgctgccgaagcatgcacagtcagaggcggacaacaagcgtgctaaacagcaatatgctcagaggtcccgtgttcggaagctgcagtatattgcagagcttgagggtagagtccaggcattacagtcagaaggggtagaagtgtctgctgaaatggagttccttacccagcagaatattatgctcgacctggaaaacaaagccttgaagcaaagactggagagtctagcacaggaacaacttattaaacgctttcaacaggagatgtttgagcgggaaaatggtcgtctcaggtctctatatcagcaacagcagcagcagcagc

SEQ ID NO: 455338 - DNA, 318 bp, Sorghum bicolor
cgtccgcccacgcgtccgcccacgcgtccgcggacgcgtgggtttttttttttttgtttgagagagaagaatcttttaaacctagttaatttatgattagataatatttatcaaatataaatgaaaatgctacagtatcaaaaaaattaccaaggcctaacttccgagtatgccgcacataggatgtaataataacttcaccaacgtccacgtgcagtcaacgcgatggaatcacaagagggtaaccagagttgacgatggtttaaacagacagaatgaagctagtctagtcgttcacgagtttagtacaagactaca

SEQ ID NO: 455339 - DNA, 391 bp, Sorghum bicolor
  unsure (1)..(391): unsure at all n locations
cgtccggagatccccaaaccctacctacactcgcccgcccgccggcgcactcggggatcgtcgaatcgagcaggttgacggaggaggaagaaggggagcgtcgaggatgttccgcaaccagtacgacaccgacgtgaccacatggagcccccaggggcggctgttccaggtggagtacgccatggaggccgtcaagcagggctccgcctgcgtcgggctctgctcccgcacccacgccgtcctcgccgccgtcaacaagcccgcctccgagctctcctcctaccagcggaaggtgttccgcgtcgcttgagcacgccnggtcgcgctcgccggactcaccgncgacgggcgcgtcctctcgcgattccttcgcaacgagtgcatcaaccac

SEQ ID NO: 455340 - DNA, 514 bp, Sorghum bicolor
  unsure (1)..(514): unsure at all n locations
acgcgtccggcacccaacaaaccctacctgccgccgcccgcgcgcagctcccgccttcgtccgcgccggcgccgctccatcgccctaaacccccgcttgtaattccaccgggaactagctgaaaggagagggagcagaggggcatggcgtcctcggatgacgagacgagccggctctaccgcatccgtcgcacggtgcatgagatgctgcgcgaccgcggatacgcggtcagcgaggaagaaatcaatctcccaagggacaggttcatcgaccgcttcggcaaccccgtccgccgcgacgacctcgccagcagcgccatgaagttggacggctcctccgagcagatctacgtgttcttncccaatgaggccaagcccggggtgaagacgatcaggaactacgtcgagaagatgaagcatgagaacgtcttcgncggcatactcgtcgtgcagcaggcgctcagcgcgttcgcacgcagcgccgttcaggaggtctcccagaagtaccacctcga

SEQ ID NO: 455341 - DNA, 358 bp, Sorghum bicolor
cgtccgcggacgcgtgggcaaaggcagaaaatatgatagcccataaggatgagatatactcacggccaaagagaacctggtttgctactgaacgggaaaagaagcttttggcagcagctgctaaagaatctttggatcaaggtaagagtacctctggagttattagtgctaagcaggctgaagacctccgtctgaaggagaaaaagagacgagagcatgagaaaaatctaccaaggaagaaacgccgaagattagaggcccagcgagagatgttggaagatgaggatgaagatgacgaggaagcaaaggaaaatgatagagggaagaaaccaaagaaaggccaatctctagtggatgc

SEQ ID NO: 455342 - DNA, 165 bp, Sorghum bicolor
  unsure (1)..(165): unsure at all n locations
ctctgggctgtccctcaccgctgtacaagctgcccggaaacgatggtgtaccctgagctgngttcgagcaccacacaggcaggcnacacaagctacncacagatgttcacagatgtgggcgtgtactacgcccctggtgcagtcctaaggggagaggagttcaac

SEQ ID NO: 455343 - DNA, 403 bp, Sorghum bicolor
cgtccgaaaggatctaacaagagtctgccttcctgtttactttaatgagcctttatcttctctccagaagtgctttgaagagttggagtactcttatttgttggaccgtgcatatgaatgtggtttaagggggaatggtctgatgagaattctttatgttgctgcatttgcggtatctggatatgcgtccacagattctcgcccatgcaaaccttttaatccattgcttggggaaacttacgaagctgattaccctgaaaaggggatccgtttcttctctgagaaggtcagtcatcatcctatggtcgtggcatgtcactgtgaggggaaaggatggaaattttgggagacagcaatctaaagagcaaattctggggacaatccattcaactggatcctaatg

SEQ ID NO: 455344 - DNA, 347 bp, Sorghum bicolor
cgtccggccacagccgccgccgccgcgcctcgcttgctttcccgtcgccaagatgactaagcgcaccaagaaggccggaattgttggcaaatatggaaccaggtatggtgctagcttgcgtaagcagatcaagaagatggaggtatctcagcattccaagtacttttgcgagttctgtgggaagtttgctgtgaagaggaaagcagttggaatttggggatgcaaggactgtgggaaggtcaaggctggcggtgcttacaccatgaacactgctagtgcagtcactgtcaggagcacaatccgtcgcttgagggagcagactgaagcatgatttagcttggtatatc

SEQ ID NO: 455345 - DNA, 329 bp, Sorghum bicolor
cgtccgcccacgcgtccgccgcaacttcacaacacagatcatcgtcttccaatcgagcaaaccctccttcggtttagagaatccgagcggcggcatcgatggcgcccaaggcagagaagaagccggcgtcgaagaagcccgcggaggaggagccctcggagaaggcggctccggcggagaaggcccccgcggggaagaagcccaaggcggagaagcggctcccggcgggcaagtcgtccgccggcaaggagggcggcgagaagaaggggaggaagaaggcaagaagagcgtggagacctacaagatctacatcttcaaggtcctgaagc

SEQ ID NO: 455346 - DNA, 247 bp, Sorghum bicolor
  unsure (1)..(247): unsure at all n locations
cgtccgtttgaggaattacctgttcaggtggagctgcagcgcaatttgccgccaccagttgacggtggagtgccacgcatcgtgagctntgccgccaagtactgcaatcagcttcttgatcagccgtatcgatctgtgctgacacaggtgatcaccatccaccgcagctggcgcaaagaagtgttcaacgacaagatgctggttgaggcaatgcttagtatcattaagacgctagagataaactttg

SEQ ID NO: 455347 - DNA, 433 bp, Sorghum bicolor
cgtccgcccacgcgtccggcgacgcaacccccagtgaagtccgcctttgtgaaatccaataacaaggaacaatgatgatgacgaaatatgctgtgtttccgtggacaatgctgttaagttggccaaggttttcctttctttttttcccccgcgtgttctatgtgtatattgccaaaggcatgcgtgagcaatgcgcccggtgccgtgctggggcgcagagacgatctgaatatctgatggtggaaacaccggaaataaaaagcgtgccgccgtgtgcttcctttgaaggaatgaaagatgttcgtgttatgaattgtttattgttgtatgtacgtcgtctgctggctgctgctgcttgtggggagtctgtaaatgcgtctgatatggtttatgcagactttcagaatcataatgtatattggtcacgcgagcc

SEQ ID NO: 455348 - DNA, 201 bp, Sorghum bicolor
tccgattcccggtcgaccacgcgttcggtggccgggccggccttatattcttcgtcgtgctttggccttcctcaccgcaccgggctcgtcgttgttggccattaagatacagtgcgacacgtgcgagggcgcggcggccacagtggtgtgctttgcccaccaggccgcgctgtgcgcgcgcttcgacatttagattcacac

SEQ ID NO: 455349 - DNA, 345 bp, Sorghum bicolor
cgtccgaaagaaaatggtggcatgctcggatgggttcgaaagggacagatggtaccagaatttgaggaggcagcatttagtgctcctttgaacaaagttgtacgatgtaagacaaaatttggatggcatctattgcaagttcttgctgagagggatcaatgcgtactgcaagacattgacccagaagagcttcacacaaaaatgcaagaccctagttttcttgaagaagctcaattgattgatgttcgggagcctgatgaagtggagaaagcttcacttccaggcttcaaagttctaccactccgccagtttgggacctggggacctttatgacagacgagttta

SEQ ID NO: 455350 - DNA, 190 bp, Sorghum bicolor
cgtccgcatccaattgcgtttggacccagctagcagtagcactctttccgccagggggaatgggtcaatcacacaaaggcttaatgttacccacaaccagcattggccgaaaccactttcaatgcgtattccgatgtcttataaaaagaattgtgaggaccagcttgagcaaaggcgaataaacaatttt

SEQ ID NO: 455351 - DNA, 382 bp, Sorghum bicolor
  unsure (1)..(382): unsure at all n locations
cgtccgggcaagcaaaaggattcagaaggaactcatggatctgcagaaggacccaccgacatcatgcagtgcagggcctgctggagaggatctattccactggcaggccacaatcatgggccctagcgacagcccctatgcaggaggggttttctttgttaatatccattttcctnctgactacccccttagcctgcaaagtgacttncaaacaaaagttatcacccaacataactctaatggagcattgcctgatatcctaagagcatggacctgcctgacatataaagtctcttcatantcgtctactcccaaccgcaccctgtctgatccccatgacaacaagcggttagactgcgccgccaatccaggtgttgtacac

SEQ ID NO: 455352 - DNA, 501 bp, Sorghum bicolor
cgtccgcggacgcgtgggcgccaccaccgcccccgcgcactgcgacgaccgctgcggcagaagagttagcagatggcgccgctcgtgccgatgtcgcagccatgggtggagaaataccggccgaggcaggtcaaggatgtggctcaccaggaggaggtgattcgggtgctcaccaatacccttcagaccgccgacctgccgcacatgctgttctacggcccgccgggaacaggaaagaccaccaccgcactcgccatcgcctaccagctctacggtccagagctgtataagtcaagagttttggagctcaatgctagtgatgatcgtggaattaatgttgtgaggacgaaaatcaaggactttgctgctgtttgccgtggtactgcaccgaaaagctggtatccctgtccaccttacaaagatattatacttgatgaagcagattcaatgacagaagatgcccagaatgctttgaggcgtaccatggagacttacttcaaa

SEQ ID NO: 455353 - DNA, 471 bp, Sorghum bicolor
  unsure (1)..(471): unsure at all n locations
cgtccgcacttacctctgtttaatctaccacccaagatcctctgcaaggtggtcaatgtagaacttagagctgaaactgattccgatgaagtttatgctcagattatgctacaacccgaagcagagcaaaatgagcccaccagcccagatgctgagccacccgagcctgaaagatgcaacgtccattccttctgcaagaccttgactgcttcagatacaagtacccatggtggattctctgtcctcaggaggcatgctgaagaatgtctgccccaactggacatgactcagaatccaccatggcaagaactggtggctaaagatctccatggaaatgaatggcatttccgtcacatctttcgagggcaaccaaggaggcatctacttacgacaggctggagtgtttntgttagctcgaaaagattggttgctggtgacgcgtttatctttttgagaggtgagaatggagag

SEQ ID NO: 455354 - DNA, 424 bp, Sorghum bicolor
cgtccgcggacgcgtgggtgcaacctcaaattatctttcctcgatctatcgaataactcattatctggtctgcccgctgaactaggtgaaatgactaccctaagaaagcttttgcttactggaaatcctatgaggacacttaagagttcattggtttctggaccaacgacaacattgctgaagtatctgcgcagtcggctttcgtctgatgaggaagcatcacgatctggaagcaccccgacaaaagatgaccaaattgctgcagcaaggcgattgtccttatcttcaaaggaactggacttgagcggtcttggtgtgaccagtgtaccagctgctgcgtgggagacaagtgatgtggtgaaactggatctttctaaaaattcaatagaagatctaccaaacgagttgtcattatgctcatcac

SEQ ID NO: 455355 - DNA, 251 bp, Sorghum bicolor
  unsure (1)..(251): unsure at all n locations
cgtccgaaagattatatgcaatgatgagctccgattagtttttgagactgatagcacagacatgttccagatgaataagcttctgtctaagcatatacgtcctctggagagtaaaaatgattcaaaacgagaagcaaaaaaattgaagccagagggtggtgaacaaattcctaaagttgaaactgatgttaaccaacttccncttacggtttctgatgctnctngctacctttttgggtacggggagaaag

SEQ ID NO: 455356 - DNA, 378 bp, Sorghum bicolor
cctgtgcgtgctcgtcaaggacaaggacgaccccaacctgcgcatcaagatcaacgccaccctcgcgctcgcgctccccaacgcctgcggcgccacccgcgccaacgtctcccactgcgctcagctgctgcatattcctccgggctccaaagacgccgtcgtcttcagccccggcggcgacaagggctccaccgccgcaccagccaaggacaactcgacggcgacgaccgactcccgcgcgctgcaggcgaccaacggaggcggcgtctactcctcggcggcgaccgccggtgctgcactgacggcggtgctgctcgccggctaccttctcctgctcgtgcctgagctgtcgcctagctcattctagacctctgcaag

SEQ ID NO: 455357 - DNA, 256 bp, Sorghum bicolor
cgtccgaggagcgacagcgctggcggcactgaggaagacgccgtcctgcgcgcgtacgtccggcagtacggaccgcgcgagtggcacctggtgttgtagcgcatgaacctggtcctcgaccgtgacaccaagtcctgcctctagcgctggaagaactatctgcgcccatggatcaagaaagggtcgctgtcctaggatgatctacgcctggggatccccctgtaggcctagcgcggttgcaagcggtagatgatcg

SEQ ID NO: 455358 - DNA, 314 bp, Sorghum bicolor
cgtccgcggacgcgtgggtagttcatgacctagcatggaccacaaatgcaatgttcctgaactcagttgatagatgcaatgaccttgtagcgtctgcatatgtaactgctggtcataccagagtcatgttgctccatgactcacgtagcgaagatggaataatatgctgttgtcaggaggtccatgaactgtacatcaagatattgctcaacccgatttacctgaccggttctcgtatcacatactcttatatcgataccaaggtcacggtcctcgcatggaagtacctgtaatacgggcatggaggatttcac

SEQ ID NO: 455359 - DNA, 294 bp, Sorghum bicolor
  unsure (1)..(294): unsure at all n locations
cgtccggagcgttcagaaagcaccagcccccaaagccccacgagagagacgaatcttccgaatctctcggcggcgatggcgctctccgaccgctgccgcgagtcgctcctcccgagcttcctctacagctcctcggcgcgctccttcgccgncacaggcgccgccgccgcgcgcctncctgtctcggccccggcgcctgccgcggctggagcaggaggccgcgtgccgttctcgatccaagcgcccagcgagaagatcgagatgtactcgccggccttctacgcagcctgcaca

SEQ ID NO: 455360 - DNA, 261 bp, Sorghum bicolor
cgtccggtttgttggcaaagatgatactggaaggaggatggagattattgaaatacccaaccaccgatattttgttggtgcacaattgcatcctgagttcaagtcaagaccttcaaaaccttccgccctatctgtgggactaattgcggctgcatctgggcagttggatagggtgctgcaagactgctgcaatggtcatgttatttcagctaagcatgttctgagcaatggctcatatacacccacagtacaccaaaatgg

SEQ ID NO: 455361 - DNA, 379 bp, Sorghum bicolor
  unsure (1)..(379): unsure at all n locations
cgtccgcaggacgccgaggagcgcgacgtccccgacaggctcatggcgctcgttgggatcggtgattggcgagccatggagcaggatgatgctggggaccacgaggaggactaagatgatggggttcatacacaagtgacattttctatctaattcangccttgtttagatgcgaaaagattttggatattgtttcgctactagtagcactttcgattgtttatggtaaatattgtctaattatgtattaactaggatcaaaagatttgtcttccgatttacaggtctgtgcaattagtttttattttcgtttatatttaatgcttcatgtgtgccgaaagattcaatgtgacagggaatcttgaaaacattgtggttt

SEQ ID NO: 455362 - DNA, 298 bp, Sorghum bicolor
cgtccgattgacttacgtgaggtcgacctatgcatatggctgcgctaccgcatcacacatcctgtgagacaatgcatatgcactgtggctgttatggcgcatatgtgagatcaggtatgctctgtccaggctcatggatcatttcccatagtggtcccgactcgaccgtgtaacttatgatgataggctggctttaacgtctgaccgacaaggtgaaccgtatcaattagctcctgtagacatgtatgtccgtactgcggatgctatgaaggagccttctcttgtcactgcaaatact

SEQ ID NO: 455363 - DNA, 389 bp, Sorghum bicolor
cgtccgcggacgcgtggggaaacattatatattggccaatgatgaatggaaggaggatattcttccagagatactggatggtcacaacgttgccgattttctggatccagatatcctagtaaggtgtgaagagttggaaagagaggaagggcttcgtctggaagaacaagctgcagaagatgctttccagattgatggtcatgaactaactcaggaacagaaggagattttggctcagattaggaagaagaaggcattactcatccaagaacatagaatgaagaagagaactgcagatagccgttctattgtccctagaaagcttgacaaagataggaaattcacaactgataggatgggacgtcagcttttctccatgggtgtggatc

SEQ ID NO: 455364 - DNA, 448 bp, Sorghum bicolor
cgtccgcaaggctcccatggacaccgccgtctccaccctcaccgctctcgccatcttcgcgagcaccgtcgagcacgccgtctacaggagcgtgcacgggtacagggtggtcgggaggaaacgcggcgggtgggttcggtgggagaggtgggtggagacttagattgtgcttaccctgtagataagctcgctgctagagatgttgatcagtcaatgcaattaagcattactggtttggaaacattctgccttagcaataaggtccagtggcctttatctcttgtaatttcaaggaaggctttgacaaaataccaattgatctttcgcctattgttccactgcaagcatgttagtcgtcagctgtgtgcagcatggcaaatacaacaagtatgtcgggctgttaagattctagggacaccaattttacggtcattaattctttgttgta

SEQ ID NO: 455365 - DNA, 315 bp, Sorghum bicolor
cgtccggaggcgctttatgacattcgcttccgaactctgaagcttacaacacctagctttggagacttgaatcacttgatcagtgcaacaatgagcggagtcacttgctgcctgcgcttcccaggacagctgaactctgacctgcgcaagcttgcagtcaacctgatcccattccctcgcctgcacttcttcatggttggctttgcgccactcacctcgcgtggctcgcagcagtaccgtgctctcaccgtccctgagctaacccagcagatgtgggatgccaagaacatgatgtgcgccgctgacccgcgccat

SEQ ID NO: 455366 - DNA, 391 bp, Sorghum bicolor
cgtccgcccacgcgtccggaatgatgcactatcaagtttcttcaaaatcttgactacatcacctgatgaaaacggcaaggtctatgtctcaactgtacaagcctataattatccaatcacttccacgcaatggcatcctgaggtattttagttgttgttctgggagttccatgctaatatattattattggctctgcctttgttttttcttgtgcactgcattttttctaaaattaatattcacaaaatatcaaattgtggccactcaccagataccaagggctctatacaaatataaaattggcctcacttaatgcaaaaagccatttttgagtggaggaaaccaatgattccacacagcgtagatgcagtacaggttactcaacatttt

SEQ ID NO: 455367 - DNA, 210 bp, Sorghum bicolor
cgtccggacaaaatttccagtaccccacaacgttatgatatttttcagtgctcacggagtttctctggcatatgttgtagaagctggtgatccatataaagcacaaatggtagagtgtgtcgatcttatcatggaagactggaatgagaggaatacacatcggccactgctataagtggtgaccatttggtgaccgtcacgtaacatatg

SEQ ID NO: 455368 - DNA, 393 bp, Sorghum bicolor
cgtccgcggacgcgtgggcggacgcgtgggtaacatccccgagttcggtcagattagcgatttcggtaaatgggaggataaatccattggaagagactgatgtaaccgttgacttccttgcccctgcaaggcctggtaggtacatatcttactggagattggcactaccctcaggtcagagatttggtcagcgaatttgggttcatattaaggtggagcagcctattcaatctactggtggcaaacaggctgctgcgatgaacctgaatcagctcccagaagccaacagcagaaaactgaagcctttcacagttgatcttgaaacaaatagtgttttcctcagaacctttctatggatgccatggaatcccagaagctaacagcacaaaactg

SEQ ID NO: 455369 - DNA, 316 bp, Sorghum bicolor
cgtccgcccacgcgtccgaaagaaatgttcagatccctggatacagataacagtgggacaattactcttgaagagctaagatctggtttaccagagcttggtacaaaaatttctgaatcggaaatcaaacagttgatggaggcggctgatgttgatggaaatggtaccattgattatggggagtttatatctgccacaatgcacttgaatagattggagaaggaagaccacatactcaaagcttttgaatattttgataaggaccacagcggatacataacagtagatgagttggaagagctctgaagaagtatga

SEQ ID NO: 455370 - DNA, 400 bp, Sorghum bicolor
  unsure (1)..(400): unsure at all n locations
cgtccggttttgttggagatgcacgtgctccttgtcaagatcatccaataatccaatggcttgaatgatcatggtatcaaccttctcgggactgaacttcagcttatacctagacaagctgtgggacaatcccaagctcattggaccaaggtcttgtgcacccaacccagttataagctcggtgagctgatttctcagccctctcatcagctccatcacagcactattgtgaaggcagtcaattttcagcttttcttttatagcatttccaagcttagaatcagcaactgccaatgtttcaccctcacaatgtttctgcaagaactngcgcagacccttgctaggcttgctatcaataatcanggttgccgcggatagggcatcagatgtgttctcaaac

SEQ ID NO: 455371 - DNA, 316 bp, Sorghum bicolor
cgtccgcggacgcgtgggggaaacacatgatggcgtgagcaaagggaagtataccattgggcttgggcaggaaagtatggcattgtgcactgaagttgaggatgctatttcgatgagctagacagtggtgaagtccctcctgaaaaattataacattgacccagagtgcattggacgttcggaagttggcagtgaagacagtaatagacaagagcaagtctatcaagacatggctgatgcaaacattcgaggaatctaggcactactgatatagaaggagttgactactgaactgcatgctatggagggacagctg

SEQ ID NO: 455372 - DNA, 412 bp, Sorghum bicolor
cgtccgaaagactccaagctcctgtgtggcttctgtttctgctgccgcctcctggtccacatctctctccgccgccgccgctgccgtcgtcgtccgccgacaccgtagcgctgggaagggatcacacgggagcggcgacgcgaggcgggggacccgcggttttgtcgcccggatggcggcggagcgatgacactggcggcggcgggagcggcgcggcgttgggatgcggacgatctgcgatgtgtgcgagagcgcaccggcggtgctcttctgtgcggacgacgaggcagcgctctgtcggtcctgcgacgagaaggtacacatgtgtaacaagcttgctagtcggcatgtgagagttggacttgcagaccctaataaactcgcccgttgtgatatatgtgaaaaatcacct

SEQ ID NO: 455373 - DNA, 301 bp, Sorghum bicolor
  unsure (1)..(301): unsure at all n locations
cgtccgccactccctattcgcccgccattaatagggatttgatgaggaggctgcggagcgccatagagaagattcagaccgacacgacggcgaaggtcgtccttgttgcgagctccgtgccgggggctttctgtgcaggcgccgatctcaaggaaaggaggctaatgaaatcttctgacgttggggagtatgctagatccttgagatctacattttcgtcttttgaggcactccctattccaacaatngctgtcattgaaggagctgcccttggtggtgggctagaactggcttttgcatg

SEQ ID NO: 455374 - DNA, 301 bp, Sorghum bicolor
cgtccgcgtatgtttccgctcacacaagcctgagcactcccttgaaatactcaccatgtccatcgccccggctaccccgatcaggcattcgacccgcagtttcagtggcagttgcagtaggctccctaccctcccgcgcgcatggatcatgtagggctactgcggaaagtacaaggatgagctcatcaagaatgccgcatacattggcacccctggaaagggtatgcttgctgctgatgagtccacaggcaccattggcaagcgacttttaagcatcaatgtggagaacattgaggagaac

SEQ ID NO: 455375 - DNA, 362 bp, Sorghum bicolor
cgtccgggtggtcgaaattccacaagaaccagctcaagtacacgcgcgggtacctgatcgagctgatgcactcggacaccatctacgtctccaacctgacgctgctcaactcgccggcgtggaacatccatccggtctacagcagcaacatcgtggtgcaaggcatcaccatcctggcgccgacgaactcgcccaacacggacggcatcaaccctgactcttgctcgcacgtccggatcgaggactgctacatcgtgtctggcgacgactgcgtggcgatcaagagcgggtgggacgagtactgcatctcgtacgggatgccgagccagcacattcgtgatccggcagctgacgtgcgtgtt

SEQ ID NO: 455376 - DNA, 450 bp, Sorghum bicolor
  unsure (1)..(450): unsure at all n locations
cgtccgtgttatgcaaaatcaacgagcagagaaccagaaagcctttgcttctacaatgggtcttcttcttacttacactctcaatattaccaatttactcacagctgttcttcgtcttgctagtcttgccgaaaatagtttaaatgctgttgaacgggttggaacatacattgagttaccttcagaagctcctcctgtcattgaggatcataggccacccccgggttggccatcatcaggtgtcatcaagtttgaagacgttgtgcttcgatatcgaccagaacttccccctgttcttcatggcatttcttttcttattaatggaagtgagaaggtaggaatagttggcagaacaggtgctggtaaatctagcatgcttaatgctttngtccgtattgtggagcttgaacgagggagaatattaattgatgattgtgacacttctaagtt

SEQ ID NO: 455377 - DNA, 492 bp, Sorghum bicolor
  unsure (1)..(492): unsure at all n locations
ggccggaccggccgcggtagacccacgcgtacgcctctctcctgttgttcggagcacacgcacaatccgatcgatccccaaatccccttcgtctctcctcgcgagcctcgtggatcccagcttcaagatgcagatctttgtgaagaccctcactggcaagactatcaccctcgaggtggagtcttctgacaccatcgacaacgtcaaggccaagatccaggacaaggaaggcatccccccggaccagcagcggctcatctttgccggcaagcagcttgaggatgggcgcacgcttgctgactacaacatccagaaggagagcaccctccaccttgtgctccgcctcaggggaggcatgcagatcttcgtgaagaccctaactggcaagacgatcaccctngaggtggagtcctcagacaccatcgacaatgtcaagggcaaagatccaggacaaggagggcatcccaccagaccaacaacggttgatctttg

SEQ ID NO: 455378 - DNA, 394 bp, Sorghum bicolor
cgtccgcggacgcgtgggttatcaagaagatgtgcgaggagactaaagcgcgcatcaaaatacttgatggcccgcctggtgtgccagaaagagcagtaatgatttcagcaaaggatgaaccagatgcacctctctctccagctgtggatggcttacttagagttcataaaagaataactgatagttcaaatggtgaatctggtcagcttcaacgaagtgctggtaatataggaccaacacgtcttctagtgccatcttcgcaagctggcagccttattggcaagcagggagcaactattaaatcaatacaagattcttctaaagtccgtgtccgtattgttgagaatgtgcctcctgttgcactaaatgatgaatagagttgtggagatacaag

SEQ ID NO: 455379 - DNA, 450 bp, Sorghum bicolor
cgtccggcacccacgatgtcgggtattgggctaacagcttcctcgaggaccttaagaggacctgcagtgatcattctcagagaaggtgctggggcattggctttgggctgcggttcagagtggtctcgctcgaccttcacttcaggaagctttccttggagagcattcttatggcataccggagagccaagacacgggcaattctgcttgactacgatggcacgctgatgccacaggcgattaacaagagcccctccactgaatctgttcggatcctcaatagcttgtgcggagacaagaaaaatgtggtgtacctatgcagcgggtatgaccggcgcactcttcatgagtggttcccttgtgagaaccttggcatagctgcggagcatggctacttcctgaggtgtagagggacgcagaatggaagacctgtgtcactgctaccgactg

SEQ ID NO: 455380 - DNA, 409 bp, Sorghum bicolor
cgtccgaaaccttaccacaacatatatatgtcgaacggcgtatcactacatgagctgtcaatttcactcttgaaaggtcaaaagatgtcaaacagacaaagtgatgacttgtgcagcatttgttcagatggtgggcaactactgctttgtgatacctgtccaagagcttttcacagagaatgtgttagcttatcttctgccccgaagggaacttggtgttgccgatattgtgagaatagacaacagagggaaagttgtttggcatataacaacaatgcaatagctgctgggagggttgaaggagttgatgccttggaacaaatatttacacggtcaatacgtattgctacaacaccttgagacttgattttggtggtgcgcactgtgcaagctccatgatttagcaaaa

SEQ ID NO: 455381 - DNA, 532 bp, Sorghum bicolor
cgtccgggattggtgcggcgtggagtcgtcagtggagctccatctatccggactgactcggatcgaccgctcctctctcgggttgtggagtttgatcagttctatcagaggagtgcttatggatgattgcatggctgtagcttgctaggccctgctttcctgtttgtagagatacatcatggcaccacgcagtagggcttcatctagaaggcctctctggatcattgtcttggtcgcttttgtttgcgcagtagcccttggagcctatctttatactccacggcattacacagcctgttatctggtaccatcagaagcctgcaattctcggccgcctccagaacctgctagggtatacactgatgatgagattgctgctcgtgctatcatgagagacatcattcgggcacggccagtgcagtcaaagaatccaaaaattgcttttattgtcttgacacccaattcgttgccatttgagaagctatgggaaaaattcttcatgggtcatgaagacagatacaccatattcgtg

SEQ ID NO: 455382 - DNA, 472 bp, Sorghum bicolor
cgtccgtgttagagcacgtgcattcgctaagaaattattgaacgcccgtttagctattgttgataaaagaagacagggtcacaacatgtcagaggtcatgaacttaattggtgatgtgaaaggaaaagtggctatcttgattgatgacatgattgacacagcagggacaatcactagtgcagcagctttgttaaagcaggagggagcagaagctgtatatgcttgttgtacgcatgctgttttcagccctcccgcaattgaaaggctttctggaggtgtctttgaggaagttattgtgacaaactccatcctgctgccagaagacaaatgcttccctcagctgacggtgctttcaatggcgaaccttgtagccgaaacaatttggcatgttcatcgtgatggctccgtcagcagcatcttccaataacagaaacgcctatcagctatcatcaactcgtcttaccattcgtgt

SEQ ID NO: 455383 - DNA, 476 bp, Sorghum bicolor
cgtccgggaggatcaaaggttgaattatgttgagatgcatgcaggaaatgttggcatcaaaactgataagcttgaaagcttgcgtatagctgtggctaaagattctccaatgtgggaaactcttgatatctgtataaaaattgttgataagaattcacttgatctattggttcctcgcctggctcaaatggttagatcagctgttggcttaaatacaagggttggtgttgctagcttcataaccttcttggttcagaaggtcatggttgacatcaaaccattcacaacaatattactgaagttattgtatagtgctgttctggaggaaaggagttctgccgctaaaaaggcttttgcgtcctcttgtgcaactgttttgaaatacgctagtcctccccaggctcagaagcttattgaagatactacctctctgcattcaggtgggaaaaacgatcagttatctggtgcaattctta

SEQ ID NO: 455384 - DNA, 455 bp, Sorghum bicolor
cgtccgataagatgcaggcctcaatgttggagatttacaatgagaccatacgcgacttgcttgtgacaaatcgcatggctgctcaggatggtggtcctacaaagtacagtatcaagcatgatgccaatggtaacacaatcgtgtcagaccttacagtcgttgatgtaactactatcaacgaagtttcttctctcctcaggcgggctgctcagagcagatcagttgggagaacacaaatgaatgaagaatcatccagaagtcactgtgttttcactcttcggatattcggtgtaaatgagggaacggatcaacaagtgcaaggagtgctcaatcttatagatctagcaggcagtgagcgtctgaaccaaaaagtggtgccacttgtgatcggctgaaagaaactctggctatcaataaaaagcttgtcatgccttaaagtgatgtcatcttctcga

SEQ ID NO: 455385 - DNA, 442 bp, Sorghum bicolor
  unsure (1)..(442): unsure at all n locations
cgtccgggcaggactagttattggatttgttacggagtattacacgagcaatgcatacagtcctgtacaggatgttgctgactcctgcagaactggagctgctactaatgtcatctttggccttgctctgggatataaatctgtcattatccctatttttgctattgcttttagtattttcctcagctttagccttgccgccatgtatggtgttgctgtggctgctcttggaatgctcagcacaatcgccaccggccttgccattgatgcctatggccctatcagtgacaatgctggaggaattgctgaaatggctggcatgagccacagaatccgtgagagaactgatgcccttgatgctgctggaaacactactgctgccattgnggaagggttttgcaataggttcagcangcccttgtgtctcttgccctctttgggg

SEQ ID NO: 455386 - DNA, 454 bp, Sorghum bicolor
  unsure (1)..(454): unsure at all n locations
cgtccggacgcgtctagctagggtttggtctcgccgttccgccgcgcgcgcctccagaagcttctagacgttccgaggaggaggaggggaggctcccgccgccgccgcagccatggcgtccaccaaggtccagcgtatcatgacccagcccatcaacctcatcttccgtttcctccagagcaaagcgcgcatccagatctggctcttcgagcagaaggacctccggattgagggtcgcatcatcggatttgatgagtacatgaacttggtcctcgatgatgctgaggaaatcaacgtcaagaaaaacactaggaaatcactgngccggatactcctcanaggtgacaacantaacttgatgatgaacanctgcaagtgaagattcttatggcangnatgatgttggtgcacgcgtgagtattgtgacacattgactccatcatcagactaaatg

SEQ ID NO: 455387 - DNA, 462 bp, Sorghum bicolor
cgtccgcaagaaaggggtgtggttgaaattgccggtggatcgagccgagttcgtccctttggcagtcaaggaaggtttcaagtaccaccacgcggaggaagcgtacctgatgatgacgtactggatccctgatgaaccgaatatgctcccagcaaatgcttctcatcaggttggagtcgggggttttgtgatcaatgaccagatggaggttctagtggtgcaagagaagtatcgcggttcgtcgctggatggcgtctggaaactacccacaggcttcattcttgcgtcagaggaaatctatacgggagccagcagggaggtgaaagaggaaaccggggttgacaccgaattcgttgatgtcgttgctttcaggcatgcccacaacgtggcgtctcagaagtcggaccttttcttcatctgcatgctgaggcctgtatcgagtgagatcaagatcgacgagac

SEQ ID NO: 455388 - DNA, 469 bp, Sorghum bicolor
cgtccgcatttattcccttgcaatcagttcgtgtgaagccaataattgagaagctgcgaactcttggtggatctgcgcagttagtttttgatgtcattcattttgaccgagttttggagaaagcagttctgtatgctgttggaaatacacttgtctgtgataaacttgatgaagctaaagccttaagttggagtggtgaaaggtataaagttgttactgttgatgggattctgctgactaaatctggaacgatgactggtggaacaagtggggggatggaagctagatcaaacaaatgggatgacagtgcaatagaatctttgaagaagaacaaaaataagttggaaactgaaatgtcagaacttggttcccccagggagctgcagagaaaggagcttgccatatctgagaaaataactggacttgagaaaaagttgcactactcgaatgttgaacagaataaccttag

SEQ ID NO: 455389 - DNA, 482 bp, Sorghum bicolor
cgtccgaaaggacccactcgaaagggctgttcttgatggtcgtcagcttgcactgaaaataagtgcaaactcagtttatggtttcactggagcaactgttggtcagttaccttgcttagagatttcttcaagtgtgaccagctatggacgacagatgattgaacatacaaaaaagcttgttgaagataaattcacaacagtaggaggttatgagcataatgcagaggtaatttatggggacactgattctgtgatggtacagtttggtgtttctacagttcaagatgcaatgaagttaggaagagaagctgcagattatattagtggaacctttaccaagcccatcaagctggagtttgagaaggtctattttccttaccttctgatcagcaagaagagatatgctggtttgtactggacgaatcctgagaaatttgacaaaatggatgcaaaaggtattgaaactgtgagaagggacaact

SEQ ID NO: 455390 - DNA, 432 bp, Sorghum bicolor
caagatcagcatcaactggaagcccaacgtcaactacaccgactggctgaagcagcacagccccttctacaaggacgactggctggtgttctactacacggcggggcaggcggacgtggtgcaggtggacgaggtcgggtacaacaagtgcgacgccaccaacgccatctacaactacagcaagggccgcagcttcgcgttccagctgaacgagaccaagacctactacttcatctgcagctacggctactgcttcggcgggatgcgcctcgccatcaaggccgagaagctgccgccgccgtccccggcgccgtccgccagcgaccagtcctctgccatcgccgccttcgccaggtcgcattgcggtagtcgtctaccgccgccgtcgccgtgcttgccgcgctccttcaggatggtctagcttgcgaagaa

SEQ ID NO: 455391 - DNA, 410 bp, Sorghum bicolor
cgtccggagcagactaccaagccttgtggattttaagactagtacaaaaattgatgccttgagagaggagataagaaacatgattgagcacgatggttctgccaaagggattgtcttcagccagtttacatcattcttggatttgattcagttttccctggagaagtctggcatcaagtgtgtccagctgaatggagccatgaacattactgagaaaggaagagccatagacaccttcacccgtgatccagactgcaggatcttcctgatgagcctgaaagctggcggagtcgctctgaatcttactgtagcatctcatgtgttcctgatggacccttggtggaatccagcagtcgagagtcaaggcgcaggatcgtatccatcgaattcggacagttcaagccaatcaa

SEQ ID NO: 455392 - DNA, 505 bp, Sorghum bicolor
  unsure (1)..(505): unsure at all n locations
cgtccgcgaccaaatgtacaagctgacgtacccagcgccgggcgcgccggacgtggccaagagggccaagcagctcctcgaggacgccgggttcgggccggtggccgaggaccgccgccgcgggctggaccacggcgcgtgggtgccgctgatgctcatgtacccggaggccaacgtcccggtgtgccagctctcggtgcagaccgaccgcgacgccacgtaccactacgacctcggcaaggcgctggcgccgctgcgggaggacggcggcgtgctcatcgtcggctccggcagcgccacgcacaacctgcgccggatcctgcgcagcttcgccccgaccagccacgagccggcgnncgggtgggcggccgagttcgacgcctggctcaaggagtccctcctcggcggcaggcacgaacacgtgaagcgctaccaggagaagggcgccgtacgccgaggggcgcacccgcggcccgaccacttctacccgcttgacgtcgcgctc

SEQ ID NO: 455393 - DNA, 458 bp, Sorghum bicolor
  unsure (1)..(458): unsure at all n locations
cgtccgatcaccccagagcctctccttcccggtctccgcccgttgccttctccgtccccggctgcgtcgccggcgaacccaccaccgcgaatcggatcctccgacaaggcgagaggggagagatggggctcacgttcaccaagctgttcagccggctgttcgccaagaaggagatgcggatcctcatggtggggctcgacgccgccggaaagaccaccatcctctacaagctcaagctcggcgagatcgtcaccaccatccccaccatcggattcaatgttgaaactgtggagtacaagaacatcagcttcactgtctgggatgtcgngggtcaggacaagatcaggccgctgtggaggcattacttccagaatacacagggtctcatcttcgtgtggacagcaatgataggggaccgtgttgtgaagcaagggatgagctcaccggtgctgatgagg

SEQ ID NO: 455394 - DNA, 445 bp, Sorghum bicolor
cgtccggcgagaaggttcctaggagcaattacagaagtgcatcgtcaagagggagagctcaagctcatggttgagtgaaggcaccacatagctgcttttggtgggacagctcgttgtacatagctgcagccttccagtatggaagcaggaggataggattggagtaggaagtctttattggaacacaaggattcggatgtattataaactagcttaagtgaattgtgttaaccctttcttttacttgcttgaatcagacttgtccgtgttgtaggatagccattaatctcgtagaaacctcctcttaggccatcctcaatggcagtttcatagcccagtttccaacacatctgtattttggaaacagtgcaatttgagtttcatgggggatgaaactctctctacttccatgaaactcttatcatctctcttcatactatagcgc

SEQ ID NO: 455395 - DNA, 522 bp, Sorghum bicolor
  unsure (1)..(522): unsure at all n locations
cgtccggagagagccccgctgcatatgatgctgacgtattcctcacctctgaattacatcagcatcctgtcaatgattctgctgttaggtttcatgttgatcaagaccgcaaggcaaagatcgtgtgccacttcaacaagcaggttttgcagagctataagaacttcatgagtagtgcaccacctaagcgcattttgcttcgcaaaggtgctgtctggaaagacgttccagaaaagattgtcaaattggcccaagccgacttcagggcaaaaaagacgatcacagaaacaggatatcagaaccatctatttttgctcgattttgcccatatgacattcatagacacaaagacaggtcttcagaggcctattgcttggattgatgaaaatggaaagcgctacttcccggaatcatttatgcaagatcagaaattatttatcaagaaagatnttggcaacggaaatcctgagtacattantgttgaaccaaatgggacacgagaaatgaatgaccagcttggag

SEQ ID NO: 455396 - DNA, 452 bp, Sorghum bicolor
cgtccgcaccccaccttggagcaagtactgtcgaggctcaggaaggcgtcgctatcgagatcgcggaagccgtggttggtgcgttgcgaggggagctcgcagccacagctgtgaatgcgcccatggtccctgctgagatcatgtcggagctggctccatatgtttctctggctgagaagctcgggaggctggcggtgcagctggtggccggcgagagtggcatcaagggcgtgaaggtggtgtacaccacagcccgtggccccgacgacctggacactcggctcctccgcgcaatggtgaccaagggcctggtggagccggtgtccagcacattcgtgaacctggtgaacgcagactacgcggcgaagcagcgcggcctccgcatcacggaggagcgcggtcgcgcacgacagcccggcagcggaggcaccggctggagtccgtccaggttc

SEQ ID NO: 455397 - DNA, 393 bp, Sorghum bicolor
cgtccggcagagaagaaccgaaaattgaatgaccttttagatgcgcttgacttcaaccaagttgtgatatttgttaaaagtgttagtagagctgcagaactcaacaaattgctctgcgagtgcaattttccctcaatctgcatacattctggaatgacacaggaagagaggttgacccggtacaagaacttcaaggaaggacacaagaggattcttgtggctactgatttggttggtaggggaattgatattgagcgtgtcaacattgttgtgaactacgacatgcccgattctgctgatacgtacttgcatagggttggtcgagctggacgttttggtaccaaaggacttgcaataacatttgtttcttctgcatctgattcttatgttctc

SEQ ID NO: 455398 - DNA, 464 bp, Sorghum bicolor
cgtccgcggacgcgtgggcggacgcgtgggcggacgcgtggggctcgagatcttaaaactggcaagtttgtcgcactcaaaaaagtgcgttttctcaatgtggatcctgagagtgtgcgctttatggctagagagattcttattctacggaaactcaatcatccaaacatcatcaagttgcaagggatcataacatcttctttttcacaaagcctgtatcttgtatttgagtacatggagcatgatcttgttggtcttgctgcgaccacaggccttaagtttactgagccacaggtcaagtgtttatttcagcaattactcagtggccttgatcattgccacagcaatggagtcctgcatcgggacctaaagagttccaacctattgatggataacaatggtgttctgaagattgcggactttggtctagcaacctcaattgatcccgacaatcagcaaccact

SEQ ID NO: 455399 - DNA, 507 bp, Sorghum bicolor
cgtccgggcgacgaggtatgcccgccgccgtaccacaataggatttcagcatggttgattctgttcatgacaacattgtgctgaacaagtgtatcaaggacatccttgcactaatcaaaccagtagaggatgatagaagcaggcggctatccacaattcaggagctggaaaactgtatccactctcaagcatctctgtcaggtgctgctgtcaaaccttttgggtcctttgtatcagatctttactcaaaatcaggcgacttagatttatcaattcagctctggaatggttcaaaccaccctataaacaagagaaagaagcagaataccttgagagaagttaggaaaaccttactaagtcaaggtgttactggatacatgcagttcattccacatgcaagagttccagtccttcaatatgtcagcaaccgctttggcatctcctgtgatatatcaattgataactttgctggtcgaattaagtccaaaatcttctactggatcaata

SEQ ID NO: 455400 - DNA, 581 bp, Sorghum bicolor
  unsure (1)..(581): unsure at all n locations
cgtccgtctatctccaatcttcttgcggcggaagcaaagcgagggcggcgagatggacggcggcggagaggacgggaagcagcagccgcacctggtactggcgcacaagctgttccttctgtcgcgctccgacgtcgacgacctcgccaaggtcgacctacgcgctgacgtgctcgcggcagtcaaatccgatgacatggcggctctgtacgagtcgctggcggcggacggcgtactggagatggacgcggcgctgctggccgagatgcgcgccaggatcgacgaggagatccggaagctcgacgagaagattgccgatgctgaggagaatttgggtgagagtgaagtgcgtgaggcccatcttgccaaatccttatacttcataagggttggggagaaggagaaagcactggagcagcttagagttactgaaggaaaaactgtagctgttgggcaaaagatggaccttgttttctacacactacanattgggacttttctatatggaccttgatctcatctcaaagtcattgacaaagcgaaaaacttaattgaggaaagtggtgactggagaggaagaa

SEQ ID NO: 455401 - DNA, 511 bp, Sorghum bicolor
  unsure (1)..(511): unsure at all n locations
cgtccgacagcttgcaaaagatgtcgcaaaagattggaatgctgtctttgaaaggagcatcaatacattgtttttgactgaaatggtccgtggcttgatgctaactctcaagtacttctttgacagaaatgttacaattaactatccatttgagaagggtcctctgagtccccgcttccgtggtgagcatgctctcagacgttacgaatctggggaagagcgttgcattgcttgtaaactatgcgaagctatatgcccagcacaggcaattacaattgaggctgaagaacgtgaagacggcagtcgccgaaccacaagatatgatattgacatgaccaaatgcatttactgtgggttctgccaagaggcttgcccagtcgatgctattgttgaggggcctaactttgagtttgctactgagacacacgaggaactactgtatgacaaggagaaactgcttgaggaatgggatcgcttggagactgagatngctgagaaccttgaatctgag

SEQ ID NO: 455402 - DNA, 496 bp, Sorghum bicolor
cgtccggcagcaagcaagcgtcttctgcctcgtcgacctcaccctctcctcacccttcgcgtgctctctccgctgctgcagcacactccctcgcttgctgctccctgcgccaggtgtgggactcgatttcggacggcatggctgaggcgttgtgcaacggcgtcgtggcgtcgccgtacggcggcggggacgtgggcgtcgccggccgggccaggggcgccgccaaggccgcgctcgcggagtccctgccggtcggcgggtacgccaccaagagctccttctccgccgggaggatgtcggtgtcggacaggaagccgaggcccctgtctcggaacctcgaggccgccgccgcgcctggacagatgaacctgtcgtttcccaaggccatgcggtggtgggagaagggctgcaccccaacatgcgggagatcgagtccgcgcaggaccttgccgactccctgctcaacgccggcgacaagctcgtcgtcgtcgacttc

SEQ ID NO: 455403 - DNA, 511 bp, Sorghum bicolor
cgtccgcggacgcgtgggctgtactccttggtttgttgagtgtgtggaatgtttcatttcttggttatccagctagagcaatattgccatattcccaggcacttgagaaattggcaccacatatacaacagcttagcatggagagcaacgggaagggtgtttccattgatggcattccactccccttcgagacgggtgaaattgattttggtgaacctggaactaatggccagcacagcttctatcaattaatccatcagggaagggtcatcccttgcgattttattggtgttgttaaaagtcagcagcctgtttacttgaaaggggaaactgtgagtaatcatgatgagcttatgtccaatttctttgcccagcctgatgcacttgcttatggaaagactcctgaacaattgcacagtgagaaagttccggaaaattttatccctcataagacttttaagggcaaccggccatcactaagtttgcttttgcctacactatccgcatatga

SEQ ID NO: 455404 - DNA, 468 bp, Sorghum bicolor
  unsure (1)..(468): unsure at all n locations
cgtccgtggtgaattacctcagggaatcaaattcctcactaacctaaggcatctggaactgtcatccatggataactggaatatgtgcatgccatgtggaattggtgagttaacaaacctacagacaatgcatgtgatcaaggtcggaagtgattcaggcagctgtgggattgctgacttggttaacttgaataagcttaagggagagctatgcatctcaggaatagagaatatcacaagtgcacaaattactcctgaagctagcatgaagagcaaagttgaattgcgcaaattgattttccactggtgttgtgtcgactccatgttttctgatgatgcatcatctgttttggatagtcttcaacctcactctgatctagaggaatnggctatcaggggcttttgtggtgtcagatttcctttgtggctggggaatgagtatatgtttagcttgtccattttagaact

SEQ ID NO: 455405 - DNA, 467 bp, Sorghum bicolor
cgtccgggcccatgtcgccgtgttcaacaccctgcttcaggtcctcgacgacggcaggctgacggacgggcaaggcaggacggtggacttcaggaacaccgtgatcatcatgacatccaacctcggcgccgagcacctcctcgccgggatggtgggcaagaactccatgaaggtcgctcgcgatctggtcatgcaggaggtgaggaggcacttccgccctgagctgctgaaccggctcgacgagatcgtgatcttcgaccctctgtcccacgagcagctgaggaaggtggctcgccttcagatgaaggacgtggccgtccgccttgccgagaggggcatcgctctggccgtcaccgacgccgcactggacatcatcttgtctctctcttacgatccgggtacggcgcgcggccgatcaggaggtgatcgagaagagggtgggacgcactgtcgaaatgctgatccag

SEQ ID NO: 455406 - DNA, 509 bp, Sorghum bicolor
cgtccgcccacgcgtccggcggcggcgagttcgctgccaaggactacacggacccaccgccagctccactgatcgacgcggcggagctgggttcctggtcgctgtaccgcgccgtgatcgccgagttcatcgcgacgctgctgttcctgtacatcaccgtcgccaccgtgatcgggtacaagcaccagacggacgcgacggcgtcgggcgccgacgccgcgtgcggcggcgtgggcgtgctgggcatcgcgtgggcgttcggcggcatgatcttcgtcctcgtctactgcactggtgcgcgcgctgctctacatcgtggcgcagtgcctgggcgccatctgcggcgtcggcctcgtcaaggcgttccagagcgcctacttcgacaggtacggcggcggcgccaactcgctcgcctccggctactcacgcggcaccgggctcggcgccagatcatcggcaccttcgtgctcgtctacaccgtcttctccgccaccgaccccaagcgcaac

SEQ ID NO: 455407 - DNA, 567 bp, Sorghum bicolor
  unsure (1)..(567): unsure at all n locations
cgtccgcgattggcccagaaggtgacttgttggaaacaactgaaaaacaatgcaaccgcctcgcacttaaaggtcccttggtatctattgatgaaatggaggctattaaaaagatgaattatcgaggttggcgaagcaaagtgctcgacataacttatccaaaaaagtctggaaggaagggcttggaagaagctttggacagaatttgtgcgaggctcgtgaagccataagcaagggttacactattttggttctctcagatagaggattttcctcggaccgtgttgctaccagttctctcttagcagtgggagcagtgcatcagcaccttgttgcaaatcatgagaggacacgcataggattgttggttgagtcagctgaacctcgtgaagtgcaccatttctgcaccctggttggattnggtgctgatgctatctgcccttatttggctattgaagcaatttggtgcttgcagaatgatggaaagattcctcctaatggtgatggacaacgctactcaaaggaagaactggtgaagaagatttctatgcttctaactatggaatg

SEQ ID NO: 455408 - DNA, 549 bp, Sorghum bicolor
cgtacgtgctgttatggcaacctgtgaccatggtgctgttgcaaagatcaagagggttgtgatggacagagacacatacccaaggaagtgggggcttggtccagtggcactcaagaagaagaaaatgatcgccgagggcctccttgataagcatgggaagccaaatgagaagaccccagccgagtggcttcgcaatgtggaagtggtgcttcccactggtggtgatgtatcgattgctagcattgcagctgctcctgagccagagaaggtgaaggtggagcaggacgcagtcatccatgaagaggtcaaggagaagaaaaagaagaggcagaaggatgagaacaatgacgacgatgcttctgttccggccaagaagatcaaggttgaggaagctgccgaggcagtggaaggggagaagagcgagaagaagaagaagaaaaagaaagataagggcgaatcagaatcagcagacgcggtggaagtgaaggaggcagagaaggctgatgtggctgatgagaaaggcagcgaaaagaagaagaagagaagaag

SEQ ID NO: 455409 - DNA, 425 bp, Sorghum bicolor
  unsure (1)..(425): unsure at all n locations
attcccagggtcgagccacgcgtacgataaggtgcaactgggcaacaaagaacaattcagaagagaaaccagaaactgacaatcataatgcagttgtactaacaaatggtagctccagcaattcagcaacggatgcaagccaggatggaggaagtaaagagaacccagagaacaatcctgattgcactactgtatatgttggcaacctcggacatgaggttaaccgggatgagcttcaccgccacttctatagcttgngggtcggngcaatcgaggaaatccgtgttcaacaggataaagggtttgggtttgtgagatatagcacccatggggaagcagcattagctattcagatgggcaatggattggtagtccgtgggaaaccaattaagtgctcatgggtaacaaaccaactccacctggac

SEQ ID NO: 455410 - DNA, 347 bp, Sorghum bicolor
  unsure (1)..(347): unsure at all n locations
gtacgcgtacgcgcacccgtccggacccacagcattcgccgatcccatcgtatgtattttgttgtgtgggttattaggagttctgggattctggatctaattgcctctggttgctgggtggggtggattcgaacccagagaacacggtaggcgtgatgacgatggtcgggattccgggaagggcgtccgcgtgcttgtcactcccaccagcgacctcgtgaagattctcgcttgtatgcaagcatgcttgacgcccaactatgcatcggcatcgccgttgagctcaattgtcagagcattgttcctgggaggcaaagcaccatgtgtgcagntttagttcatgtgga

SEQ ID NO: 455411 - DNA, 264 bp, Sorghum bicolor
cccacgcgagggcaccgtccaaaatacattcataagaaaaccgagactgacctcttcaagcaccggtctaacaaagagcagagggagtgatattacacaaagcagacaaggagagagagatactacgcttttcttcatctttattgcttctatgaccgataaggaagctatggtgtatccttttctggttaaggctcttcaaaattctcgtcatcttctcaccattttgcgaatggagccaatcgaggaaatccgttgttcaac

SEQ ID NO: 455412 - DNA, 496 bp, Sorghum bicolor
cgtccgcccacgcgtccgccgacttcccgctctccctgtcagctcaccgcccgccccagatctcctctccgcccaaacagaaccaagcttcgcagcgcagcggatccgccccgcgctttgccgccggcaaccagccatggcgacggccttcgatgccttcaccgacaagaacgccgtcttccgccgcctcaaggccaagcccgagaacaagatgtgcttcgactgcaacgctaagaaccccacctgggcctccgtcacctacggcatcttcctctgcctcgactgctccgccgtccaccggagcctcggggtccacatcaccttcgtcaggtcaacgaaccttgactcatggactcctgaccagctgaagatgatggctttcggaggcaacaaccgggcacatgctttcttcaagcagcatggatggaccgatggtggaaaggttgaggcaaagtacacatcgagagctgctgaactgtacaggcagatgcttaac

SEQ ID NO: 455413 - DNA, 461 bp, Sorghum bicolor
  unsure (1)..(461): unsure at all n locations
ttcccctccaccgattcggccggcgagagtctccgcaggctcgccgggatcgcgagtccacgatggccgccaacttctggacgtcgtcgcactgcaagcagctactggaccccgatgatgtggacctggtgccggcggcggaccgggagcggggcatcacgccagaggagttccgcctcatcaagatccatatgtcgttccatatctggaggctggcacaacaggttaaagttaggcaaagagttatagctacagcagtcacttacttcaggcgtgtgtatacaaggaagagcatgtcagactatgatcctcgtttggttgcacctacttgtttgtatttggcatctaaggtggaggagagcacagtgcaagctcggcttcttgtcttttacataaaaaagatgtgtggttccgatgacaagtatcggtttgaaattaaggatattctngaaatggaaatg

SEQ ID NO: 455414 - DNA, 490 bp, Sorghum bicolor
cgtccgattcaatcatcagttgaactcttatgtgaggagcgtgaaaagaaatttcgtagaagagaggaggaccgagttagacaacgagagattctagaacaaatggcatatggtaaaactccaatgaacaaggcagttgacatgcagaagctgaaaggcttgactgctatcggatttgagaagtatcttgctgcagaagcactgcgcataaatgaaaatgatgctgacaaagcgttagaccttttgacaaatcctgaacaaaactgcatcctacaaagtaaaattcaggcaaagagaagccgggcatctcgtgggtttagtgcaggatcatcgagctccaaggcagctgttgccagggctgctccagcaatcaacaactctcagacttctgtcaatgatgtaccacatcctgctgatggagatgctccaccacatcctgcagatggaggagcaccacatcctgcggatggaagaaatgctccccacatgc

SEQ ID NO: 455415 - DNA, 480 bp, Sorghum bicolor
cgtccgggcatagcgacactgctcacgcttcttccccgtgcttgcagttgctgtgcctgtgcctgtgcagctgttcccacactaccccgtcagtctcagtcaccgcattacctcaagaagcagcaatggagttgccaagatccatggccgtgcttgtgctcgtgttcttcgtcctgtgcggagtgggggaggcggcgacgttcacgttcgtgaaccggtgcacggacacggtgtggccgggcgtcctgtccaacgccggcagcccaaggctggagcccacagggttcgagctctcgccgggggaggcgcgcgcggtgccggcgccggcgggctggtcgggccgcatgtgggcgcgcacgggctgctcccacgacggcgccacggtgcggctcgtctgcgccacgggcgactgcggctccggctccgccgagtgcgcgggcgcgggcgccgcgccgcctgccacgctggccgagttcacgc

SEQ ID NO: 455416 - DNA, 555 bp, Sorghum bicolor
cgtccggccggacgcccctcacgcgccgcaccaccaccacctcagcaccgcgccgcgtttccttctcggcttctccctctcccctacacaccgcctctccgccgcgtcctccccgcacattttcttctcctcgcgccgccgccgccagcttcttttcctcctccgagatggccaacgcggcgtccgggatggccgtggacgacgactgcaagcgcaagttcctggagctcaaggccaagcgcacctaccgcttcgtcgtcttcaagatcgaggagaagcagaagcaggtggtcgtggacaagctcggcgagcccaacctcacctacgacgacttcgccgccaccctcccagccgacgagtgcaggtactgcgtctacgacttcgacttcgtcaccgaggaggggtgccagaagagcaagatcttcttcatcgcatggtccccggacacggcaaagattaggagcaagatgctgtatgcaagctccaaggagaggttcaagagggagcttgacggcatccaggtggagttgcaagcaacagatcccactgagatgg

SEQ ID NO: 455417 - DNA, 463 bp, Sorghum bicolor
cgtccgctggctgtgaagattaaggctgcaacgacaggtggaacaaagctgaaggactttgttgctactttgcaatctgatagcatccaagctgagattgcaaagcttcgccatgatgtggaggaatatgcaaaacagttcccaacaattggatttgagaaggagaccatgaaatacaagaactgatatctgaatggcaagcaagcaaccgttgcaagatgccacgacgattattgggagtttaaatgggggaagatcatgtaaacataaactcatggtgtgatggcatcttatgttaaaaagagatattggcaatttacagcatgtggaactttcgtcaatggctcatattgtagatacataccgtgagatcctatactgatgctatatattgacccctttctggacaaaaatcaacaattttgtagattttttttaaatttttttaatgaattcttatata

SEQ ID NO: 455418 - DNA, 558 bp, Sorghum bicolor
cgtccggcacttgatgggtgggatagtattgctctggaatattcagtcgactggcctctgcagctcttcttcactcctgatgttctgtccaagtatcgcaaggttttccagtatctcatccgattgaagaggacacaaatggaacttgagaaatcctgggcagctgtaatgcataaagaccatgctgatttttctgagtactgcaaggatcggaaaaataactctgcaacacaactgcgtcgacaacgctctaagcctttgtggcgagtaagggagcatatggcattcttgatcagaaacctgcaattttacatccaggttgatgtaattgagtcgcagtggaatgttttacaatctcatgtgcaagattcacatgattttacagagctagtgagctttcatcaagaatatttgtcagcactgatttcacaatccttcctggatattggatcagtttcaaggatactagacagcataatgaagctttgcttgcagttctgctggagcattgagcaatacgaaacccgcccaaatatttctgagatgatcacataactg

SEQ ID NO: 455419 - DNA, 397 bp, Sorghum bicolor
cgtccgccacagtccactgccaactcctccgatgaagatgagctcatcatccgtgcccgcggcggcggcggtggcggcggtgctgctgctctcggcggtgtggacgacgacgactgtgacggggcaggcgctggtgccgggcgtgatgatcttcggcgactcggtggtggacgccggcaacaacaaccggctggccacgctggtgcgcgccgacttcccgccctacggccgcgacttcccggcgacgcacgctcccacgggacgcttctgcaacggcaagctcgccacggactacaccgtggagagcctggggctgagctcgtacccgccggcgtacctgagcgaggaggcgcagagcaacaacaagagcctcctacacggcgccaactttgcgtac

SEQ ID NO: 455420 - DNA, 369 bp, Sorghum bicolor
cgtccgaccattggtaatacatgtgggccgttttgggcgtgaaaaaaatttggattttctgaaaagggttatggagaggctcccaggagcaaggattgcctttgttggagacgggccatacagggctgagttggaaaaaatgttcatgggcatgcctgcagtttttactggaatgctccaaggcgaggagctctcacaagcttacgccagtgcagatgtatttgcaatgccttcagagtctgagaccctcgggcaagtagtgctggagtccatggcttctggagtcccagttgtcgctgctcgtgctggagggatacctgatataatacccaatgacaaggatggttagacaagctttttgtttacacc

SEQ ID NO: 455421 - DNA, 350 bp, Sorghum bicolor
cgtccgcccacgcgtccgtcctcgtggagtctcaagggagtctctcagaccaagtggacctaccgacaccgaccatggccaccgccgacatccgcgtctccatcgggcaccagacccgcttcgcgctgcgcctcgccgccgcgctctcctccccgtccccctccgcttcccccgccgggaacgtcgccttctccccgctctccctccacgtcgcgctcagcctcctcgccgccggcgcgggcggcgccacgcgcgaccagatcgccgccaccctatgaggaggaggcgacgcggtcgaaggccttcacgcgctcttccagcaagtggtgcatatcgtgctcgccgacggg

SEQ ID NO: 455422 - DNA, 474 bp, Sorghum bicolor
cgtccggatgacctaacacatttcttgttaagttgttaaataaccaggccagccaaagtggcgtctccaaaccaatagcacagagccgtcttctctgttttgatattgccagtgttaagtaggatcaacgtatacaggccttattgaggtcatttttgggtttgtcctcacggacaattgatgggaataaatatgagtgagcagtttggaatgaaactgtcaaaggaggatgctgcaaaagctcaacaagccatgtcgtcattatctccagaggatttggatagaatgatgagatggatggagcgagcacagaaaggggtagaagtcgcgaagaagacaaagaactggctcctaggccggcgaggcttgatcctcgctattgtcatgctgatcctagccttcatacttcagaagcatgggtttatcggcaggtgatggagtgaccctgggagctgcatcagccatcagcatgga

SEQ ID NO: 455423 - DNA, 483 bp, Sorghum bicolor
  unsure (1)..(483): unsure at all n locations
ccggtcgaccacgcgtccgcatcattggaggggctgtacaagtctactggtaacttctgcactcagtgtgaagcagaagggtttcggaagattaccttctttcaggatcgcccggatgttatggcaaaatatacttgccgtattgaagctgataaaactttgtatccagtattattgtccaatgggaatcttattgagcagggagaccttgagggtggaaagcattatgcactgtgggaggatcccttcaagaaaccaagctacctgtttgctctagttgctggtcagctgggatgccgggaggattcatttgttacatgctctggccgcaacgtaacactaagaatttggactcctgcccaagatttaccaaaaacagcacatgctatgtattctctcaaagcagcaatgaagtgggatgaggaggtctntggtctggagtatgatcttgatttattcaacaantgttgttgttcccgattt

SEQ ID NO: 455424 - DNA, 540 bp, Sorghum bicolor
cgtccgcaaatatcttggaggttggttatgtgatgctaatgacatacttcttgaaaggaatgatttccctttttatggggaatagtccttttggcatgtctatttgttacctctattttttatggtttttgatatgtatgaagaagtgggcatagacttctgcaaaaaagataattgtttaacatagtcttctatgtttggtaaatgcctatgtcctcaatttgaggatgtcattttcttcaatgaaatgtaaacatttagttttaaatataacttaatcagccagtcattgaagtcttgtaataaaaaagaaaatttagagaagtgacattgtatggtgtgatctggcaactcagatgctgcttttgctttttatatcttatgaactgctgtttgatttacattccatttccaattcatgctttgaggtgatttggagcatacacatctggtcaagggcttggactatgctctacttcacaaagtgcggagtgaaattgaaaagaaacctgatgcagatgatgggaaggattctaaatc

SEQ ID NO: 455425 - DNA, 538 bp, Sorghum bicolor
ccggtcgaccacgcgtggcgatgcagacattcaaactgcggttgcagcaaaagaagcactagaaggacacagtatctatgaaggtggctactgcaaactgcacctgacattttcacgccatactgagcttaatgttaaggttaacaatgagcgaggtagagattataccaaggggaatgtcactccaagcagtgatcgaccttccattcttggtcctcagccaataccaaacgttggtgctgccattccaccagctccgggtagtgttgccaccaattcagtaatgcaaccaggagatccatcagttgctgtaccttctaatccttccagtgagccactcctgcaagcacctgttgtttcctcgggtggacctgcacagtaccctaaccaggccatcctacaagccccacctggtgttgctccacagtttccaggctatggtgccctgcagtttgctcaaggctcagctcaagcacaaatggtgcagccttcaagccaatgaagtcaacaaatgtcaagtcatgtaaactatcagcta

SEQ ID NO: 455426 - DNA, 548 bp, Sorghum bicolor
acgcgtccgaagatattgatgatccggaactccagagattgagatgcagggtgaattaccatgcactacgattcaagccacatatcatgaaaacaagcagtgagatagtgaacaagctccgctcagaaggccatttcatgtcaattcatcttcggtttgagttggatatgcttgcatttgcagggtgcattgacatattcaaacctcaagagcaaaaaattatgttgaagtacaggaaagaacattttgcagaaaaggaacttatccccatggaaaggaggcgcatggggaagtgccctttaactccagaagaggtaggtcttattctaagtgctatgggatttgacaatagaacacgcatttaccttgcttctggtgagctctttggtgggaaacgtttcatgaagccattcaagactatgtttccacgcgttgagaaccacagcacagttggacctggaaagctggaaaaaaatacccaagggctagcacgatcagcagttgattacatgtgttgtctcctgtctgacattttcatacccacatat

SEQ ID NO: 455427 - DNA, 517 bp, Sorghum bicolor
cgtccggcgcttgcagagacacaagatgggagttgaagattttgaacttttgactattattgggagaggtgcatttggagaggtgcgtctttgtagagagaagtcctctaagaatgtgtacgcaatgaaaaagctcaagaaatctgaaatgcttcgtaggggccaggtagaacatgtcaaagccgaaaggaaccttcttgctgaagttgatagtgcttacatagttaagctctattattctttccaagacgaagagttcttatatctcatcatggaataccttcctggtggggacatgatgactttacttatgcgcaaggacacactaacagaagatgaagctagattttatattgcagaaacggtgcttgccattgagtctattcacaagcacaactatattcatcgggatatcaaaccagataatcttttgttagatcgcattggtcacctgaagctttctgacttcggtttgtgtaaaccttttgacagcaataatttttcatttttgaatgaa

SEQ ID NO: 455428 - DNA, 404 bp, Sorghum bicolor
ccacgcgtccgagaacgcgttgaagtcaaacgaattcataactgccgcaggttaagccatgaatggcaagcatacatatcccgaactcattccctgaggaagacatttatttccgtcaagggcatatatttccaggctgaagttcaaggacaaaagatcacctggctaacccctcatgctcttcagcaagtattaaccgatgatgttgatttcaatgtgatgctctcttttctagaattctatgagactcttttaggatttgtgaacttcaagctctatcattcaataaatgtaaattatcctcctattctggatccacgtctggaagctttagctgctgagctctatgcattgtgccgatacatgtctgctggttccagaagaatgattgggaatcacaatct

SEQ ID NO: 455429 - DNA, 445 bp, Sorghum bicolor
cgtccgcccacgcgtccgcccacgcgtccgatcttgcctcaagaagctttctgggtatagcgaccgacaagatgaaattcccaatgataatgcactgtctgtctcagaacgtctgcagtgctgcatagttgcgtttaaagtctggaggagcaaccttgaggcattgaatgtggatctacaggatttcttcgtgcagctttataacctcatactggagtatcggcctgacagggatcacggcgaggtattggctgatgctctgaagacacttctttgggaaggcaaacagcaggatatgctaagagctgctgctttcattaaacgtttggccacatttgccctctcatttggctctgcagaagcgatagcagcattggtcacactgaagcatcttctccaaataaatagcaagtgtcgcaatatgctggaaaatgattctggtggc

SEQ ID NO: 455430 - DNA, 210 bp, Sorghum bicolor
  unsure (1)..(210): unsure at all n locations
gaattncaggctacgacccacgcgtgcgcaaggttgcctctgaccttcccatgctagaagaaagtttgcagcgtctggctaagtctgatcctatggttctctgtacgaggggggaatctggtgaacatatcattgctggagccgcagtgcatcatcttgagatctgcctgtaggatctgcaggacgacttcttgggtggtgctgaaaata

SEQ ID NO: 455431 - DNA, 472 bp, Sorghum bicolor
cgtccggacccacgcgtccgccctacccttcttcattccttcccctccggcgccgtcaccccatactctccgccgtcggcaagatgggccgcgtgatccgcgctcagcgtaagggtgcggggtccgtgttcaagtcgcacacccaccaccgcaagggccctgcccggttccggtccctcgacttctgcgagcgcaacgggtacctcaagggcgtggtcaccgacgtcatccacgacccgggccgttgcgcgccgctggccaaggtcaccttccgccacccgtttcgctacaagcaccataaggagcttttcgtcactgttgatggcatgttcacaggccatttcgtctactgcggacgccgtgctacgctctctatcggcaacgttctgcctgtcagggagatccccgagggtgccgttgtctgcaacgttgagcaccacttttgggaccttggcgtctttgccatggcgtt

SEQ ID NO: 455432 - DNA, 512 bp, Sorghum bicolor
ttcccggtcgaccacgcgtccggacgcttgggaacgagcgacggagacctaggcagaagcaggacaggagctcccccatggcgaccggcaacctggcgagcgtggtggtggcggtggacggcagcgaggagagcatgaacgcgttgcggtgggcgctcgacaacctccgcctgcgccccgacggcgagctcgtcgtgctccacgtccagccgccgcccaacatcgcagcggggctcaacccggcgcccatccccttcggcggccccagcggggtggaggtgccggcgttcactcaggccatcgaggcgcaccagcagtgcatcactcaggcgatcctggggcacgcgctgaagatgtgctcactaaagaatgtggatgggcagatcgtcgtattacatgctgaccttgactacttgaaagatgaagatgatactctccaagggtctcttgctgatcttaactcaataattttctgtgaaagattccatgctgcatcaggctgaatatgagct

SEQ ID NO: 455433 - DNA, 447 bp, Sorghum bicolor
cgtccggagaaatccaggtttggaaagatgttgatggtgttttaacatgtgacccaaatatccatcctaaggcaaaaccagtgccatacttgacatttgatgaggcagccgaacttgcctattttggagcgcaggttttgcatccacaatcaatgcgaccagctagagaaggcgatgtacctgttagggttaagaactcttataaccgtcgagcccctggtactcttatcactaaagcaagagatatgagtaagactgttttgactagcattgttttgaaatcaaatattacaatgcttgatatagtgagcacacgcatgcttggccagtatggttttctagctaaggttttttcgatatttgaagactcgggcatgtctgttgattgtgtggccactagtgaagtcagcatatctttgacactggatccatcgaaactatggagtt

SEQ ID NO: 455434 - DNA, 517 bp, Sorghum bicolor
cgtccggaagaaaaaggggtataagaacccagaacttacaatacaccaccacaccacacacacactacacaagccaaaacagccaagacacagatgcatctaagctggcagcaaggcgacccacatcgacctcaggaattaatcacctgggagatgggcagtcaagagggaaagccctcgagcccctgcagtgctccacatccggcgctcctcaccagccactactaaagccccagccacacttggagctgatccatcaaaaatgcagcgattgcgatgattccaaagagtccaggcacccagaataattagggagttcaccccttgcctcaccaaattagttgtagcattatcggctctctcccaccagtccaggaaggagttatcggtaggttggggagataggatctggagaccgacctgcctaagcataaaaaaccaaaactccctagcgaagacacattccaccaggagatggttgatggaatcttctgcttgatcacaaaacgggcagcga

SEQ ID NO: 455435 - DNA, 552 bp, Sorghum bicolor
  unsure (1)..(552): unsure at all n locations
cgtccggaagagggcaaaggatcttcttggggtgcattatttaagaagcagcagcggaagattcaggtgaatggcataagcgatgatttgctcaggaaagctgcaaggaagatcgatggcttctctgggagggagattgcgaagctcgtggctagtgtgcaagctgctgtttatggccggcctgactgtatattggatccacagttattttcggaggtagttgactacaaagtgactgagcatcaccaacgcatcaagcttgcttccgagggtatggtttgatcaataagaaatatttacctggaagccacaggtttcaagtagagattgggtttggtggtgagtgacaatcacctcccactgactttaagtagtagtgtatgcatgttttggatcccgcaggacattttgtagacggagggtctattaccaccacttttgttccatgtgccttgcctgcagcaagggttggtcccggatggacatccatacaggcctggtcaactgaatntagtttactcatttagtaggtttgcaccgtgttttaacttt

SEQ ID NO: 455436 - DNA, 548 bp, Sorghum bicolor
  unsure (1)..(548): unsure at all n locations
cgtccggngcttcaaggacctcgagggcgtcgtcgcctacatgcacggctgggaccgcgacggccaccccgtctgctacaacgcctatggcgtcttcaaagacagggacatgtacgagcgcgtcttcggcgacggcgaccgcctctcgcgcttcctccgctggcgcgtccaggtcatggagcgcggcgtgcgcgcgctcaccctcaggcccggcggcgtcaacgccatcatacaggtcaccgacctcaaggacatgcccaagcgggagctcagagccgccagcaaccagatcctctccctcttccaggacaattacccggagatggtggcgcgcaaggtgttcatcaacgtgccgtggtacttctccgtgctcttctccatgatctcgccattcctcaccgagcgcaccaagagcaagttcgtcatcgcgcgcgagggaaacgtcgccgagacactctacaagttcatccggccggagctggtgccggggcagtacggcgggctgagccgcgccggcgacctcgagaacggaccaccaaagccggcgt

SEQ ID NO: 455437 - DNA, 540 bp, Sorghum bicolor
cgtccgcagaatcagctacatgtgttgccttcagatgatctgcaatttgttcatagaggtcactctgcaggaacagagaagccaatttttgagaaagttggcagtggtgcaataccatcagcggatgtgtgcatcgaggatgattttgataaaaggtttcaagaagatcttgatgaagcaatgcgccaaagccttggatacgatgcttatcctgctggtacgataagcacttcgaatgggacagaagtgtatgggactggccttaaaaatgctgctggtgaatacaattgtttcttgaatgtgattattcagtcattatggcatataaggcggtttcgagacgagttccttaaaacatcatcactgcacaagcatgttgaagatccttgtgctgtctgcgctttatatggtatcttcattgacctgagcaaagcagccaagggacaaggagaagctgttgcgcctacttcattgaggatcgctttgagcaaatcctacccgaacagcaaattctttcatgagggacagatgaatgatgca

SEQ ID NO: 455438 - DNA, 534 bp, Sorghum bicolor
  unsure (1)..(534): unsure at all n locations
cgtccggtacagacatatacccttgctacacggcttcctgataacactagcagttcaggttcaggccggggttacgtacaacccattatacatttcagtccttcagacacaatgttgctttggaatggagtgctgtgggatacgaggcaaccaactcctgttcatcagtttgaccagttcacagattactgtggtggtggattccatccagcaggaaatgaggtgatcttaaattcggaggtgtgggatcntgagaagtttaagcttttgaggagtgttccttccctggaccagacagtaataaagttcaatggaactggtgatgttatctatgccatcctgaggcgtaatcttgaggacgtgacagcatccatcaatgctcgtagggtcaggcaacctcttttccctgcattccgcacgattgatgcggtgacttactcagatattgcaaccgtccaaatcgaccgctgtgtacttgatcttgccactgagcccaatgattctcttattgggggggtggtatggacgatcacc

SEQ ID NO: 455439 - DNA, 481 bp, Sorghum bicolor
ttacaggatcacgtagattattacggtttgtcaaaatgttcctccaagcctcacgagacggcgaaacaaaaaggccgaagaaagaggtaaagtacatcacaagaacgattctgcatctgtatcccaatgctgaactaattctttggtcccccagtggaatcatcttgccaggttgcctgccattgcttgtcatagaacgtagtctcgtcgataagcttcttcagtgattcaatgtcctcatttttcctgattagcagtacaccagcgacggcaacaaacagcagcgttttgcagaagaagttgcccatttggtcaacaaggcccacgcccgtcaagctatccacaaagtatgccatgaagaagccaaccatggcagcgcgaccatttagcttctcggcttcaggaaggtggaatcgcttcatccatgcccaccatgggataattgaagtgtcgaagacgacagcctcgtctgtgctagtgg

SEQ ID NO: 455440 - DNA, 540 bp, Sorghum bicolor
cgtccggcttcactgagaacaccaagcaaactgaagattaatagcagaacctcctcatggccgagaaggaaccttgacagtggactggcaaaagttgctgcactggagatccttgagaggtggacagtggatcgctctgagttgctcatcggccatagatttgcatccggggcgtatagccgattgttccatgggatctacaaggagctacctgttgctgtgaagttcatcaggcagcctgacgatggcgaggatgacgaattgtctgctaagcttgagaagcagttcacttcagaggttaccattctggcaaggctccaacatcgtaatgtcattaagcttgttggggcctgtaattgcccgccagtcttctgtgtcatcactgagtttttgtcctggggttctttgagggctttcttgcgaaagctggagcgtaaaactcttcctttggagaaggtcgtttccatcgctttggatatcgcacgtggcctggaatatattcacctcaaaggaattgtgcaccgtgacatcaaacccgag

SEQ ID NO: 455441 - DNA, 541 bp, Sorghum bicolor
cgtccggaacgccgccgcccgtggctaggttttcgtcgggcccttcgccggcgacgagcatccaccagggggacgactgagctgagctgagcctgcagtagcgagagttgtcgaggcactatgttgttcttctcctacttcaaggagctcgtggggaaggaggtgacagtggagctcaagaatgacctggcgatccgcgggacgctccactcggttgaccagtacctcaacatcaagctggagaacacccgagttgttgaccaggacaagtatccccacatgctgtcagtgcggaactgcttcatcaggggctcggtggtgcggtacgtgctgctcccgcaggacggcgtggacatcgacatcctccacgacgccaccaggagggaagcgcgcggaggctgatcctgatcctgatcggcaccgccggccctcacctgctgcttcgttcccggggaggagatttgcctttgcccccctgatcagattgtacgaagcaatgcatgtatggtgggtgtgttgttagacagatggtgatctgagt

SEQ ID NO: 455442 - DNA, 439 bp, Sorghum bicolor
cgtccgcggacgcgtgggggctactacaagggctgcgacgacgacaagcgcaagcagaggccgctcacgcccgccgcccaggccgagcaggagcaccgcaagcgcgtgctccgcgagctcaattccctcatctccggcgccgccgctgcccccgacgaggccgtcgaggaggaggtcaccgacaccgagtggttcttcctcgtctccatgacgcagtcgttcctcaacgggtccgggctccccgggcaggcgctcttcgcggggcagcccacttggatcgcctctggcctctcctccgcgccgtgcgagcgcgcgcgccaggcctacaacttcggcctccgcaccatggtctgcttccccgtcggcaccggggtgctcgagctcggctccaacgacgtcgtgttccagaccgccgagagcatggccaagatccgctcgc

SEQ ID NO: 455443 - DNA, 473 bp, Sorghum bicolor
  unsure (1)..(473): unsure at all n locations
cgtccggngctatccatccatctcttgactttgacaatgcatatggagtaaataggatgaagccttcactgaacaagcttcaatctttccatattggaaagaaccacagtttccgcgtgccaacaagcccgagtaaagtaagtatggattatcattctgacgtgaacagccaagtatggcatagcaggcaccccgatccgggagcccaaagggcccggcattgtgaggtcaatgcagctgggagcagcccggattatgtgtttacagcgaggcgctactatactggagctcagttgccgccaaatctcccgagaacaaaatctgtaccccccctaagtgctgtcgacgcctgaaatgctcttgccctgtaaattttatagagtgtacatctgttttggttctttttgtatccattatgaaacatagtngttagcaggagacttgatgtgacgaggcttgagctgttgtaaatt

SEQ ID NO: 455444 - DNA, 528 bp, Sorghum bicolor
  unsure (1)..(528): unsure at all n locations
cgtccgatttgcggtttgctattccaacaaggctctctttgctctcctatacttcttcagctttgtccttgatggtgtggatggttggttcgcacggaagttcaatcaagcatcaacatttggagctgtgttggacatggttacagatagggttagcactgcttgtttgttggcccttctctcccagttttacagacctggtttagtcttcttgatattgcttgggttggatattacgagccactggtttcaaatgtacagttctttcttgtcaggtaagactagccacaaggatgtaaaacacacaggcaattggcttctgaaattatattatggatacaggccattcatggccttctgctgtgtttcttgcgaggttttatatattatcctctttctctttgctgatgagaagtcaacaagcttgcttagtgtatgcaaaggtgtcctgaaccaaaantcctgtgttgtcttggtgtttatttccactctagttggctgggcagtgaaacaagttaccaacgtcat

SEQ ID NO: 455445 - DNA, 525 bp, Sorghum bicolor
cgtccgggcaggcacaggcaatggaagctgataaagaattctacagtcggatacgcatacctgatgaagatgattcatgtagtcagaagcagacatgccgtagttcagcctcacagggtgccgatagcaaacctgcatctgagcggcaatcaagaggtgtggagcatataaaacagggtctcgtgaattttatagcctcactgctgatgccattatatagaggaaaaaagatcgaccgagaagggtacaaatcaatcatgcgcaaatctgttaacaagatcattgatacatgctcagaaggagagaaatcgatgactactcttgagtttcttgatgctaaaaggaaaattaagattgaatcctttgtgaacaaaatggttgacaagcatttgcatgttgttagcaagtctgccaaaccttaagattcacatgtgtagtgaggtgtttgtgcaaaggaatctactctaaaacaccaagctatcaatcagtgattggtgatccaagtgaactaaaacctcacttcag

SEQ ID NO: 455446 - DNA, 543 bp, Sorghum bicolor
cgtccgcgcgctgtcgggggccatccccgacgagctcaggggcctgaagcagctccaggagctgcagatttcagggaacaacctcacgggcgcgctccccggctggctggcggggctcccggcgctccgcgtgctgtccgcctacgagaacgcgctgtctggcccgatcccgccggggctggggctgtcgtcggagctccaggtgctcatcctcaccttgaatcgcctcaacggcaccatccccgacgccatcggccggtgccgcggcctctccaacgtgcgcatcggcgacaacctcctctccggcgccatcccggcgtccgtcggggacgccaccagcctcacctacttcgaggccaacaccaacgacctgtccggcgggatccccacgcagttcgcgcgctgcgccaacctgacgctgctcaatctggcctacaatcgcctcgccggcgaggtgccggatgttctcggtgagctcaggagcctgcaggagctcatcgtgtctagcaacggcctcggcggcgagttcccgagatcgatcct

SEQ ID NO: 455447 - DNA, 545 bp, Sorghum bicolor
cgtccgcgctgcgcctgcgcagtggcggcggcctccgcatccacgccaaggagaagctgcccctcggccacagctcgctgctgcaggctcatgcggagctcgacctccacacaagccccgccggagttactgccccgagttacctcgctctctttgtcaggcacttctacccccagctatcagccaacctcggagctggcgtccagttgcacaacggcgatgacctcacctacagccttcgcgccaagaaggccgtcctcttcagaccagacaatggctttctaggcctaaacctcaaaggacgcctacttatcgacaaagagttcaagccgacaaagacatctggagccgttgaattggcctggaccatacttgacttcaaacagggccaagatgtaaggctcaaagttggctacgaattggatgacaaggtgccttatttccagcttagagaaaacagttggacgctgaatggctatatggatgggaaattgggatgttagattgaaatgtgatgagaatccacttttcagtagcattattat

SEQ ID NO: 455448 - DNA, 533 bp, Sorghum bicolor
cgtccgcgtgatggcgcagtcggacccgccctccacgggcgcgttccacccggacgtggcgccgcagctgcagcagatcctggcgttcctcagccggaccggcgcgcccttcatgatcaacccgtacccgtggttcgcgtaccagtcggacccgcgcccggagacgctggcgttctgcctgttccagcccaacgccggccgcgtcgacggcgggtccaagatcaggtacaccaacatgttcgacgcgcagctggacgccgtcaagtcggcgctggtgcgcgccgggtacgggagcgtggacatcgtggtggccgagacgggttggccgacgaaaggcgacgccggggagcccggcgccacggcggagaacgccagggcgtacgtgtccaacctggtggcgcaccttcggtccggcgccggcacgccgctgatgccggggaagtcggtggagacgtacctgttcgcgctctactactaggacctctagcctggcccgacgtcggagcgctcgttcggtctgtaccacacggacc

SEQ ID NO: 455449 - DNA, 530 bp, Sorghum bicolor
  unsure (1)..(530): unsure at all n locations
ccttatgcttctagggattcaaggcaatttggagccgtgccttatggtctcattacagggaagatcttttgtcgggtttggccactggagggctttggtccaattgattcaaaccagtcttaacaggggtaatttagcttctttgttgcatcttgttttctaaaggtaactggttctatctgatcgtcatttgtgctaatttctttgttgtccatttctgaccacagcagatggacccatattattgcttgtgcccagagatttaataacgaactcagggcccttgagcttgaaagctttcgatctactagagcacattgctacagagaagcagattttatcttgacgtctaatgttttgagttttattgtatgtgtagtaacagttttggttatcagacctgaaaccccaatcagcacatgttctgatacagtttcttgtgctaatgcgggttgtaactttactgccagtggatcctgaaaacctgattgattcatgtaaattgaggcacatnttgtttgacttctgag

SEQ ID NO: 455450 - DNA, 535 bp, Sorghum bicolor
  unsure (1)..(535): unsure at all n locations
cgtccgtaaggttgctaaggagcacaagaagccttggttatggtgggactatgttactgattttgcgattcggtgcccaatgaaggaaaagaagtacacaaaggagtgtgctgaaggggttattaagtcgcttggccttgatcataaagcaatagataagtgtattggtgatccagatgctgatgaagaaaaccctgttctgaaagctgaacaagatgcacagattggcaagggctctcgtggtgatgttaccatcttaccaactctggtaatcaacaatagacaatacagagggaagcttgacaaaggagcagttcttaaagcactttgtgctggttttaaggaaaccactgagccagccgtttgcttgagtgaagatatacaaacaaatgagtgcctagagaacaatggtggctgttggcaagataaggctgctaacatcactgcatgcaaggatacnnttccgtggagagtttgtagtgtncagtgtgaaaggagtaaatttggtgggatggtatactcatnggaagctttc

SEQ ID NO: 455451 - DNA, 525 bp, Sorghum bicolor
cgtccggtaccgcgggacgatgcccggcggggagtgcgtggcggtgaagcggatcgtgtcggcggagggcggagggttccaggcggaggtggagacgctgggtcggatccggcaccggcacatcgtgcggctgctggccttctgctcggggcccgaggcgaagctgctggtgtacgagtacatggtgaacggcagcctcggggaggcgctgcaccgtcgtaacgacggcgatggcagcggcgtgctggcgtgggcgtcgcgtctccgcgtggcgacggaggcggccaaggggctgtgctacctgcaccacgactgctcgccgccgatcctgcatcgggacgtcaagtccaacaacatcttgctggacgcccgaatggaggcccacgtggcggacttcggcctggccaagtttctggtgggcggcaacgacgccaccgagtgcatgtccgccgtcgccggatcctacggctacattgcaccagagtacgcgtacacgctgaaggttgacgagaagagcgacgtgta

SEQ ID NO: 455452 - DNA, 537 bp, Sorghum bicolor
cgtccggtattcactcacacggcagcgccacctgctccgcggccccatcggcgatctgctgcgcgctccgtcccagtcccaggcacgcggcggcgggctgcggctgcggctgcttctgcttcgaggcgaggctgttggttcttggcggccgtgcttgacccctgcggggatccgactccactggtgctacttctggatttctcaagcttgtttcgttcggggccatcatcagacgagagggagaatcagcagggagtgacaagaagatgctgaagaaactgctgccaaagactaagagcaagaagaagaaggaggctgcctcctctgccatacccacgttggatcggctccatgagaccctagaaatgctggagaagaaagagcgtttcctccagaagaaatgttctgcagaaatcgaaaaggctaaggattatacaaaatcgaagaacaagaatgctgcaattcagtgtctaaagaaaaagaaactgtacgagacacaaatcgagcagctatcgaattttcagtttcgagttcatg

SEQ ID NO: 455453 - DNA, 520 bp, Sorghum bicolor
acgaccgacgcgtccgacgctaccgacaactcgtgcgtgatcaacctgatcattagcaagaagccgagatccaggccagagaagcgagcactagcgacagcacacatacatcaacgtacagctatggctcggcccgcggcgtggactccgcctgctctagccgtcgcagaagagccctctgcctcgccggtgtttgagcccggggagctcaagtgctggtacttgtaccgcgcgggcatcgacgagttcgtagacacctacctctttctctacatcaccatcctcaccgtcatgggcgtctacaagtgcaactccaagtgcgccaccggcggcatccagggcatcgcctggtccttcggagggatgatcttcgcgctcgtctactgcaccgccggcatctccggagggcacatcaacccagctgtgactttcgggcttgtcttggacaggaagctgatcctgactagggccatcttctacattatcatgcatagccatggtgccatctgtggagctggag

SEQ ID NO: 455454 - DNA, 521 bp, Sorghum bicolor
cgtccggagagaaaccccggctgccccccggcgaggtagagagagaaaccaaggccaaggagcaccgcccccctgttcgtccccagcaggagagggagatagagagagagagagagaaggctgtgggaaggaaagaagaggcggtgggaaaggagtgcgacatggagaggccggcgccggtgaggaagtcccacacgtcgacggcggacctgctgatctggccggagggggcgccgcaggaggctcctgccggggccacgccgccgtccaaccgccggccgcaccagccgtcggaggcgctcaagaaggtggtgttcggcgggcaagtgaccggagaggaggccgagagcctcaacaagaggaaaccatgctctgctcccaagtggaaggagatgacaggaagcggcatatttgcagctgggggcgaggctgaagaagatgaatctgccaatgcctctgcaactcccatccgaacagctccaaagaattatcaggcaattagtactataagccacatttca

SEQ ID NO: 455455 - DNA, 517 bp, Sorghum bicolor
cgtccggctcatcgagggcatcgagtacgacccgcagatcaacaacaagttcgacgtgatcatcaacgtgcccaaggaggacgccggcaaggtggggcccaaggactgcgagtacgccggcagcttcaccgccgtgccgagctccaacgccgccggcgggacgctcgtggggaaggtcacgctcttcatcgacggtgtgctggccgacctcgggctcaccaacgagagcgccgtcgacatcgtgctggttcctcacaccgacgaggagatcaagatctacctgccgccgaccatcgagaacgcatgagaacgcattgctggctgttatcttcgccgcgccgccgccggccggtgactgaacagcggctgcgatttctttttaataaggtttaaaaataaattagtaaaatgttctactcctgccgtttgattattgagtttgtaagtttttaataaactggatgaaatgaaactccggcacattgcgccgggacagtaatatatggaatgcatgatt

SEQ ID NO: 455456 - DNA, 460 bp, Sorghum bicolor
cgtccgatgctacccacagctagtgtctgatcaagctcatcatttccaagaagccgagatccaggccagccgatcgagcactagcgacaacacacatccatcaacgtacagctatggcgcggccggcggcgtggactccgcctgctctgtcgcctgcggtcgccgtcctctgcctcgtcggccggtccacctccgaggagttctggctcgacgagttcaccacggacggcgacgtccgcaaagactacgacggttctggccggaaggtggcgtcgctggtcctcgaccagagttctggcgctggcttcaactccacccgcaagtacctattttgcgagttcatcgtcgagatgaagctcgtcgccggcaactccgtcggcactgtcaccttcttatacctgacgtccggcgagggcgacttgcacgacgagatcgacatggatgtcatggtcaactccag

SEQ ID NO: 455457 - DNA, 530 bp, Sorghum bicolor
cgtccgagagtaccttgagcctgttcaccgctgtcgccgcctcacagccacagcatccatggccgacgcagctcgtctcttcctgctggtggcggtgaccgccgctctcgccggccgctcagacgccgcgtggtgcgtgtgccgcacggacctggcggacaccgcgctgcagaagacgctggactacgcgtgcggcggcggcgccgactgcaagcccatcctgcagaacggcgcctgcttcgcgccggacaccgtcaaggcgcactgctcctacgccgtcaacagcttctaccagcgcaacaaccagaacccgcaggcctgcgtcttctccggcaccgccacgctctccaacaacgaccccagcggcaatggctgcacgtaccctgcgaccccaagcgccgccgcgacaagctcacccggcgtgtacagccctcccacaatgggtccgtcagccctcaacgacaacagtggtgctgctggcgtcctcccgacggccgccggactggccacacggctggtgatcctagcct

SEQ ID NO: 455458 - DNA, 450 bp, Sorghum bicolor
  unsure (1)..(450): unsure at all n locations
cgtccgcccacgcgtccgcggacgcgtgggctcccacaaccacctctccggcggggtgcccctcgagctcggtcgcctcccggccaccgtcacgctcgacctccgcttcaacaacctctcaggcgagatcccgcagtccggctccctcgccagccagggccccaccgcgttcctcaacaacccggggctctgcggcttcccgctgcaggtcccctgccgcgccgctcctccgtcgtcggcgtcgtcgtcgncgtccctacctcctccgntgtcctctggcggcggcgcgggcggtgcacggcagccgatcaagaccagcctcatcgagctcatctcggtggccgacccggtggccgacgtgttgattctaagaaagccagtctcgcagaatgtcacgcagcttgaactttgtggaaaaaacgcagtataacagcaccgttgctaagtgcc

SEQ ID NO: 455459 - DNA, 442 bp, Sorghum bicolor
  unsure (1)..(442): unsure at all n locations
cgtccgcaagggcgtccgctagctgatcaccctggtgtcaagaatggccgtcctccgggtgctctcactgtcccccgtgaccttcttgatgcatccacagttgctgaggccatcagtgtcatctcatgctggtacgaagacaagaccgagtggggccaccgtgttggttggatctatggctcagtcacagaggatgtggtcactgggtaccggatgcacaaccgtggttggaagtctgtgtactgtgtcaccaagcgtgacgccttccgcggcaccgcacccatcaatctgactgaccgtctccaccaggtgctccgttgggctaccggttcagtggagatcttcttctcccgcaacaatgctctgctcgcaagccgcaggatgaagttcctccaaaggatcngcctacctaacgtcggcatctacccattcacgtccatct

SEQ ID NO: 455460 - DNA, 518 bp, Sorghum bicolor
cgtccgatgcattggagggtggcctgcttcttgcaatgtttaacttggctcatattgctgaagagtactttacaagtaagtcaatgtttgatgtgagggaactgaaggaaaatcacccggaatttgcgctgttgttagaaacaagtggagaagaatctgtacagttttcaaatctaagttacaccaaggttcctgtgcacgatcttgaagtgggttctcatatcttggttagagctggcgagttcttgtattctttaggctgtgcctgttgatggtgaagtctaccaaggttcatcaactgtcacaattgagcacctaactggtgaaacaaaacctttagaaaggacagttggagatgccataccaggtggtgccaggaacttggaaggaatgatgattgtaaaggtgaccaagtcatgggaggattcaacactcaacagaattgtccaattgactgaagagggccagctaaacaagccaaagttgcaaagatggcttgatgagtttggagagtacta

SEQ ID NO: 455461 - DNA, 425 bp, Sorghum bicolor
cgtccgcccacgcgttcgccagaatcgtttaagcttgattatgtttcaataggaaatcaagaatgttggatgctgtactacagaggaaattaccaaaagttttactctgcgattaaatctgcctacccagacatcaacattatatcaagttgtgataggccaactatttcaccatccaaccctgccgatctttatgatgttcatgtctacacctctttgactaatatgttttcaaaaactagtatgtttgacaacacaccacgtggagcaccgaaggcaattgttagtgagtacgctgtgactgggaatgatgctggcaaaggaacactggtagcagcacttgcagaagctgcatttctcattggattggaaagggacagtgatgtggttgagatggcaagctgtgcacccctttttgtaatgac

SEQ ID NO: 455462 - DNA, 521 bp, Sorghum bicolor
  unsure (1)..(521): unsure at all n locations
cgtccgcgacgaatgtccgccacgtctcccacgtcacattcgaccgcttccacggcttcctcggcctccctagcgagttcgaggacgagatgccctgccgcgtgcccagcgccagtgccagtgttttcggtgtctcggctgaatcaatgcaatgcacgtatgatggcaagggaaattcagtccccacgatattgcttctcatgcaggagaggctgtatgcccaggaggggctgaaggctgagggtatctttcgcatcaatccagagaatgaccaagaggagcacgtgagggatcagctgaacaaaggagttgtacctgaggacattgatgttcactgcttggccagcctgattaaggcatggttcagggaacttccaggaagtgtccttgatggcctctcccctgaacaagtgcttcaatgcaattctgaangggagttccttgaccttggntcgagttgcgccccactcaggcagcactcctcaattgggctgtcgagctgatgtctgatgtgtcgaaga

SEQ ID NO: 455463 - DNA, 449 bp, Sorghum bicolor
cgtccgagcgaacagaggcgtgcaggggagtctgacggggatcagcatcggcgtggtgaccccgatggacaaagtgtggcgcagcctgcaggcgttcggcgacatcgccttcgcctactcctactccctgatcctgatcgagatccaggacacgatccgggcgccgccgccgtcggagtcgacggtgatgaagcgcgccacggtggtgagccgtgcggtgaccacgctcttctacatgctgtgcggatgcatggggtacgcggcgttcggcgacggcgcgcccggaaacctcctcacgggcttcggcttctacgagcccttctggctcctggacgtggccaacgccgccatcgtcgtccacctcgtcggcgcctaccaggtctactgccagccgctgttcgccttcgtcgagaagtgggccgcggcgcggtggccggactcggcgttcg

SEQ ID NO: 455464 - DNA, 472 bp, Sorghum bicolor
cgtccgcccacgcgtccgcccacgcgtccgcccacgcgtccgcgctcctgcgcgcggcgccgctggggctgtgcgtggccgccatgaccgtcatgctccgtgaccagcagagcaacgagtacggcaccgtcgcctactccgaccttgggggctttaagtacctcgtctacgccaacggcctctgcgccgcctactcgctggtgtccgcgttctacacggccgtgccgaggcccgccaccgtatcgcgctcctgggtcgtcttcctcctcgaccaggtgttcacgtacctgatcctggcggccggtgccgcggcggcggagctgctgtacctcgcctacaacggcgacaaggaagtgacgtggagcgaggcgttgcgcgttttcggcagcttctgccgtcaggcgcgcacatccgtagccatcaccttcggcaccgtgctctgtttcatcctcctctccctcatcttctcgta

SEQ ID NO: 455465 - DNA, 475 bp, Sorghum bicolor
  unsure (1)..(475): unsure at all n locations
cgtccgcttcctcgccacgctcaccgcgcacccgtccctccgcgccgccgtcgtcgccgacctactcgccgcccgctcccgcgaccccgcctgcgtcggcttctcccactgcctcctcaactacaagggcttcctcgccatccaggcccaccgcgtcgcgcacgtgctctgggcgcagcaccgccggccccttgcgctcgcgctccagtcccgcgtcgctgacgtcttcgctgtcgacatccaccccgccgccgtcgtcgggaagggaatcctcctcgaccacgccaccggcgtcgtcatcggtgagacggccgtcgtcggcgacaacgtctccatcctccaccacgtcaccttgngtgggactgggaaggcggtgggcgaccggcaccccaagattggggatggcgtgctgattggagcaggggccacgatccttgggaacgtgaaaaatggtgccggtgctaagaatggggcc

SEQ ID NO: 455466 - DNA, 562 bp, Sorghum bicolor
cgtccgcccacgcgtccgcccacgcgtccggttctgtgggcgcgtccggggggccagggtgccggaagcacgtggcgaaggtcacggagtacggcgcggtgggggacgggaggacgctcaacacggaggcgttcgccaaggcggtggcggacctgtcgcggcgcgcccgcgatggcggcgcggcgctggtggtgccgccggggaagtggctcacggggcccttcaatctcaccagctgcttcacgctctacctcgacgagggcgccgagatcctagcgtcccaggacatgaaccattggcccctcatagctcccttgccgtcttacgggagaggaagggacgagcctggcccaaggtacatcaatttcattggaggatccaatctcactgacgtcatcatcacaggtaaaaatggaacaatcaacgggcaggggcaagtctggtgggacaagttccatgccaaggagctcaagtccacccgtggccacctcctagagctcctccactctgataacatcatcatctccaatgtcaccttcgtcgatgcgccatactggaacct

SEQ ID NO: 455467 - DNA, 563 bp, Sorghum bicolor
cgtccggacctgccttcctgctagtagcctctacgcgctcagtccgcatcatcctcttctggggctgccgaaccagcacaagcttctgcagatgccgttggtccaggagcaggctgctgcgaataatcatggcgtgatgctctattcggaccaccaccaccacggcggcggcctcctgtacccgctgcttcttcccggcatcccgttctgccccttctccgccgccgccgacgccgccacctgcgataagaccaccaccaccggcggcttcgcggcgctcgatgccggcgaggcgggcacctcagtggcgaaagccgccggcgagatcgctagtaccaccaccacatgcaacggcccaagttcctgcaattggtggaagggcccggcggcggcgggggagaaaggcggacggatgaaggtgaggaggaagatgagggaacccaggttctgcttccagaccaggagcgacgtggatgtgctggacgacggctacaagtggaggaagtacggccagaaggttgtcaagaacagcctccatccaaggagctactaccggtgcaccc

SEQ ID NO: 455468 - DNA, 504 bp, Sorghum bicolor
cgtccgcacgtttctgagccgtaatggaattgaatgcaatgatcttgaaaaattattcatcaaagaccaatcactgagtaatgaaaatgtggacaagattgttgggtacgcagtgagttatcaccttaagcacaataaaattgagacgtccaactccaaggatgctaaacttgtactcgcaagtgaaagccttaagcatgggctcaacatgctgcaaagcatgcaaagtgataacaagagctccaaaaaatcactgaaggatgttgtcacagagaatgaatttgagaaaaggcttttggcagatgttataccacctaatgacattggagttacctttgatgatattggagccctggagaatgtaaaggacacgttaaaggagctggtgatgctccctttacaaagacctgaattgttctgcaaaggccagttaacaaagccttgcaagggaatattgcttttcggacctcctggcactgggaaaactatgcttgccaaagcagt

SEQ ID NO: 455469 - DNA, 483 bp, Sorghum bicolor
cgtccggtaaaaaatccccttctctgtactcctgcatctcgaccgcaccggcggcggtatcaacgatggtggagctgctgggccggcggatcggggtggcggcggcagctgccgcgttcatcgccctcgcggcgttcggatccgcctcgtcctcgcccaaatccttcgtgaagtccaccgtctccgcccacgacgttgtcatcttctccaagtcatactgcccgtactgcaaaagagcaaaggccgtgtttaaggagcttcagttgaagaaagagccatatgtcgtggagcttgatcagcgagaggatggttcggagattcaggatgccttacgtgacatagttggcaggcgtactgttcctcaagtttttgtccatggaaagcacttgggaggctctgacgatactgttgacgcttatgaaagtggaaaactggctaaacttctgaacaattgagtcaagggatatctttgagtgacattct

SEQ ID NO: 455470 - DNA, 441 bp, Sorghum bicolor
  unsure (1)..(441): unsure at all n locations
cgtccgggtagctacagcaagaagatggttgcgctccttcgtccactctccgccgccgccttcctccgcgtccccgccgcgccgctcactggttccgcagtcgccgctagtgccgtaggaggcaggcggtggagaagcgtgagggcgaacgccggcgggggctggctatccgggctgctgggcggcaagggcggcggcgcgtccacagcgatggcggtgacgccggggaccgtgaaggccggcgaccccgtcctgcacgagcccgcgcaggaggtggcgccggnggacgtgcggtccgagaaggtccagggcatcatcgaccggatggtcgacgtcatgcgcaaggctccaggcgtcggcctcgccgccccgcagatcggcgtcccgctcaggattatnngtctcgaggatacgcaagagtacatcagctatgcacccaag

SEQ ID NO: 455471 - DNA, 540 bp, Sorghum bicolor
  unsure (1)..(540): unsure at all n locations
cgtccgcgacatcgaacgcgccaagggcctctcccccgagcacctcgtcgccgcctgggatgactatcattggaaggggtcatataggtgcatctatgaaagcgaagctttaccatctcttggaacaaagatcagattcatgccgacactttgttattcctttgtggaagggaagtggatacaccactatgttcatgcaagtccagatgccatacattatcttcacaggacttgaagactataaagcacgaggcactcaagcaagtccttactacacagtcactcattacacagagtttgcagagaccaaggacacggtacttattcgaggagatgttgttttcaccagcaaactaactgattcagaggcaaagactcttctagagacagctcactcgttctacctgaatgatgtgaggtacagactcgtggagcgattcaacaaagagacccatgattntgagttccgagatgtcccttaagtgcttgatatgccaaccatgtgacctagtttaattctcaatcaacaagccaatattt

SEQ ID NO: 455472 - DNA, 382 bp, Sorghum bicolor
cgtccgctcccgatgcacagaggagttccgcttgaggaaagccaagaatgaccagctcaaggcggatgccaaggcccgtggtgaggtgatcagcaccaagaggcaacctgtgggacccaaacctggcttcatggttgagggtgctacgcttgagacagtcactcctattccttatgatgtggtcaatgatctcaagggtggttactagagaggattcttgtaccttgagcagttcaagtgagctggcataaatacttatctgaatctttttgataactgcgtagttcttttgttctggttttatgaacctattaccaatgtggctattgctagttaacgttaaagattttgccatggttgagtgaaaaaaaaaaaaataaaa

SEQ ID NO: 455473 - DNA, 550 bp, Sorghum bicolor
cgtccgcccaaatttcccctcgcggagccacgcggatcgagtccccgtcgaattcgcctctgccacctgctcgatccggtggccgcgaactcgccgctgtcggatcgtttccgccggggtgattaagctacgggatttgtagagatctaggcgagccgcgggcagcagccatgagcgaggtgttcgagggatacgagaggcagtactgcgaggcctccgcctcgctctcccgcaagtgcaccgctgcctccgccctcgatggagagaagaagaagcagaagctgtccgagatccaatccggcatcgaggaagctgaatcgctgattcggaagatggacctggaggcaaggagcctacagcctagcataaaagctggtttgcttgcaaagctgagggagtataaatctgaccttaacaacgtcaagagtgagcttaagaggatatcagcgcccaatgccaggcaggctaccccggaggagctcctggagtctggaatggctgatacttctgcgggtctactgatcagaggggaagattgatgatgacaact

SEQ ID NO: 455474 - DNA, 554 bp, Sorghum bicolor
cgtccgcccacgcgtccgcccacgcgtccgcccacgcgtccgtgagaaccttgtaacctgggcccgtcctctactaagccataaggaaggcctggagaagttaattgatccttctctggatggaaagttcaactttgacaatgtagctaaggtggcatccattgcttccatgtgtgtgcacacggatccatcacagaggccattcatgggtgaagttgtccaggcactgaagcttatctacaatgatccagatgaggcttgtgatgattcctacagtccaaggaattcatctgatcaagacggtgactatgaaggagacctagtctttgagagtggaagctgggggtttgaggcctctgggtgtctagactaccggaattccttaccgtttgttactatggactacagttctggccgaatagaaggaccgcatgaccctcgcgcagcattgtcagcgggaccccatgtccagtcaccagtgctgcagaatagatcaggccccttgcggatgaagaaaaagctggcctccttttaccgctctagaggcagcatta

SEQ ID NO: 455475 - DNA, 556 bp, Sorghum bicolor
  unsure (1)..(556): unsure at all n locations
cgtccgcccacgcgtccgcggacgcgtgggcttgccgcggccgtcgatggagaacctccacctcgccatcgcccaccgcccgcctctgccggtaccggcggcgggccacctccgccgccgccacctccacctccaccacctccccgccccactctcccttcccagcacctcccactccctttcctccccgcatcatcaccgccttactcccacccttcgccgccacctccgcccgcctcttcgcgtctcccagacccctgatgctaaccccgagcctgagcctgagcctgagcccaagcccgagcccactggcgcgaagctagtgccgttcgtcatctccatcgccgtcggcctcgccgtgcggttcctcgcgccgcggcccgttgaggtgagcccgcaggcgtggcagctcctctccatcttcctctccaccatcgcggggctggtgcttggcccgctccccgtcggcgcgtgggccttcctcgggctcaccgncgccgtcgccactcgcacgctccccttcgccgccgccttctccgccttcaccaacgaggtc

SEQ ID NO: 455476 - DNA, 523 bp, Sorghum bicolor
  unsure (1)..(523): unsure at all n locations
cgtccgcaacgacacagcatcacgattcttgcacacaacacagtacaagtctacagcgatcagcgagcgatcctctgattctgaagccaaacaagctaatctccaagaaagaggaggacatggcgggcgcagcgaaggcgtcgtggatggtggcgatgagcgtgggcgccgtggaggcgctcaaggaccaggcggggctctgccgctggaactacgcgctgcggtccatccaccaggccgccaaggccaacgctcccagcttcgcgcaggccaagaagctggcgccggcgccggcggagaggaggcgggcggacaaggccgcggagggagggttgaggacggtcatgtacctcagctgctggggccctaattagtcgtcataggtcttagcctcttaggtcctcttgctctngttccagctttgggtttcagcagatgagcgagcttggcggccgattcgtcctcctgactgtaaataataaagagcaaatgatgatggtggaaaagtctgcagtcatccaag

SEQ ID NO: 455477 - DNA, 533 bp, Sorghum bicolor
cgtccggcatcttgtgtatgatctgctactgaaatttattggctcctcatctctggatacaaaggtaggaaagaaatattttgaccacacattcatcgtgaagctacttgaactgtttgattctgaggatccaagagaaagggattgcttgaaaacaatattgcatcgaatctatggaaagttcatggtccaccgtcccttcatccgcaaagcagtgaccaatatattctaccactttgtgtttgagactgatcgccataatggtattgctgaactactggaggtttttggcagtgttattagtggttttgcattgcctctgaaggaggaacacaaaatctttctttggagggttctaattcctttacacaagccaaaatcagttggtttatatctgcagcagttaacctactgtgtgacccagtttgtagagaaggaaccaaagcttgcaagttcagtgatacttggcctgctcagatactggccaataacaaatagccagaaagaagtatgtttctgagtgagaatggaag

SEQ ID NO: 455478 - DNA, 541 bp, Sorghum bicolor
cgtccggctattggatgctatttcattacatgtaggagaaagaagaaatctcatgaagacactgttgttattgcagcaccagcaaaaaaacttggctcatattttagtgaagtagctacagaatcagcacacagattttctttatctgaaattgaagatgctactgacaaatttgagagaagaattggctctggaggctttggtattgtgtactatggaaagctggctgatgggagagagattgcggtcaaacttctcacaaatgactcctatcagggaatccgagaattcttgaatgaggtgacattgctatccaagatacatcatagacacctggttacattccttggttacagtcagcaagatggcaaaaacatactagtgtacgagttcatgcataatgggacacttaaagagcaccttcgtggaactgataatgtaaagataactagctggctggagcgtcttgagaatgcagaagattctgcgaaaggtatagagtatctcacacaggatgctcccgacatcatcatagagactg

SEQ ID NO: 455479 - DNA, 504 bp, Sorghum bicolor
cgtccgatcacaccacgactccacaccgccggttggcttcgctgctccgacctcgatcttccacctcccgcctccgcctcgtgaagcgcgtggggactgggcctctggggttcgcctctcggcgcggcggccgagtgcctgcgtcctctacggagagggatcggcggcggggatggcgagggagcggcgggagataaagaggatagagagcgcgcggcgcggcaggtcacgttctccaagcgccgccgcggcctcttcaagaaggccgaggagctctccgtgctgtgcgatgccgacgtcgcgctcatcgtcttctcctccacggggaagctctcccagttcgccagctccagtatgaatgagatcattgacaagtacaacacacattctaaaaacctgaggaaagcagaagagccttctcttgacttgaacttagaacatagcaaatacgcaaatttgaacgagcaacttgtggaagcaagccttagactcaggcagatgaga

SEQ ID NO: 455480 - DNA, 564 bp, Sorghum bicolor
cgtccgcccacgcgtccgctcatttccctccacgagcaccctcgactcgactccatggacggcggcggcgcgaaggcgaagaaggcggcggcggggcggaagctgggcggcggagggccgaagaagaagccggtgtcgcggtccgtcaaggccgggctgcagttcccggtgggccgcatcgggcggtacctgaagaagggtcggtacgcgcagcgcgtgggcacgggcgcgcccgtctacctcgccgccgtcctcgagtacctcgccgccgaggtccttgagctggcgggcaacgcggcgcgcgacaacaagaagaaccgcatcatcccgcgccacgtcctcctcgccatccgcaacgacgaggagctcggcaagctgctggcgggcgtcaccatcgcccacggcggcgtgctccccaacatcaactccgtcctcctccccaagaaggccgccgagaaggctgagaaggccgcctccgctaccaagtcgcccaagaaggccgccgccgccaagtcgcccaagaagtagtggtgcccgtctcgtctcgtctcgtctcgtctcgtc

SEQ ID NO: 455481 - DNA, 506 bp, Sorghum bicolor
cgtccgagagccttctgcacaggctgtcacaaagcttgaatttgaattcgagaggcggagagttacaaaggaagacataagggaactcatatatagggaaattcttgagtatcatccaaagatgctgagggagtttcttgagggaactgagtcaagtggtttcatgtacccaagtgcagtagaccattttaaaaagcagtttgcgtaccttgaagaacattatgccaagggatctacaggaactccacctgagaggcaacataattcattgccacggccttctgttgtctattcggacaaccgatcacaaaccacagccaacatcaccgaggatctttccaagtgtataatcagagaaaatacacaaaagccacatcaacattctgcttatgttgcaagtaaatttccaccccatgttccttaaggtgttgttgcaaggcctggtaaagcggttggtcggtgatcagtacaacccctattcagcatctgctgccgagcaatatgag

SEQ ID NO: 455482 - DNA, 450 bp, Sorghum bicolor
tacgacctcacgcgtacgcgtaggagtggaaaacaccagcactgccaaaggaccggcagcttattcaggatcgtataaaggagctccgggaactcgtacctaatggggcaaagtgtagcattgatgcattgttggagaagaccattaagcacatgcttttcttgcaaagcgtgacaaagcatgcagacaacctcaaggacacaaatgaatctaagattcttggtggtgagaatggtccacttaaagactacttcgaaggtggtgcaacttgggcctttgatgttggtagtcaatctatgacatgtccaatcattgttgaggatcttgagcggcctcgtcagatgcttgtggagatgctctgtgaggatagaggtatcttcttggagatagctgactttataaaaggactaggattaaccatcttaaaggggcgtatgggaagcacgcaaa

SEQ ID NO: 455483 - DNA, 305 bp, Sorghum bicolor
gcccctgcaaaggcgaagccagctgccaagccgaaagccgcagccgccaagccgaaggctgcagctaagcccaaggcagccgctaagccgaaggccaagccagctgccgcgaagccgaagccgaagccgaaggcagtcgccgccaagccgaagcctgctgccaagaaggccggccgccccgccaaggccgccaagacgtcggctaaggacacgcctgggaagaaggcgccggcggccaagaagcccgcggctgccgcgaagaagtcggctgccaagaaggccgctccggcgaagaaagtccgctg

SEQ ID NO: 455484 - DNA, 534 bp, Sorghum bicolor
cgtgcgcccacgcgtccgcataggtggtgtagagggtctgcaaacatgcttggtgggtttactgtcgatgtcaaggtggtttaaacctgctgcaggatcgtttgtgaaagtgccattttttggagctgtttcataccttacattggcagtttgtccgttttgcatagtatttgctgttctgtggggtgtttaccgtcggttgtcctttgcttggattgggcaagatattcttggtattaccttgatcgttacagtcatccaaattgttagaatacctaacctcaaggtgggttcagccctcctgagttgtgccttcttatatgacatcttctgggtttttatctccaagatgatattccatgaaagtgtgatgattgtggttgcacgtggtgataagactgatgaggatggtgtacccatgctgttaaagattcctcggatgtttgatccatggggcggatacagcatcataggctttggtgatatccttcttcctgggcttgtggttgcttttgcattaaggtatgattgggc

SEQ ID NO: 455485 - DNA, 448 bp, Sorghum bicolor
  unsure (1)..(448): unsure at all n locations
cggacgacccacgcgtccgcgaggcttctacaaagggaacggtgcaagcgtgcttcggattgttccatatgcagcattacattacatgacatatgaacagtacaggtgctggatattgaacaattttgctccatcaataggtacagggcctgtcgttgatcttttagcgggctctgctgctggtggtactgcagttttgtgtacatacccattagacttggctaggaccaagctggcataccaggtttcaaatgttggccagcctggcaatgcttttggaaattctggtcaacaacaaacatataatggcataaaggatgtcttcaagactgtttacaaggaaggaggcgcacgatctttatatcgtggagtaggcccaactcttatnggtattcttccatacgccggcttaaaattttacatatactgagatctgaaaatctaagtt

SEQ ID NO: 455486 - DNA, 428 bp, Sorghum bicolor
cgtccgcccacgcgtccggtgggtgggaatggtgaatttgcccctgatggcaatggggaaaagcagaagggctcgcctggaggccaagtgccccgtcttaatgaggcgactggtgcggagcacgagctgccattcgagttccatgtgctggaggttgctcttgaggttgtgtgctcatcgttggaccttagcgtggcagaccttgagaggcatgctactccagtgcttgacgagttgaccaagaatgtcagcacgaggaaccttgagcgagtgcggagccttaagagtcatcttacccgtttgcttgcccgtgtgcaaaaggtcagggatgaaatagaacaccttctagatgataatgaagacatggaacatctgtatctaacaaggaagcaagtacaaaaccaacaggttgaggctttaatgtcatc

SEQ ID NO: 455487 - DNA, 510 bp, Sorghum bicolor
cgtccgcccacgcgtccgcccacgcgtccgaaattgagcagagtgacagaaaacaatgacaggggaaccttgttcttgtaggaaccaggaagagcagaggctgattttggccggtatgatgtgaagagagttgttcggaccatctacgtgctcttctctaggagcgaaataccaatagcaaaagaaggccaagagattatggaccttgcagacttgtcaacacctcttccagagtggttgactgaggatgatctagctgtgtatgcttcactctatgagaaatcgggtttccggtatccaatggaaatgccatataggtcgctccataaaaggatgccaattgaagatccaagattccaagtcccagtgtttgttgtcatgggggagaaagactatgtgttcaagttccctggtgttgagtccgttttgaaagatggcatcatggagaaattcacaccggacctaaagatcacctacatccctgaaggaaagccattcgttcaagagcag

SEQ ID NO: 455488 - DNA, 505 bp, Sorghum bicolor
  unsure (1)..(505): unsure at all n locations
cgtccgcccacgcgtccgcgatggtgttgtggcaacgctcaaggcagtgattaaggataccaattccctgttggaattctactattctgtgggaggtttgcttagcatcaaggaacaaggccataatgttgttctgtctgatgcagaaagtacatttcatgccattaaggcacttagccaaagcgacggaagatggcgttatgacactaacagtgctgaatctagcacatttgctgctggtatcgcactagaagcattggcgggcattgtttcactggcagatgcagagattgattcatccatgatggcagtggttaaaaacgacatcatgaagctttttgacaccatcaagagctacgatgatgggaccttctactttgatgaaaagcatgttgatgctactgaatacaagggtcctataatgacttccgcttcagtggtacggggtgtcacctcatttgcagcctgtgttctggaaaatngaatatctctggtgagaaaatac

SEQ ID NO: 455489 - DNA, 287 bp, Sorghum bicolor
ttttgcttgttgctgaaagggttgcttcaacggatcttgaggactccacggcagttgaggcacctgatgcatataaaacagcgtgggatttgttgaagggggcagatggaattttggtacctggtggctttggtgacagaggtgttcaagggaaaattttggctgctaagtatgcccgtgaaaagaatgtcccatatcttggtatatgtcttgggatgcagattgctgtggtggagtatgctcgtcatgtcatgaatctcaccgatgcaaacagcactgaaattgat

SEQ ID NO: 455490 - DNA, 415 bp, Sorghum bicolor
  unsure (1)..(415): unsure at all n locations
tagaactagtcctcatagttggtccgggtgtgctcggccggatcgtcgccgagatgtgnnaacaggggtatacaggaggaaaggtttgtggccggagtgggcgcacagatcatcacagcgaattaactgacattggtatcattccctccttgaagaggtccgtagcgggtcccaaatttccaaatgttattttctgtgctccaccatatcgttctgaggattatgctggagatctgagaatagcagcttcgaattggaatggagaaggttctttcctattcacctcgagtactgctgtgtatgactgcagtgacaatggattctgcgatcgaggtcctcatgtctattggttgtcaaaaggaacccttggatgtgcgtcctgatcatatactcaatctgatacatnatgaagatg

SEQ ID NO: 455491 - DNA, 486 bp, Sorghum bicolor
cgtccgaacgccgaacgccagtgctgcggctgccgagagtccggaccacagctcgcgccgcccgccgcacccgacccgcgtcgcctcgcctcgcctcgcccaggcgtgcgctccctcccttctcccgcgccgtcgcctccggacccgctgggcccagcgggcgccgcccaactcggacgcgccgccgccctcccggtgtgaggcggaggtgcttggggacccgccccccatggcgagcgccggcaacagcggcagcggggacgacgattcaggagggaagctcctggcggatcgctaccagaagggcgaggtcctcggcgagggcacgtacggagtcgtcttcaaggccatcgacaccaagactggaaatacagtcgcagtaaagagaatccggatagggaaggacaagaaggaaggtgttaacttcaccgcattgagggaaattaaactacttaaggagctgaaagatcctaatattatagagct

SEQ ID NO: 455492 - DNA, 502 bp, Sorghum bicolor
cgtccggtggggtacaggtacaggttcgacaacattaacagagaatatacacacccttgaaacaaccaaaatgggcagcaggagggctttgcagcttggggcagctgtgttagtcatcttctccttctttggtaaaatcggagctctcctagcctctatacctcttgccttggccgcctctgttctgtgtttcacctgggcgctaagtattgcactgggcttgtccacattgcgttacacccaagcagcaagctccaggaacatgataatagttggatttacactattcatttccttgtcaatccctgcatactttcagcagtatgaacccagctccaaccttatcttgccaagctatcttcttccatatgcagctgcgtcaagtggaccagttcgcacagccagcagtgggctgaattatgcagtgaatgcgctcctatccatcaacgttgtggtggctctctttgtcgcgttgatccttgacaacacggtgccaggcagc

SEQ ID NO: 455493 - DNA, 438 bp, Sorghum bicolor
cgtccgcccacgcgtccgcgtagaaggcgaaagggtgtgcctattcttgtgcctggcttatgtcttcctaaagcactgcagccttttcttcctatatttcagcagggtttaattagtgggtcggccgaaacaaaggagcaggcagctgaaggtttaggagagttaattgacgtaacaagtgagaagactcttaaggaagttgtagtgccaattacaggacctcttattcgcatccttggtgatcggtttccctggcaagttaagtcagctatcctatcaaccttgacaatcatcatcatgaaaggtggaattgcacttaagcccttccttccacaacttcaaactacatttatgaaatgtctacaggataacaataggtctctcctgacgagggctgcagctgctctcggaaaagctagtgctcttagcaccacgggt

SEQ ID NO: 455494 - DNA, 302 bp, Sorghum bicolor
cgtccgcccacgcgtacggaataagcgattggagcagcttgccaattcccatcctgtgattgtattcatgaagggaaccccagaacaaccaaggtgtggcttcagtcgtaaagtggttgacattttgaagcaagaaggagtcaaattcgtgagtattgacattcttacacataatgatgttcgtgaaggtatgaagaagtcctctaactggcccacttactctcaactctactgcaaaggtgagcttcttggtggatgtgatattgatatcgctatgcatgacaatgatgaattgaaggatg

SEQ ID NO: 455495 - DNA, 419 bp, Sorghum bicolor
cgtccggcgcctcaagcgctggtagacacgtatggcggcttcttagatgagaggattataaaagattacacagacttcgctaaagtgtgctttgaaaagtttggtacactactacagaatgaggcattggtcgatgtccaaaatggccaaaaacctcggcctttttgcggcccggggttaaagacccctttagcaccggttcgtgtgacaaaccggtgctaaagggtcctgcccaacggctactgacatgtgctgtctgggcagggaccctttagcaccggtttttaacaagaaccggtgctaaaggggtccctttagcaccggccagagccacgggccgaggcaaaccctttagcaccggtttgtgttacaaaccggtgctaaaaggtaaccctttagcaccgccttttgctctgaac

SEQ ID NO: 455496 - DNA, 522 bp, Sorghum bicolor
cgtccggaggaaatggttactcgcaacggagccaatatacgaggaacttatggatatcttgatccagagtatgtatccacacgatcattcacaaagaagagtgatgtgtacagctatggtgttttgctattcgaactgattgctggcagaaacccacaacagggtctaatggaatatgttgagcttgtaagccgccatgccccttgctctaagtagattttggtttgaggatattagcttctccagatgctgattacattgcattctaccacaggctgcaatcaacgctgatgcgaaaactgggtgggaagaaattgcagattctcggttagaaggcgcatttgacatggaggagctcaatgacatgtctgctgttgcctacagatgtgtaagccgcgtgtcccggaagcgcccggcgatgcgagatgtggtccaggctctgacccgtgtgttgaagcgcagccgcagcaggaagcaccacagcaacaggcattcacaggcaaggccagacgatgaatctgt

SEQ ID NO: 455497 - DNA, 493 bp, Sorghum bicolor
cgtccgcccacgcgtccggacgtctccaactatttcagtatctacgggccagttcacgacgtgcgcattccctaccagcagaagcgcatgttcgggttcgtcaccttcgtgtacccagagacggtgaagctcatcctcgccaagggcaacccgcacttcatctgcgacgcacgcgtgctcgtcaagccctataaggagaagggcaaggtccccgacaagtacaggaagcagcagcaaggggacttctccggctgcacgacgccccccggcgggctggacgcccgggacccctttgatctgcaccagctcggcgccaggatgctgcagcactcaaacagcgccaacgagctgctgttgcgccgaaagctggaggaacagcagcaggctgccgaactgcagcaggccattgagctccagagccgccgcctcatgggtcttcagctgctcgaccttaaggctcgtgcagcaacgacagcagcagcagcatcaccac

SEQ ID NO: 455498 - DNA, 561 bp, Sorghum bicolor
cgtccggatttggactcgaaacgcaggaaaatggaatctgctggtatcgacgctgctttgatgggtaaaccgaatcgcgagccccgtgttgttgtacaaactgttagtgaagttgatatcttggatgatgggtatcgctggcgcaaatatgggcagaaagtagtgaaaggaaaccccaacccacggagttactacaaatgcacacatacaggatgcccggtcaggaagcatgttgagagagcatcacatgacccgaagtcagtgatcacaacatatgaaggaaaacataaccatgaagtccctgcttccaggaatgcaagccatgagatgtccacagctcccatgaagcctgtggtgcatcctattaacagcaacatgccaggccttggtggcatgatgagagcatgtgatgccagggccttcaccaatcaatattctcaggcagctgaaagtgacaccatcagccttgaccttggtgtggtatcagccctaaccacagcgatgcaacaaaccaaatgcagccctcagttccagaaccttatcagtatcaaatgcaacaca

SEQ ID NO: 455499 - DNA, 403 bp, Sorghum bicolor
cgtccgtgaagatgctgacctcgaggatttctatgattacagcagcagttatgttgatgcagaaggcaagcaattggttgctgttgatgagtctaacaacaacattgagctgggaaccggtgggtctgagctagtaataacaaacaagagtgagaaaggcacacgggtcagaacccttggttctagggaatttatccgctactatcgccagaaaccacggccttctgtcgcaacagaccgtgcacttgcactttcactggcttccagctacaagaacatgggtttggtgacagttcagtctaaggagcagatggtaaggctgaaagttctccgtgcaatgaacaagaccggtgtcgagacgatgcggaacaagaatgggatgaagaagcaatgtgatccggaa

SEQ ID NO: 455500 - DNA, 520 bp, Sorghum bicolor
cgtccggaatttcttactgttgcagcaaagcaactgaatcctcagtctgtgaaggatgcggtatcagtagctaacaatgcctgttgggctatcggagaattagcaatcaagattggcaaagaaatttcacccgtggtgatcactgttgtttcttgcttggttcccattctaaaatccccagagggtttgaacaagtcacttattgaaaatagtgcgatcactcttgggaggcttagctgggtctgtccagacattgtggcccctcatatggagcatttcatgcaagcatggtgcagtgccttgtgcatgatcagagacgattttgagaaagaggacgcttttcatggactgtgtgcaatggtggcagcaaaccctacaggagcggctggttcattagcttacatctgtcaggcctgtgcaagttggactgagataaaaagtgaaggtcttcacaatgaggtgtgccagattctgaatggctacaagcagctgcttggaaacggtgggtggaacaatgcat

SEQ ID NO: 455501 - DNA, 509 bp, Sorghum bicolor
cgtccggcaaactccatttctccctgagaaacctgccaaaggccaaagcgtccctaactgctgctagaacagcagcaaatgccatttatgttccacctgcccagcaaggcactattgatctccagagtggaatcctccatgctgaagaaaaggattacaagactgcatacagctacttctttgaagcatttgaagctttcagtgcactggaggacccgaaggccattttcagcctgaagtacatgctgttgtgcaagataatggttaaccaagctgatgatgttgcagggataatctcatctaaggctggcctaaaatatctgggtcctgatgttgatgctatgaaggctgttgctgatgcatactctaaaagatctctcaagtattttgaaactgcccttcgcgattacaagtcccagctggaggaggaccctattgtccacaggcatctttcttctctgtatgatacgctcttggagcagaacctcttgaggttgattgaaccctac

SEQ ID NO: 455502 - DNA, 424 bp, Sorghum bicolor
  unsure (1)..(424): unsure at all n locations
cgtccggagattacanaaaatatcgttaatgataatatctnttcccaatatatgcacaagattctgccaactggcaactacctctggaccttcaagaaacaatttgcaatccaagtggccctctcctgcttcatgtcgtatatgctgcagattggtggcagggctcctaataaaattctgtttgctaaaaatactgngaagatcttccagactgacttccatccagcttatgatccaaatggaatgatcgagttcaacgagcttgttccatttaggctgacacgcaacttgcaagctttcttctcgaatnttggtgttgaaggtctcattatgtctgccatgtgttctgctgcccagtcagtggtttctccaaaacaaagccagcacatttggcatcattttgctatgtttttccgtgatgaac

SEQ ID NO: 455503 - DNA, 192 bp, Sorghum bicolor
cgtccgcccacgcgtccgcccacgcgtgcgcggacgcgtgggctcgctgcacactctagagagttgagaaagagaaagaggaagtgaagtggtataaggagagggggtgctcgtctgctcttccgtcaatggcaatggcgttgtcgaacggctgtggtggagccttatcggtggcggccgtgctggtggctg

SEQ ID NO: 455504 - DNA, 498 bp, Sorghum bicolor
cgtccggttttgcgatcggcaacggtctaacagatccagcaatacagtacaaggcgtaccctgattacgcgttggatatgggattaattacaaaaacacaatttaacaggatcaataaaattgttccgacttgtgaacttgctgtcaagctttgtggtacctctggaacagtatcttgccttgctgcgtactttgtctgcaatacaatattcagtgccatcaggacaatcataggcaataaaaattattatgacatcaggaaaccatgcatcggaagcctgtgctatgatttcaataatttggagaaatttcttaatctcaaatctgttagggagagcctaggagttggggatatagagttcgtttcatgcagcccaacggtctatgaggccatgctattagattggatgaggaaccttgaagttggaatcccagaactccttgagagcgacatcaaagtgttgatttatgctggagagtatgacctcatatgtaact

SEQ ID NO: 455505 - DNA, 418 bp, Sorghum bicolor
cgtccgctgaagggttgtggtgtgctttctgaggcttccatcaattgccctcgcttgacatcgttagatgcctctttctgcaggcagcttgtggatgattcactgactcgtatggcagaggcatgtcctctgattgaacatcttatcctgtcatcatgcctatccattggcattgatggattgtcttcattgcattgccttcataagctgaccttgcttgacctgtcttatacatttttgatcaacttgaagcctgtattcgacagttgcccacagctgagggtgttaaaactttcagcttgcaagtacctcagtgactcatcattagatgccctctacagagagggtgctcttccattacttgttgagctagatctgtcctactcatccattggacagaatgcgatagaagatcttc

SEQ ID NO: 455506 - DNA, 390 bp, Sorghum bicolor
gccgtcgccgaggcggagcgctccgtcggccctccctccgcggcgcggcgcggctgctgcgccgcggcgggcggcgggccatgcgggaaccctcggtgctggtgcgggaggcagccgcagagcacctcgaggagcggcaggctgactgggcctactcccgccccgtcgtggcgctcgacctgctctggaacctcgccttcatcacggtcgccgcggtcgtgctcgtgctcagccgcgacgaggactcgcccatgccgcttcggacctgggtcgccggctacgccctgcagtgcgtcgtacaacatggtctgcgtcgcaatcgagtaccggatgcgccaccgccaaaggccgcggcgccggccgcccggcccactgacgaaggaaaggggc

SEQ ID NO: 455507 - DNA, 551 bp, Sorghum bicolor
cgtccgccgaagcattagtggaacccggaatcctggtgttattggggacaggagatccatttcacgaggaagttctttaactgttgactgggctgaggatgtggagttttcaaactggggagatcaagacgtatttgaaaatgaggaattccacgaaagtaaaagatggtggtcatccaattcttcagttcagcaaggggattctaactccagaccactaagtcgaacatcttcctaccctcagcagccactgcagcaccggtcaagtgaacctatcgttttaccaaagacatcttcatttacctcattcccaccacctgttgctgctgctggtggtagatccccttaccctgctcaaggccttacacgtcatgggagcattccatcaattggtgctgggctccaaatgggttctccaggcatgtcactttctgcttctccataccatatggtcggaccatctcatgggctgccatacacaggaggaatgccttatggtgctcttaacctgcctgtaaacaaatctgtgcaaaatgattggtcgaaccatg

SEQ ID NO: 455508 - DNA, 436 bp, Sorghum bicolor
cgtccgcgcaaggttcgtctccatcgacaatgtgtggcggagccatcatcgccgacttcgtccccgccggcggccgtcgccaggcaaccgacgacaccatctccgcctcctccctcctctccggcgaggaccagcatctggaggagctcggcagcagggtgccggcgccggggcgcaagacggcgtaccgcgggatccggcgccgtccctggggccggtgggcggcggagatccgcgacccgcggaagggcgcgcgcgtctggctcggcacctacgccaccccggaggacgccgcgcgcgcctacgacgccgcggcgcgcgagatccgcggggccaaggccaagctcaacttcccgcccgccgtcggcgccggcgcgcgcgagccggcggccaagaggcgcccgacgtcgtcgtccgcggcggccgaggagagctc

SEQ ID NO: 455509 - DNA, 456 bp, Sorghum bicolor
cgtccgctcagggaaaccctgacgaagttgctgcagcattgtgtagatactcagcaccagaagaggttgatactttaccatcaacatgtggggcctgtggaacagaatgtgtcacgcgattctttgctacaaaaatcccatatttccgggaggttattgttatggcaacaacatgtgacatgtgtggttatcgcaattcagagctgaagcctgggggtgaaattccagctaagggaaagaaaattacactgcgtgttcaaaacgcacgagaccttactcgcgatgtcataaagtcagattcagctagcgtgaaagtacctgaacttgagttggagctttcaagtggaacgttgggtggtatggtcacaacttgtgaaggtttaattgtgaaaatatgtgaagctctggagagaatacatggattccaattgggcgatagcacacttgaatggaaaa

SEQ ID NO: 455510 - DNA, 512 bp, Sorghum bicolor
cgtccggtacaatacaggaaaacccagtttctgctgaaaatggaaaagtgccatctctttgggatgatggtgatgatatgtctcctgttgcatcctctaatggtcatatcaaggaagaaaggcgttacagtggaggtgatcaagtggctgagagtgaaatagcatatgattttggtgatgaatctgtgagaagtcctggcagtgctggaagaagtgcctcaggcagtccatttaaatcttcccgctttgggatgcatgattcatctcccagcaaaagagaaagttacagtgaccatggtggttctgaatctgtttttggtgacaagtttgctgatgaaacttcttggaactttgatgatcaagatactgactctgtttggggttctactgcactgaacactgaggctgatcaacatggtggcacacatagctctttctttgggtccgaggcaggctcttcaagtggcgctagtgtatttggaaagaagaggagtacattctttgatggatct

SEQ ID NO: 455511 - DNA, 473 bp, Sorghum bicolor
cgtccgaagaagaaatacaaaggaagaaattgattggagttatatccagttcgtagataaccaagagattcttgatcttattgagaagaaaccagggggtataattgctctactggatgaaacttgcatgctgcgaaattcaacccatgaaatatttgctgaaaagctgtatcaaaaatttaaggagaacccacacttcagtaggccaaagttttcacggtctgatttcactattcatcactatgctggaaatgttacgtatcaaacagatctgttcttggataagaacattgattatgctgtgaatgagcatcaagttttattacatgcttcgagatgttcatttgtttccaatctttttccaccttctgaagaatcagctaaatctacgaaatttacatcaataggttcaagctttaagcaacaattacaatctttgctggaaactctgagtgcaacagagccacattaca

SEQ ID NO: 455512 - DNA, 316 bp, Sorghum bicolor
ccacggagcccgcctgcgccacctagcccgctcagtccaccagattcaaacaagtccgatccagattacgaccctacacaggatctgtctgactccaacgatgcagattatgaccctaccctggacccatagatttaggtctcagtttcagttccattgcacttatgtttcagttcctatgagataggcactcatgacatgtaggtaggccttgtttacttccaaattattttgcaaaatatgaatagtgacgctttcgtttgtatttgacaaatattgtccaattatagactaactagggtcgtctcgtcaaaaa

SEQ ID NO: 455513 - DNA, 482 bp, Sorghum bicolor
  unsure (1)..(482): unsure at all n locations
agtccagtgtctccatcgcggctgccacgcctctcgcgcacgcgcaggacgaccaatggcttccaggaagttcttcgtgggcggcaactggaaatgcaacggcaccggcgaggacgtgaagaagatcgtcaccgtcctcaacgaagccgaggtgcccactgaggacgtcgtcgaggtggtggtgagcccgcctttcgtttttctgcagcaggtcaaggggctgctgcggctggacttcgctgtcgcagcgcagaactgctgggtgcgcaagggcggcgccttcaccggcgagatcagtgctgagatgctggtgaacctgcaggtgccctgggtcattttggggcattctgagcgcagagctctgttgggtgaatccagtgattttgttgctgataaagttgcatatgcactcacccaaggtctcaaggtaattgcttgcattggtgagacccttgagcagagagaggcangaacgacaatgg

SEQ ID NO: 455514 - DNA, 500 bp, Sorghum bicolor
  unsure (1)..(500): unsure at all n locations
cgtccgcggacgcgtgggatcccatcagcagcagcagcagcagtcaccatgcagagactcgcgcgcgtcctcgtggtgctcgtcgtagccgccgccacggcgtcggcacagggcccgacggcggcgccagcgacgcccacgccggcaacacccgcggcgccggcgcccaaggcagcgacaacgacgacgacgtcgagcaacatcacgggcgtgctggccaagggcgggcagttcaacaccttcatccggctgctcaagtccacgggggtggcgtcgcagatcgacaaccaggtcagcaatggcgggaacgggatcacggtgttcgcgcccacggacaacgccttcacgtcgctccccgccggcacgctcaactcgctgtcggaccaggacaagaacgcgctggtgcagtaccacgtcgtgtccaccgccatccccatgtcgcagttcgacaccgtcagcaacccgctccggacgcatgcagggagcgcctnccccgggga

SEQ ID NO: 455515 - DNA, 411 bp, Sorghum bicolor
  unsure (1)..(411): unsure at all n locations
cgtccgcccacgcgtccgggcctttggggtcaatttgcaaagggcatcgactagagcagctggttcccatggtttattcgagatcaggtgttcagataacatgcttgttactcaagttattggccctggtgaagaggcgtctcctgattctcatgaaacattcaagcatgatagttctttttgcatccagatgcatagtgttgaggagacacagagtttttctgtgtctatggagacaaagggtgatatcaaaagtgattttgttttctttcagtttgcggtccattattccgatatatatcaaacagaaatcactcgggtgatcactatgaggctacagactgttgatggttgtctgcatatctgtcagtgtgcagcanggatgtgcgtagttatcattggtaaagaact

SEQ ID NO: 455516 - DNA, 518 bp, Sorghum bicolor
  unsure (1)..(518): unsure at all n locations
ggcgtccgacgcgtagcatctactgatggtgtatcacaaattcctagtcgggccatggatagcctcactccaagtccaaggtcaagatttccagctgcagaggcagccccctatgtgccagttgggcactaccgtatgccttgccacagcatggctccttcagtcacaattaggactgcagttcctgtgttctctgctccacctctcccatctccgtctgcacgcccgcagcagcttcctccactcatgagccacccaccaccgattcggatggcatccccagttcgcatgaggccatcctctccaatgtttgcctcctcggctgctgttcaagggccgaaacctgtgatgcctattcagttaaagaatgtgcaagatcaatcaaggaaggaaacagctccatctgcgatccctgttcaggtaaaagatgtgcaataccaaccaaggaagagctcaatgtctnctgtgattcctgtctcgtaaaggatgcacaacgccagcctcttgtgggatcacta

SEQ ID NO: 455517 - DNA, 513 bp, Sorghum bicolor
  unsure (1)..(513): unsure at all n locations
cgtccgccagaagttgcggttggcctcctcctcctcctcctcctcttctcctccgtcggctcagacttcagatctctgcgtgcggcgatggcgtcgttctcggaggctcccccaggcaaccccaaggcgggcgagaagatcttcaagaccaagtgcgcgcagtgccacacggtcgagaagggcgccggtcacaagcaaggtccaaacttgaatggtctttttgggaggcagtcgggtaccaccgcaggctactcctactctgcgggaaacaaaaacaaggctgtggtctgggaggagaacactttgtatgactacttgcttaaccctaagaagtacattcctggaactaagatggtcttccctgggctcaagaagccacaggagcgtgctgatctcattgcgtacctgaaggaagcaactgcatagtgcaatgacatgtctntgccatgaagagagaaattcgtttttgcagtttaataaagacattctagacaatttgggtcactctgtttg

SEQ ID NO: 455518 - DNA, 479 bp, Sorghum bicolor
cgtccgccaccacgacatttccaatgagatacctatccatctacaaaggatgcagtaccttgcattctcgtcattcttgggattggtagcgtgtctcttttggaatatcatagcaactacaacagcatggattaaaggggaaggtgttatgatctggctgcttgccattatctacttcatatctggtgcacctggggcttatgtgttatggtatcgacctctttataatgcaatgagaactgagagcgctttgaagtttgggtggttttttctattttacatgattcatataatcttctgtgtgtgggcagctgtggctcctccattccctttcaaaggaatatctttggctgggattttacctgcaattgatgtcataagcaagaatgctattgtggggatattttactttgttggatttggcttgttctgccttgaatcacttctgagccatcgtgtcattcagcaagtatacatgt

SEQ ID NO: 455519 - DNA, 366 bp, Sorghum bicolor
cgtccggaagacggtacatggaagcccagaatgatacctaatccagaatacaagggaccatggaagcggaagaaaattaagaatcctaactacaaaggaaaatggaagaccccgtggattgacaatccagagtttgaggatgacccagacctatatgttttgaaacctttgcagtatgtggggattgaagtctggcaggtcaaagctggttcggtttttgacaacattttgatttgcgatgatccagactatgcaagacatgttgtagatgaaacttttgctgcaaataaggaggctgaaaaagaggcctttgaaggagctgaaaggaagaggaaggctagagaagaagaggaagcacggcgagca

SEQ ID NO: 455520 - DNA, 363 bp, Sorghum bicolor
  unsure (1)..(363): unsure at all n locations
cgtccgcgattttcctcctaatctcactcaaaccctagccgaatcccagatccatccccagctctagcgtccccccctctcgccggcgacgaccatgggcaacccggagaagctgatgaaccagatcttcgacctcaagttcacctccaagtcgctgcagcggcaggcgcgcaagtgcgagaaggaggagaaggagcagaagctcaaggtgaagaaggcgatcgagaagggcaacatggacggcgcccgcatctacgccgagaacgccatccgcaagcgcaccgagcacatgaactacctccgnctngccttccgcctcgacgccgtcgtcgcacgcctcgacgcaggccaagatgcaggtca

SEQ ID NO: 455521 - DNA, 286 bp, Sorghum bicolor
cgtccggctaaaactttttatgctggaaaggcgggcgtgcccgttactgaggtgaatgttcctgttgtggggggccatgcgggtattactattctgccactcttctcacaggccactcctgcaagcaattcattgtcccaagaagacattgaggccctcaccaagaggacacaagatggtgggacggaggttgttgaagcaaaggctggaaagggctctccaacactgtccatggcatatgctggtgctgtttttgcagatgcatgcttgaagggtctgaatggag

SEQ ID NO: 455522 - DNA, 389 bp, Sorghum bicolor
cgtccgacaacgtgtccctatgatgatgccgcggcgagccgcgcatgctagcgggtggcaagcggcgctacgggttcgacgacggtgacgcccgcttagatcgaccgcgcaatgtcgccgttgatgaccgcgacgacgtgtacgtaggacacgaatcgaaccatgccggtcgcaagggcccgccctgcgggtatactactacagctaccggacgtctgtcatgatgacctggagagaatgatggactggcacagaacgctactctgttgagatatgacgagccatgttatgtccctaaaataagtgccatgttagtcgctcgcagaagaaatcctatggctctaccaatctatctagaagctgaaaattgtgcacatgaaaaacacata

SEQ ID NO: 455523 - DNA, 496 bp, Sorghum bicolor
  unsure (1)..(496): unsure at all n locations
cgtccgctccgtgcaatgatcaccaagggattgattgaaccaatctccagtgtttttgtcaatctggtaaatgctgacttcaccgcaaagcagaggggagttcgcatcaccgaggagaggatcctgttggacggctcacctgagacacctattgattacattcaagttcagattgccaatgtcgagtccaaatttcccagtgcgatatctgagagtggagagatcactgtggaggggagagtgaaggatggtgttcctcatctaacaaaggttggagcattccaggtggatgtgagcttggaaggaagcctgatcctttgcaggcaggttgatcaacctggtatgaatggggtagtttggagtgtcttgggtgaagagaacgtcaatgtcagtttcatgagtgttggaagaattgctcctcgcaagcatgctgtcatggcctatcgtgntgatgaggaaccaagcaaggccacgctgaacaagatcggggagattc

SEQ ID NO: 455524 - DNA, 221 bp, Sorghum bicolor
cgtccgatgctgatagggatgaggatgaaaaagagagtcatgctgaacttctttctcttcctcctcatggatctgaagtttatgttgggggcatatcttctgatgtctcttctgatgatctcagaaaactctgcgagtctattggagaagtagtggaagtgcgaatgccaggaaagagtggtaagcttgatgcttttgtcaatttcagaactaaagagctg

SEQ ID NO: 455525 - DNA, 390 bp, Sorghum bicolor
cgtccggacccacgcgtccgcaattctgggttctagacaaagatggccttattacgaaagctaggaaggatctggattctgcagtggcacgttttgcccgaggttttggtcctgatgaggtcccagatctccatgagggggctagtcttgttgaagtggtcaagaaagttaagcctcatgtgcttttaggactatctggagttgggggcatatttaatgaggaagttctcaaagctatgaaagaatccgattcccctcgccctgcagtttttgcaatgtccaaccctactactaaagctgaatgcactcctgatgatgtattcaagcatgttggtgagaatgcgatatttgccagtggaagccctttcaacaatgtttctttaggaaatg

SEQ ID NO: 455526 - DNA, 384 bp, Sorghum bicolor
  unsure (1)..(384): unsure at all n locations
cgtccgcccacgcgtccggcctgaagaacctgcggcccaccgccaagtgggacgtgtacgccttcggcatggtgctcctggagctgctctccgggcgggtctactcggaggtggagctgtgccagtggcacgcggngctggtggccgccgaggagcacggccgcgtgctccggatggccgaccccacgctccgcggcgaggccgacggcagggaggacgcgctgctggcgtgcttcaagatcgccttcgcgtgctgcgccatggcgcccggcaagcggccctncatgagggacgccgtgatggtgctcgagcgaaccacggccggcgccgncgcgagcggcagtgccgccgccgttccctgaggggaacgaaaaaaaaactgac

SEQ ID NO: 455527 - DNA, 435 bp, Sorghum bicolor
  unsure (1)..(435): unsure at all n locations
cgtccgggttgattcagttgttgaagcctgttccaatccttcaataattcggtctctgttcagtgccactttgcccgattcaattgaggctcttgcacgcactataatgcatgatgccattcgagtcattgtcggcagaaagaattcagcctcctcactgattaagcaaaagttgattttcgctggaactgagaggggaaangtgctagcacttcgccaaagctttcaagagtctctcaatcctncagtattgatttttgttcaaagcaaagagagggccaaagagctttacanagaactggcattngatgacgttagagttgatgcaattcatgcagatctcaatgagcagcagcgtcaagatgctgntgacaatttgagagctggaaagacctgggtactgatagcaacagaagtcattgcccggggaatgga

SEQ ID NO: 455528 - DNA, 424 bp, Sorghum bicolor
  unsure (1)..(424): unsure at all n locations
cgtccgattcatactgtgatctaataccaggcttgcctgaagacttggcaaagatatgtcttgcccttgttcctcgtactcattttcctgtcatgggtgcagtttccaagaggtggatgtcatttcttgagagcaaggaactcatagctgtgaggaaggaggttgggaaacttgaggaaggggtgtatggtttgactccagatgcntgcgcaaaggggtcgcactgggaagatctagagtgttcagggcaaaagcagagccctcttccgcgtatgcctggactaaccaaagctgggttcggtatggttgttattggtgggaagctctttattattgctggctattccgctgaccatgggaaagaatgtgtttcagatgaggtttatcaatatgattcttgccttaacaggtggactgttcttgc

SEQ ID NO: 455529 - DNA, 337 bp, Sorghum bicolor
  unsure (1)..(337): unsure at all n locations
cgtccgtgatgaatctgatggaaaggatgagctggatgaactggatgaggaagattccgacgaggatgatccaaaatttcagcaggacactgcctgtgagtataggaaactgatcaccatccaagctggcaaaccgaaaggccatttgcgggatgcgctaaaggtggatccagaaaaagtcaggcggctntctttgagtgagacacagttagctaaagcaacaacttctcatggtgctgaagtcataaggttcacccagaataatatactccgtgtgtatccaaagggcacgagggttaattcttcaaactatgatccaatgaatgcctggactcat

SEQ ID NO: 455530 - DNA, 199 bp, Sorghum bicolor
cgtccggacgacaatggtggcgcgtgcggcttcaagggcgtcaacctcccacctttctcggcgatgacgtcctgcggcaacgagccactcttcaaggacggcaaaggatgcggctcatgctaccagatccgtgcagggccaaccttgttggctccggcgtgccggagaggtgatattaacggccatgaactactacccc

SEQ ID NO: 455531 - DNA, 173 bp, Sorghum bicolor
  unsure (1)..(173): unsure at all n locations
cgtccgcttcttctgcctggaggaccgcgcgctgctctgccggagctgcgacgtcgccgtgcacaccgncaacgccttcgtctcggcgcaccgccggttcctgctaaccggcgtccaggtcggcaggactggatggacgaccttccggagcagagcagagggcgcgctcccgc

SEQ ID NO: 455532 - DNA, 246 bp, Sorghum bicolor
cgaccacgcgtccgcgacggcgtccggccaacggggcgacagaaatcctatcggcaagtatactgcatctgttgcccctcacctgtggcaaccagcaaatgggattctgatgacaaatgacactaacgatggcaatccagaagaagcaactgcctgcattgcattgtccaaaaatgactcctatgttatgtctgcctctggtggcaaagcctcgttgttcaatatgatgccattcaaggtcatgac

SEQ ID NO: 455533 - DNA, 138 bp, Sorghum bicolor
cgtccgggagtcggccaagtgcgagtgctgcggcctgcgcgaggactgcaccggggagtacatcgccgccgtcaaggcgggcttcggcggccggtggctctgcgggctctgctccgaggcggtgcgcgacgaggtggc

SEQ ID NO: 455534 - DNA, 482 bp, Sorghum bicolor
cgtccgcccacgcgtccgcccacgcgtccgcatacatgcaaaatctggggaaactgaaaaagctatagaaaccttcaagaaagttacccgtattgacccaaaagatcatcaggcatttgtggaacttggtgaattgttggtagaatccgactgggctgctgctatggaatacttgaagacagctcgaaatctccttaagaaggcaggggaggctgtccctgttgagttgctcaatggaattggacttcttcattttgagaagggagagtttgagatggcagaacagagttttaaggaagcactaggtgatggtctttgggtttcagttatggacgggaaagtaggcagctctatggtcaactggagtgtccagaacaaggatcagagcttctttcaccaacttgaagaagaagggtacctcttgaatacattcaattaaagtaccacactgttaattatgcaagataactggagaactcatg

SEQ ID NO: 455535 - DNA, 453 bp, Sorghum bicolor
cgtccggtgaagcatcatcttcaggtacttcagtcagaaaaggaagcactagggcactgcatgatgagggcatgttaaatattcacattggagtaggatgtgactcatgtggggtatatccgatacgtggtaagagatacaaatgccaggactgcactgagttaattgggtttgacctttgcgaagcctgctacaactccagttcaaagctcccaggacgctttaatcagcggcacacccctgatcacagaatggaagttgacaattcagcactcttgcgtgggatactgagacaccatggcatgcccgaggaaggccctgagggactgatgatggaagaagcggtggttgctcctggtgcattcttgcagatactcgttgatactcaaggaatggaggagggggcactattgtgggggcccaggagaggcggccattgaagaaccagttggt

SEQ ID NO: 455536 - DNA, 403 bp, Sorghum bicolor
  unsure (1)..(403): unsure at all n locations
cgtccgcgtgcggtggaggccaagtcgcggagatgccgcgcgttcccaagtctgcaaggggcaagagatcggtcaggaagaaggaggcccagagcccggcccagatgtccgcattcgaccttctcgcgacggtggcagggaagctgcttgatgagggggtgggctcgctggggaacatgagcgccggtgcctctgccttggctgcgtgcgcgaaggatgtccgtgtgaagcaggagcagtgtgatgaggaaatgaacagttcaagcatgaggtgacggatcaggacagctgcaatgagagtgcaattctcccccacattgctttncagcgggcggtgaataatgctcgaactgaggtcctaaggcgaaatctgaggcccaggacaaaggaatctccatgatca

SEQ ID NO: 455537 - DNA, 380 bp, Sorghum bicolor
cgtccgccctgaagccatcatcagttggtacctcatggagctatagctcaaatgaaatagttgcagcagctatggttgccgctcatgtttctgagttgtttcgtcggtctaggccgtgccttacttcactctctgcaatgatgagatgtaagcgggatgctgagatttctaccagggcatcatccctctaccatttgattgacttacatggtaaaacagtgtcctccattgtgaacaaagccgagcctcttgaagctcacctgacccttacaccagtaaagaaggataatcaacatcgctgtgaggaaaacaataccagctcaatcgatagtgtaagttggaaaacaagatggttcaacatacataagaaaaatggtctc

SEQ ID NO: 455538 - DNA, 495 bp, Sorghum bicolor
cgtccgggttggtgacaggcaatgtggtaaaaaggtgacaaagtctgattcaggcaactggctatgtgacaagtgcaatcaagagtttccagagtgtgattacaggtatctcctgcagttgaacattcaagatcacacgggaacaacttctgcaacagcatttcaagaggttggacaggagctacttggttgctcagcgcgagagctcaacatgtttaaagagaatgaagatcctcgctacacagctgtcttgatccattgcttgtatcagaattatttgttgaggctaaaagttaaagaagaacagtatggcgatgaacgacgagtgaagaacactgtggtcaaggtggagagggtggatccttcggctgagagtaaatttctgcttgattccatttcaaggtttatagtatgagagctttattcttacatctctcaactgctggtccatgtgttgctcgcttagaagtggtataattagtatctaagtctccc

SEQ ID NO: 455539 - DNA, 452 bp, Sorghum bicolor
  unsure (1)..(452): unsure at all n locations
cgtccgccccattctcgatcccgtttgaaatccatccgtcctcgtttcctccgtcccgcagcctctcgtccccatggccaagatcaagatcgggatcaatgggttcggcaggatcggaaggctggtggccaagtggcgttcccacgaccacgcgttgctactacttccctcggcgcactcgatctgtattcctgttcgatgataatagtcgtggtcctagcggtcttacagtcaagaagcaaaggaacactgttagaagataatctggacacccagtaggcctgcaaagaggttggagttgttgctactgtatgtgcatctaccaacattgcagtgtttgtcatccctattgacaactgaacctgcactttcctgaaattttatagaatttctgctggcccttanagtattcagttttcattttccatgttttgtcaatacctttgaattca

SEQ ID NO: 455540 - DNA, 312 bp, Sorghum bicolor
cgtccgattaactgttgtcattgcgtcccagctaacagagagttctagactgaagctagatgatatatgcaggaaagcacatattgatcacggtaagctgacagttcatatggtctaacaggtttggtcagggatagcgtcatggagcactgtgtaatacaatcaacaccagaccacttattggatgatgtgggactgcacaatgcatggactgatctaaagccatttcaagaatcaattgacatatatgatgaaaatcctggtggacacacacatactccatacattgatcttcttgagcgacttgcacaa

SEQ ID NO: 455541 - DNA, 422 bp, Sorghum bicolor
cgtccgagataagaaaattacagatttagttaccaaacagcaacaaatggatgctgaacgtgatcatgccaagtcggagttggaacaatttaaggttgacattgccagggctatgaagcaaaagtcgtcacttgagaaagcccttggcaagaaggaaaaatcacttgacaacatccgcaaccaaattgagcaagtccagtctagcattgcaatgaagaatgatgaaatgggcacagagcttattgatcagctaacttcagaagaaagagatctcctttcacgattgaatcctgaaattactgatttgaaggagaggtttctaatgtgtaaaaacagtcggattgagattgaaacacgaaaggaagaattagagaccaatttatcaacgaatcttatccagcgtcagaaagagctagaagcga

SEQ ID NO: 455542 - DNA, 536 bp, Sorghum bicolor
  unsure (1)..(536): unsure at all n locations
cgtccgcgacccacgcgtccgcgcggcgcaccacgaactcttctttcttcgccgtcgccccaccgctcccgctcggactaccaccaccgctccacacctcccgtcgcgccgccgagcgacggcggcatccgcctcctccggtccgtcccgccacccgcgccgtctcgcctccgccccgcctccctccgtcgttcctggccgccgggcttcttctccgtcgtcggctacgcgcgtgagaaggaaggaggagccgcagcacgtggatccagggcagcggcgtccgttccgcgtgagaagagagaaggagccgaaagatgattaatcttttcaaaataaagggtcaaaagaaagaagaggcagcaagtgctgctggaaaggccccggttaagaaacagtctgctggggagctccgtcttcataaagatattagtgagctcaacctgccgaagaccacatcaatttcttttcccaatggcaagggtgatcttatgaattntgagatcatcatccgaaccggatgaaggtactacatgggg

SEQ ID NO: 455543 - DNA, 402 bp, Sorghum bicolor
  unsure (1)..(402): unsure at all n locations
cgtccgcccacgcgtncgcccacgcgtccgcccacgcgtccgggagaacacgctcgtgccgcatgaatgggtgaaccaccgccactcgtactggtccagcggcggcaaggacaaccccgacgcccccgagagcttgacctacaggctctcctctgacctctgcgtgattgatgagatcagggtgcgcccctacaaagctgcttttcagcttggccatcctatttactcttccaaggcggtgaggatccggctgggtcattccaagcttgatcctggaacagagactntcgtgtcagctgagaatgagaacctgacagcaatcgctgatgaaaactacacgtggacatacacgtcgncagagttccctatgcttcaaggaaaatggttgcaaaccttcaagct

SEQ ID NO: 455544 - DNA, 460 bp, Sorghum bicolor
  unsure (1)..(460): unsure at all n locations
cgtccgagaggcgctagacagatacagagaaattgttccaactcttcgattagcaggtcctacatctttcgctccaataattgagacagcagttggaattgttgacagcactggtggtcaatatcatgttcttctgataattgcagatggacaggtcacccgaagcgtcgatacacaatctggacaattaagtccacaggagcgggctactattgatgcaatagtaagagcgagccagttccccttgtcaattgttcttgttggggttggtgatggaccatgggacatgatgcaccagtttgatgacaatatacctgctcggtcatttgacaatttccagtttgtgaatttcacggagattatgtcaaagagtgtagcagctgacagaaaggaggcagaatttgcattgtcagcactgatgganatccctacacagtacaaagcaacacttggtctcaac

SEQ ID NO: 455545 - DNA, 414 bp, Sorghum bicolor
cgtccgcccacgcgtccgactgcctggagcatggcattcaggctgatggccagatgcccggtgacaagactgttgggggaggtgacgatgctttcaacaccttcttcagtgagactggcgctggcaagcacgttccccgtgctgtgtttgttgaccttgagcccactgtcactacagtgttaggactcgaagaaggaaaggattgcataattgttggaactttatataagcacatgaagttgaagccttccattcttgatgaatatgccaaagagaggtctgcaattcctcttgtcaaaccgcataatttcatgcatcctgatgatcatctcattctcgaagatgaaagtggaagggttacacttgcaggagccattcctccagcagcatttgtgacctggggttgagtggctc

SEQ ID NO: 455546 - DNA, 400 bp, Sorghum bicolor
cgtccgcctccgcctccgattgagtggctcaccttcttccccacccagcaatcctttctctctcgatcgacagagagattccagctcggttctcctccagaggtccgtcgagcagaccagcctcctccgaggaccgaagctctctctgcccagttcgttgccagtcaaggaactgctgctgttcttggcagatcttggccggagatccgaacaaacttgcgcgttggggggttcgccggggttccttgcgctggagggaggtttcgttctcgccggccatggtttggctgggaagcaccagcagcaccgccttgatgccaaatctctgagctttatgaagatcgccactcacctgcgccgctcctgcttcctccactccttctccgtgtcttcctctact

SEQ ID NO: 455547 - DNA, 347 bp, Sorghum bicolor
cgtccgagccacagctttttgcagcttggtctgaatgtagcatatgaatcattccatgacttgctcagctcacctggccttagcttaatggccacacatttgatttctcaagctaagtacaaagatccttgcactccaaggggatttacacacatagcaggatcagttaaacttcctgttagtgttcttgagccgaaggttgagtacagaccgtttgctcatgctgtggggaacttttctgagtgtagatctgcagcgttaacactacttgcaaaaaggaaaggagggtgtacatatcataatgtcgccttgagcggcatttgaccctgagttgaaggaaattttag

SEQ ID NO: 455548 - DNA, 371 bp, Sorghum bicolor
gttcctgacaccgaagtacctgagccagatgaagatcaagatgatccagatgaacggcatgatcctgactctgatatggaagtggatgatcacaaggctgtggaagagtcagcgaggaggagcattccaggtataaaagttaagagagaatttggtgaaaatgagaccaaagtgcaggatggtggcagaattgcatctgaccatagaggagtggaacccatggcagaagacattggttcttccaagcaagctcctcaggcggatgccagtgcgatggctgttgatgagccaagcaatgttaagaatgaacctgagagctcaactaaattggcagatcaagcagctgcataccacaagccataactgcgaca

SEQ ID NO: 455549 - DNA, 420 bp, Sorghum bicolor
cgtccgcccacgcgtccgcccacgcgtccgcttgtgcttgccaactttgctcagcaactttcaatgaagggctttgctggtgacacagcaaaggcacatgccaagagcagtatggttgcaggtgaaggagtgagcaatatccgcaccgtagcggccttcaacgctcaaagcaagatcttgtcactcttgagccatgaactgcgtgtaccagagcagcaaatcctccgccgcagccagacatcaggtcttttgtttggcctgtcacagctctgcttatactcctcagaagcgctcatcctctggtatggttctcatcttgtgcggtcacacggatccaccttctctaaggtcatcaaggtttttgttgtccttgtggtgactgccaactccgtagctgagacggtgagcctggccccagag

SEQ ID NO: 455550 - DNA, 471 bp, Sorghum bicolor
acgcgtccggatgattcaagcctttttgagaggtcgcagggtagctgatgcgctccacatgtttgatgacatgttggcccaaggagttctgccaaataccgggatgataacatcatttatcaatccattgtgtacatttggaccgcctcatgctgctttgatgatttataaaaagagtaggaaggctggttgtgtaatatccttgaaagcttataagcttttgctagaaaggctcgctaaatttgggaagagcggaattgttttggacatttgggaagagatgcaggagtgcggatatcaacccgataaagtgatttacgagtttattgtaaatgggctttgcaatgtgggtaaggttgatgctgctgtgtttgtggtggaggaatcacttcggaaatggcttctgtctttggggagagttgttgcagcaaactgaacaacaaagctgttgggaaaatggccaaagttgag

SEQ ID NO: 455551 - DNA, 490 bp, Sorghum bicolor
  unsure (1)..(490): unsure at all n locations
cgtccgcttctacaggaaagggttcgtcctcatggcgccgccgcagccgaagtcgggcctcttcgtgggcatcaacaagggccatgtcgtcaccaagcgcgagctgcctccgcgcccgtcccaccgcaaggggaaagcaacgaagagggtgtccatggtcaggggcctgatcagagaggttgctggctttgctccttatgagaagcgtatcactgagcttctgaaggttggcaaggacaagcgtgctctgaaggttgccaagagaaagcttggaactcacaagagggcaaagaagaagagagaggagatggctgtgtcctcaggaagatagatcggctggtacgcacacagacaagaagaaatagagcatttcaagtttatgaagctggcggccagaggatttgnttccggtgtctgttttcctacttgtagaacgtaatagacatgtcaaagtatctgcagcgaaaataatgggtggtaggtatgatcg

SEQ ID NO: 455552 - DNA, 450 bp, Sorghum bicolor
cgtccgtgaggctcgtgttccattccttgacaaaagtttcatcaatgtagcaatggacattgatccggaatggaagatgataaaacgtgatctcggtcgaattgagaaatgggttatccgtaatgcatttgatgacgaggagcggccctatttacctaagcacattctttacaggcaaaaggaacagttcagtgatggtgtcggctatagttggatcgatggattgaaagaccatgccaaccaacatgtcacggattccatgatgatgaatgctagctttgtttacccagagaacacacccacaacaaaagaagggtattactacagaacaatattcgagaaattcttccccaagcctgcagcaaggtctactgttccctggggtcccagcgtggcatgcagcaccgccaaagctgttgaatgggacgcatcctgtccaagaaccctgat

SEQ ID NO: 455553 - DNA, 417 bp, Sorghum bicolor
cgtccgttcacaaacgccggcgcttccactctcgatcgatcgatcctcgaccattccccattccgtcctcccccgatcgatcctcgaccattccccttcccgtcctcccccgatcgacgagcggttgtctgagagaagaggaggaagatgagggagtgcatctccgtccacatcgggcaggccggcatccaagtcggcaacgcgtgctgggaactttactgcctcgagcacggcatccagcctgatggccaagtgcctggagacaagactgcgggacaccacgatgatgccttcagcaccttcttcagccagactggtgcagggaagcatgtgccccgtgcaatcttcgttgtcttgagcccactggatcgacgagggcgcactgcactaccgcagctttcaccctgagcagtatag

SEQ ID NO: 455554 - DNA, 448 bp, Sorghum bicolor
  unsure (1)..(448): unsure at all n locations
cgtccgggacttcaaaatgttgaaactcctgaatcgccaaaaccagacaatgttgatagccaatcaagtgatgaaacaaaaagctcatctggagaagttaagaagcctgactctgtagctattcctgaagatttccgttgcccaatatctctcgagctgatgagagatccagtaattgtttcaacgggacagacatatgaacgtgctttcattcaaaggtggattgactgtggaaatcggacctgcccaaaaactcagcagaagctgcagaatcttgcattgaccccaaactatgtgctnagaagtttaatattgcaatggtgcgaggaaaaggggattgaaccancctagcagatctaaaagtgatggttctcctctttgagggtggtggcaacagattagcaattgaagccttagttcgcaacctctctagtagtcattagatgaa

SEQ ID NO: 455555 - DNA, 485 bp, Sorghum bicolor
  unsure (1)..(485): unsure at all n locations
cgtccgcttgaatgaggaatcggatattatattgaagagacctggcattaaggcaaggttgcataatctaatgattcagctgaggaagaattgcaaccatcctgatcttttggaagctcaagttgattcaataggtttatatccacctgttgagaagatcctggaacaatgtggtaaattccaactttttgacaggttactaaattacctgattgaacaaaagcacaaggttctagtattttcgcaatggacaaaagtgttggacattattgagtattaccttgattcaaaaggccatgatgtttgccgaattgatggtagtgtaaaanttgaagaaagaaggaggcagatagcagaattcaatgacttgaatagcagtatgcgaatcttcctcctgagcacaagggctggtggacttggcatcaaccttacttctgctgatacctgtatcctctacgacgtgactggaatcctcagatggattg

SEQ ID NO: 455556 - DNA, 426 bp, Sorghum bicolor
cgtccggccacacacaggatagcgagagcggcagggacggcggcgccgagctagggttttgatccggcctcgccggccagaggctacgccgccccgccgccgaagccatggagagggagctgctggagacgttcgatgcggccaagaaggcggccgacgctacggcagcggacggcgactcgccggaggctgaccgctgcctcgacgcgctgcgccggctgcgcgacatacgcgtcaacaccgacatcctcgtctccacgcaggttggcaaacgtctccgaccccttactaagcaccctcactcaggcatccaggcggtcgctgcagacctttttgggtactggaaaaaggttgtccttgaagagtcaggaaagaaaaatggtggctcagagaatgaaagatcaagtgactcttctggaaaggtga

SEQ ID NO: 455557 - DNA, 320 bp, Sorghum bicolor
cgtccggttatccagtagggatgttgctggatgtgctggctaagcacagagacaagtaccatgatttgctgcttgcggattgccgtaggcaggtggcagaggcactggctgcagataagtttgatcagatgctcatgagaaaggagtatgaatactcaatgaatgtccttgcatttggaattcaaagctcagatatcaccccagctttcccatatgttgcaccattttcatgcactgtcccagacatttgccgtattgttcgttcattcattgaagattctgtgagcttcatggcccacgggggtggtgggatacctatg

SEQ ID NO: 455558 - DNA, 272 bp, Sorghum bicolor
cgtccggacaagcgtccgaccacacatctgcctatgcatccggaagatggccgctgacgacaccttactcttgacctgcgagcatgtgaaagaggcacacctagacacgctctgcgaccaggactcatgatgctgatgttgacgcttgactcgctgaggaccctgacagcaaggttgcttgcgagaccagcaccaagaccaacatggtcatggtctatggtgtgatcaccaccgacgccaatgtcaactactagaagatagtcagggagacc

SEQ ID NO: 455559 - DNA, 386 bp, Sorghum bicolor
  unsure (1)..(386): unsure at all n locations
cgtccgcccacgcgtccgattacctacgcctcgtcccgctcatcacgctcgtcgacaatgcccgcattcgggatcggcttgagtatattgagagggaccaatgtgaatattcttttgacgaggaagacaagaaagtgcaagatgctctgttaaatcctgacccttgcacgaatcctacaatagtgctcaagaagactctgtcatgttcctatccaaacttgcctttcaatgaggccctccgaaaggaaagtgagaagcttcaggttgagctttcaagatcacaaagcaacatggatctgggttcgtgtgaggttattcagcacctgaattgagtaaccaaaacttgtgaatctacanatccagaggaagaaacaaatgctaaagct

SEQ ID NO: 455560 - DNA, 401 bp, Sorghum bicolor
cgtccgcccacgcgtccgggccatgaacatggagcagcaaatcaagcacagccatctcccgatccgaggcctcagcctccacgtggcccaagcaggcaaaggcgagctgggcacggtggtgttcctgcacgggttcccggagatatggtactcgtggcgccaccagatgctggccgtggccgccgccgggtaccgcgccgtcgcgccggactggcgagggtacgggctctcggaccagccgccggaggcggaggccgcgtcgtacgacgacctggtggaggatctcctcgcaatcctcgatgctctctccattcccaaggctttccttgtggcgaaggatttcggagccatgccagcctatgactttgctcttcgtcaccctagccgcacatgtgtgtcat

SEQ ID NO: 455561 - DNA, 522 bp, Sorghum bicolor
cgtccggcggagaagaggaggcaggcagcggtctcggccatggcgagctcttccgaccccgacaagctcatgagcaaagccgacaaactaacaaaattaagttttacaaggtggaatgctgattggaaaagcgccacttccttgtatgagcaagctgcaattgcttataggttcagaaaggacaatgagaaagcaaaagatgcgtttgagaaggcctcaaaaggacaggaaatgatctcctcaccatgggacgctgctaagcatatggagtctgctgctgctttagcaaaggatcttggacgctggaatgaagtatctgatttctatcacagagcttcagaattataccgtgaatgtggaaggtcacaacctgcatccgatgctctagcaaagggtgccagtgcattggaggagaaatctccagaagaagctattaaaatgtatgatgaggcttgttcagttctagaagaagatgggaaggaacagatggcttttgacttgtatcgtgctgcagcagctttg

SEQ ID NO: 455562 - DNA, 462 bp, Sorghum bicolor
cgtccggaggaagttaagtgattatattggagagctaaatgcagctgatgcaagccttcgagctctgaagaggttagcaactgccaagaaggctgaagtttcatctgatgaaactggtaaaattttatccgatgaagattttaaacgcatcaaagaactcaaggcaaagaaagaggcaaagctggctttggctcaacatggactaatcaagggtggtgacacgagatctgtaacctttaagatgccatcttctgatcaactcagtaggaagcgtgttgatccacttgagcttgaggctcacgtcaggagaaagatgtcgaaggaagaaaggttagcgttagtgaaagctgggagagaggatagaggtgcatacatggcgagaacggctgtgaaacagaaaaagaacggtggcctgagcaataaacagaagcagcacaagaagaggatgcccctggcagcgac

SEQ ID NO: 455563 - DNA, 314 bp, Sorghum bicolor
cgtccgcccacgcgtccgcacaaatagctctgcttgcaaactgaagttgggagatttcgagggtgctttgttagatgctgattatgcactgcgtgaaacggaggacaatgcgaaagcttttttccgacacggacaggtacgcatggcactcaaccatattgatgcatcagtcgagagcttcaagcaagcactggagctagagccaaacgatggaggaattaagcgagagcttgctgctgcaaaaaagaagatttctgacaggcgggatcgggagaagaagggtttttaaagttgttccgatctttcaggaggat

SEQ ID NO: 455564 - DNA, 467 bp, Sorghum bicolor
cgtccgcccacgcgtccgcccacgcgtccgcccacgcgtccgcgctctcaggtgcagcccacaggtcgaagcggcagccacccgcgatgagcaaagcaggcggcggtcccggctcggccccgggcccgacggccgcggcggcggcggcagcggtgcagaagcagaagtcgctgctgcagaaggcggacgccgacgtctccagcctcgtcgacaatttctcctcgctcatcaacatagctcgagtcaacgatccgccagtgcgcaactcgcaggaggtcttccagatggagatgcgcgccgcccgcatggtacatgcagcagactctctgttgaaattagtgtcggaacttaagaggacagccatcttttctgggcttgcttcattgaatgaaaatgtggataggaggaattgagtgctgggcagcaagctgagggaactgagagaatgctggagaggatgggcagga

SEQ ID NO: 455565 - DNA, 487 bp, Sorghum bicolor
cgtccgaccgagcgagcgaagccatggctctccgtaccctggcatcgaagaaggccctatccttcgcgctcggcggcgcggcccggccgttggcggcgttcgcgaggggggtgacgacggtcacgctccccgacctctcctacgacttcggcgcgctggagccggccatctcgggggagatcatgcgcctgcaccaccagaagcaccacgccacctacgtcgccaactacaacaaggcgctggagcagctcgacgccgccgtcgccaagagcgacgcctccgctgtcgtccagctccagggcgccatcaagttcaacggcggcggtcatgtgaaccattcaatcttctggaagaacctcaagcctattagcgaaggtggtggggagccacctcatgggaaacttggctgggccattgatgaggaatttggtcgtttgaagcacttgtaaagaagatgaatgcagaaggcgctgctttacagggatct

SEQ ID NO: 455566 - DNA, 358 bp, Sorghum bicolor
cgtccgcttgttgcagcactgaaaaaaattgaaccagaagatccatcagaacctacacatgatcctgaggtgcttacacctgaagagcacttctatttcctcaagatgggccaaaaatgtaaaaattatgtgcctgttggaagacgtggaatttaccagggagtgatcttgaacatgcacttgcattggaaaaagcatcaaactctccaagtaattgtgaaaacattcacaccagaagaggtcaaggaaatcgccactgagttagccagactaagtggtgggattgtgcttgacattcaagatgggaacacaattatcatgtacagagggaaaaactatgcacaggcaccaccagaaa

SEQ ID NO: 455567 - DNA, 469 bp, Sorghum bicolor
  unsure (1)..(469): unsure at all n locations
cgtccggattcctattttctcttttgcagaaatcaggctatgaggtgtacttgctggaggcaccatacaaggatccaacgggctgtgctgcaaggaatgtgcacggatttacattggatgagataaaaaagatggcagcagactgggaggaggctccaccactgtatctgcagctagatatacattcattattccatgatgataaccttcgtggccattctatacaagaggtagatatggacactgaggatgttgatgatgctaatgacacaactagcatcattgctgagacttcacagaaggctgtacaggatccaccatatgaaggcttctcaaagccaggggagaagtggaactcagaagtagaagatgaccgggatggcttaaaagagctaggacagagtaaatggtcaaaagattttgacgatgacnaccgaaagtctgaaaatacagaggaaaacacacatgc

SEQ ID NO: 455568 - DNA, 452 bp, Sorghum bicolor
  unsure (1)..(452): unsure at all n locations
cgtccggagcgagggaccaccggaggcggaggccgccgttagcacccacaccaccccgcggcgcgtgtccgcagccatgggggaagacctcgtcaccaccctgtccatggagaacggcggcggcggcggcggccaccacggcccctgcacgctcctctccatggacccgtcgggccacctctccgcgccggacgaccgcgccgtcggcgtcatggtgcaggccctcatcggaggggccgtcggcgtcggcgcccgcgcccacgccgtgtcgccctccggcgcgcctccgcccgacatcaaccagccctggcagacggacctctgcgacatgctggacgtcggcctcggcccgcaggtctacagcgccgaggcagtactcagctgcgctcccaaggccgggaaccggaaggccgccaagcgcggngacaccatctggggcgcctggttcttct

SEQ ID NO: 455569 - DNA, 487 bp, Sorghum bicolor
  unsure (1)..(487): unsure at all n locations
cgtccgctggtcccctgtctggaaatcggcttgttattgctctatggaaccgttgttctgagactgctaatattacaatgaaactgccagcggtaggccttgatggatcagctgcctattctgttagggatctgtggaagcatgaaacgctatcagaaaatgtggtaggaacttttggcgctcaagttgacgtgcatgacaccaagatgtacatcttttctcctgcaaccagtgtcgcttcaatttgatcggaactcgtgaatccaagatggcagcacgctatattcaaaggatatcacgacaaggaacttcatttttcctgctgcagtctgtcccactcaagtgcagaagcttacttcgtgcagaattgtctcattaatgtttgccatttctcacgaagtaggtctctntatgtttcttcttttcaatgaagttgtactgccaaatgagggtggctcatgtgttggctagactgagcgagctcgca

SEQ ID NO: 455570 - DNA, 512 bp, Sorghum bicolor
  unsure (1)..(512): unsure at all n locations
cgtccggctgcagcaaccactgatggtgttttattgtactcagttgatgaatcatttatttttgatccgacagaccttgacattgatgttacgcctgagaaagtagaggaagctcttgcagaaaaccaacagcagagagcccttatacttagccttcggttgaatgaggactccttgattaagaagtgcatattcgcagttgatccatctgatgtaagagcaatttgttcggcaattccttacaagtatctccaaagattgattgatgctttcgctggtcttttggaaagttgtccgcatctggaatttatcctcctgtggtctcaggagctatgtaaggttcatggccactatattcaacagaactccagaactttgcttccttctctgaaatcattgcagaagtctataacaagactacatcaggatttggcagacactngctcttctaatgagtacttgttgaaatatctgtgcactggtggtacaaagaaataaggcggtgggcaaca

SEQ ID NO: 455571 - DNA, 467 bp, Sorghum bicolor
  unsure (1)..(467): unsure at all n locations
cgtccggggagcctccaagtgtcagacagatagatggagagtggaagttggactcaagaaactccgtgttggaatggtctattcttcttattgatcagtcgaatcgcagtggttccatggaatttgttgtccccccagctgacccatcatcatttttccccatctctgttggattttctgcatcgagtacattcagtgatctgaaggttactggaatccttcctctgaaggaaggcaaccctccgaagttttctcagcgggctcgtttgctcactgctaactatcaagttgtttaatgcttgtaccacagtctgagtgttgtccacttaacatattcaatncagatattgtgtatgcatgtattgcatngacttgcagccatgcacgagatcattggttgaaatcttacttggacttatgtagctgtgcaagtgtctgtgatgtcaaaatagatgctcatcgtgctc

SEQ ID NO: 455572 - DNA, 477 bp, Sorghum bicolor
  unsure (1)..(477): unsure at all n locations
cggacgcgtgggaaaattatgacgacttgtgtgaatgccatggtttgcagataactgagctgaagctccttgttgatagcctggagaaggagagagatttctacttcaccaagctgcgggacattgagatgctgtcccagaaccctgaggttgagcacgtttcggtccaaactatccagaacatactctacgcatcagaggaggacgctcagcagctgcctccggccctgagccccatcatggaggcgtccgaggagaggccgaagcaagagatggcgaacaagaggaagagcatctcggacctggacgagtttggtatgtcatccagctcaaggcagaggctctccgacatctcggacgtgcagctgtgcggttcgccactgacgagtttcagctgaaggaacttaactgtcattgctacanaatggggctngtcattgctgtcatgacttgtccttctgaaccttggtgtctcgt

SEQ ID NO: 455573 - DNA, 424 bp, Sorghum bicolor
cgtccggatgaggctcagtccaagagaggtattctcacgctcaagtacacgctcgagcatggtattgtcagcagctgggatgacatggagaaaatcaggcatcacactttgtacaatgagctccgcgatgccccggaggagcaccctgtgtagctcactgaagctcctacgaacccaaatgccaacacggagaagatgacccagattatgatcgagactatcaatgttactgccatggatgttgcgattcaagccgtgctctacctctatgctagtgggcatactactggaattgctattgactctggtgatggcgttagccacactgtgcgcatctacgaacgatatgcccttcgacatgctattcttcatgcggatcttgctgggcagcaccttacggactctcttatggaaattcttactg

SEQ ID NO: 455574 - DNA, 486 bp, Sorghum bicolor
  unsure (1)..(486): unsure at all n locations
cgtccgctcaacttctcacgttacggtgacacgttttttgaggtggtttttgttggagggcgcactcagcctggcactataaaacctgaagaaggagaccgccacccttattctgtgttagattgtgcagcacagcgtgaaacaattttgcctttcgtactctatatccagaaaacattgcgcaggaggcctttcttaataaagaatcttgaaaatgttatgcgcaaattcctccaatctttggagttctttgaagaaaatgagagaaagaaactcgccatattcactgcccttgcattttctcagaagctatcagggcttcctcctgagacagtgttccagccactgctcaaggataatcttgttgccaaagggatagtactttcattcatcactgagtttttcaaggagtaccttaaggaaaacagcttggatganttgattgcacttttgaagaagggcaaaatggaggacaatctgttggac

SEQ ID NO: 455575 - DNA, 429 bp, Sorghum bicolor
cgtccgccaaagatggcctcgagatcacaaacaatctcatcacctgcactactacttgggttcctcgcgctactgctgcccctgcagttcactgatgcatcatcaggccaaacgacgatctacgttgtgtacatgggtaggaagatgcacgatgacccatccgtggtcatggcatctcaccacgccgcgctgacctccattcttgggagcaaggatgaagccctcaactccatagtctacagctacaagcacggattctccggtttcgcggcgaagctcaccgaggcgcaggcagaggcacttcggaagtaccctggtgttgtgagagtgaggcctaacacttaccatgaactgcacacgactcggagctgggattttcttggcatgagctacggccaacaagcatcgtcgtcgtcgtcgtcgtcgtcg

SEQ ID NO: 455576 - DNA, 549 bp, Sorghum bicolor
cgtccgcagtctttgaagcttctttaagagctacacttgccaggattggaacaaacttttctgtttctggctttggctcaagcctggataaatcacctgcagcagctattgatgagaatgcagacttgcctcttgctggaagggctgcactagatattgcagctattcgcctaagtgatctgccagacaagtctaagaagctcttgactgtactagaacagtcaaaagatccacggttccatgctcttcctctcacatcacaaagagttgcagccttctcagacacagtaaatgaacttgtctatgatgtactcatatctaaggttcggcagcgtctcagtgaggttgcacgccttccaatctggtcatccgtggaggaacagggtggtcttcctcttccaagtttcagtgcctacccgcaagcatatgtgaccagtgttggggagtatctcctcactttaccacagcagctggagccactcgcggaaggtatctcaggcaatgaagctggcaacgacgaggcctcagtctttgccactgagtggattt

SEQ ID NO: 455577 - DNA, 525 bp, Sorghum bicolor
  unsure (1)..(525): unsure at all n locations
cgtccgccctcgcggcggcctcctcctcctcatcctcccccatctccgccgccacttgccgccgctttgccctgctcttcgaagcagcccctcgcataagcgcccgggaccaggagccttcttcgcccccgtacgcgccgtctccggctactccggcatggcggcggggacgccggaggagcagcagcagcagcagcggagcgttgtggtcagggagaccgtggagctcacggagacggaggagcgcatcttcaaccgccttctcgaggttgttcgccacttcggcctcggcacgcagctccgcgtcgccggtggatgggtccgggacaagctattagggaaagactctgctgacattgacattgcccttgacaatatgacgggccagaatttctgtgagaaagtaaatgagtactcaaagttgataggggagcagcagaaagggaattgtgttatccagtgttttttgcagtaatcctgatcaatccaagcactnggaaactgctaggatngctattctcgaca

SEQ ID NO: 455578 - DNA, 385 bp, Sorghum bicolor
  unsure (1)..(385): unsure at all n locations
cgtccgcggacgcgtgggccgttccccaattcgaaatcgaatcgggtcggtcttgccgtgcgtgcgtgcgtggctgcgcgaacgactcgactgcacaccccccaccccgctcctccctccctcccgccgccgggtcttcccccctagggtttcgccgcgatgtcgctccggccgagcgagcgggagcagatgcggaagggcaactacaagcagacggtggacgcggaggagagccgccgccgccgggagggccagatggtggacatccgcaaggccaagcgcgaggagagcctncagaagaagcgccgcgacggcttnccggcctccgncgncggcgccgttccgcccatgggacactccaccgcgctncagcagaagctcgatg

SEQ ID NO: 455579 - DNA, 500 bp, Sorghum bicolor
cgtccgggctgggattgataccaacttcacagttacctcaaaggcatctgatgaggatggcgactttgctgagctatatgtgttcaagtggaccagtttgctcattcctccgaccactgttcttgtcattaacctggtcggaatggtggcaggaatttcgtatgccatcaacagcggttaccaatcctggggtccgctctttggaaagctcttcttttcgatctgggtgatcctccatctctaccccttcctcaagggtctcatgggcaggcagaaccgcacaccaacaatcgttatcgtctggtccatcctccttgcgtccatcttctccttgctgtgggtgaagatcgatcctttcatctccccgacacagaaagctgccgccttggggcaatgcggtgtgaactgctgatcgagaccgtgactcttatttgaagaggctgaatcaagatcgtctgccccctcgtgtaaatacctgaggaggctagatgggaaatttt

SEQ ID NO: 455580 - DNA, 419 bp, Sorghum bicolor
  unsure (1)..(419): unsure at all n locations
gtgtggcgcaccacttacctgcacccgctggcggatcatgcggcagtggtggagtggttcaaggcttcggcgttacggccgtttctcgcgccattgtccgatagcgaaaaaaccgcgttcctgcaggactaccaagcgcggattacccaggcctacccagccctggccgatggcaccgtgttactgcccttcccgcgcctgttcatcatcgcaacgcgctgaaacccggcaaacaagcggtggtcacacagccgccgcttggctctgcagatactcatccgccgacatcacgctggcgtangcaaagcccagcgatgccataaaagccccctgcacttgggccgccggaatcacctgcccgttgaactccagatcccgcgtagcgcacgcatcgtgaatcaacgtgaccttgtagccca

SEQ ID NO: 455581 - DNA, 431 bp, Sorghum bicolor
cgtccgaagctgcagctattgttttagaagactatggactcccttactctacagaagagttcctctcaatgattactccagtgttcagtgaacagtggtgcaacataaaagctcttccaggagctactcggctgctaaaacatttaaggagtaatggggtgcctactgctttggcttcaaactcaccaagatctaacatagaagccaaaatttcatgccatcaaggatggaaagagtctttctctgcaattgttggtggagacgaagtagagaaagggaagccatccccagatatatttttggaagctgctaaaagaatgaacgccactccttcaaattgcctagtaattgaggattccttgccaggtattacagctggtaaagctgcagggatgcatgtcatagctgtaccttcaatacccaaaaagact

SEQ ID NO: 455582 - DNA, 389 bp, Sorghum bicolor
cgtccgctctctctctcttctccccccaatctccgagccggagctcgagctcccaaaccctaggcctcagccggggagccatctccgccacgccagcgatgcctctcgccgcagcggcttgacggggcgtgccccatcccaaacctacctctcggcggagagcgcggcgtagttgctgtaggaggcccggcgtgggtgagaaatggagccgaggcggatctcggcgagcccgcgcccgtgcagcgggcggcgggttgtggcggccaggaagaggccgaggcaggaggcggtggtgagcagcgtgcggaagctgcagcgccgggagatcaagctccgccgcgaccgcgccttcggcatgagcgccgcgcaagagcgctttcgcaacatac

SEQ ID NO: 455583 - DNA, 493 bp, Sorghum bicolor
  unsure (1)..(493): unsure at all n locations
cgtccgatttgaagaactgaaagaaaagaccgacaattttgggtcaaaggctttgattggtgagggatcatatggaagagtgtattacgctattctggacagtgaaaaacatgttgctgttaaaaagcttgacgcttcaacagaccctgaactcgataatgagtttttgacacaggtatccattgcctcaaaactaaagcatgataattttgtggagatgcttggatattgtgtggaaggaaatcagcgtctagtggcctatgaatttgctacaatgggttctctgcatgatatcttgcatggaagaaagggtgttccaggtgcacagcctggcccagcacttgattggatgcagcgggttaagattgctattgatgctgctaaagggctagagtatcttcatgnaaaggtgcagccttcaatagtccaccgggacatacggtctagcaacgttcttctgtttgaggactacaaagcgaaaaatgcagatttc

SEQ ID NO: 455584 - DNA, 451 bp, Sorghum bicolor
  unsure (1)..(451): unsure at all n locations
cgtccggcaattgttttattggctgttggtacaactacaagccaggtgaaaggatgtggagatgcaccatgtgattctcttttctcagcaccattgcagggttacatgcttggaatactttctgcttgtctttccgctctagccggtgtgtacacagaatatttgatgaagaagaacaatgatagtttgtactggcaaaatgtacaattatatacgtttggagttatgttcaacatgggctggctaatttatggtgattttaaagctagatttgagctgngtccatggtggcagcgcctttntaatggttattcaatcacaacatggatggtagtgttcaatttaggatctactggtctgctagtatcatggttgatgaagtattctgacaatataatccaagtgtactcaacttcaatggcaatgcttttgacgatggtttatctatata

SEQ ID NO: 455585 - DNA, 567 bp, Sorghum bicolor
cgtccgacaaaaacctcacaggaacagcacgatatgctagtgtaaacacccatcttggagtagaacaaagcaggagagacgacttagagtctcttggttatgtgctgatgtacttcttaagaggaagccttccctggcaaggcctgaaagctggaacgaaaaaacaaaagtatgacaaaattagtgagaagaaaatgctaacctcaattgaggccctttgtaaatcttatccatcagaattcattacatacttccattattgccgctctttgcgatttgaagataagccagactatagctatttgaagaaaatcttccgggatttattcatccgtgaaggttaccagcctgattatgtatttgattggactgtatcaaggcaagctgcggacaataacagattgcgactgagcgggaagacaggtgggttggtgggaccatctgtggatcgggctgaacgagctgcaacaagacatgatgttgcggaaagattcactggtccagctgatgcatttactagaagaactggctctggttctggtcattatggagaacacacaaagcaca

SEQ ID NO: 455586 - DNA, 480 bp, Sorghum bicolor
cgtccgcgtgcccccccaccgatttcgtcggcctcctcgctcctcttctcccccgcctcgccaccccgaattagaaggagctccgaatctaccgggccgagctcgcccgctggcctccccgagggcgaagccctatcggctgccgctcctccgttgacaggggagctcagccccaccgccgccgcggctgcggcgggtggacgtgaccggagctcctcgccgccgccgataagatccgaagggttcctagactttttgtggcgggaggcgactggttccgtcgggtggtccggtgagcatggcggggcccaagttcgggtcgttcaaggcagaaaagggggactccgcggcggctgccggcgccgcggtgcagaggaaggacccatacgaggtgctcggggtggggcgtaatgctacggagcaagagatcaagagtgccttccggcgtatggcactcaagtaccatccagataagaattc

SEQ ID NO: 455587 - DNA, 493 bp, Sorghum bicolor
  unsure (1)..(493): unsure at all n locations
ngtttacagactatgctgacttctgttttaagacctacggtgatcgcgtaaagcactggtttacattcaatgagccaaggatagcagcgctacttggctatgacgtgggatcaaatcctcctcaaaggtgcaccaaatgtgctgctggtgggaattcagcaaccgaaccttatattgttgctcataattttctcttggcacatgctgctgcagttgcaagataccgtacaaaatatcaggctgcccagaagggtaaggttggaattgtcctggacttcaactggtatgaagctcttacaaactcacctgatgaccaagcagcagcccaaagagctagggacttccacattggctggtttgttgatccattgataaatggacattatccacaaataatgcaagatcttgtgaaagagaggctacccaggttcactcctgaacaagctaaaatggtcaaaggctcggcagactacatggtattaatgaatacaca

SEQ ID NO: 455588 - DNA, 408 bp, Sorghum bicolor
  unsure (1)..(408): unsure at all n locations
cgtccgcaccagtttttctccacaaggactggataatggagcagtgggagaaaagttactacataacagcaattgctggatcaaccaatgggagttcattggttgtcatgtccaaaggaactccttacactcagcaatcgtacaaggttagcgaatcattcccttacaagtggatcaataaaaagtggaaagaaggatttcatgtaacatctatggccactgccggaaatcgctggggtgtagtcatgtcaaggaactcaggatttctactaggttgagagttggattctgtccctagcaatgatcatcgcgatgagagggtcaggtacttcaagngcacatgacactgttcattacatgcaacgagcgtgtaaccagacttcgacttgctctacccattagaaatgc

SEQ ID NO: 455589 - DNA, 510 bp, Sorghum bicolor
  unsure (1)..(510): unsure at all n locations
cgtccgagttaccattcccaagtccaaatgatgaagtcgctcctcttctccgtccaccccacgccgccgctcctccccaccccccgccttcgcaggctcctgcgcttccgcgcctcctcctcagcctccgcctccgcctccgcgccgccccgagccgaccgccgctcgccccggcccgcgccgtcgcgccgcccatcctcctcctccctctatgcgcgccccagcctcctcgagatggagcgcgagcgcgccgcccgccgcgcggacgttgacgccttcctcacctccctcggcgtcgacccgggcgagctcgcgggcctcgagctcccggtcaccgtcgacgtcatgcgggagcgcgccgagttcctgggctccctcgggctcacccgcgaggacctcgccgcgtaccctctcgctctcggctgcagcgtgcgcaagaacatggtccccgtcctcgactacctcggcaagctcggcgtncgccgcgacgcgctcccggacctgctgaga

SEQ ID NO: 455590 - DNA, 445 bp, Sorghum bicolor
  unsure (1)..(445): unsure at all n locations
attgagatgctgcagcagtgtagccatccaaatgttgtccgctactttggaagctaccaaggagaggactacctatggatagttatggagtactgtggtggtggaagtgttgctgatttgataggcatcacagaggagcctcttgatgaatcccaaatagcttatatatgtagagaagcactaaagggccttgcttacctgcactccatttttaaagttcatagagatattaagggtggcaacattcttctaactgagcaaggcgaggtgaagttgggtgattntggtgtagctgcccagctgacaagaaccatgtcaaagcgcaacacgttcattggtactccacattggatggcaccagaggtcattcaagaaagtcgttatgatggaaaggtagatgtttgggcattaggtgtatctgcaattgagatggcagagggcatgc

SEQ ID NO: 455591 - DNA, 426 bp, Sorghum bicolor
cgtccgggctcaatgcgcccaagcattggatgctggacaagcttggcggagcttttgcccccaagccatcttctggtcctcataagtccagagagtgcctgcctctgatcctcatcatcaggaacaggctcaagtatgctctgacataccgtgaggtcatttctatcctgatgcaacgccatgacttgggatggcaaggcaggactgacaagactacctgctgggtatggtgcatttcatccaaccacagactacagtgtgatgacacaggccgttcgtttaccaacaggtgagtctagtaacttgaggtaggtgtagttggcaaaggctccgcctgaccctatatggcgaccatcgtcccgcccgtataaggcatgccctaagatgttgagccacagatgggctcacagttgtgtgcatgtgcat

SEQ ID NO: 455592 - DNA, 488 bp, Sorghum bicolor
cgtccgcccacgcgtccgcccacgcgtccgctcgtctctttttcttcgccccgcccgaagccgaggaggagagggagaggggagcagcgagatcgcgcgcgcctccgagatctccacgaaggtgtggcaatatggggctcagcttcacgaagctctttagccggctctttgccaagaaagagatgaggatccttatggtcggtctcgatgcagctggtaagaccaccatcctctacaagctcaagctcggagagatcgtgaccaccatccctacaatcgggtttaatgtggagactgttgaatacaagaacattagcttcactgtctgggatgtcgggggtcaggacaagatcaggccattgtggaggcactatttccagaacacccaaggccttatctttgttgttgatagcaatgacagagatcgtgttgttgaggcaagggatgagctccacaggatgctgaacgaggatgagttgagggatgct

SEQ ID NO: 455593 - DNA, 421 bp, Sorghum bicolor
cgtccgggagatgagttcttccagtaccaagtagtcctactagttctactttttagcagtaggaggctggtgtttgctgcgatttcgattggattgagatgggaatcgtctgcgtcgatgcatcctccacgctgctctgcgaggaggacaggagcaacgcactcggcctcgtcggctgctgcgacgagctgctagaggtggggagcggccttgatggcttggactccgccgacggcgccgtgttgcccgtgcacaccgatgaggccgtgtcggcgttggtggagaaggagatggaccaccaacctcaagagggctatgcggagaggctggagcgcggcggattggagtcctcctggaggagagacgccatggattggatttgcaaggttcattcacactacagctttgcaccactcagtct

SEQ ID NO: 455594 - DNA, 433 bp, Sorghum bicolor
cgtccgatgaagggaaacacctctcagatgatgatgtggagatgagagatgacacgcctgggtacggttcatctcacgctcaagatgatgcacatggttttgttgcccatgatgatggcaatgagtctggtgaagattttgatgaaaaatcaggccacccttcagagcccacagactgcaagagctgtgatactggtgcctcatgtaaatgttggttgaagaagcatatgacatgcctgtataaccaagcaaaggaaacaagtgctatctggtctgtggtggttgcagctgcactagttggtattgtgattgtgggacgttggcacaaagataaattgcaccttaaccagcttaaatggcgctctggctcagcagtgagaggatgatcaacaagtggtttgtgctgatacaactctgatgagcaattcaactg

SEQ ID NO: 455595 - DNA, 394 bp, Sorghum bicolor
cgtccgcaaaaggcaaaagagaaagaagagaaaaaacttaaggcaaaacaaaaggaggtggctaggctccaggcacaagcaaactcagatggagcaaagaagaccgagaaaaaacaaaggaagaaagctgtggaggatgaaaatccacaggatttcatagacccagacactcctaatgggcagaagaaattgctcgcatctcagatggccaagcaatacagcccaagtgcagttgagagatcatggtatgcctggtgggaatcatcaggatattttggggcagatcctgcaagcacaaaatcaccatttgttatagttctgccacctccaaatgtgactggagctcttcatatcggccatgcacttacagtggctatagaggatgctatgatac

SEQ ID NO: 455596 - DNA, 458 bp, Sorghum bicolor
  unsure (1)..(458): unsure at all n locations
cgtccgcccacgcgtccgcccacgcgtccgcccacgcgtccggttntgactgaagctgatctggaacctaacattgttgttaagagctgctgtggtagaaggaagaaaaagaacaagagttatatggatagtcaaagccgtattatgaagagaacagaatcttcagctcccatcttcaacatggaagacatcgaagagggtattgaaggttatgaggatgaaaggtcagtgcttatgtcccagaggaaattggagaaacgctntggtcagtctccaattttcattgcatccacctttatgactcaaggtggcataccaccttcaacaaatccagcttctctactaaaggaagctatccatgtaatcagctgtgggtatgacgacaaaactgaatggggaaaagagaatggctggatctatgggtcagttacagaggatattctgaactggtttaaaat

SEQ ID NO: 455597 - DNA, 417 bp, Sorghum bicolor
cgtccgagccaccgcgggaaggagttcgacgccgccatcaagaaggccgaggccgacctgcgtgcgctcctcgcggtgcccgacacccacgacgtgctcttcctccagggcggagccaccacgcagttcgccgccgtcccgctcaacctctgcgcggggccctccgaccccgctgacttcgtcgtgtccggctcctggagcgacaaggccttcaaggaggccaagaagttctccgccgcctccgtcgcctggtcgggcaaggacggcaagtacaccgcgctcccgcccttcgacgccatcaagcagaatcccgaggccaggttcctccacatctgctccaacgagactatccacggcgtcgagttcaaggactacccggagccccggaacaagtcgggcattctcgtcgccgacatg

SEQ ID NO: 455598 - DNA, 439 bp, Sorghum bicolor
cgtccggaaagaaaaaactgaagctgcgtccagtaacatatctaagtggttctcagggttctggcaatgacattcctcatggatacatttggagtcctcatctagtcccgaaaccaaaagactggggcccaaagatcgatgttgttggattttgcttccttgatcttgcttccaattacgtacctcctgaaccacttgtgaaatggcttgaagctggtgacaagcccatatatgttggttttggtagccttccagttcaagacccacaaaagatgactgaaattattgtcaaagcactggaaattactggacagagaggtatcattaacaaaggctggggtggccttggaaccttggcagaaccaaaagattttgtatatctactagacaactgccctcatgactggctttttctgcagtgcaaagcagtggtgcatta

SEQ ID NO: 455599 - DNA, 388 bp, Sorghum bicolor
cgtccggtctgaaggagatgtttggaaaatatgggtccatcactagtgctgttgttatgcgggatagtgatgggaaatccaggtgttttggatttgtcaattttgaaaatgctgatgatgctgctcaggctgttcaagagttgaatggcaagatattcaatgataaggaactgtatgttggaagagcacagaagaagtctgaaagagagatggagttgaaggagaaattcgaaaagaatattcaagaggtagctgagaagttccagaacactaacttgtatctgaagaacttagaagataacattgatgatgagaaagtgcgtgaactctttgctgagtatggcaatattacttcttgcaaggttatgcgggattcgaatggtgtcag

SEQ ID NO: 455600 - DNA, 443 bp, Sorghum bicolor
cgtccgcccacgcgtacggcctacgcacaaccaaacgcacccgcacccgcgccgctcgtactcgtctccaaatccctgctgcacgggcggcggctgcacagccgtagccgtcttcgaatcctcggcgaatctactcctcagtcggtacgaaccgctctctacctcggggcagagtgaacgcgcggcccgctgctcgtcgtcagcagcgaggcaccaccgcagcagcacctccgccacccgccccggcgagcactgtccgctgtcgcgcgccggcttgcagccacgggtgcattcgatccgtaccggcacgctacactacacgatgtccaagtcgggagcgctggatcttgcttctggcctcggagggaagatcgacaaggaaggagtgaagtcggccgtcgatgagtatgagaaatatcatgggtactatggagggaaggagg

SEQ ID NO: 455601 - DNA, 260 bp, Sorghum bicolor
ttgaccgcatcgatccacgcgtgcggtctgactgagacgcatgcaaaatctgcctccatcactagtgctgttgttatgcgggatagtgatgggaaatgcaggtggttgggatatgccaatcgtgataaagctcatgatgctgctcatgctgatcaagagctgaacggcatgatattcaatgataaggaactgcacggtgcaagagcacagaagaagtctgaaagagagacggagtagaaggataaatccgcaacgaatat

SEQ ID NO: 455602 - DNA, 412 bp, Sorghum bicolor
cgtccgatgaggtgtgtgtgatgcacgagacttccactggctacttgtaggacacatggggcgagcatacggtatacaatgagggatgagtgcaccagctgtatagaccacttctgcggttcgggcttgactttggggccaggcgctggctcgcaatgctgcacaaccagcgtgaatgcgctggtcatgctcatgtgcccagttacatgctgatgaaatgactcgtgatgtataacccacgaagggaagcgaagcatgctgcaactggcgcgtgggatgacagaaaactgctgcggtgtggtcagcgcgtaaagggcacatgaattgagcaagctcgactgctcaggatggaacatacgtgaggaagtgctggtcatgtgtcggaaaaacctgtgcgaaccttgggagccac

SEQ ID NO: 455603 - DNA, 435 bp, Sorghum bicolor
cgtccggagcaatataacacaatatttgtccgaccctcagtactactttcaagtcaacagccagtatgtgaggaacaaactgaaggtcatcttgttccctttcttgcacaggggtcactggacaagaataactgaaccagtaggaggaaggctgtcctacaaacctccagtccaggatatcaatgcaccggacttgtacatccctttgatggcatttggcacctacattgtagttgctgggtacgccttgggtgttcttggaaggtttacctctgaggcactgaccctacagttctctaaagggatacttggctggtttctgcaagtcatcctcatcaaaggtctgctctactccctgggcagcagtgaagctccattgctggacattgtggcatatgctggatatggtttcgctggcacttcccttgcaatgct

SEQ ID NO: 455604 - DNA, 283 bp, Sorghum bicolor
  unsure (1)..(283): unsure at all n locations
cgtccgctaagagatgcagctgcaacatacgaggctgcagacatcattgcgaccggnggcaccaacggtgagccgccagacctggttgccttcctgaaagaacactggtcccagagtgcgtttgctgaaggggtgaccaccggcgaaatgcacttcgtgaatgtcatgagggtcctcaggagaggtgcgtccccgatctgcctggaggacctcccgtctgagatggtgctcggcatcacatacctgccactgtaccgtgagtgcgtgagtgcaggtgggcagc

SEQ ID NO: 455605 - DNA, 453 bp, Sorghum bicolor
  unsure (1)..(453): unsure at all n locations
cgtccgggtcgcctctcctcccttccgctcccctcccctccccctgcctaatctctcctccggccaccgcgacaccgttggttcgctcgctcgccgcgccaagggacaagcccgcggagaccatggcggaccagctcaccgacgaccagatcgccgagttcaaggaggccttcagcctcttcgacaaggacggcgatggttgcatcacaaccaaggagcttggaactgtcatgcgttcactgggtcaaaacccaaccgaggctgagcttcaggacatgatcaatgaggtcgatgccgatggcaatggcaccattgactttcctgagttcctcaacctcatggcccgcaagatgaaggacaccgactccgaggaggagctcaaggaggcgttcagggtgttcgacaaggaccagaacggcttcatctctgcagcggagctccgncatgtgatga

SEQ ID NO: 455606 - DNA, 364 bp, Sorghum bicolor
cgtccgcggacgcgtggggtgaaggtgatcagccctgaatccgttgctgtcacggtgacaccggcgaaactgaccttcaagaaggcggggcagaagctcaggtaccatgtcacctttgcgtccaaggctggtcagagccacgcgaaaccggatttcgggtggatatcctgggtgaacgatgaacacgtcgttcgcagcccggtcgcgtatacatggaagatgtgaggtgaataataattaagctgagtcttcctggtgtctaagtcgtctaatcatgctgcttagcttagcagatgaaagataggatagggtgatgttagtttgctgatcgcttcacaaagagaatcggcgtgaagctctcgac

SEQ ID NO: 455607 - DNA, 361 bp, Sorghum bicolor
cgtccgaagttttgatgaggccccatggcccactctcacagctgaagctaaagattttgtaaaaaggcttcttaataaggattatcgcaagagaatgacggccgcacaagccctcagtcatccatggatccgtaatgctcaacaagtgaaagttcctttggatatgataatctataagctaatgagagcttacatcagttcgtcttcactgcggaagtctgctttgagggccctagccaagacgctgacaacgaaccaactcttttatgtaagggagcagtttgaattgctgggcccaaacaagaatggttatatctcattgcaaaatctgaaatcggctctagtgaagaactccacagat

SEQ ID NO: 455608 - DNA, 349 bp, Sorghum bicolor
cgtccgcgcaggccgtcatgaagcccatgctcgacttcctggcgcagaccgggtcgtacctcatggtgaacgcctacccgttctttgcctactccggcaatgccggcgacatctccctcgactacgcgctgttccgccccaacgccggcgtgctcgatgccgggaacggcctcaagtactacagcctcctcgacgcccagctcgacgccgtgttcgccgcggtcagcaagctcgggaactacaatgccgtacgcgttgtggtctccgagaccgggtggccgtccaagggcgacgccaacgaggcaggcgcttcggcggccaacgccgcagcgtacaacggcaacctggc

SEQ ID NO: 455609 - DNA, 419 bp, Sorghum bicolor
cgtccgcccacgcgtccgcacatatgcaagctacagagcatgctgtgctaaagaaacatgaccagccattcgtattcacagtatgtgctgatcattgcattaatcttctgcttgagaatatagctaaactggatcacgtgaaagatgtcctaacgaaggcaagggaaatcacgatgtttttgtatggccatgcattacccatggaactgatgaaaaagttcttttattttgactctgagatcataagcaactctaacttgagatcggtggctaagtttctcacgcttgagaccctagtgtctcagagggaaaatctgatggagatgtttagctcgccgaactgggcttcctctgatctggcttgtacaagtctgtccatgcatatatgtgaggtggtaaaacagatagtgcattttggc

SEQ ID NO: 455610 - DNA, 363 bp, Sorghum bicolor
gacgtacgctcacgcgtgcgtgcaacactacttgttcataaagatatttaacaagagtagagggccttgattatctattagtggacctcgaaaaggatggagaaaactatttatggtgcccactgtagcacatgacaaatagatagtactaaaggtagattcattaatacatgagtatagctcaatggcatgcactctcaaatttggtgctgatgtgcaggcaaatatcactcacataaatccgtatcgaagagcacacacagactgcatcataacaactgatgaacgtgttgcctaggcttttctgtaacaagccgatagtgctgttgcgttccataattgaagcccaaggttttcggattg

SEQ ID NO: 455611 - DNA, 440 bp, Sorghum bicolor
cgtccgcgcagctccttctccgcgccgtttcttcctgcggcctgcacctccacgccctccgcctccactccctccttcccgacccctcccacctcaccttccccttcgcgatcaaggtcgcctcccggctccccaacccgctcactgccggcgtgcaactccatgcccggtccctcaagctcccctgccactccaacccccacgtcctcacctccctcctcaatctctacgccaaatgcggccgtttgctcgacgcccagaaggcgttcgacgaaatgccccaccccggcaccgtctcctggaccgcgctcatcaccgcgtacatggacgcgggccgcgctcaggaagccgtcggagttgcgaggagggcgttcgcgagtggcatgcgccctgacagcttcacggccgtgcgggtcctcactgcgtgcgctcgagtcact

SEQ ID NO: 455612 - DNA, 407 bp, Sorghum bicolor
cgtccgcattatctttgtctcggtgaacacccccaccaagacccgtggacttggagctggcaaggctgccgacctcacctactgggagagtgctgctcgtatgatcgctgatgtctctaagtctgacaagattgttgttgagaagtccactgtccctgtcaagactgctgaggctattgagaagatcttgacccacaacagcaagggcatcaactaccagatcctttccaacccagagttccttgctgagggcactgctattgaggacctgttcaagcctgacagagtgctcatcggtggccgggagacccctgagggcaagaaggcttgccaggctctcaaggatgtgtacgctcactgggttcctgaggacaggatcctcaccaccaacctgtggtctgctgagc

SEQ ID NO: 455613 - DNA, 379 bp, Sorghum bicolor
cgtccgatcacctgtgcggagatcacgatcgtgctgtgctatttccagctgtgcagtgaggactacatgtggtggtggaggtcctatctgacctcaggatcatctgcaatctacctcttcctgtatgccgggttctacttcttcactaaactgcagatcaccaaggtggtgtcgggcatactgtactttggctacatgcttcttgcctcgtgtgctttctgtgtgctcactggtgcgatcggcttctgtgcctgcttctggttcacaagattgatttattcatctgtgaagatcgactaggcatgttgcatgagcctgcagagagtatgctgatctgaagcggcctccattttcactgagtttctttttttcttgaatt

SEQ ID NO: 455614 - DNA, 524 bp, Sorghum bicolor
  unsure (1)..(524): unsure at all n locations
cgtccggtttctgagaaaaaggctaaagcatggtgtgcttcaaagggaaacatcccctactttgagacgtcggctaaagagggcttcaatgtagaggctgcatttgagtgtatagcgaggaatgctgtaaaaaatgagccagaagaagatatgtatcttcctgatacgattgatgttgggggcgctggaaggcaacaacgttcgtcaggttgtgaatgctagaagatatggagcacagcgatttgctcggttggttggtttgattctctagggcttgttgtttgggacatatattatatatttagtttgcaaaactgctatttgtggatactggatagtctggcaatctgcatgggggtgcttattgtcgactcccctatgtagatgcagagaattcatttgtaactgctgtttcagtgctgtatcggcgctagatgctagtgttgtaatgctttgattgttgatgaattgcatatatgtatgtnttggttagtatggctgtaaatgaactgaacatagtgccc

SEQ ID NO: 455615 - DNA, 344 bp, Sorghum bicolor
cgtccgcccacgcgtccgcaccattacagcaaagcagagcaggtgcaaaagctctcaagaactagctagcaaaaggcaagaagctccgagctgaggaccggagaaacgtacaagaaagaacagcagaaacaatgaggccaggagcagggttcaatgcgacggcggctgcggcggcgaaggtcgccgcggtcgcaccagcggtcgccggcagcgccgcggcgcattccgcctggcactcgccggtgccgtacctcttcggcgggctggccgcgatgctggggctcatagccttcgcgctcctcatcctcgcgtgctcctactggaagctctccgggtactctgag

SEQ ID NO: 455616 - DNA, 472 bp, Sorghum bicolor
cgtccgcttcccttcccttcttggtggaagtggattggttgattgatcgcacagaacacagaccgagctgctgcacgcccgcctctcttctcctcgcggagcaggcaggcaggcaggcaggcaggctgggattcccgtccgcggcgccggcgttgaagcagcgcaggtccagaatcttatagagcgttgccttcagatgtacatgaaccagaaagaagtggttgatgccctctctcagcactctaagatagagccttgcattactgaacttgtttggcgacaacttgagcaacaaaatcctttgtttttcaaggcatactatatgaggctaatgcttaagaatcaaataatggtcttcaacaagcttcttcaggatcagtttgagattatgaataaagatttttcttcaaggatcccttctatgtctcttcctaatggatctaattccaactctatgaagcaaaatccatgc

SEQ ID NO: 455617 - DNA, 491 bp, Sorghum bicolor
  unsure (1)..(491): unsure at all n locations
cgtccggttggtaggaacacaaaggccctggttgctggtgtatctgaaagagcatctaggcatccagatgctatggcttctgtcttccatgcagtgaactctattagtgaagagctttcaagcattgttgagttagcagccgaggatgagatagccatcacctctaaggaggataagctagcagagcttatggagatgaaccaaggtttgcttcagtgcatgggagtcagccattcttctatagaaactgtgttgcgaaccactctgaaatatagcttggtctcaaagctaactggagctggtggtggtggctgtgtgttgactctaataccgactntatcggccaatattgttctagagaaagtcaccacagagctcgaatctcatggttatcgctgctttaaagttgaggttggtgggcgaggtctncaagtattccgaggataacactcaacctatttcaaaggagatgttgtccatacttttagaaa

SEQ ID NO: 455618 - DNA, 334 bp, Sorghum bicolor
cgtccgccgaggcgtacggaagaagaacgatgggccgtccggcgtcaccatcggcattgtgcgcaaggacctcatcggcgccgcgcactccatcacgcccgtcatgcttgacttcaagacgcacgcggacaacgccgctctgtacaacaccgcgccctgctacgacatctacatctgcggtctcgtcttcgaggacctgctagcgcagggcgggctcgccgaggtcgataaaaagaacacgcacaaggccggtgttctatacgacaccatcgacgccagcggggggtactacatctgtcctgtccacaaagcggcgcggtcgcacatgaacgtg

SEQ ID NO: 455619 - DNA, 362 bp, Sorghum bicolor
cgtccgaaggggtttgtagtatctgcttaattagcccggccttctagtggtagactagtagtagcaagtagcaacacgacgcgcgcggccggccggcgagaatgatgagcggcagccgtgtattattcgtcgtggccgccgccgtgggcgtgctgctcgccgccgctgccgtctcctcgaggcccgtcgtcgtgcctctggctactggccgccctggtgccggcggtaacgacgagctgtcggtgtacttccacgtggagtcgtgcccgcagctggagacgatcgtgcggtccgccgtggacgcggcgctccagcagaacgtgcggctgacggcggggctcctccggtgttcttccacgact

SEQ ID NO: 455620 - DNA, 313 bp, Sorghum bicolor
gtccgaggggatctgcaacccctcagctcctcatcttgtcttcaaactcgtccacctcagccagctggttgctgtccagccagctgatggcactatcgacggcgtcctcaatcttcttcttgtcctctgccgaggacaagaccaccggccagaagaacaagatcacgatcaccaacgacaagggcaggcttagcaaggaggagatggagaagatggtgcatgaggctgagaagtacaaggctgaggacgaggaggtcaataagaaggggacgctcagaacacgctcgagactactcctacaacatgaggaaca

SEQ ID NO: 455621 - DNA, 304 bp, Sorghum bicolor
  unsure (1)..(304): unsure at all n locations
cgtccgggcccggtgaccgatcctagcaagctgcccaagtggaactacgacggctccagcaccggccaggcccccggcgaggacagtgaggtcatcnctgtacccgcaggctatcttcaaggacccattccggaggggcaacaacatccttgtcatgtgcgattgctacaccccagctggcgagccaattcccaccaacaagaggcacaacgccgccaagatcttcagcaaccctgaggtcgctgctgaggagccctggtacggtattgagcaggagtacaccctccttcagaaggacaccaac

SEQ ID NO: 455622 - DNA, 405 bp, Sorghum bicolor
cgtccgggaccagctgctgctcctcccagttccatcgaaatggcaagagctcctcctcctcctcctctgcaccggctccctgctcttctcgccgccctgtgccttgccgtggcggtttgcttctccggcgtcgtcgaaaatgctgcagcggcgaccctagcggcggacaggaccggcaggaagatggtcggtgttcacgagctcaggatgggagatttctccatcaaggtcaccaactggggggcgactctcatgtccgtcatcctccccgactccaaagggaacttgggcgacgttgtgctcggctacgacaccgtcgctgaatatgtcaacggcagcgcctatttccggggtctgatcggccgcgtggccaacaggatcgccggcgctcggttcgtgctggac

SEQ ID NO: 455623 - DNA, 401 bp, Sorghum bicolor
cgtccgggagcatcgctctgaatgggctgatcctggtgttgatgcttattctgctgcctctttgagggccaacccatatgctgttccaggtttaagggctggtgggtttatgggcaaccaggttatactaccccttgcacgcaccttggagcatgaagagtgcttggaggttattaggcttgaaggacatggctttagccatgaggaggtgctcatgtctcgggatatgtttcttctgcagttgtgcagtggtgttgatgagaatgcacctggtgcatgtgcacagcttgtctttgctcctattgatgaatcttttgctgatgatgcaccgttgctaccctcaggcttccgtgtgataccacttgatgctaagacggatgtgccatctgccacacgcacac

SEQ ID NO: 455624 - DNA, 469 bp, Sorghum bicolor
cgtccggcggaggaagcgggactttcctcgagatccagccatcggagctcgcattcccctttgagataatgaggcagagctcctgctccatgcgagttgaccaataagactgaccattatgtagcattcaaggtcaaaacaaccaacccgaagcagtactgcgtgcgtcctaatattggcgttgtattacctgggtcaacttgtgatgttacagtgacaatgcaagcacagaaggcttcaccatctgacatgcaatgcaaggacaagttcctagttcaaagcgttgtggctgagaatggtgcaacagctcaagaaattaatgcagcaatgttcaataaggaaccagggaaggttgttgatgaattcaagctgcgtgtggtttatgtgccaacaactacacccaacccgatccctgaagaatctgaactaggggctttttcttcctcatatttacaagaaaatgggatca

SEQ ID NO: 455625 - DNA, 513 bp, Sorghum bicolor
  unsure (1)..(513): unsure at all n locations
cgtccgcccacgcgtccggcagtgggaaccatgccgccgccgtggctttggctgcaaagctgcgtggcatacctgcacacattgtcataccaagaaatgcaccagcgtgtaaggttgaaaatgttaagcggtatggtggtcatattatccggagcgatgtcagcattgaatcgagagaatctgtttgtaaaagagtccaggaggagactggtgctgttcttatccatcccttcaatgataaatacactatcagtggtcagggtacagtatctcttgaacttttggagcaagtccctgaaattgacacaataattgttcctattagtggcggtggtttaatttctggtgtgacccttgctgcaaaggccataaacccttcgatacgcattctggcagcagaaccaaaaggtgctgatgattctgtccagtctaaggctgctggaaagatcatcacattgccttccacaaacaccatngctgatggtctacgagcttttcttggtgacttgacat

SEQ ID NO: 455626 - DNA, 485 bp, Sorghum bicolor
  unsure (1)..(485): unsure at all n locations
cgtccgtacgccgacaccttcctgctgcagctgtctagcgcacggtgcagccgtcagaaacctagcttgggcagcgacgatggcggcggcaccggcaggcagctgcgcgcgggcgctgtctcatcgggagcaggacatacagatgatgctcgtcgncgacgtccacctcgggaccaagaactgcgacttncagatggagcgttacgtatacaagcgccgcactgatggtatctacattattaaccttgggaagacctgtgagaagctacagttggctgcgagggtcattgttgcaattgaaaatcctcaagatattatagtacagtctgctaggccctatggccagagggctgtactcaagtttgcccagtacactggggctcatgccatcgccggcaggcacactcctggtacattcaccaaccagctgcatacctcattcagcgagccgcgccttcttatctgactgaccctaggactgatca

SEQ ID NO: 455627 - DNA, 458 bp, Sorghum bicolor
cgtccgaagaaaagtcatcctttggtttcattgactactatgaccgcagatatgctgcactagcaattttatctctcaatggcagaccactgggtggtcagccaataaaagttaattgggcatatacaagtactcagagggaggatacatcaggtcattttaatatttttgttggggatctttgcccagaagtcactgatgctactttgtttgcatttttctctggatactctacctgctcagatgctagggttatgtgggaccagaaaacaggacgatccagagggtttggttttgtttctttcaagaaccagcaggatgctcaaagtgcgataaatgacttgaatgggaagtggcttggcaaccgtcaaattcgttgcaattgggcaacgaaaggtgccaatgctggtgaagagaaacagattgtggactccaagggtgacctgacaaatggcaca

SEQ ID NO: 455628 - DNA, 518 bp, Sorghum bicolor
cgtccgcttcagcatgatggagaggtttgccgatgctgaagctatttaccttgaactgaaggcttcagcttctgtacttgatatgattgcttatagtgtcattgtgagaatgtatattaaagcacaacgactagaggatgcttgttcaattttggcagaaatggagaaacaaaaagaaataattcctgataagtatctttttctcgacatgcttcggacttaccaaaaatgtggtctgctcgagaagttggctgatacatattactggatacgtaagagtcaagttgaatgtgatgaagccatgtataactgcattattaattgctgtgggcgggccatacctgttgatgagctgtccagaatttttgatgaaatgattcaacagggacacttagcaaacactgttaccctcaatgtattgctagatatatatggaaaagctgggctttttaacagggctgaaaaggtctttatcatggctcgcaagcagggcctggtggatatcatatcatacaata

SEQ ID NO: 455629 - DNA, 404 bp, Sorghum bicolor
cgtccgcccacgcgtccggcttcctttagcacagactgcaaaggtgggggaagggaaagcaactcccggtttcttccattcatggtccagatggcttcttatcttgcagatggaagtgctaaccagcagcgtcatgtaatggccaaggctgtcacgacatacttgtccggctctgcatcaacactggattctcctattcgagtttcagcatctgtctctgggtcccgtggtggttcaggttcctccgaggagactgtacagttcatgatggtttattcccttctgtcagagtcatacgagagttggctccaacaccgacctgtgttcctacagaggggcatctaccacgcctacatgcaacataagcacgggcggtcaaccctcaagctgtcatcagattcgtc

SEQ ID NO: 455630 - DNA, 524 bp, Sorghum bicolor
  unsure (1)..(524): unsure at all n locations
cgtccgctgtcgcggccggaggaggtgctggcgctggtgaagctgcgggtggcggcggggcagatcaagcgccagatcccgcccgaggagcactgggccttcggctactccatgctccanaaggtctcccgcagcttcgccctcgtcatccagcagctcccaccccaactccgcaatgccgtgtgcatcttctacctcgtgctccgtgccctcgacaccgttgaggatgacactagcatcccgacggaggtgaaggtgcccatcctccaggaattctaccggcacatctacaaccgcgactggcatttttcgtgtggaacaaatcactacagagtgctgatggataactttcaccacgtatccactgccttcctggagcttggtcaaggttaccaaaaggcaatagaagaaatcactaggcgaatgggagcaggaatggcaaaatttatatgcaaggaggtcgaaactgttgatgactatgacgagtattgtcactatgtggccgggctaagtggttatggact

SEQ ID NO: 455631 - DNA, 517 bp, Sorghum bicolor
  unsure (1)..(517): unsure at all n locations
cgtccgcaaggctgaaaaacttttctgcaatgaacaagctcaagaagatggcattgagggtgattgctgaaagtctatctgaggaggagattgggggtttaaaggagttgttcaaaatgattgatactgacaatagtgggacgataacttatgatgaactgaaggatggtctgaaaagggtgggctcggatctgatggaacctgaaatccaggctttgatggatgcagctgatattgataacagtggaaccattgattatggagagttcttagcggctacattgcacatgaataaactggagagggaggaaagcttggtgtcagcatttgcattcttcgataaggacgggagtggcttcataacaatcgatgagctgtcacaagcatgtgagcagtttggtctttctgatgttcatcttgaggatatgatcaaagatgtggaccagaacaatgatggccaaatngattacagtgaagttgctgcgatgatgagaaagggcaatgctggtggaacagg

SEQ ID NO: 455632 - DNA, 495 bp, Sorghum bicolor
cgtccgcaaagcttggaattgattcttctagttctcggtggaagcttctagaggaattgcaaaaggtgctccctccaactgtgatggtgcctgagaggaggttagaaaatttagttgagcaagcacttactgtacaaagggatgcttgctatttccataattctgttgatgggttgtccctctacactgaccatcactgtgggaaagaccagataccgtctcgcacgctacaggttttgcatgcacatcacgatgaagtgtggtttatccagttttcaaacaacggaaagtatttagcctcagcgtcaaatgataaatctgcaattatatgggaggttgatgaagatggagagctattactgaggcatacattgattggtcatcagaagtcggtgatgatggtcgcatggagccctgatgattgccagcttctcacatgtgggcaggaagaagccatcagacgctgggatgttgaatctggcaaatgtcttcatg

SEQ ID NO: 455633 - DNA, 496 bp, Sorghum bicolor
cgtccgggctgatcaaatagcaaaggatcctgcattcaaccagatggctgagcagctacagaaaagtgctcatagtacaggcgaacaggggaggcccccattggaccctcaacaatacatggaaacaatgcaaaaggtcatggaaaacccccagtttatgacaatggcagagcgtctggggaatgctcttatgcaggatcctgctatgtctagtatgctggaaacctttagcagtccatcacataaggagcagctggaagagcgtatgtctcgcattaaggaagatccagctatgaagtcaattcttgatgagttagagaatggaggtccttctgcaatgatgaagtactggaatgaccctgatactcttcaaaagaatggcgaggcaatgggagctagcttcccgtttggtgcaggttcttctgctgaaccttctggtcctgaagaatctgaggaaagagggtggggtgatgatgaatcaatcgtccatcacact

SEQ ID NO: 455634 - DNA, 527 bp, Sorghum bicolor
cgtccggggaagtctattgatgaaaagaagacaaaacctcggaagtccatggaatttcataacatcaagattagccaggttgaacttgttgttacatatgaggggtcaaggcttgctattaatgacctaaggttgcttatggatactttccacaaggcagaatttactggtacatggaggcgactattctctagagtcaaaaaacatatcatctggggagttttgaagtcggtgaccggaatgcaggggaagaagtttagcaaccatagggaaacacttgagggatctattcctgaaaatgatcttaacttgagtgacagtgacgttggtcatcatggaagacatgatcaattaacagcttcatggttgaagaggccgggcgaaggtgcaggtgatggatttgtcacatcaattagggggcttttcaatacacaacgccgtaaagcaaaggcctttgtgattcggacaatgcgtggtgaagggcataataatgatgaatatcaggacgaatggagcgagagtgatgg

SEQ ID NO: 455635 - DNA, 516 bp, Sorghum bicolor
cgtccggcattctacatgttgtcaattaatgaagtgtctgtctatgttaccctttgatataatgagaaaggatctaggactgttctgtgtcctgtaaggtaattctatgttgttgtcactgccattgaagttttactgataatagtgcacgaatgcatctcaacactaacccagctatatcctgcttagttaaaactgcccccattcagatgcttctgttttctccaatggaatatgatatcatgatcgcattagttattcaccatagggatatgctgaaacttatgtttgagtaggcccacttgcgctgtttcttatctgtcttttcagtgttgtatactgatgaatacacctttcaggcaacaaagcatcagctactgttcagcccttcctactgctccatcttgatatattcccagatgctgttcagacacttaatgatgcacttcatctgttctctactcccgaatctttggaaggatacagaacagctgctggaaaggctggtttggtgac

SEQ ID NO: 455636 - DNA, 344 bp, Sorghum bicolor
  unsure (1)..(344): unsure at all n locations
cgtccggtattttcggcatgctactggtcaattatatgctatttcaaaagatttggcaacctacatatctataaacaagcatatcctgcacaagtatataaatgaggatgtttcattagggatctgggttcatgggttagatgttgggcatattgatgatcggagacttttgtgggggactcccgctgattgcgaaatggaagctcangcggggacatttgcgccgcgtcattcgattggagatgcagcggcatatgcaactccgagggggaggatcttggaaagtccacaacaagtgcgccgaaggcgagaaggcgctgtggaacgccactttctagcacaag

SEQ ID NO: 455637 - DNA, 534 bp, Sorghum bicolor
  unsure (1)..(534): unsure at all n locations
cgaattcccggtcgaccacgcgtccgcccaacccatcagccttcgtaccttctcatcaaagggtaccacccatgtgtttgcttcatcagataggccaactgtcatctggagcagcaataagaagcttctctatagcaatgtcaatttgaaagaggttaatcatatgtgccctttcatacagctgcttttcagacagtcttgcaattgctaaagagggtgagctntcaattggaactattgatgatatccagaagcttcatatccgcacaatcccccttaatgaacaagcacgtcgcatttgtcaccaggagcaatcaaagacactagcattttgcagtttcaagtacaaccagagtgtggaggaaagtgagactcatttaatacgtctgctagatcatcagacttttgagtccctgtgtgtatatcctctagatcaatatgaatttggctgctccatcattagctgttcttttgcggatgataataaatgttattactgtgtgggaactgcatatgttatacctgaagaaaatg

SEQ ID NO: 455638 - DNA, 458 bp, Sorghum bicolor
gtcgaccacgcgtccgcaaggtgatatggacggtgaaggagcacgtcggcggcggcgactcaccgtacatcacgctctactaccatagcttcgacggggagcgagggtttccgggcgacctggacgtgtacgtgacgtaccgactctcgtccccgtacgtgctgagcgtgcgcatgaacgccacggcggagagcagggccaccccggtgaacctggcgcaccacgcctactggaacctgggcggccacggcagcgggcctatcctcggcgagacggtgcagctcttcgcgtcgcggtacacgccggtggacgccgccacgctcatcccgacgggcgcgttggcgcccgtggccggcacgccctacgacttccgcgcgccggcgcccgtgggcgcgcgcctgcagccggacctgccgcacggtctcgccggctacgacaccaactacgccgtggatcac

SEQ ID NO: 455639 - DNA, 497 bp, Sorghum bicolor
  unsure (1)..(497): unsure at all n locations
aattccagctacgacgtacgcgtacgcgtacgcgtacgtgactgctggtgcaccagatcctgctgccgcgcatttttttagcacagagaagtctccgaaatcggcaaagcctaaagaagggatgtctgctgtcttccaagagattagtacaaaacctgtgcctgcagggttgcgaaaggttaccgatgatatgaagactaaaaaccgtgctgatagaagcggtgttgtcagcagtagtgttgctgctcctgctgcagctnctgaaaagacttctcgtgcggngtccttctctttcaaatctgggacccccaaactggaacttcagatgggacgcaaatgggtggttgagaatcaggttggcaagaaaccctngctatngatgattgtgattccagacaatctgtttatgtgtatggatgcaaggattctgtccttcaagtaaacggcaagggtaacaatattactgttgacaaatgcactaaatttggaatcgtttc

SEQ ID NO: 455640 - DNA, 521 bp, Sorghum bicolor
cgtccgcccacgcgtccgattataactgatggtgcaattgaacatattgcaaagcttggaacaaacttgcaatatttgagcctcagaggatactggaataacttcacaggcactatgtattctggcagggacagttccaaacctcacctcactgtctttagctaatacaaaaattgatgactctgctctagcatatattggcatgatacctttgctgagaacgatagatttaagccagacaagtatcaaaggttttactcatatgtctgcatttgagcatctcaaatatctggaaagtctaaatctggaggatacaccgctatcagctgaagttatacctcccttggcatcccttgcagcactcaaatatctgtacctgaaaagtgatttcttgtctgatcctgccttgcatgcgctctctgctgcctctaatttgatacaccttgggttctgcgggaatatattgtcgagctcgggacttttacaatttgtaccccctaccacactgtgtgtgttggatt

SEQ ID NO: 455641 - DNA, 225 bp, Sorghum bicolor
cgtccggatgagagcaaaaattcgaaaccagagaagccgtcttcagcagctggtgcaggcctccccaatccttttgatttttcttctagtgaggagtttgctcaatgacccatcaataagagagatggcggagcaaattgcaagtgaccctgtgttcaaccagatggctgaacaacttcagaaaagtgctcagggtgctggagaacaaggtatccctgcattgga

SEQ ID NO: 455642 - DNA, 527 bp, Sorghum bicolor
cgtccgacctcacctgcctctccatggacggcggacgagccgcagccgtcggcggcgacccctctcccatcgctgctcctaccaatcgctcggcgctgagcagcaggcccgtcgatgtctcctcgtttacccacaccccgtgctactgtgaagaaaatgtttacatgttatgtaaggagcttatcagaaccggagtggctgaccctgcaggcactgatctttatgttgttttcatatcaaatgaggaaaagaaggttcctctctggcatcagaaagcaggccattctgacaacggatttatttgctgggattatcatgtgatctgcatccagtctaggcgaagcaaaggagaagttcttgattttgtttgggatctggactccgatcttccttttccttccccattcatccaatatgtttctgatgcgattcaaccactatcattcagcaattccagatatgcaagactcttccgtgtgattcatgctcctgtgtttcttcgatcatttgcctcagatagaagccat

SEQ ID NO: 455643 - DNA, 522 bp, Sorghum bicolor
cgtccgcccacgcgtccgatcgtggactctcacttccaatttgatacggaggcatacgagaagaatggtccgctgtacctcagcacggtctgggctgtcacctatggtgttggtttcgcatcccttaccgcgacaattgttcatgttttcctcttccatggaagtgaaattttgcagttaagtaaatcagctttccaagaaaaaaaggtggacatacatacaaaacttatgaggagatataagcaggtcccggagtggtggttcatctgcatcctcattgctaacattgctgtcaccatatttgcctgtgaatactatattgagcaactccagctgccttggtgggtgttctgcttgcatgtgccatcgcgtttaccttcaccctcccaattggaataatcacagcaacaacgaaccagactccaggcttgaacatcatcacagagtacatcatggggtacttataccctggacggccagtggcaaatatgtgcttcaaggtgtatggttacatcagcatga

SEQ ID NO: 455644 - DNA, 521 bp, Sorghum bicolor
cgtccgggtgatgtagcaaatgctgaaagacgggcacaggctgcggctcaagcagcggcacatgcagctggtgcgcaggtgacagctgcacagcctgggacagctcaagctacagcggtttcagcagcagctacagacccatatgcaggtgcatatgccagttacccctcggcatatcagcagggagcccaggctgcagcatatcagcagggagcccaggctgcggcatatcagcagggagcccaggctggggcatatcagcagggagcccaggctggggcatatcagcagggagcccaggctggggcatatcagcagggagcccaggttggggcatatcagcacggaacccaagctggggcatatcagcaaggaaaccaggctggagcatacacctatgcttatgatgctgccacggcttacgcatatgcaggttactctggctatccaggctatgcgcaaagtgcagtgcccaattattcctatgccgtacctccgcagccaagcagcggtgcaactac

SEQ ID NO: 455645 - DNA, 402 bp, Sorghum bicolor
cgtccgccctcccgcccagatccccgctagggtttccccgatccccctcagccaccgggccgccgccgacgaggagaccgccgccacgatgttggagctgcggcttgtgcaggggagcctcctcaagaaggtcctggaggcgatccgcgagctggtcaccgacgctaacttcgactgctccgggaccgggttctcgctgcaggccatggactcgagccacgtcgcgctcgtcgcgttgctcctccgcgccgaggggttcgagcactaccgctgcgaccgcaacctctccatgggcatgaacctcaacaacatggccaagatgctccgctgcgccggcaacgacgacatcatcaccatcaaggccgatgacggctctgataccgtcaccttcatgttcgagtc

SEQ ID NO: 455646 - DNA, 437 bp, Sorghum bicolor
  unsure (1)..(437): unsure at all n locations
cgtccgcagctggaagctgcagctggatccattgcacaaaaagtaggcttgaggcttccttcagttaacttctatgcaattgctcaccgttgtgtgaaggacttgttactgcctatagatagaatcctcccccacgcatgccgaatttacgagtgggcaatgcctgcagaattatggttgtctagtaatcctgctagagtccctacacgggtttgtgtgatggctatcctaattgtggccctacgacttctttataacatcaacggtcaagggatatgggagaagatntgtgaggaaggaagaaacacaagtgaatctcaccatgatacgaattcatcaacttccaggaagcttgaggctagtaacaatgaggagnttggcacaagagaactgtgtgtgctattgcactgctatgataaatcatacgcacatgcttc

SEQ ID NO: 455647 - DNA, 444 bp, Sorghum bicolor
cgtccgatcagaattgttccccagaaaggggatacatgggccttgtaccgtaactggtctcctgattggaatgagctgacacctgatgatgtgatatacaagtatgagatagtagaagttattgatgatttcaccgaggagcaagggctgactgtcattccattgctgaaggttgccggattcaaagctgtcttccacagacacatggatcccaaggaggtcaggaggataccaaaggaagagctgttccggttctcgcatcgagttccttctcgtcttctgactggtgaagaagcaacaatgccccgaaaggttgcatgagctgaccctgctgcaactcagtggacctcttaaggcgatacggagctcaggaagacacgatgacacagacttgtaataggagggggaactattgacactgagataggtagctgatgtctgatg

SEQ ID NO: 455648 - DNA, 296 bp, Sorghum bicolor
cgtccggtccagccgacctgccttccgccgtcgcgaccccacaccgtcttcctttgccggcggccccgtcccgcggatcggttggcgtctccccttgctgctgaatcactgaccagatggctgacggcgaggacatccagccccttgtctgcgacaatggcaccggcatggtcaaggccggtttcgccggtgatgatgcgcccaaggctgtctttccagtatcgtgggcgcctcgcatacggggtgaggggggatggcaaagacccttgcggcacagccatcagaggttctaccta

SEQ ID NO: 455649 - DNA, 145 bp, Sorghum bicolor
  unsure (1)..(145): unsure at all n locations
acgcgtccgcaacgcggaagatctacgaccccctggaggaggacgccttncgccccattctncaccactacgacgggcccaagttccggctcgagctctccgtcaccgaggccctcgcactcctcgacatcttcgccgacaagga

SEQ ID NO: 455650 - DNA, 523 bp, Sorghum bicolor
  unsure (1)..(523): unsure at all n locations
ccgcattcccggtcgaccacgcgtccggaaattcagtctacaccaggaatcttcacattcaacctcacttgggccaacattagcagtagtgctttaaaacccaagatatcttccccagtgagtgattattatcttgtaaggaacccaaggtacgcagatcaagcggaatttctgaagttatctgactttcttgcaatcgtaatggagagggatttgtctggtgccatgatcattattgagaatgctgcatatatagcgaagtcattaggaattgacattgttgattctgtaaccactgccttaagtgctgctggcttcgataatcagactgccaaggaagttctgatccagtcaaaagatagtgctgttctagtcaaactgaagcagcagaaaacaaaatgcaagcttgtttacactctcccttcagacatcggngacgcttctaattcctcattgaaagacattaagaagtngctcatgcggtagttgtgatagaatattgnttcactctaagtccaattta

SEQ ID NO: 455651 - DNA, 198 bp, Sorghum bicolor
cgtccgttcattagtcgttttgcagtccatcacatcaatgtgaacttttcctgcagaaagcatggagccaatagagcagatgttcatagttcgagcacatcttctagactggatgctataaggaatgtctatggggcttctgttgttcgtgatctgattgaaatagaagtttcagatgaggatgctggagatgcagtc

SEQ ID NO: 455652 - DNA, 492 bp, Sorghum bicolor
  unsure (1)..(492): unsure at all n locations
cgtccggacttgctcaacgcatttctacaggcgatgtacctgaaacaatagaagggaaaaaggtcattacccttgacatgggacttcttgttgctggcacaaaataccgtggagaattcgaagaaagattaaagaagctgatggaggaaataaagcaaagtgacgagataatactctttattgatgaagttcacactctgataggagcaggagcagccgaaggtgctatagatgctgctaatatctngaagcctgcgttggccagaggtgaattacagtgcattggagcgactacactngatgaatataggaagcacattgagaaagacccagcacttgaacggcggtttcaacctgtgaaagtgccagagccaacagtagatgaaaccattgaaattctcagaggactgagggaacgatatgagatccaccataaacttcgttacactgatgaagctctgattgcagctgcaaagctgtcatatcaatata

SEQ ID NO: 455653 - DNA, 484 bp, Sorghum bicolor
  unsure (1)..(484): unsure at all n locations
cgtccggctacgcgagccctaactgccgcagaggtcagtactaacagctgtagccttactaatggaagcactgcgcctgggacgtgatcataagccgtagaggacagctgcctgtgagacagcgaaagactgacagagcacatgttttagacaaggctaagcatctttcaaggctaaatgtgaaggagtcaggaaaagtaatgttgaaacgtggtgaaggaaagcttgaaaagcagttccgcatgagctgtgtgggatgtgacctttatgtttgttcccgatcagaagaggatctggaggttgctcctttcatatacgttgttgatggagcactgagttcagttgcagctgaaacaaatccacatgatgctcctgtacctncttgcatcacacaactggaaggtggacttgtccaagtagccattgaagtggaagaccgggcacaacgttcagcaataacaagagtgaacgcagatgatgttcg

SEQ ID NO: 455654 - DNA, 520 bp, Sorghum bicolor
cgtccgatctgcaccagaaaagttctagtgataccaatgcattaccagccttttcaataccaaggtctccaaatagttgttatgggtgtagtactacattagttacacaatgcttagagttattacaagtgctttcaaaacatgaatactgcaggaagcagcttgttagtgctggaactttatcagagttatttgaaaacaacattcatcacggccctaagacagcacgcactcttgctagggctgtgctatcttcattctctgaaagtgatgaagatgcggttcacgaattaaacaactcgattcagaagaaagtgatgtattgtcttgagcaccatcgttccatggacattgcacaatcaacacgagaagagttactgctgctatcagagactcgtgctcttgtggatgagttttgtgaggcaagaatacgtgtcacctttcaactgtgttctcttctattaaggtggagcaaacaatctgaatttcggacatatattcttactgttgaggatattct

SEQ ID NO: 455655 - DNA, 379 bp, Sorghum bicolor
cgttcgagcgcccgcgccagaagccaaaacccttccccggcccctgcaggctgcaaccgcagccggcgagtccgcaagggaggccaaaggtttcctggagaaatacccggccctggtcaccggttttttcttcttcatgtggtacttccctaacgtcatattcaacatccctaacaagaagatctaaactacttccctatcatacttgtgtctgatcattagagtggtgcgatactgctgcgctgaggtcgctccagcaggctatatgcattctgagtgtttcaggatgcctgatgtagactacaggctgtgtgtgagtatgcaacatagttgagcttagcgtgtctattctggaagtcttttggtgttgctggatggt

SEQ ID NO: 455656 - DNA, 441 bp, Sorghum bicolor
  unsure (1)..(441): unsure at all n locations
cgtccgcagcagaagagatagggagaggagaaagcataagctaataagcatccatcaatggcggatgctgtcaacaaggaggccgagggtcgtctgacgctgctgggcctgcacgtgagccctttcgcgcttcgcgtgcgcatggcgctggacctgaagggcctgagctacgagtacgtcgagcaggacctgttccacaagagcgaccttctcctcacctccaaccccgtgcacaagaaggtccccgtgctcatccacaacggcaagcccatctgcgagtctctcgtcgtcctggagtacctcgaagaggtctggcccgggccgcccggcaccggcaccggcgcagccatcctncccgctgacccctacggcccggccgtcgctcgcttctgggcccgctacatcgacggcaagctgttcccggcgtgggtagacgtcatg

SEQ ID NO: 455657 - DNA, 514 bp, Sorghum bicolor
  unsure (1)..(514): unsure at all n locations
cgtccgatttcgagacctatttaaaagaagcaacaagccgagtgctttaccagccagtattcactgaggatgattccacttcggagaactcttcagcatcaacagctaaaacacctgggagtttggatcttggcaagccgacgaaggaggtggaattgccagcacaagaatcaggcacttcagacacccagttggatgtaccactgcctcaccgcgtggacccaaaccattcgtacgagggactgctgagcaatgatcaagtgtttattagatccacccggttacttgagagaagatccaagaaacgcaacgccaacagggctttgagtaatgacgttccgtgcagtggtgtgaatgtgaaatccaaagagaaaagagaagtcaaagaagtttggcagagttcttgatccagatgagccttttanggttgttctacgggatcgagagacaacagagttcttgacaagcaaagaggagaaaccagatgtcagtcaaatacagaatcttatgaagc

SEQ ID NO: 455658 - DNA, 302 bp, Sorghum bicolor
cgtccgtgcgtccctgcaggcgtcgccaagtttgatccggcgacggggaagcagttcaagtccccggccaagacgctgtcctacaccaactacttcgccgagtctctgatcgcggaggcggagcatgacagcaagatcgtggccatccacgccgccatggggggcggcacggtgctcaactacttcctccgccgcttcccgagccggtgcttcgacgtcgggatcgcggagcagcacgccgtgacgttcgcggccggcctcgcctgcgagggcctcaagcccttctgcgccatctactcgtc

SEQ ID NO: 455659 - DNA, 475 bp, Sorghum bicolor
cgtccgcccaatgtggggaagtcatcattagtccgcatattatcatctggaaaacctgaggtctgcagctacccattcacaacaagagggattctaatgggtcacattgtatccaatcacgaacgttttcaggttacggacactccatgactcctgacgaggcatgatgatgacagaaataacatagagagattgacacttgctgtccttttttatctacctatcgctgtcctgtatgtgcacgatctatctgaagactgtggcacctcagtggccgatcagtacatcacatacaagcatattaaggacagatttggcgatcgcctgtggcttgatgttatatccaaatgcgatcttttaggaaagaaagagcccataagctttcacgatgccgatgatgtagcacagtacagaagattggggccagaatgcgccctccgagtatctgtgcagagtgaaatcggcgtcaaagagc

SEQ ID NO: 455660 - DNA, 314 bp, Sorghum bicolor
  unsure (1)..(314): unsure at all n locations
cgtccgctccagtaaaaattgccgaccctttcgattacggagcagggtttgtgaacccaagcaaggccgacgatccaggtcttatatatgacattgatccatcagattatctcaggttcttctcctgcgtgggaggactgggtgtcaacaacaactgcacgacacctaagtcagctgtagcagacctgaacctcccatcgatcgtgatccctaatctcaaggcatccgagactgtcatgcgcactgtcaccaatgttggccagcctgatgcactgtacaaagcattcttncaagccgcttctggcgtggagatg

SEQ ID NO: 455661 - DNA, 440 bp, Sorghum bicolor
cgtccggcatcagagaaggcattggttgctggtttgggaggactcaatctctttggtgtcatcattcttggaaacttgttgaagcaaatgactgtgacacctggtggactgatctcatttgcagcacagttatatcctttgcttcagatatacgctggctccttttttgcaatacctttatttagatggtttctgctacgcaagaccaacaatgacattagaaagaggaataaggccagagaacagcgagctcaagaactcgtgtctccagattcttctctaagaagaaagttgctcagtgcacgcgatatggctgaacggaaagtaattacgccagaggagatcgtctatactactgaaaaggatctattggagcaggattatgaagtcaaggagtgggagaggagattaaggaagctgaatcagagtgatggacatga

SEQ ID NO: 455662 - DNA, 522 bp, Sorghum bicolor
  unsure (1)..(522): unsure at all n locations
cgtccgctgaagacactgtcagtgtgaactatgatgacttcataaatgatgttgaagctggtgacatactgttagtggatggaggaatgatgtcgcttgctgtgaagtctaaaacagccgatacagtcaagtgtgcagtagttgacggtggggaattgaaatcaaggcgccacctaaatgtccgtggaaagagtgctactttgccatctatcactgagaaggattgggaagacataaaatttggtgtcgaaaacggtgttgatttctatgcagtttcctttgtgaaggatgccaaagttattcatgaattaaaggactaccttaaaggtgctaatgcggatatacatgtcattccaaaaattgaaagtgcagattcaataccaaatctgcagtccattattgctgcttcagatggggcaatggtagcacgtggagaccttggtgctgaacttnccattgaggacgttcctttgctacaggcagagattggtcaaacatgtcgaagcatggagaaaccagtca

SEQ ID NO: 455663 - DNA, 339 bp, Sorghum bicolor
  unsure (1)..(339): unsure at all n locations
cgtccgcggacgcgtgggcgccgaggagcgcaaggcctggcgcaagaaccacccgcacggtttcgtcgcgaagccggagacgctgcccgacgggacggtgaacctgatgatctggcactgtaccatccccggcaagcaagggactgattgggaaggtggatacttccctctgacccttcatttcagtgaggattaccctagcaagcctcccaagtgcaagttcccccagggtttcttccacccaaatgtctatccttctggaacagtctgcctttcgatccttaatgaggacagcngctggagaccagctattactggtaagcagattctcgtcgggat

SEQ ID NO: 455664 - DNA, 396 bp, Sorghum bicolor
cgtccgcaattgcaggagctgcgaaggaatgtgtttggagatactaatgcgcaagggctctttaactacttcaagaaaatgcaatcagagaattccagctttttcttttctacacaagttgacagtaaaaactgtgtgagcaatgcagtttgggttgatgcaagagctagaatggcatacacatactttggggatgctgtttacttcgacactacttatagtcaaaatgagaacatgctgccctttgcagctttcacaggagttaatcaccatggtgacactgttgtttttggctgtgccttaattttggacaggacagaatcttcatacagctggatttttgagacgtggttgacagcaatggatgatcggttgccattttcctttactactgat

SEQ ID NO: 455665 - DNA, 447 bp, Sorghum bicolor
cgtccgggggcgcctaaacaggcttccttctgcctgtgtgggtgacatggttatggcaactgtgaagaagggaaagcctgaccttaggaagaaggtgatgccagctgtcattgtgaggcagcgcaagccatggcgccgaaaggatggtgtctacatgtactttgaagacaatgctggagtgattgtgaacccaaagggagagatgaaaggttctgccatcactggacccatcggaaaggagtgtgctgatctctggcccaggattgctagcgcggcaaatgcgatcgtgtaatggaagcagctagttgaagtttatttcttgtgttgagacttgagagttcttagttagacagctttcgatggccctaaagatgtttccccgcttgatgtttgtgctgctagatcgtttcctagctttgatgacatctctccatatcgataaagtgt

SEQ ID NO: 455666 - DNA, 438 bp, Sorghum bicolor
  unsure (1)..(438): unsure at all n locations
cgtccggatcactgaaagctacaaatccaagctcaagtctattgattgcaagtactttgactttgggactggctcatgcccctttggaacaagttgtttctacaggcatgcctacagagatggccgcttggaagaggttgtactacggcatcttgatgctgatgatggaagtacagtaattgcaaaagacatcaggttatcagacttcctcggtaggatgcatctttagggaccagcagctgtatagatatcaaatgctttctgggatatcgttatccaccaattatttacaatattctgaagagcagtttagcttgaggcatcttcggaaagtacagctttgtctccatttaagtggtggtgcttttgtcgcagttgaaataaagaagtttngagatctctatggcctgtgacgctgggataccttttaaagcactg

SEQ ID NO: 455667 - DNA, 389 bp, Sorghum bicolor
cgtccgcccacgcgtccgcccacgcgtccgccctcccttgcgttgcgcgttcctcttcttccttccttgatactacgatcgattccaacttctttattagccttatattattactatcagtcaatcctgagaaattggattggggatcgcatcgcatccaaatccgatacacaacaagccaagcgagaggccgcctgcccaccttccggcgcggcgacatgaagaagatcttcggcgccaagaagaacaaggacccgccgcccaccatccaggacgcaaccgacagaatcaccaagcgcggcgacaccgtcgatgaaaagatcaagaagctcgacgctgagctcgcgcgctacaaggagcagatcaagaagacgcgcccaggccccgcg

SEQ ID NO: 455668 - DNA, 104 bp, Sorghum bicolor
cgtccgcaacactctcacgctcgcagagtttgctcagcaatggccgcctccaccatgtcgatctcctccacggcgatggccggaaccccaatcaagggggcttc

SEQ ID NO: 455669 - DNA, 476 bp, Sorghum bicolor
cgtccgcatccatgcgatcccaaggaagatctggctggatcccagcgggaagcagctgctgcagtggcccatcgaggaggtcgagaagctcagaggaaaggccgtcactgtgggcggcaaggtggtgaagcccggcgagcattttgaggtcacaggcctcgcgacttaccaggctgatgtggaggtgagcttcgagatctcgagcttggacaaggcggagcccttcgacccggcgtacgacaacgacgcgcagaagctgtgcggcgtcaagggcgccgacgtcaagggcggcgtagggcccttcggcctgtgggtgttggcctctgccgacctgcaggagaagacagccgtcttcttcagagtcttcaaggacggctacggcaagcccaaggtgctcatgtgcaccgaccccaccaagtcatcgcttagtccagatctgtacaagccgaccttcgccggcttcgtcgacactgaca

SEQ ID NO: 455670 - DNA, 260 bp, Sorghum bicolor
cgtccgcttccctagagcctccggtagcacagccgagacagcgacgggttctccacccatacggggatggagcgacagaagtgtggaaataggataaggtagcggcgagacgagccgtttaaataggtgtcaagtggaagtgcagtgatgtatgcagctgaggcatcctaacgaacgaacgatttgaaccttgttcctacacgacctgatcaaatcgatcaggcacttgccatctatcttcattgttcaactctttgatg

SEQ ID NO: 455671 - DNA, 388 bp, Sorghum bicolor
  unsure (1)..(388): unsure at all n locations
cgtccgcatctctccgaatctttcggcatcggcaccggcaccggcgagagaagagaaggggcgacccaggcgggccaacgcgcaccctagcactttatcatcatcaaggggtagacggccctcgaagcgcacccgtccggaccgaccccatcctcctttcccgaacaaccggagcgcggcggcgcggcgcgagacccttccccgccccagtccgccgactactcgcccagagggacttgcgatcgatcgcgtgcccgcggggagtgatatggcgaccaagaggagcgtcggtacccttggggaggcggatctgaaggggaaagaggtgttcgtgcgcgccgacctcaacgtcccgctcgacgacgccncaaaagatcaccgatgacac

SEQ ID NO: 455672 - DNA, 445 bp, Sorghum bicolor
cgtccgcggacgcgtgggcgactgcaccgaggagttcgacgccatccactccgacaaggccaaggcgctcctcgacacctaccgcatcggcgagctcatcaccaccggcaccggatacagctccgacaactccgtccatggcggctccgccgtcctgtccaacctcgcgcccatccgcgaggccgtcagggccccggcccccgtcgcgctctctaatccgcgcgagaagatccactgccgcctcgtcggcaagaaggagctgtcccgcgacgtccgcctcttccgcttcgccctgccgtcgtccgaccaggtgctcggcctccccatcggcaagcacatcttcgtctgcgccaccatcgacgggaagctctgcatgcgggcgtacacgccgacgagcatggtggacagatcggcacttcgacctctcgtaaggctacttaagacg

SEQ ID NO: 455673 - DNA, 413 bp, Sorghum bicolor
cgtccgatcctctcctgagtctctcctctgctttagctaggtagctacggccctttggtccccggctagcttcttcttcattcgaccccacgcagcagcaggacgccagcagcagccagcagccatggctgccgtgaccgcggcgtccccgtcgtcgccatgcagccacctccagttcctatccttgtacccgcagcggcgcacccgcgcggtgcggatgcgggtgcaggtgtccagcaccgagaccgcggaggcggaggcggtgaagaaggagaaggtgtccaagaagcaggacgagggcgtcgtcaccaacaagtacaggcccaaggagccctacggtcggaggtgcctgtccaacactaggattaccggcgacgacgcgccaaggggagcgtggcacatggtcttcagca

SEQ ID NO: 455674 - DNA, 422 bp, Sorghum bicolor
cgtccgatttttttagtaaaaaactctcttgaattattaatgaacagaaaggtgctattgtctctgacactgtactgtagagatagaatatttcttaagtgcttatagtaggataaattgttgacataatcttcgctgcagtgtcagatttttaaccggacactccagaaatggtgggacagatccactacatgtagctggaagtgcagctgatccagacactactttggttgtgtacatgggtttgtcaacacttccatcactcgctccaaagttaatgaagcacggcctgccgccagatacccctgctgttgcagtagagcgcgggactacacctcaacaacgaacggtgttctccttgttaaaggatcttgtggatgaagtcaagtcaactgatctaagttctccaactctaataatta

SEQ ID NO: 455675 - DNA, 385 bp, Sorghum bicolor
cgtccgccaaacttgcagacgttggatctctcctggaatattggtctggaggaattgcctgaatcaatcggcagtcttcataatttgaagatcctgatcttgttccagtgctggagtctttccaggttgcctgactctatatccaaccttgtgatgttggaaagtttgaaccttgttggatgtgaacagctgacaaagctaccagatggcataataagcatcagcaatttaaagcacctgagaaatgaccaatgctcagctttggagagactgcctcatggatttgggcaatggacaaaacttgaaacattgtccctacttacagtaggtgacaaaaatagcaatattgctgagctagagtaccttaatgttttaactggtcagc

SEQ ID NO: 455676 - DNA, 434 bp, Sorghum bicolor
cgtccgcccacgcgtccgcacagaatgacaagacttgacaagaaacattcaaagcaattattcctgaaggaagcttgtccggtggaatattcagagtacatggggcctgatttggcagcaattttgaagaaatgtgatggtcaaccactcgctctgactaccgttggccaattcatgggaaaaaagagttggccaacaggacatgactgtgaagatgtgtgcaaccaggaacggttttaccatctgcagagtggtgacgatactttggacagaatgcataaggtgctgatccatgactacaccagtctgcctagccatgctctcaaagcttgctttctgtattttgctatgtttccaagtgatcatccagtaagggcaaaaaggctaaagaggcaatggttagctgagggatttctgcagcccacaaatttatg

SEQ ID NO: 455677 - DNA, 294 bp, Sorghum bicolor
cgtccggcctgcaattgcccctgtgtctgcatctggggctgtgcctgcgcctccacctgttagtgccgtggttcctgagctgtccgacctagatgttcacaatgaggagaagttgctgagggagctggaggaaatgggctttaggcagatcgatctcaacaaagaaatccttaggcagaacaattacaacctggagcagtctgttgatgacctatgtggcgtcaatgaatgggatccactccttgcagagttggaagaaatgggatttgatgacacagaagtgaacaaggagct

SEQ ID NO: 455678 - DNA, 482 bp, Sorghum bicolor
cgtccgccgcaccctctaaaccctcaccaccggccaccatggcgatggccggcgccgccgccgccggtcgctgcctcctgctctcccgcccgtcccctttccggctccgcctcctccgcgccgccctctccacctctgcccccaccatcggccccacctccactcccgctccccctccgcggcacgagctcctcctcgagcgcctccgcctccgccacctcaaggacgcctcctcctcccccggcgccccgaggcccgcctcgaggggcgcggagcggagctcgcagcaggggaaggggaagagggtcgaggccgcggagagcttcgaggagctcggcctcggggaggaggtaatggccgcgctcggggagatgggcatctccaagcccacggagatccagtgcgttggcgtgccggcggtgctggccggcaccagcgtcgtgctcggctcccacaccggctccgggaagacgctggcctac

SEQ ID NO: 455679 - DNA, 382 bp, Sorghum bicolor
cgtccgcccacgcgtccggtgacagatgagttatgtgttctgaaagctacagctgaattgctcaaatcacaattgaacgaagagaaagcagcacttgctgccactcaacaggtggaagcgatggcatccacaaccatccaatctctcaagatggacatcaagctgtcacagcaggaacttgaagcagtccatgtcaagtcaaaggagtgccgagatagaatggacaaggttctgcaagatgcatcccaggaagttgacgaggctaagatcattgctaccaaggctcgggaggagctaagaaagaccaaggaagaagtggagcaagcaaaggctgctctgagcaccatggaattcaagcttgaagcagttctaagggacatac

SEQ ID NO: 455680 - DNA, 396 bp, Sorghum bicolor
cgtccgagcagtccttgtggttgacagacttggcagaagaccgttacttattggaggtgtcagtggaattactgttgccttatttttgctgtcctcctactacactttactgaaagatgcctcctatgtggctgtaatagcacttctactatatgttggctgttatcagctctcatttggccctattggctggcttatgatctcagaggttttcccgctgaggctgcgagggcgtggattgggtgtcgctgttcttgtgaattttgcgtccaacgctctggtgacctttgctttttctccactggaggatttgattggaacgggggcgctcttctctggatttggggtgattgcagtggcatctcttgcattcatattctggatcgtccctgagac

SEQ ID NO: 455681 - DNA, 302 bp, Sorghum bicolor
gctagacgtcctaacacaagaactggagggagcgaaaagacagatagaggcactcaaaactgaaaagtcccagattgaagctgaagctaacaaccaaagaaacctttcggtaaaactggagtctgatctcaagagtttgtcagaagcttacaacagcatagagcaggccaactaccgtttggatgccgaggtaaaaaccttgcggcagggaggcagcgtgccgtatcctgacgtggaagcaataaaagcgcaagccaaggaagaggctgagaaggacagtgagggcgaactgattgatctac

SEQ ID NO: 455682 - DNA, 465 bp, Sorghum bicolor
cgtccggtttagtaggccatttgtggacatatgaatgcgtgaagcattggatcccatagaactccaatatgcaatatggcctcgaatggactagtatcaggatcgggagaccgccctgagaagctccatcaagagtgccttgttcacgcgcttcttcagaggcccttttcctgcaccgctgatggttgccccttgagctatagcaggaaggatcatttgaacagacatttacttactcatgaagggaaactatgtgtgtgccctatcgaaggatgtggccgaaagttcaatatcaagggtaatatgcagagacatgtgcaggaaatccacaaagatggctcttcatgtgaacagtagaaagagttcgactgtccagacgttaactcggggaagactttcaaatatgccgtccagttcaagaagcacgcataatcacatgtccatctggaatacacagaagctatc

SEQ ID NO: 455683 - DNA, 438 bp, Sorghum bicolor
  unsure (1)..(438): unsure at all n locations
ctgtgggagaagcccctccaatttggcagagcatgaaagagcagaaactggtcgcaaaggatgtcttctctttctggcttaatcgtgaccctgatgcatctgctggaggcgagcttgtctttggtggtgttgacccaaaacactacaaggggaaccatacatatgttcccgttactcgcaaaggctactggcagtttgacatgggagatcttcttattggtggccactcgactggttactgtgctggtggctgtgctgctattgtggactcagggacttcattgcttgctggtccaacaaccatagtggctcaagtcaatcatgcaattggggctgaagggatcatcagtacagaatgcaaagaagtggtgagagagtatggagagatgantcctgagttactcatagcacagacaagcccgcagaaagtgtgcactc

SEQ ID NO: 455684 - DNA, 488 bp, Sorghum bicolor
cgtccggttctattggtacacggatgctgttgttggaccaggattttctgagggatatattggtctcatctattcaattggttcagttggttcactaattggagttttactataccaaagcgcactaaaggactatccttttcggagcatgctattatggggtcaagtgctctcaagtctagcaggaatgcttgatctggtgttagtgacccggctaaacctgaaaattggcatgccggattacttctttgcagtggctgataacgcagtttcccaaatggttggtaggctccaatggctaccactacttgtgctttgctccaagctttgtcctcccggcactgaaggaacattttatgcattactcatgtctctacaaaatgccgggttgctgatgtctgcttggtggggggcctgctgctgcacatgctgaacgtgacccgaatggagttcagtaacctctggatcatcgtcttgattagaaacac

SEQ ID NO: 455685 - DNA, 162 bp, Sorghum bicolor
cgtccggttcgccgtcctcggccgttccaacgttggcaaatcctcgctcatcaacgccctcacccgccgcaaggaagccgcgctcacctccaaaaagcctgggaagacacagacaatcaatcacttttggtaataagagtggaccttgggattgccggtatg

SEQ ID NO: 455686 - DNA, 342 bp, Sorghum bicolor
caccgtcaacacttacgctgcaagttgtagaatgccgctcaccatgtgactctcacggatggcgcaccccataggggctccttggaggccgataccatgccagacgggcaacccaggtgcggcgtcgcagccctgtacggcccaccggtaagactggcctttcgggagcccggctacctaccgcgagttcccgcgactacgtggacaccgggggctgtcggccgaccccgagaccttcgccaagaaccgcgagcctggagggatccactcccgctgggccatgctgggcgcgctcggctgcgtcttccccgagctgctcggccgcaaacggggtcaagtttc

SEQ ID NO: 455687 - DNA, 413 bp, Sorghum bicolor
  unsure (1)..(413): unsure at all n locations
cgtccgatacattcatccctggggatgatgataatgtgtacagcacagaattgagggaacttctaagcagaaggagcgtttctaaccttcttcacagtgcttttcgtgaaaacttggatcggcttatccggtcatatgttgaacggcaaggtcgtggtcctctcccttgggatctggaaggaacaactcctgcccctccctcaccagatcaaaatcaggagcagcaaagagatgatgaggatcaggaactgcagaacactgtgaacaggcctcctttagtgataccacctccacctatgcctcctcgtcagccactctggcattcagagttgcatcgtaataattggatcagacaaaacattcatcgntcatcttctgatattgaatgggaagccatcaatgatttaagagct

SEQ ID NO: 455688 - DNA, 493 bp, Sorghum bicolor
cgtccgaggagctcccctccgcctccgagtcccacttcctggacctcatctccgccacggcggcgctccgcccggcgttcgcggatgcgctggcgcagctgcagccccggccggacctgctcgtccacgacggcttcctcccgtgggccaaggacgccgccgacggcctcggcgtgccccggctcgtctcgcatggtatgggcgccttctcctgctacgccacgctctctgtactcatacagaagccgcacgcgcgcgtgagctcgccgtgggagccgttcgaggtcgacggcttgccggggctccagctcacgacggccgacctgagcccgccgttcgacgacccggagccagccggccgtcactgggacttcatctgtgagagcggtgtagccatgaactccagccggggcactatcctcaattccttccatgagctcgagtcactctacatagacaagatgaaccagctggagaactcgccggcgatgtg

SEQ ID NO: 455689 - DNA, 357 bp, Sorghum bicolor
gtccgattccggtcgaccacgcgtccgccatctcgtgcgcctagtttgttaaccataccaaccttatcatcttcctcgatgtgtgacccctcaccttggacattgagaccgtcgttggagtcatgaccaagttgatcccgttgaacacagtcatcccatccatgatgtcgcaggtgttcaccacctaccaggaccagcagaccactgtctccatccatgtcttcgagggtgagcgcatcatgaccaatgactgccgtcttctcagcaagttcgacctctctggcattccaccagctccaaggtgcactccccagatcgaggtgaccttcgaggtggacgccaacagttttctgaacg

SEQ ID NO: 455690 - DNA, 505 bp, Sorghum bicolor
cgtccgagctcatgcacgggcgctgggccatgctcgccaccctcgtctccctcttcgtctagtggctcaccggcgtgacctggcaggacgccgtcaaggtatagtttcatgcatgtatccatggagttcgttcgttccaagcgcatgcgcttcaacgatctaaccatcctgtgaattgatcgatgtgacggccggcgtgcacgtggagctggtggacggatcctcttacctgggccagccgctgccgttctgcatctcgactctcatatgtatcgaagggctggtgatcggctacatcgagttgcagcgcaacgtcgtgctcgacccggtgaagaaggagcggttgcagctggcgtagatcaagcacgcgcgcctggacatggtcggcttgctcggattctacgtgcaggtcgacgccacctgcaaggagacgatcaacatctgcgccatccacatgagcgacctgatccacaccaccatcttcgacacgttcggagcatgctct

SEQ ID NO: 455691 - DNA, 473 bp, Sorghum bicolor
cgtccggttgaagagaaaaggggaaaatacagaaggaatcgcaagatgcacatttgaggacagaattcttatgagtgacattgttttcctgcgtgcctgggttaatgttgaagttcccacgtactgtaaccctgtgaccactgctctgcaacctagagagcagacctggcaaggcatgagaacaactgctgagttgcggagggaacacaatatccctaccccacacaacaaggactcagtttacaagcctattgagcggaaaccacggaagttcaatcctgttgagatccctgcaaagctgcaacagttacttccttttaaatctaagcctaaggatacacctaagcagaagaaagtatcagttgaaaacagggtgccagtaatcatgcaacctagtgagaagaagacacatgcagctatacaacagctaaggctgataaaacatgagaaggcaaagaagaagaaaaataagg

SEQ ID NO: 455692 - DNA, 452 bp, Sorghum bicolor
cgtccggttgagccactcctgttcaactaccaggtggatttggttttcttcggccatgtacacaactatgagaggacctgtgcggtataccagggcgattgcaaaggcatgccaacgaaggacaaaaacggaattgacgtctatgacaacagcaactataccgcacctgttcatgtcattgctggagcaggagggttcaccttggacagcttccctaacaatggggaggcctggagcttatcaagggtttcggagtttggctatggcaaggtgcatgctacaagaaccgatatgctgggtcagtttgtaaactcaagttcgatggaagtacgagaccaatttaagattgtgaagggagcttcggtaaacaagacaccgagcctgatacttcaataatagctgctgctcacaacagaaagaagatttaacgggacatattcttccttttttgg

SEQ ID NO: 455693 - DNA, 445 bp, Sorghum bicolor
cgtccgcccacgcgtccggcgtcctccccgcgacgacgcttcccgagctctctcctctgttccctctcatccccgcgattctcctctgccgctctccgctagggttttgccgccgacctctcgctcgctcgctcccggctccgcgaggcaaccgtacggccggtcgaaatggtggatgtggaggaggccgggaacaagatgcaatcactgatgcacctgcacgccgagccggaggacgacgcctgcgacgacaccccctggcgcacctttcaaaggcacctcgcatgcacgccaacgatgaagccacgccgaggccgaggacggatccggcctgtggataacgggcagcgcagcagggacaaggaggacatgaacctcaagcggtaccgcgtggagcgcaccaacggacagttcacgaggcgcttcctcctgcccgagaacgcca

SEQ ID NO: 455694 - DNA, 425 bp, Sorghum bicolor
  unsure (1)..(425): unsure at all n locations
cgtccgcaccataattggatacgcagttgcgctatctggtgttgtcctgtacaattatttgaagatgaaagatgtcaaagcaaaccagcttccagcagacaatagttctgatagggctacgaaggacaagaagtctgtaagtatattcaggcctgacaattccatggacaacaatgatgggactgtagtatgaggcctggcatcagaagctgcggcagttgatgaggaagcccctttgatcccttctgcacgcctctgctatgttacacggacccatacaggcagcttcattaacagataaccatggtttgcctatntcgtgggttgatatctgctttgttccggtgaatttgacaggggtgctgatatacgtttggaaaagaatatattttcagaagctcctgcaagtggcacctcttctcata

SEQ ID NO: 455695 - DNA, 453 bp, Sorghum bicolor
  unsure (1)..(453): unsure at all n locations
cgtccgctcattatcacagcggcgattttgaagagatggaggatgagtacgacatgaacgagccagtcgagggggaggatgagtaccaagagctcgtggttagggactctgatgcggaggaggaagacgacgcggaccaattgcataagctctccgacacatcagcagcagacgcaagaagtgggaaagatattcaaggaataccttgggagacgatagaagtcacaagagaaacatacaggcaggcccgactagagcagtacaagaactacgagaacatacctaattctggagaagcagcaatgatggcatgcaaatctaccgagaaaggaagaacatattacgaattcagacgaaatactagatccgtgaaatccactatctctcactttcagctgagaanattagtatgggcgacatcgaagcacgatgtgtacctgtggtgcattactc

SEQ ID NO: 455696 - DNA, 392 bp, Sorghum bicolor
cgtccgacgccacacagctcaatggcactcgtctccgcctcctcgtcctccaccaccgccgtcgcggcgctccccaggaatgggcagcagcgcgcgtcgtggacgtcctttctcggcggcaagacgctgctgaggcatgccgtcgctgggctgacatcatcaagcccggaagcgtcaacactgaccccatacttcccagcaacaagctcaccggcaccgacggcgggtaccctggtggcctgtggtttgacccactcggctggggctccggctcgccggagaagatcaaggaggctgccaccaaggagatcaagaacggacgcctcgtcatgctcgccaggatgggcgcctggttccaggccagatacaccgggactggccccatctacaac

SEQ ID NO: 455697 - DNA, 498 bp, Sorghum bicolor
cgtccgcattcaagaaggtcattagtttgccttcccgcattgatcctcaccaaacctctgctgttgtcaccctccatgggcagctatttgtgcgtgcaccatttgaacaatcaaaataatgttgatgccacaatgaagcacaataatacaagtttgccttatgggtgggattatactgttgtgacatgagcttagagttctcaccctgaccgtcgtcaaaaactagttccttgctgatcctaatgcttcaaccatgcttgatctctcctgtatcaagttaaactcattagttgacatagttctgtgtgtattcggctgtgcccattggctgtgaattgtagctaaagcaaagttactaagcctagagtttaggatgttaatagcctgatgctcaacatgtccatggtttcttttcaatttaaccggcataaagtgtactgtttgtagcaatgtagtatgtaacttgttcccagtatttgagctctggaacatggagtc

SEQ ID NO: 455698 - DNA, 409 bp, Sorghum bicolor
  unsure (1)..(409): unsure at all n locations
ttcccggtcgaccacgcgtccggtcaccggcggtgcggcgaggcgatcactgcgagtctnccaccaccgcctccacgttaacatggcgcagcaggctgctgcaccggcgaggcctgcgggccccaccaggcttgtctacttcgatgatatgggagcgctccgctactccgccaccgtcctctccgtccaccaggaggacggcggccgggtagcggtggtgctggacgccacagtctttcacccgcagggcggcggccaaccggcggacacgggcgttatctccgccggcggagccaggttcctcgtcgaggatgtgcgggcgaaggacggagtggctttccactatggaagatttgagggcacggaacatggatgtgggattgcatttaaagaggccgaaaccgttagc

SEQ ID NO: 455699 - DNA, 394 bp, Sorghum bicolor
cgtccgattaaagatattggaagaggtggtccgatggtggaatatgagaggagaatagcatcaggagacctagtagatggcgatagctttcaggttgatacaattcatcaattacaaaggctctatgaggagttgattgagaatgaagaagactgtcagctggatagatataagtcatctgagaaatcaggacggagtcgatggctatggtcccgcctcattactcagccttctacctatgctccagttaagggcctttacctctatggtggtgttggtacagggaagacgatgcttatggacttgttctatgaacaactgccatctaattggagaaaaatacgtattcactttcatgatttcatgttgaatgtacaatagtcgtcttcagatg

SEQ ID NO: 455700 - DNA, 513 bp, Sorghum bicolor
  unsure (1)..(513): unsure at all n locations
cgtccggttatcgtggatgggtgaagggcaagctgataagcagcgacaacgaagtttgatgttgaagcaactactgacggagatattactaagggatggtggtattcaacttttgcttggtccaaatggaatgggagaagaaggagagctgaaaaagtatatgatggattggagaagtaggcagcaattcttacttgaagctgcccatcggtgtcaagaggctgggctctatgacaaagctgtggaaattcacaaaagagtaggagcctttgccatggctcttcagacaataaacaagtgcctgtccgatgcagtctgtgccatggcacggagtatgctagatggcgagagtcatgctgctgccctaattcattctggcaatgaaattttggagacagctagatattcttctgaagccagcactcaagagaaggatctcatttctgaacaacaaactgtgctgagacagctngaagctattctccatatttataggctagctcgagctggaca

SEQ ID NO: 455701 - DNA, 464 bp, Sorghum bicolor
cgtccgggcacagatgaagaagaccctgaaaatgcacgatgaatcaaataaacgacagaaggtcgatgatgatgtccaagagggtgctcttcctccgtatctactggatcgtgatcagacacagcgtgccatggttctgagcaacacaatcaagcaaaagaggaaggaaaaggctggcaaatgggatgttcctctgccaaacgtcagacctgtagctgaagaagaaatgttcaaggttctacgaactggcaagcgaaaaaccaagctgcggaagagtatggttaccaaagccacctctcggtgcagctggatctactaggacaccagctaagtatgaacggttcattcggactgcctgccatcctttaacaaaagctgatgacaatcacctcgaactgcagtgcactttcatccttgacataatattttgtgaaaaaaagctcaaatggtccaatgtacacgtc

SEQ ID NO: 455702 - DNA, 445 bp, Sorghum bicolor
cgtccggcagggcaggaacgtgaagctgagcgacaagctcaaggagcacatcgaggacaaggtgggccgggcggtgtccaagcactgccacctggtccgggaggtggacgtgcgcctctccgcgcgcggcggcgagctcggccgcggacccaagacgtcgcgctgcgagatcacgctcttcagcaagcgccacggcgtcctgcgcgccgaggaggacgccgagtccacctacgccagcatcgacctcgccgccgccatcatcaagcgcaagctccgcaagatcaaggagaaggagacggaggtgcggcgcgacggcgacggtggtgcgggaggcgcctgggaagaggagctcccgctgctcgacgacgacctggtggaggccgacgaattggctgcggccgtgggcgcggaggacgagcagactgttgtcgccaaggtggtgcgc

SEQ ID NO: 455703 - DNA, 465 bp, Sorghum bicolor
cgtccggcagagtgataagcaagagcaaattaagcttctcactcatcatcagcacctggcctgccattaattacctagcagctagctagctaaggtagccatgaaggtagagcgcgacctccacatgagccgcggcgatggcgaggacagctacgcctccaactccaggctttaggagaagtccatactgaagacgaggccggtgctccacaaggccgtggcggcggcgcacgcgtcgtcgctctcctccggcggcggcgccatggtcgtcgcggacctcggctgctcgtcggggcccaacacgctgctcgtcgtctccgaggtgctcggagccgtcgccgacaggcgagaggatctggcaatggccgctggcgcccaaccgcagcacgtgcagttcttcctgaacgacctgcccgggaacgacttcaacctcgtgttccaatcccctggagctgttcaagaagc

SEQ ID NO: 455704 - DNA, 503 bp, Sorghum bicolor
cgtccgcgccgacccgctgtactgggacgaggctttctacgacgaactacagaaccgcatcggcggagggaagcccaagatgcggtggtactttggagaaaatgggtggccttcttcagagctctttgagacaccaccttcgactgacaccgacaaggagaagttggttgacataattcaggattggaaaacagagagatacaaagaaataataaaatctggaactgtgaagcctagacctggtgtgttgcggttgatggatgaagtaaagaatgcgggtatcaagcttgctgtttgctctgcagcaactaaaagttcagtcataatgtgccttgaaaaccttattgggcttgagcgatttaatggtctggattgcttccttgctggtgatgatgttaaactaaagaagcctgatccaacaatatatataacagcatcagagaaattaggtgtcggaagcaagaactggtctgtgggtgacgatagtgttattggattactag

SEQ ID NO: 455705 - DNA, 418 bp, Sorghum bicolor
  unsure (1)..(418): unsure at all n locations
cgtccgggcgcaccgccacgtgggtgcccgacccttacggcatcgagatcggcgaccccgacgcggcgccggaagggtacgaggagcggtggatgctcaacgtgcacgccatcgacacgcggcgcgtggtcgacaagctcgcgtgcaccgagtgccgctgcgacctgtacaacgtcaccgtggaccagtacggccgcggcatcgaggacggctacgccggcggcctgcgctgctgctacgacgagacgcggtgcgcgctggaggagcgagcagggctcctcgtgaacgccgacgaggaggcgccgcccaggaaggtgttcttgcgctacaccgtgatgtggcaggactggagcgacgccggggtgctgcccgtgaagatctacatcnttgacgtcaccgcgtgcaaggtggagtacga

SEQ ID NO: 455706 - DNA, 162 bp, Sorghum bicolor
cgtccggtcgacccgccggagcttatcacgccggccaagatttttgtcattgaacgtctgcacccaatgatcgatcagcgagtgagggacctcttagagttcaggatctactcggacatcaccgaggaagttaaggttgcatggaaaatccagcggaccatg

SEQ ID NO: 455707 - DNA, 482 bp, Sorghum bicolor
  unsure (1)..(482): unsure at all n locations
cgtccggtttgcagaggagaacgggctagatgtggttgtggttaaccctgggactgtgctgggcccgatgattccaccagccatcaacgctagcatggccatgttttgtcgcctccttcaaggctgcacagaggagtatgccgatttcttcataggaccagtacacgtggaagacgttgccatggcgcatatcatggtgttcgagaacccatcggcgtcggggaggcatatgtgcgtccagtccatctgtcactggagcgacttcgcggtcaaggtcgccgagctctaccccaactacaaagtgcccaagttccctaaggacacccagcctgggctggtgagacaagaggtaggctccaagaagctcatcgcgctggggcttcagatcactcccatggagaagatcatcaaggatgccgtggagagcctcgagagcagaggccacatctnctgaatcctgatggatggatggcaggatgggc

SEQ ID NO: 455708 - DNA, 504 bp, Sorghum bicolor
cgtccgaacgagtccggtaagagcgtccagagcgaggtgcgcaccagctccggcatgttcctggagaagaagcaggatgaagtagtaaggggaatagaggagaggatagctgcttggacatttcttccaccagagaatggtgaatccattcagatattacactaccagaatggtgagaaatacgaaccccactatgactacttccatgacaaaaataatcaagccctgggtggccatcgcattgccactgtgctcatgtacttatctaatgttgagaagggtggagagaccatcttccccaatgcagaggggaagctattacaacccaaggacgacacatggtctgattgtgcaagaaatggatatgcagttaaaccggtaaagggtgatgccctgctgttcttcagtctccaccctgatgcaacaacagactctgagagcttgcacggtagctgccccgtcatcgaaggccagaagtggtccgcaactaaatggatccatgtg

SEQ ID NO: 455709 - DNA, 449 bp, Sorghum bicolor
  unsure (1)..(449): unsure at all n locations
cgtccgcctcatcgtcctcgatcctcctgctcctcctcgccgccaccttgatggccggcggcactcatgcggcgacattcaccatcaccaacaactgcgggttcacggtgtggccggcggcgaccccagtcggcggtggcacgcagctgaactcaggcgggacgtggacgatcaacgtgccggccggcaccagctccggccgcgtctggggccgcacgggctgctccttcaacggcaacagcgggagctgccagacgggcgactgcggcggcgcgctcgcctgcaccctctccggcaagcctccactgacgctggccgagttcacgatcggcggcagccaggacttctacgacatctcggtcatcgacggcttcaacatcggcatggccttctcctgcagcaccggcgtccgggctggtgtgcanggactcgagcttgcctgacgcata

SEQ ID NO: 455710 - DNA, 474 bp, Sorghum bicolor
cgtccgcaaagctagtacacaagctagcagtctcctcgatcccagtctcgatcagaattcagacaccaagaacatcgacgacatggctcggcttgctgtggcgatcgccgtggtggcggcggcggcggtggtggtgctggcggcgacgacctcggaggcggccatctcctgcgggcaggtgagctcggccatcgcgccctgcctgtcctacgcccggggccagggctccgcaccctcagcaggctgctgcagcggcgtcaggagcctcaactccgccgcccgcaccaccgtcgacaggcgcgccgtctgcaactgcctcaagaacgccgcccgtggcatcagcggcctcaacgccggcaacgccgtcagcatcccctccaagtgcggcgtcagcgtcccctacaccaatagcaccttcaccgactgctccagggtgagctaaacctaaaccaggatgatcgatcgatgatccat

SEQ ID NO: 455711 - DNA, 426 bp, Sorghum bicolor
  unsure (1)..(426): unsure at all n locations
cgtccgacgaggccgagatgagccagcaggaggtgtacaggttcaacgtccccacttttggccctggcgtcgtctttgatgtggattactctgttaggcaggagcagttcaggttctttaccgaggcgttacgggctaataagcttcgtagctatgttgaccagatggttgctgaggctgaggagtacttctcaaagtggggagaaagtggcactgttgatttgaagtacaagaatgggcgccccaccactgagggtgaggtaaccgggctacttatcgcagcactctttgctggacagcacaccagctcaatcacctcaacctggaccggcgcgtacatgcttcggttcaagcagtactttgcagaagctgtagaggagcagaaggatgtcatgaaacgtcatggtgacaagatngatcatgaca

SEQ ID NO: 455712 - DNA, 441 bp, Sorghum bicolor
gaagaaaattttttataaaaattataacactcaacaatctataactttatagttctcagttttataaggtcttgtttagttcgcaaaaattttcaagataccccatcacatcgaatctttggtcgcatgcatagagtattaaatatagacaaaaataaaaactaattacacagtttacctgtaatttgtgagatgaatcttttgagcctagttactccatgattggactatgtttgtcaaataaaaacaaaagtgctacagtagctaaaaataaaaaattttgcgaactaaacaaggcctaaattaagatcattaagatgctaaaaaattaaacaaagtattcggtagtaatattcttagcttattttcttaaccccaaggtaaaatattcaacaccttcgaagtcatttccttttcatcctgtacacagtgcacgagaga

SEQ ID NO: 455713 - DNA, 432 bp, Sorghum bicolor
cgtccgcagaagggtactctggtagtgatctcaagaacctgtgtgttactgctgctcatcgtcctattagggagattcttgaaaaggagaagaaggagagagcttcagcagaagcagaaaatagatcgttgcctctgtcacacactagcaatgatgtccgcgcattaagattaggtgatttcatacatgcacacgaacaggtgtgtgcaagtgtttcctcagattccagtaacatgaacgagcttgtgcaatggaatgatctctatggagaaggcgggtcgaggaaaaagacaacgctaagctacttcatgtagcttatgctgtaaatataatagaggtgccctggtacaaagcagcaatggttggaggcagttgggtttgtatttggtgcatagttggaaaagagctatgctcatctgccagccatacata

SEQ ID NO: 455714 - DNA, 495 bp, Sorghum bicolor
cgtccgctcagatgtttagacaaggctgctacagttaccgaagttgatgtgaaaatggctgacttcagcaacccatggcggatatgcactgtcacccaggtggaagaactgaagatactagtaaggatgttccctgtctgggcaacaacaatagtgttttctgctgtatatgctcaaatgtcgacaatgttcgtggaacaagggatggtgcttgacccatcgttgggttctttcaagattcctccagcttcactgtctacctttgacaccctaagtgtcatcgtatgtgtcccgatgtacgattacattgtggttccaatagccaggagattcaccggcaacgagaggggctttacagagttgcagaggatgggcattggcctggtcatttccatccttgctatgtcggtcgctgcaatcctcgaaatcaagcggctagcagttgccaaggaagcacacctggtggatcagaatgtcccggtcccactgagcata

SEQ ID NO: 455715 - DNA, 460 bp, Sorghum bicolor
cgtccggagatctgcccacccccctcgccacttcccgtgaaccacaaacctaacgcggagcggcgcgggccggccgccgggcgaggtgcgcgtagctgctgccatcgatcgtcgccgggtccatccaccatgggcggcggcaacggccagaagtccaagatggcccgcgagcgcaacttggagaagaacaaggggtccaaggggagccagcttgagaccaacaagaaggccatgagcatgccgaggctaagcatccaaagacagatgtgtaccagtgcttcccccatctgaagaagtgaaaagcctctgaactagcaaccagtgccgtggtcatggagttgaggaaatgtgtctgttagctatgcggtttggtcacagtcagtacaggtcatggagcttgcctgtgcggagggtgttaattccgtgttgtctgccgtcaatcatgcgtcctgtcctatgt

SEQ ID NO: 455716 - DNA, 431 bp, Sorghum bicolor
cgtccgctcctgcaaatctttctctgaattgtgggtctccggcaatggcgctcgctccatcgaagattctgggcacccagctcaacgtcgccggctcctcccgctacgcccgctgaggcgaagctgaaggtcgccatcaacggcttcggccgcattggccggaacttcctccggtgctggcacggccgtgaggactccccgctcgacgtcgtcgtcgtgaacgacagcggaggcgtcaggaacgcgtctcaccttctcaagtatgactcgatgctgggcaccttcaaggctgacgtcaagatcgtcgacgacacgaccatcagcgtcgatggcaagcccatcaccatcgtctccagcagggaccctctcaagctcccatgggctgagctcggcattgacatcgtcatcgagggcaccggagtcttcgtcga

SEQ ID NO: 455717 - DNA, 546 bp, Sorghum bicolor
cgtccgaaaaacttcagtctagacactagatacagtaagccttggcaccaacagaggttaatatctcaacaaggatacttcaaatatgtctgcctcgcggagctcctctcccaactccatgtcaaagtggagccccaaagagaacaagatgtttgaacaggcactcgcctactatggcgagggcacacccaaccggtgggacaaggtgtccagcgccatgggaggcatcaagtctgctgaggaggtgcgctgccactatgaagatcttgactatgacgtcaagatgattgagtcaggccatgtaccgtaccctcagtacaagacacagggattctggacccgaggttaaaatgttggaggctcaaggaggcagaaaacaaagctctacgaatctaagatggacctaggttctagaaggtagcaaaagaatccagctctggttggcgaataaaatgatgaaacaggtgtacatgtatatagtataggttatgagcaaagttatgtctaactggtggaggatctagtgtacattcataaaccgatgta

SEQ ID NO: 455718 - DNA, 468 bp, Sorghum bicolor
cgtccgcaaggatttacattgtgctggagtttgttatgggtggagagctccatgatatcattgccacaagtggaagattgaaggaggaggaagcgcgtagatactttcagcagttgatcaatgctgtagactattgccacagtaggggtgtataccacagagacttgaagctagagaacctgttactcgatgttgctggaaacctaagaattcaaaattccgggtaaagggcttaataaaaccaggggaaaatggttgattggtgtgttcctacttgtggaccacctacctatgttcttcaaaaggttatggttaacaaaggttataatggcgccctggctgaccttgggtcttgtggggtgatcctttttgtgctgctcgcaggatgtctgcctttcgaggatgacaacatcgcatccctttataaaaagatctcagaagctcagtttacttgtccatcttggtttc

SEQ ID NO: 455719 - DNA, 482 bp, Sorghum bicolor
cgtccgcggacgcgtgggcgcgcccacctctcctctagtcctctctccccacccacacccgacctctgcgtccgtgcgttgtgtttgttagggaggggcggcaaccgcgaggcgcaagcaatggcggccgggcgagagctggtggtgagtttcggcgagatgctgatagacttcgtgccgaccgtggcgggggtctcgctggcggaggcgccggccttcctcaaggcgcccgggggcgcgcccgccaacgtcgccatcgccgtctcgcgcctcggcggcggggccgccttcgtcggcaagctcggcgacgacgagttcggccgcatgctcgccgccatcctccgcgacaacggcgtctacgacggcggcgtcttcttcgacgccggtgcgcgcaccgcgctcgtctttgttacccttcgcgcctacggctagcgcgagttcatgttctaccgctaccccagcgccgacatgctccttaccga

SEQ ID NO: 455720 - DNA, 433 bp, Sorghum bicolor
  unsure (1)..(433): unsure at all n locations
cgtccgccgagctgggccctccgccggcgctctactntaacnccggcatgttcgtgcacgagcccagcatggccaccgccaaggcgctcctcgacaccctccgtgtgactccgcccacccccttcgcggagcaggacttcctgaacatgttcttcagggaccagtacaggccgatcccgaacgtgtacaacctcgtgctggccatgctctggaggcaccccgagaacgtgcagctggagaaggtgaaggccgtgcactactgcgcggccgggtcgaagccgtggaggttcacgggcaaggagcccaacatggacagggaggacatcaagatgctggtgaagaagtggtgggacatctacaacgacgagacgctggacttcaagggcctgctgcccctctcgcccgccgacgccgacgccgacgacgaggtgga

SEQ ID NO: 455721 - DNA, 487 bp, Sorghum bicolor
  unsure (1)..(487): unsure at all n locations
cgtccggtttattttctcttcatgtattctgggctcacatgacatcacatgtataatctgtatttttttttctgataaccgttccttttactggttcaaactatgatataggatgaagtactttagtgaagagtgaagacattacctttaacattgtaagtaatggttgtgctaggccaggtattacagctggtaaagctgcagggatgcatgtcatagctgtaccttcaatacccaaaaagactgctgagttcagttctgctgatgtggtgatcaattccctccttgatgtgaggcctgagaaatggggtttaccaccatttaatgattggattgaagataccttaccaatagaaccgtggtttatcagtggaccagtgatcaaaggatttggccgtggttctaaagtactaggaataccaacagcntaattacctgcagagaacttttctgatgtagtgtccgagtatacatctggggtatactt

SEQ ID NO: 455722 - DNA, 362 bp, Sorghum bicolor
cgtccgcagggagaaggtgtcggagtcggacgcgagagcagcagcatggaggcggcggcggagaggggcaccgtcgtcaccgcctgcgtgaccggcgcggggggcttcctggcgtcgtggctcgtcaagctcttgctctccaccggccgctacgccgtccgcggcaccgtgcgggatctcggtgatggcaagaatgcccatcttatgacactcgaagacgccggcgagaggttgcagttggtcaaggctgacatgctggactacggcagcgttgcgtccgcggtcgccggctgtgagggtgtcttccatgtcgcgagccctgtcccctccggtcaactcttcaaccctgaggcagatgtcat

SEQ ID NO: 455723 - DNA, 509 bp, Sorghum bicolor
cgtccgcttccttcgtaatgtttccttgacttcaaactggagcaacgaatttcttcaagaactttcttctcagctcaacttgcgtgttaatcaatttgagattgtaaatttttatgttgttggagcttctgggctaaatatcacaatggatatagctccccatactggaattagctttgctgctgatcaagtcaaggcaatgaattattcacttactctgcatacagttcagattgatcctgtgttggtcggggactacaatcttcttaatttaacttggttcaggccattggctccagccccagctccagaattcacaatagcgcctagggcctctccatctacagtatccaacttaccaagaccaagtgagggtcccagcaacaatggacatccaagcctgattactgtggttatcatatgcgttggttctctaattggagtcttgctgattggtttaataatatgcctctgcacatttaggaaaggaaaaaagagagtgcctcgtg

SEQ ID NO: 455724 - DNA, 429 bp, Sorghum bicolor
  unsure (1)..(429): unsure at all n locations
tccgtccgaattccggtcgccacgcgtccgctgggctgattaaagaggtggatggagctcactgngagggatgccaatttctcggtcccaactgagggccagtgatttgagtcctggagggaattgccgagcacagactntgagctcgagaggccagcaaccatggctcctgcatagagcagctcacatgggcaccacaagaagtgctgaacggtctggcctaacctctcgacacaaccatccaatcacagttctggggatggcatggagatcacggccacctgtaacaagcgcangaaggattcctcaccggctgcaatggaagaggatttgcagcaactcgaatttcagacaaggccccaagacatggatgtgagccacacctttgagccaacatggatgaaatgactctcagtgtgatgcgccatg

SEQ ID NO: 455725 - DNA, 298 bp, Sorghum bicolor
cgtccgatcaatgtgagcgcagctcctccaggtcgctggggccatactctgtcatgcttaaatggctcttggttggttgtttttggtggatgtggaaggcagggtctgcttaacgatgtattcatgttggatttggatgcaaaacaaccaacctggcgtgagatacctggagttgcacccccagttccgcgttcatggcacagctcctgcactttggatggaacaaagttggtagtttctggtggctgtgctgattcaagtgtactcctcagtgacacatatcttcttgatgtaacca

SEQ ID NO: 455726 - DNA, 290 bp, Sorghum bicolor
cgtccgaacacagagcaagctatcatctgatcgacatggccggcgccaccatggctctcacctcccgcgcgctcgtcggcaagccggcgaccaccagcaccagggacgtcttcggcgagggccgcatcaccatgcgcaagactgctgccaagcccaagccagcggcgtccggcagcccctggtacggtgccgaccgcgtcctgtacctgggtccgttctccggcgccgtcgaggggtaccgcgtcgccggtggcccgctcggagaggtggtcgatcctctgtaccctggc

SEQ ID NO: 455727 - DNA, 287 bp, Sorghum bicolor
cgtccgagcgatgccgccgccgccgccgccgcaggggaacggggggaaggtgaccccgaacctggcgatggacgccgaggccacgcgcatgctcaacctcacagtcctccagcgcctggacccggccgtcgaggacatcctcatcaccgccgcgcacgtcacgctctacgacttcaacatcgacctcaaccagtggagtcgcaaggacgtggaggggtcgctgttcgtcgtcaagaggaactcccagccgaggttccagttcattgtcatgaacaggcgcaacactg

SEQ ID NO: 455728 - DNA, 347 bp, Sorghum bicolor
  unsure (1)..(347): unsure at all n locations
cgacccacgcgtccggtccacagtgagatgaggccatttaaatgcccctgggaaggatgtaaaatgactttcaagtggctatgggctcagactgaacatatcagggtgcacacgggagagcggccatataagtgctcagcccctgactgtgggcagacattcagatacgtctcggattacagccgccacagaaagaaatttaaccattattgacagggtctagttttcgagttcctggccgcagcttgaggcaaatctccagctgctggtgttggtgggccctggttggtgtagtagctcacatnattaacaacctgacagctgatagggctagtgaatggtcccgt

SEQ ID NO: 455729 - DNA, 345 bp, Sorghum bicolor
cgtccgctgagatctgatttctgggggacaaacttcaaaatatacgatagcaagccaccatatgatggtgctaaagcatcaagtagtcgatctagtcgtcgtttcggaagcagaaggatcagtccccaagtatcagctggcaactatgaagttggacaggtttcatacaaatacaacttgctcaaatccagaggccccaggagaatgtattgcactcttgaatgcccttcagcccaagagacttgggaaaactcactcaagacaaagttcaggaggcccttggggcccacgactttacgaaataaagcaccccgctggcatgagcacctgcagtgctggtgctta

SEQ ID NO: 455730 - DNA, 411 bp, Sorghum bicolor
cgtccgaggatttggagactcaattaaatgaacttaaaaatatggaatcagtggcaagtgagcagcatggaagaattgagaaattgactgatgaactaagcagaaaagaccaagaaattgaaggtttggtgcaagcactcgatgaagaagaaaaagagcttgaaatcttggagaataaaagccttcagttggagcaaatgctgcaggagaaagaattttccttgaagacctcagaagtttctaggaccaaagctctagcaaaactgacgacaactgttgacaaatttgatgagttacatagcttgtctgagaatcttcttgcagaagtagaaaaccttcagtcacaattgcaagaaagagattctgagatctcttttctgcgacaagaagttacaagaagcactaatgaac

SEQ ID NO: 455731 - DNA, 349 bp, Sorghum bicolor
cgtccgaggaagagttcttgttggtcatgcactgcacaatgatctcaaggtcttgctactaagccaaccaaagaaggacatcagggatacatctgaatatgaggttttccgaagggagagaaagaggcgatccttgaaggatcttgctgctgaagtacttggtgctaaaatacaacagaatgaacactgccccattgaggacgcacgagctgcaatgttcatttacaacaagcacaagaaagcatgggagaagaacatgaaggaacaattcagattcaaaaagaagctcaagaagcgaggcaagaagaaaactaccgagtccaatgggaatgaccccaatgtccccact

SEQ ID NO: 455732 - DNA, 394 bp, Sorghum bicolor
cgtccggcagggcgatcgcccggccagttcgcctcggcggagtgtagcactagcacaccatggagagctcgtcgccgtcggtgccgttcccgctgctgcaggcgccggtcgagagcacctaccgcgcctgcaccatcccctaccgcttcccctccgacaacccgcggaaggccactcctgttgagatccagtggattgacctcttcctcaactctgtcccgtccttcaagcagcgcgctgagaacgaccccaccgtacctgatgcgccggcgaaagcggagaagttcgcgcagaggtacacaacaatgcttgaagagttgaagaagaatccagaaagccatggaggaccaccagactgcatacttctttgtaggcttcgtgagctagtacttag

SEQ ID NO: 455733 - DNA, 338 bp, Sorghum bicolor
tcgacccacgcgtccgtgcaaatcgaagtttctaagttggaagaaaattctgttgttgcttggtcacctgcagttgttgcaaagactatctggaagaacaacctattagtcgactacactgtttcaaagtgttatggtactgcattgtctgaggagattgttgatgtcaagcacgtgaggccttgcccaccacaagcatcagagattagtttctgcatcaatgatgaggttgaagcattccaaggtgattgctggtggctaggggtgattactaaggttcatccagaattcaagtacacatttaagtcggcgcatttagggacggaagttgaggtgaa

SEQ ID NO: 455734 - DNA, 364 bp, Sorghum bicolor
cgtccgattggatcagtctgtaccagaatgcatgagctaaccaaaaacaatcatctgaggaagatggtctgccagaatgcatggggaagggatgtcactgtcaggcttgagatgagcaccaagatggtaggatggggtcgtcttgcaagagagttaacaactcttgaggcagcctcatggaggaagttcacagttggagggcgcgttgagccttcccgatgcaatttcagtgcctgtgctgttggtaaccgtcttgtcctttttggaggggaaggtgtcaacatgcagcctatggatgacacgtttgtgcttaacttggaggctgcaaggccagaatggcgccgcgtcaaggtttctgccttcc

SEQ ID NO: 455735 - DNA, 348 bp, Sorghum bicolor
cgcgtccgcggacgcgtgggtcgacctgctgtcaccggacggctactccaggatgttcttgctggggtcgtcggaggagcccaacggcgccgatggcgatattggaggatgcgacatccaaaagcaagaaatacgggaggcggttgagttacccttgactcatcatgagctgtacaagcagattggtattgatcctccaagaggtgtgcttctgtatggtcctccaggtactggaaagaccatgcttgccaaagcagtcgcacatcacacgactgctgcttttatcagagtcgtgggttcagagtttgtacagaagtacttgggtgagggccctagaatggtgcgtga

SEQ ID NO: 455736 - DNA, 376 bp, Sorghum bicolor
cgtccgcttatcctgcctgcatatgacattgtgaacataatagggtctggtttgcggacaattggctattggtccaactattctgggctgtccattgtgtctcctgagactctatacaagaaaccattcaatgtcagtgcaaatcaggaactccactctgcaatctggccaggtgagactgtaacgaagccccggggatgggtgttccctaacaatggaaatgagctgagaattggagttcccgatagggtaagttaccgtcaatttgtatcagttgacaatcaaactgaaacggtgggaggtttctgtattgatgtgtttgctgctgcaataaacctgttgcaatacccagttacatataggtttataccttttg

SEQ ID NO: 455737 - DNA, 366 bp, Sorghum bicolor
cgtccgatttaccaccaccattgattttgacttcaatacaatctccagtcgcattcgggagcttgcctttctaaatcctgagcttacaataaccttgacaaaggaagaagggcacacagttcaacataatgaatactgttatgctggtggccttgttgaatatgttaaatggttgaatactgacaagaaacccctgcatgacctgattgcgttcagaaaggagttggatggtataacagtggatgtctcccttcaatggtcctctgattcgtactctgatacagtgctaggatatgcaaacagtatccggactattgatggtggtactcatattgatggcctgaaggcttcattgacaagaaccat

SEQ ID NO: 455738 - DNA, 220 bp, Sorghum bicolor
cgtccgcggacagcgtggcgagcgccttccctacgatgttcctctcattaagttctgctcttggatgggtggtgaccgtgatggaggggcaagagttactccggaggtgactggagatgtgtgcttgctggctagaatgatggctgcaaacttgtacatgaatgaggtcgaacacctgatgttcgagctctctatgaggagctgcaatgatgagcttggt

SEQ ID NO: 455739 - DNA, 430 bp, Sorghum bicolor
cgtccggtccgcaggtggacgccttcacggcggagccgttcaggggcaaccccgccgcggtgtgcctcctccaggacgccgccaaggccgctgacgagcggtggatgcagtccgtcgccgccgagttcaacctctccgagaccgccttcctcctccgggactcctccgcctctggcgccgccccgcggttccagctccgatggttcatccccgccgctgaggtggagctctgcggccacgcgacgctggcctccgcccacttcctcttcacatccgtcctcgcggagcacgagacgctcatcgagttctcgaccaagtcggggattcttaccgccaaaagggttcctgcgccggagagcacgggcgtgtcaggcgaggggaaactgttcattgagctggatttccccatgattgaccttgttgattggca

SEQ ID NO: 455740 - DNA, 335 bp, Sorghum bicolor
cgtccgattgatcagctcagctatggaagcatatcaagcttctcctgagatgacaaaagttgttaactcttccccatttctgatgccaagtgctagaaacagtttgcagcggatcagatcagctgctgagaattcagggaacaaggatcctgcaaacagatctgcttatcttcctgtaaactttgcactgtcaccatttcagaggaaggacgttgttatgcatgtggagggtgttagtgcccttcgtcaacttgtacatcaagtagtcctcaacaatgaagaaacaagcattgaggagcttgctcgtgatagattggtacaggaactagcgagag

SEQ ID NO: 455741 - DNA, 381 bp, Sorghum bicolor
cgtccgccatgtcctactgtcctgtactgctccgcgccctgccactgctcccttcaatcaactccggtaccaccaggggatgccccgggcttaattgaatgggctctcttctcaccaggactggcgcatggctccaggccaagatttttgatcccgtgctgcaggtcatcagaaggggagcagaacccaaggaactggccttctctgctgcccttggtgtcacgattgggatctttccaatatgtgggaccactgttattcttggcgctgttgctgtagcaatgttgggaagtcgttgcaatgctgttactgttatggttctaaatttggccgccactccaattgagctaagcttgatcatccctttcttgcgcttggggg

SEQ ID NO: 455742 - DNA, 351 bp, Sorghum bicolor
cgtccgccggcggcgagtgcggcgtgccggccgagacctactactactaccccgccgagaacagggcgaacttctggtacaaggtggactacggcatgttccggttctgcgtcgccgactcggagcacgactggcggatcggcacgccgcagtacgagttcatcgagcactgcctgtcgacggtggaccggaagcaccagccgtggctcatcttcgcgacgcaccgcgtgctgggatactcctccaacgcctggtacgccggcgaagggtccttcgaggagcctgagggccgcgagaacctgcagaggctgtggcagaagtaccacgtcgacatcgcctactttggccacg

SEQ ID NO: 455743 - DNA, 283 bp, Sorghum bicolor
cgtccggactagttctagatccagtgcgacgcgtgcgagggcgcggcggccacggtggtgtgctgcgccgacgaggccgcgctgtgcgcgcgctgcgacgtcgagatccacgccgccaacaagctcgccagcaagcaccagcgcctcccgctcgaggcgctctccgccaggctcccccgctgcgacgtctgccaggagaaagcggcgttcatcttctgcgtggaggaccgggcactcttctgccgggactgcgacgagcccatccacgtcccgggcacgctct

SEQ ID NO: 455744 - DNA, 436 bp, Sorghum bicolor
cgtccgggagggtatggcgcgcagcaggggtactcggaggagcggaacagcgcgcggcgggtggccgaccactacagcgcgaggtccaaccagacgctcgaggaacgcgagaacagccccatcatccacctcaagaagcttaacaactggatcaagagtgttttaatccagctgtatgcacgcccgggcgactgtgttcttgatcttgcttgcgggaagggaggtgatttgataaagtgggataaagccaaggttggctactatgtaggagttgatattgctgaaggctcgataaaagattgcatgactcgctataatggtgacccagatcaacaaagaagggaaaaggtcagtttccctgcaccgcttatttgtaccgattgctatgaggctcgtctggatgaatatttatatgaggatgctccatttgatatat

SEQ ID NO: 455745 - DNA, 293 bp, Sorghum bicolor
cctacctctagcagcttaattagcagcttgctctagtacacacgaacgaacggtacgtacgtccatcgctagctcgctcgccatggcctccctctcctctgccaccatcaccgtcccttattgccggcggcgccatggcccaagatgtgctgctgggcgcaaacagaggcgcgctcgtcttcgagcccagcgagtataccagaaaaggcggcgacaccatcaccttgaagaacaacaccgggtacccgcacaacgtcgtcttcgacgaggacgaggtgcccagcggcgtggac

SEQ ID NO: 455746 - DNA, 374 bp, Sorghum bicolor
ggaatgaccgactcgaccacgcgtccgttccacctgagagcatatacgatcactcctcaccagatatcagaggcaacaagcacgaagagccagagcctgtctcccagactccgatggctgctcgcgctctcactgccctgctcaccgccgtcctcgcactcaggctcaccggccccgtgcgggcgtacaacgacgagggcgacgcgctctacgcgctgcgacagcggctgtccgaccccaaccgggtgctggaaagctgggatcccacgctcgtcaacccctgcacctggttccacgtaacctgcgaccaggccagccgcgtctgtcgcctggatttaagcaactccaacgtctttggctgcatcggccctgag

SEQ ID NO: 455747 - DNA, 411 bp, Sorghum bicolor
cgtccgagaaatattatgttccatatgcttctgattcaaatgctattcgtagagtcataacacatgatgtggcatatgcggctgttcaagcttacccagatgaatataggcccgattggggacgtatgagcttccttgtagacatcttgagaccaactcctggagaagggccttcatggtaccatcttttgaagaaagctagtggcggttgcaatgaccttatgtacagtggacacatgctcgttgctgtccttactgcaatggcgtggacggaagcatatgggggctggatctctgttgcaatatggctcctcgtcctgcacagcgcacagagggaggtacgtgagcggcaccactacagcgtggactgtgttgctgctatctacgctggcaatcttgctgggaggatga

SEQ ID NO: 455748 - DNA, 353 bp, Sorghum bicolor
  unsure (1)..(353): unsure at all n locations
cgtccgggtaaatttggccccggatcagccgcctggcagtccttcagatcacccgttgtgtctcaaaaggatgacatggtgtgcattcacatcaggaggggcggcgtcgacagcgggcagtgccacagcaagtggctctccaccatcaccggcttcccggacgtgatctccatgtcgttcgtgcccataacgagcctgctcaccggcgtccggngcagcggcttcctcaaccacgccgtgaacctctacctcagatacaagccgcccatagaagagctccagcagtttctcgagttccaggtgcctcgactctgggctccagagttcggtgagctccccgctgtgtctccagc

SEQ ID NO: 455749 - DNA, 376 bp, Sorghum bicolor
acgcgtcacggcattgtaggccctactgctggtggcggccacactgctcgcgcaggccgagaaggtccgagattgtttccttgatctgggctgcttcccagaggataagaagatcccccttgatgtcttgatcaacatctggatggagattcatgatcttgatgaaccagatgcttttgccatcttggttgagctttcaaacaagaaccttcttacccttgtcaatgatgcacagaacaaggctggaggattgtacagtagctaccatgactactcggtgacacaacatgatgtgttgagagatcttgctcttcacaatgagtgggcgtgaccctctgaacaagcggaggcggttggtgatgccaagaagggaaga

SEQ ID NO: 455750 - DNA, 388 bp, Sorghum bicolor
cgtccgcatccgtccatacatcagcggcaaggccagccccgttgccggcgactcgccaaatccaccacaccatgagcgccgccgcctccaagaagctctctcaggccgccaggtgcctcatcctctccgcttctcagcgctactgcggcgtcgccggcctcgacgccgagggccgcaccggcgcgctcgccacgctcaccaactgcggcgggagggccctccccaccgtctactactgctaccacaggcagggctcccaccacgctgcgtcaggatggggagccatcggcgccgctgtcccagctgcagtgtacatgctccaggaccaggatgctcatgctgcagagatggagcgcaccttcattgccatcaagcccgactgcggcaa

SEQ ID NO: 455751 - DNA, 404 bp, Sorghum bicolor
cgtccgattttggaaatagtgcagaagagtttcatccccataaaactctctctacttccatgaaactcttatcatctctctcttcattaatacggtgccatcagcatatttaatgttaatgaaactccattgagagtggcctaacaggacacttgtatgcctccaagggagtatattttgctactgcctcctattcaagttggctgtatccatagcagcatgccatttttgagcattctagcataaagtgctatctccccattgttcactggttcccacagagataatgcttgccttcatttctactggataagattaaatgtatcttgcggttttatctcagtttgttgagctgtatggatgttatcttttgaaggtcaactgttggaaattattttcatgat

SEQ ID NO: 455752 - DNA, 434 bp, Sorghum bicolor
cgtccgaattacacgatttctcacggtgaagaaactcagcatgatgaaaataaagccaatggatcaaattcttgtatatactccataaatgcgaggctaaagaaattttcagattggcttttggatataatagcaatgggcgacctagatgcattcttccctgctgcaacgcgtgaatatgctccatttgttgatgagatgtggaaggaccccgccatacaagcaacatttaaaagaaaggaagaattacattttctccctgatgtagctgagcacttcttgagcagggccattgaggtgtcaagcaatgagtatgaaccttcagagaaagatgtaatctatgctgaaggagtaacacaaggaaatgggctagccttcattgagttcacacttgatgatcgcagcccaatgtcagaaccttatatcgacaaccc

SEQ ID NO: 455753 - DNA, 282 bp, Sorghum bicolor
cggttggtgaaacagctggctcctaagatcgtgatagccatagaccatgacgctgaacggctggggttccctcctgacagcacttcttgaattgataaagtgcggcacgttcctccttgattcgcttgatgctgctgacggtggatgctgattctgccggcacgattgttacgtgcctgattcaaccaataattgatgatacaaagcttgatcggatcaaggtggacaagccaactgcatggagaagtgcattagcaggtgctgggttcgcacctgtttctt

SEQ ID NO: 455754 - DNA, 374 bp, Sorghum bicolor
cgtccgcgacatctccgtctccgagggcgagtccgctggccccggcggcttcgtcgccttcgtcggcaacctcctcttcccgttcctcgccttcgcgggcctcttcttcctcttccgccgcgcgcagggcgggcctggcgctggccccggcgggctcggcgggcccatggacttcggccgctccaagagcaagttccaggaggtgcctgagacgggcgtcacgttcctcgacgtcgctggtgcggaccaggccaagctcgagctgcaggaggtcgttgatttccttaagaaccccgataagtacaccgcgctcggagccaagatccccaaggggtgcctcctcgttggtccgcctgggactgggaaagaccctc

SEQ ID NO: 455755 - DNA, 469 bp, Sorghum bicolor
cgtccgcagagatggaggagcaatggctggttcgtcttcaatggacactgaagctgcaggccaacagctcaagcatggcagcggctacagcatcccggctactgctcatgcggtggacacagactcgtggcagcaggtgagcctgctgatggtgatcggcttcaactgcgcctacgtgctcagcttctccaacctcatgatggtgcccctgggctgggcatgggcgtcgcctgcctgctgctcgtcggcgccgccgcatggtacgccaactggctcctcgccggcctccatttcgtcgacggacagaggttcatccgctacagggacctcatgggcttcgtattcgggaggaacatgtactacatcacttggttcctgcagttcaccactctacttttgtgcaacatgggcttcattctactaggagcaagagcactcaaggcaatcaacaacgagtttacccacaccc

SEQ ID NO: 455756 - DNA, 279 bp, Sorghum bicolor
cgtccggtgtgacaatgattgaagggccaggcactctagtcgatgctcatactgtcgaagttagccagccctgaggttcacagcaaaggtatacagcgaagcacattttgattgcgactggtagccatgctcaacgtgtcaacatacctggaaaggagctggctattacatcagatgaggcctcgagctcggaggagcttccaaagcgtgctgtaatcctcggagggggataaatagctgatgaatttgcttctatctagagaggcatgggtgctgaac

SEQ ID NO: 455757 - DNA, 462 bp, Sorghum bicolor
cgtccggtcagattctgcttgtgaagcgcatcgaggaagtactcgaccatgctttcgaaggaggatgcccacttagatcacgctccaagttatagcacccaactcgcctttgatatggatatttgcttcggaggatcatcgtcacagtaccacgcgaatgatcaacagtgagagtaagagcctagctctcttgccagcacaggtcttggcacgccctctttcgttaggcttcgcatccggaatgtgtatactggtcagaattcggagagcagtgagaagatctgctcgttcctctgctgggattccctgcatattttttgcgacaccagctgttgatctttatacacagatgcaagacaaatctgggaggaacactggttggttcctctgtcgataataatgggtgtatatgtaatctattccaaggaaatatagctaaaaccgaggtgtcaaatcaaaact

SEQ ID NO: 455758 - DNA, 448 bp, Sorghum bicolor
cgtccgcaacctgttcgttcggttttgcatccactttggaagacgggacagttccttctcaagcgatgaggaatctggaggttgaggcaaatgaagtctcctcagtgtatcgtgaccagtactatgaaggtggcatctcgtctgattacatttgggaggatgaagataatgggtttatcgcatgcttcttaattaagaaagatggacatggaaaaagagggtacatgcagattggttcatgggatgctattcatgttattcaggctggtcctgaagaagaaggagcggcacattactgcttgaacagcactgtgatgctctcattgacaacagacagcaagcagtcgcgaaccttcaacttgtctggatcgataagacggcagatgagtatgacccttgctgtagctgatggacaccttgttgatatgggaaaaatgatagaagaaat

SEQ ID NO: 455759 - DNA, 413 bp, Sorghum bicolor
cgtccgggaatgtaccttgggtcagtcactggcctgggtttctcacctctgttgattagcagatttggctggccttctgtcttttatgcatttggatcccttggaaccgtttggtttgcactatggcaaagcaaagcacacagctctccagatgatgatccggagataagtaaagctgaaaagaggcatatactgggtggcagtcccttaaaggagcctgtcacttccataccatggaggctgattctatcaaaggctccagtgtgggctctcataatatcacatttttgccataactggggaacattcattcttctaacatggatgcccacatactacaatcaggttctgaagttcaatctaaccgagtccggtcttctctgtgtcttgccatggctgacaatgggctgttt

SEQ ID NO: 455760 - DNA, 443 bp, Sorghum bicolor
cgtccgcccacgcgtccgcccacgcgtccgcgcggaggtgctggagtcggagctgcctgtgctcgtggacttcgtcgccgactggtgcgggccgtgccgcctcatcgcgcccgtcgtcgattgggcctcggaggaatacaatgagcggttaaaaattgtcaagattgatcatgatgccaatccacagctgattgaagaatacaaggtttttggtctcccgactttgattctcttcaagaatggccaagaggtgccaggtagccgatatgaaggggcaatgacaaaagataagttcaagcaatacctggagcctctcttgactacaacagtcgcttaaggtcattgcctgcagcttgagcactgtggatgccagtggcattggcttaccctacgtattgggaatgttgaagaatttttccttacatgagcgtcatttttatcga

SEQ ID NO: 455761 - DNA, 438 bp, Sorghum bicolor
cgtccgccacgctctacgagtcaagacactagatatcacatcagcgattcttgctgcgaagagtgctgtctttagcaagcttttctcaaacggcatgaaagaatcggatcagagacatgcaccccttagaactactgactcagaggaaactgccctcatggagctcctaagctttatgtatagcggaaagttgacagctactgagcccactcttgtgctggatatcttgatggctgccgacaaagctgaggtcgtttcatgcatgaggtactgcatgcagttgctcacacacttgccgatgaccacagaatctgcacttgtatacctagatctttcctgctcaatttcaatggcagctgcagtgtaaccactgacagatgcagctacagatgcccttgctgttaaacacaaggatttgactaaggtccaagatgaagt

SEQ ID NO: 455762 - DNA, 401 bp, Sorghum bicolor
cgtccgcctgacacagattatctcaattggagatggaagccatatggttgtgaggtaccaccatttgatggcaagaagtttctggatggcatgaagggcaagcattgggcacttattggtgattccatccttcgcaaccatgtccagtcattgctttgtcttctttctaaggtcgaagatgctactgaggtctaccatgatgatacattcagatccagaagatggcactttccttcacacaatttcacagtctctcttatctgggcaccattcctggtcaaagctaaaatatttgaagacagtgatggagtttctactgctgatctccagctgcaccttgacgttctaaagaaaaattggactagtcaatgggagagctttgattacgtagtgatatccac

SEQ ID NO: 455763 - DNA, 459 bp, Sorghum bicolor
cgtccgcgtcgtcggacgcggcgctggcggcgcagcgcgtggcggacgtggcggcggcggccgacgccgggagcgacaaccgcggccagctgctgctcttcgtggtcgcgcccgccatcggctgggtgctctacaacatcctgcagccggcgctgaaccagctcaaccgcatgcgcagccaggccgtggtcgcggggctcggcctcggtgccgccgccaccgccgccgggatggcatccccgcccgaggcctccgccgccgtgtcggcgcaggacctcgccgcgctcgccgacgaggcgcccgccgatgatagccggggcctcctgctgctcatcgccgtcgctcccgccatcggctgagtgctctacaacatactacagcccgagctcaaccagctcaaccgaatgccgtccgactggtgagctactagctgccaacaagagtggggacccccaacgc

SEQ ID NO: 455764 - DNA, 385 bp, Sorghum bicolor
  unsure (1)..(385): unsure at all n locations
cgtccgagcagcgcagcacccgcagcgacaggagagaactcgagaagccccggaggaggagcagccgtcggggggtcggggggaagaagatgtcgtacctgctgccgcatctgcactcggggtgggcggtggaccaggccatcctcgccgaggaggagcgcctcgtcatcatccgcttcggccacgactgggacgagacctgcatgcagatggatgaagtgctggcagcagtagctgagaccataaagaactntgcagtcatctaccttgtcgacatcacggaggtccctgatttcaacaccatgtatgagctgtacgacccttcgacggggatgttcttcttccggaacaagcacatcatgaatgatctcgggacaggaaacaa

SEQ ID NO: 455765 - DNA, 432 bp, Sorghum bicolor
cgtccgcggacgcgtgggcttcaatccaaaatcgtgtccgtagatggaagtctctcactggtaagacaattcagctctttatcggtgacatatgtgattttgaattcctctcggaagctttcaagtcttttgagccggatgctgctgttcactttggtgagcaaagatccgcaccatactctatgattgatcgttcgcgggcagtctacacgcagcataacaatgtcattgggacacttaatgtcttgtttgccataaaggaatacagtgacgagtgccatttggttaagctaggaactatgggtgagtatggaacaccaaacattgacattgaagaggggtttatcactattactcacaatggaagaacagacaccttgccttatccaaaacaaagcgagttctttctaccatctaaacaaagtgcatgac

SEQ ID NO: 455766 - DNA, 498 bp, Sorghum bicolor
cgtccgcggacgcgtgggcgcgccgccgctcctccatattctgcgctcgctatgcctcctcgtcctggccgcgtcggcggcggtgtcggtgtcggggcgccaccacgcgcccacgccggcgcacggcaccgggcagagcatgtacctggcgccggcctgccgggtgcacacggcatcgctcgcggacttcggcggcgtcggcgacggcaccacctccaacaccgcggcgttccgctccgcggtcgaccacctgtcgcagtactccggggagacgccggcggcgccatgctgtacgtgcccgccgggaagtggctcacggggcccttcaacctcaccagccacttcaccctcttcctccacagcgacgccgtcatcctcgcctctcaggacataaacgaatggccaatcattgatcccctgccttcttatggaagaggaagggataaaattggaggaagattcgctagcctcatcgggggatcaaacctgaccgatgta

SEQ ID NO: 455767 - DNA, 339 bp, Sorghum bicolor
  unsure (1)..(339): unsure at all n locations
cgtccggaccgcccaaatccttcaacaggagaatggtacccggcgccattcgattcatctgcagtggacaatatgaggaggcttctggagcatgctggcgttcctgggcacatatatccactatcattgctgtgctatgaggttatgcctccaccacaacaggttgagaaagagattggtgagcagagggtgatatccttccatggagtaggcttgtcagtaactgaagaaataaaatatggggatattactgctcataccaagaatgctgatgagggaagggagctattcacaaatactntgtacaactcagttgttaatcagtacgatgtgctcaaa

SEQ ID NO: 455768 - DNA, 439 bp, Sorghum bicolor
cgcccgcgcaccgctcacggtctgtgtctgtcagatggcgctcagtctgtcagcaagggaattgaatctgttgttggcaaagaaaacctgggctcagatgttatgtgctcagcctgtgagatggctgttgtgtggatagagaatcagctccgtgagaacaaaacgaaggagctgatattgcaatatgctaaccagctatgtgagcgtctaccaagccccagcggagaatcaactgtcagctgcgaggatatctcaacgatgcccaatcttgcattcaccattgcaaacataaccttcaccctaacaccagagcagttcatcgtgaagctggagcaaggaggccaaactgtctgcatcagtggcttcatggcatattacgtcccaccaacggcgtgagtcctctatggattcttggggggtgtcttcaatgggagcttac

SEQ ID NO: 455769 - DNA, 379 bp, Sorghum bicolor
cgtccgcccacgcgtccggctttctggagccaacttcgactgtcctagcaaggcctgttttagatgcgcatggatgggatcatgactgtggttatgatggagtgagcgttgaagagacactagctatccttagcaggttcccagcaaatgtagcagttcaggtcaccaaggacaagaaggaatttagcatccatctggactcttccattgcagcaaagcatggagagaatgcatcatcgcttgctggttttgatatccagactgttgggcggcagcttgcatatattctccgtggcgagacaaaaatcaagaatatcaagaagaacaagaccactggagggttctcaagtaactttcctgggcgacattgtggcaactg

SEQ ID NO: 455770 - DNA, 343 bp, Sorghum bicolor
cgtccgaaaatttacaactcaggatgtttcttccctctggtttctttgtaagcaggaagcatctttgttgaatataaccaatcaagcttgtgggcttttcaatgaagccgaggttcgttttctagagtggacagatgatttggagggttttgtcctaaaaggctatggtgagtcaattaactacaggatgggactgccattgctcaaggatgttgtccagtcaatggaagaagcaataatagctagagaagaaaaccaccctgatggtacgtatgaaaaggcaaggcttcgatttgcacatgcaaaaacttgtgttccttttagctgtcttctcggtcttttt

SEQ ID NO: 455771 - DNA, 290 bp, Sorghum bicolor
cgtccgcccacacacccctcgcccgccctcgttcccctcctcgccagtcgcctccactcccatcaccgacgacgtgtcgaggcgagagcagagggcgagtccaaagtctagggttcccgccgcatcggcacgggcatcgcaccgcaccccgagggcgcgggcacggaggaagatggcgcggcgcgggcgcgtggagctgcggcggatcgaggacaaggcgagccgacaggtgcgcttctccaagcgccgcgcggggctgttcaagaaggccttcgagctggccctgctct

SEQ ID NO: 455772 - DNA, 400 bp, Sorghum bicolor
cgtccgggcttccacccgtactgatcgctcctcaccctcacctgtcacctctttctataggctccaatactccactggtccaggatcgaacacgcaccaccatgccgcccggcggaggaggcaaccgcgacgccgcgccggccatgcacgtgctgatgctcccgtggctcgccttcggccacatcgtcccgttcgcgcagctagcacggaggctgctggcctcctcctcctccgtccgcgtcacgttcgtcacggccgccgggaacgtcccgcgcgtcgaggccatgctatcctcggcctcctcgtccgccggcggcagggtgtccatcgtgccgctgcgcctgccccacgtgccgggccttcccgagggcgccgccagcacggcggagctctcgctcga

SEQ ID NO: 455773 - DNA, 431 bp, Sorghum bicolor
cgtccgtgcgcagggagggccgcgccgtcatggccaagaaccgccagcgaaggctctacaccaacatcctcaaggaaggcttcgatgacggttactaccaagacgtttggacgcatgtcccgttcgagcaccccaagacgttcgacaagctggccatggacccagcgaagaagaaggagatcatcgacgacctcgacatgttcaagaagagcaaggactactacgctcgcgtggggaagccgtggaagcgcgggtatctcctgtacggtccgccgggcaccggcaagtccaccatggtcgccgccatggcgaaccacctcgagtacgacgtctacgacttcgagctcacgtcggtgaagaccaacaccgacctccggaagctgctcatcgagaccaagagcaagtccatcatggtgttcgaggacatcgac

SEQ ID NO: 455774 - DNA, 344 bp, Sorghum bicolor
cgtccggcacatgggactacaagatcccaactgtcgacataatcccaaaacagttcaatgctgaggtgctgaacactggatacaataagaaccgtgtgctttcttccaaagctgctggtgaacctgccttggttcttgcctcatccgttcattgtgcactgagagaagctatccgagcagcgagaatggagtttgcaaacagcactgtatctggacgctcaccgctggaattcaagatggatgtccctgcaccaatgacgctggtgaaacaactatgtggtttagatattgtggagaagtacctaaaaagtctatctacctagaaaggagtggtatcatctttg

SEQ ID NO: 455775 - DNA, 414 bp, Sorghum bicolor
cgtccgcgccattcgcatcccaccaccaccaccgtccaccgatctcgtcgtcgtcgtcgtccgccgatccgatccggttcttccaaccccgcggggagtgatatggcgaccaagaggagcgtcggtacccttggggaggcggatctgaaggggaagaaggtgttcgtgcgcgccgacctcaacgtcccgctcgacgacgcccagaagatcaccgataacacccgcatccgcgcctccgtccccaccatcaagttcctcctcgagaagggcgccaaggtcatcctcgctagccacctgggtcgtccaaaaggtgtcaccccaaagtacagcttgaagcctcttgttccacgcttgtctgagctccttggagttgaagttgtgatggccaatgattgcattggtgaggaagttgag

SEQ ID NO: 455776 - DNA, 443 bp, Sorghum bicolor
cgtccgggcttcctcgtcaatggcggcttcttctcctccttggccgccgactctcagaggttagctggaaaggtagcggtgatcaccggcggcgcgagcgggatcgggaaggcgacggcagctgagtttgtcaggaacggggcgagggtcatcatcgccgacgtccaggacgacctctgacacgccgtagctaccgagctgggcgccgacgccgtgcgatacacccgctgcgacgtcacggacgaggcgcatgtcgccgcggccgtcgacctcgccgtccagctccacggccgcctcgacgtgatgtacaacaacgcgggcatcggcggcgacatggcggcgtcctcgctgggcgccatcgacctggccgacttcgaccgcgtcatggccgtcaacgcccggggcgtgctggccggcgtgaagcacgccgcgcgcgtcatggt

SEQ ID NO: 455777 - DNA, 412 bp, Sorghum bicolor
cgtccgctgcaaatgatgggtcgtgcaggtcggccgcaatatgaccagcatggcaaagctgttattcttgttcatgaaccaaaaaagagcttttacaagaagttcctctacgaaccatttcctgtggaaagtaatctgagggagcacttgcatgaccacataaatgcagaaattgtttctggcaccatcagcaacaaggaggaggcgattatttatctcacctggacttacctatatcgcagattggttgttaatccggcctattatggattggaggatactgaaacaaacacattgaattcttatctatcaaggttagtcgaaactacatttgaagatcttgaggacagtggatgcaataaagtggatgaccactcttgtaaagtactgattttggggaaaatagcttcac

SEQ ID NO: 455778 - DNA, 323 bp, Sorghum bicolor
cgtccgcgccgccgccggcctcaggccgctctccctcgccgtctccgcgcgtccgctgtaccgccaggagcatgtcctctcaaccgtggcggtggcggcggcggcgggccgcaacgaccgctccacgtcccccgcgccgccgtccgccaccgcggacggcgcccggccggtcgaggtcgccgccgcgcccgcggagaacgcgcggcgcgccaggatcggggtctacttcgccacgtggtgggcgctgaacgtgatcttcaacatctacaacaagaaggtgctcaacgcgttcccgtacccgtggctcacgtcgacgctctccc

SEQ ID NO: 455779 - DNA, 507 bp, Sorghum bicolor
cgtccgcccacgcgtccgaagtgggatccgactggttcttttttggcttcatgttctgatgattggacagcaaagatatggagtatgaaacaagacaaatgtttattcgatttcaaggagcataccaaggaaatatacactattcggtggagcccaacaggcccaggaacaaacaatcctaatcagcagttgctgttggctagcgcatcttttgattcaactatcaagctttgggaagttgagcatggacgccttctgtacagcttgtctggtcataggcaaccagtgtattctgttgcatttagccctgacggtgaatacttagcgagtgggtccttggatcagtgcctacacatctggtctgtgaaagaaagcaggatcctgaagacctacagaagtagtgggggcatattcgaagtttgctggaacaaagaaggcagcaagattgctgcctgtttctcgaacaacaccgtctgcgtgatggatttcaggatgtagtccaactag

SEQ ID NO: 455780 - DNA, 480 bp, Sorghum bicolor
cgtccgcaggaagatagatctggagaaggggtcttccctcagcatgctgccaggcagcaagacacagttcatcctatagtgaaacagaagcgcaacatgccatctaggaaggtttcaccagcttctaggtcggggaaattgacttacatgtctgggtctggtgagggatctgctgaacgctccaaggaaaattggaacagtaaggccattgattccaccccccctgagttccgtggcacaaagatgtctgacagtatgcaaagaaagtgcaaaaatgtgataagcaagctttggaggaggattgacaaagaaggtcatcaaatcatacctaatatatcttcttggtggcggaggaatgaaaattcctcattcagaggtccggctggtagcaccctggacctacaaaaaatcgaacaacgagttgatggattcgagtatggcgcttgaactgaattcatagcggacatgcaacagatgttg

SEQ ID NO: 455781 - DNA, 434 bp, Sorghum bicolor
  unsure (1)..(434): unsure at all n locations
cgtccgatagaaaatctgggcagacgtttggttcaagttcttcgccggaatggaccctttgtagttcttcacttacggtatgagatggacatgcttgccttctctggatgcacacatggttgcagcaatatggaggctgaagagctcacgaaaatgagatatgcctacccatggtggaaggagaaagtgattgactctgatgccaagaggaaagacgggctctgtcctttaacaccggaggagactgcactggtgttgcaggcactcggcattgatcgcagttatcaaatttacattgccgcaggtgaaatatatggtggacaaagaagaatggctgctcttacctcggcttatcccagtgtggttagaaaagagacattattgccttcagaactcagtcttttccagaaccattcttnncagatggcagcact

SEQ ID NO: 455782 - DNA, 434 bp, Sorghum bicolor
cgtccgcacagctgaatcgacagatggcacctcgatttggcaagttgaacaagtgtttagctgaactggttgatgattacagcatggttaatttcataccacttgatttgagaaaggaaagcagcatacaatatgtgctgtcgtatatcgacacctgtatccagtacggggaagatgctgatgtgaaggtcagggactttgagcccatcgaagacgaagactaaaattgcctcattggatgccgaaggagctgcaaactagttggtagtagtcttgtagtgaggtgtggcgtttgggaatattatatatgtatggcacagactgcaggcatgcaaaaaaaaaaaaaaaacgggcccataggatgctgatgacatctacctggtttatgtaagtttgaaactaaagcagagcactcatatctacaagttcccgtt

SEQ ID NO: 455783 - DNA, 488 bp, Sorghum bicolor
cgtccgatgacctatgctccatccagtgctgtgtggtgggcaagttatggttccagccagcgcataatttggagtgctcttggccatttgcatgacaaagaagaggctcctagccaattgaaactagttggtgttcaagcatcagggggggtttttgccggtgccgtgacctcttttgttacgactcccatagatacaataaagaccaggctgcaggttatggataatgaaaataagccaaaagccagggaagttgtcaaaagattgattgctgaagatggatggaaaggtttgtacagagggttgggtccaagatttttcagctcatcagcttggggaacctcaatgatagtatgctacgagtacctgaagcgcttgtgtgctaaagttgaagaggtctgatttctgagctgccttaaactcagaacgcaattcctacaattctggaagttttgtattagcagaagtgtaataatgctgtacaccaa

SEQ ID NO: 455784 - DNA, 384 bp, Sorghum bicolor
cgtccgccaaaccctagcttttgctctgtctatgaataatgaataggggatgtacaagtgtcttctccaagggccagggggcctacttatatagcccttccaaatgaacgtgggctgtcggatcaaaccgaccttaatcgcatggttttccttaatcctttaggtcggtggagcataatccacgaggtggagcctgattggctgccatagctgggcgggcgccctatagggggaggcgggcgccctgtccccgggcccgctcggcctcccgtttgttcccgtgtcttctggactcttctagatgatagaaaattggcgcacacgttaatatctctatgtaaacccgacgtgtgggcctttcctccatattttctgataacccct

SEQ ID NO: 455785 - DNA, 312 bp, Sorghum bicolor
cgtccgatctggccaagattttagcacctgaaggttctaaagatgttcaggttggacaacccattgctgtcacggttgaagacctcgaggatattaaaagtataccagccgatacatcttttggaggtgaacaaaaggaggagcattcaacagaaagtgtgccacaaaataaagtagttaatgtgcctgaacaaacctcaacagtgagccggatcagcccagcagctaagttactgatcaaggaacatggactggatacgtcatccctgagagcaacaggcccccgtggcacccttctgaaaggggatgttc

SEQ ID NO: 455786 - DNA, 188 bp, Sorghum bicolor
cgtccgaaattagctatacatcttcaatatctctgctctcttcctcagattatccagcttgaagatgacccttacaatcaccaaattccagaatatgaccgcaaatactatgaaccaattggaccgtggaagcgtttttctcatgtctgcgcagcaccagtcgagtcagatgatttgtccattgtcac

SEQ ID NO: 455787 - DNA, 496 bp, Sorghum bicolor
cgtccgcatcattgttgtcaaagatccagacatggcagaggatcttcaaatccctacaggttttgatctcaaggtttacaccaagtcagatattaatggggtgcttggttcctcatccataaacttctctggtcactcatgccgttacttcgggtatcttgtctcacgcaagaagtatgtgatttcaattgatgacaattgcctcccagcgaaggacactgctgggttgactgttgatgctgttgcacagcacatggccaatctgaaaacacctgctacacctttctttttcaacacactctatgatccataccggaaaggtgctgactttgtccgtggttacccattcagcctgcgtgagggagttgagtgcatgctctcatgtggtttgtggatgcataatgctgactacgacccaatgactcatgttgtgaagagaaatcaacgaaacacaacctatgtggatgctgtgatgacagttccgcttggtgcgatg

SEQ ID NO: 455788 - DNA, 270 bp, Sorghum bicolor
cgtccggttcttggcctggagcaccttgccgcggtggacgccttctgcgagctcgtcgcccgcggcatgggcgcgcccgagccgccgcgcacctaccacatcaacctgtccgtgttcacctccctgccggacatgtgggccatcgggcagcagttccccatcatcccgatccagcgcctgcaggagcgccccgccgtcgacggtgtcctctcggacctcacctgcgacagcgacggcaaggtcagcgagttcatcggcgggaggcacagc

SEQ ID NO: 455789 - DNA, 430 bp, Sorghum bicolor
cgtccgcctacaggcatttatggtgctggatgcctgattactgaaggttcccgtggtgaaggtggtatccttagaaatagtgaaggtgaacggttcatggaacgatatgctcctactgcaaaagatcttgcttctcgtgatgttgtttcaagatcaatgacaatggaaattagagaaggacgtggtgtagggccattgaaggatcacatttatttgcatctgaaccatctgccgcctgaggttctcaaggaaaggcttcctggtatttctgaaactgctgctatttttgctggtgttgatgtcaccaaggagcccattccagttttgcctactgtgcactacaatatgggtggtataccaacaaactaccatggggaggtagtggatatcaagggtgataatccagatgctgttgttcctggtctaatgg

SEQ ID NO: 455790 - DNA, 381 bp, Sorghum bicolor
cgtccgacacaatcgagaggactcgagggagattccgccaggccatcaccaccctgcgtgccatcccctggatcttctcgtggacacagacgaggttccacctccccgtgtggctgggagtcggcgccgccttcaagtgggccatcgacaaggacatcaagaacttccagaagctcaaggagatgtacaacgagtggccattcttcagggtcaccctggacctgctggagatggttttcgccaagggagaccctggcattgccggcttgtacgacgagctgcttgtcgccgaggaactcaagccctttgggaagcagctcatggacaaatacgtggagacacagcagcttctcctacagatcgctgggcacaaggacattc

SEQ ID NO: 455791 - DNA, 437 bp, Sorghum bicolor
cgtccggttttaatgacggatatcagctgcaacaacaacactgtggttatgtttctgtgttattcttttaggaattctgcaagacatgcagaggaaacaaagttgtgcctggaacgaaatcagtccaccttgacatactggctggttcggataatgaggatactataaaggttgttagatcaggtggagaagacccagacggccgtccaggtgatctttatgtgaccctcaaggttcgtgaggatcctgtattccgtagagaaaaaggtgatattcatgttgatgctgttctgaatgtgactcaagcaattttgggagggacagttcaagtcccaactcttagtggagacgttggtctaaaagtcaaacctggtactcaacctggtcagaaagtagttctgagaggaaaagggatcaaggcaagaaactcaccatac

SEQ ID NO: 455792 - DNA, 339 bp, Sorghum bicolor
cgtccgcaggtctgttccgctgaagttggcagttaagcaggcattggatgttgcacgtggcatggcctatgtccatggccttgggttcattcacagagacctgaagtcagacaacctcctgatttctggtgataagtccattaagattgctgactttggagtggctaggattgaagtcaagactgaggggatgacacctgaaactggaacataccgatggatggctcctgagatgatccagcataggccatacaatcagaaagttgacgtctacagttttgccattgtcctgtgggagttggtaactgggaaatctccttttgcatacatgactgcagt

SEQ ID NO: 455793 - DNA, 391 bp, Sorghum bicolor
cgtccggtccgtcattcagtcgccgtacgagttcgacgaagatcgcgtcccgtcctacttcctctgcccgatccttcaggaggccatgagggatccccacgtcgcggcagacgggttcacgtacgaaggcgacgccatcagaggctggctggacggcgggaacgacgcgtcccccgtgaccgggcagccgctcgcgcaccgggagctggcacccaatctcgcgcttgctgccgtgatccaagattacacggtgatgatgatgaagaagcggcggcagtaccgattcggcgattcgcatgacaacaccgttgctgcacttcagtttctttcctctcctgtgggcagtgagcggtgagctgcgcttgccagaaaatggccaggcatagatcac

SEQ ID NO: 455794 - DNA, 482 bp, Sorghum bicolor
  unsure (1)..(482): unsure at all n locations
cgtccggttgtttcttcttcttcttcttcttcttcttcttcttcttcttcttcttcctcagctccttcttcctctcgatcgaccgatcgagcatccaagcttggtctttgtttctgtcgctggaggaggtgtagctagatagctagctagctagcaaccgaccgatcgaccatgtcgtcgtccttgttgtgtaggcgcaggaaccacaagaaggacggcgatggcgagcatcagatcatcatcagcaccagcacgccggcggcgatgaggaagggcccgtggacggacgaggaggacgagcagctggtacggttcgtgcgcctcttcggcgaacgccgatgggatttcttagcaaaggtgtcaggtttgcgcggtggcgggtgcgtcgatcgatcttnctncatccatgcctgccctgccatctgcaattctgcatgcatgcgtgcatgagattgaagaggatcggtcgacacagtgagatc

SEQ ID NO: 455795 - DNA, 434 bp, Sorghum bicolor
cgtccgcacgtctttccggtttctcctctcgctcccctccgccggcggaggagctcatggcatcctcttccatggccgccgtcgcctgcgccaccggcaccgccctctcgccgtcgaccgcgacggcccagaggccgtctgtccagggccgcctcgtcttccccgccgcgccctcccgctcccactctctccggctccggttcgcacacagtgagcaaagatggcgcgccgtacctgaggaagattgacctcaagacttacaagaactacaaggacctgtctactgcgcttgagaagatgttcagtggcttcagtactggcaaggatggcttatctgagtaccgcaaggatggtgaatatgttttgacttatgaggacaaggatggagattggatgcttgtcggcgatgtaccatgggagatgttcgctgactc

SEQ ID NO: 455796 - DNA, 331 bp, Sorghum bicolor
cgtccgctctgttgaaaaaggcatatggcgaagagggaggtgatgatattgactatgatcgacgcttgctaacatcttccgatgaatctgtttcagagggatcaggaaatggatcagctaacggtatggtgtcagaatttggtgatgacaattttgtcattggaaattgggagttgaaggagataattagccgcgatggccatatgaagctttcatcccaggtgttctttgcatcaatagaccagagaagtgagcgagcatctggggagagcgcatgtacagcacttgtggctgttattgcagactggttccaagcaaatcaaaatatgat

SEQ ID NO: 455797 - DNA, 392 bp, Sorghum bicolor
cgtccgcacgccatgaagacgctgtcgtttgatgtgggcatcgtgatgatcttcggcggcgggcggctggacgagcggcgcaaggcggagctgaggaagaactactccatcgtggagaaggggtacaactccttccccaacagcctaccggggacgctctattacaaggcgatgcaggcgcggcggcggctgcagggcgtgctgagcgacatcatgcgcgagcggcggaagcgcggcgagccgggcaccgacctgctgggctgcctgatgcagtcccagggcgacgacggcgcgccgctcctgagcgacgagcaggtcgcggacaacatcatcggcgtgctgttcgcggcgcaggacacgacggccagcgtgctcacctggatcgtcaagta

SEQ ID NO: 455798 - DNA, 250 bp, Sorghum bicolor
cgtccgcggacgcgtgggcaagaacggccggctcgccatgttcttggtggatgatgttagaaagctcaaggttctggctaatgcggatacccctgaggatgcattggctgcacggaacaatggggcacaaggaattggactatgccggacagagcacatgttctttgcttcagatgagaggattaaggctgtaaggcagatgattatggctcccacagttgaactgaggcagcaggcactagatcgtctt

SEQ ID NO: 455799 - DNA, 289 bp, Sorghum bicolor
  unsure (1)..(289): unsure at all n locations
cgtccgatcgatcccagctcgactgccacacacactactacttaccaagctgctgatcttcagcgagtctgcaatggacacaccctcgccgtcgccgacgtcgtccgcggggcacgacgagtacaggacggtgtggtcggcgccgcccaagaagccggcgggacggaccaagttccgggagacgcggcacccggtgtaccgcggcgtccggcgccgcggcacgctgtggcggtgtgtgtgcgaggtgcgcgtncccgggggccgcgggtcaaggctctggctcggcacc

SEQ ID NO: 455800 - DNA, 192 bp, Sorghum bicolor
cgtccgcggacgcgtggggtcgcttgtgaagagggtgattgtggctgagtctgaagctgctaatgagaaagagaaggtgaggatggggttggaagagatcaggagaaagacgttgcaggtcgagactatgtctgccaaagtcgaggagatggagaagtttgcggtgggtacgaatgggatgttgaatgagat

SEQ ID NO: 455801 - DNA, 181 bp, Sorghum bicolor
cgtccgctaagatgtgatgtgacgggaaagattcttatgaaatgcttcctttctggaatgcctgatctgaagctgggactaaatgacaagattggacttgaaaaagaggcccaactaaagtccagaccagcaaagagtgggaagaccattgaacttgatgatgtcacattccaccagtgtg

SEQ ID NO: 455802 - DNA, 393 bp, Sorghum bicolor
cgtccgggttttgattcttcaaaatcgatgcgactgtcttggcatccaagggtcttcttgtatgaaggttttctttctgacatggagtgcgaccacttgatatctatggcacatggtaagaagcaatcatcattagttgttggtggcagtgctggaaataattcccagggtgcaagcatcgaagtgttcatggctcatagcaaagacacaattgtttcaacaattgaagataggatatcagtatggagctttcttccaaaagattttggagagagtatgcagattttgaagtatgaggtgaacaaaagtgactataacaactatgaatctcaatcaagcagtggccatgataggcttgtgacagttttgatgtatctttctgatgtcaaagag

SEQ ID NO: 455803 - DNA, 141 bp, Sorghum bicolor
atcgctgtaccgcaacactgccgcttgaatatgcaccgagcagaagaccatcctctcagtggacgacatcctggcgctcatcggcgatcgctgtgacggcgtgattggacagctcactgagggactggggggaccgtgctc

SEQ ID NO: 455804 - DNA, 351 bp, Sorghum bicolor
  unsure (1)..(351): unsure at all n locations
cgtccgcacttgtcaaaggtttgatgagcctgactaccaagatgaacgtgtcatcattacatattacttttccgtctgaaggtgaattcagcaaattgaagaatagtgggttgttacaaagaattgggttgcaatatcactggagaaatcggaattacaagagttttgatgagtttctgatggatttgaagcaacctaaacggaagaatatcagacaagaacgtaaaaaggtttaccttcttttggcttaattgattcaaatgtgcttgtcaattgaggataatcttttttggaaacttcccagattcctgctcaaaattngcaaatgaagcgacttcgtggagacgaaat

SEQ ID NO: 455805 - DNA, 310 bp, Sorghum bicolor
  unsure (1)..(310): unsure at all n locations
cgtccgatcatcgccttcaccacctctaggtacaaggagcagccactgatcgtgcggngtccaggcgcgggcgcggaggtgactgcgggtggcgtcttctgcgaccttctgcggctggcgtcttacctcggcgctccttcgtagagcttccagctacagttgtcaatttcaagaggcagacggacacactgttctgcatgatgcctccggattgatcttatggacttgttcatatgttgttgtttctgaataagtgccaggaaataaggcctctatcttatgtaaggagagagaggttcggctttgggat

SEQ ID NO: 455806 - DNA, 338 bp, Sorghum bicolor
  unsure (1)..(338): unsure at all n locations
cgtccgagagaccgcttgaggcattgaatgtattttacagcatgcagaaccaattgtcatcttatcctgacatggcagcttatcattgtattgctgttactcttgggcaagctggtcttgtgaaagaactatttgatgtgattgattgcatgcgttctcctcctaagaagaagttcaaattgagccctcttcagaattgggatcctcgcttggaaccagacctcattgtatacaatgcggttttgaatgcttgtgtgcaacaaaagcaatgggaaggggcattntgggtactgcaacagttgaaagagaagaacatccgtccaacaaattcaacatat

SEQ ID NO: 455807 - DNA, 395 bp, Sorghum bicolor
cgtccgatttttgttgtgaaagacaatgttatctctactcctgccattaagggaacaatactgcctggtataacaaggaaaagtatcattgaagttgctcagagcaaaggcttcaaggttgaggagcgcctggtgtcagtagatgagttgcttaatgctgatgaagttttctgcacggggactgctgttgtggtgtcacctgtagggagtgttacatatatggggaaaagggcggaatatggcaaccaaggagtcggtgtcgtgtctcagcaactatacaagtcacttacaagcctccagatgggcaatgttgaggactggatgggttggaccgtgcaactgaatcagtaacaggttctccacagatattgccttggcagatccccagatcatta

SEQ ID NO: 455808 - DNA, 380 bp, Sorghum bicolor
cgtccggtcgtgccccgcgcgctctgcactgcgtggtcaccaccaccaacaccaccaccaccagctaaggtagccgaagagagccagggagcgaagcggagcggaggcgagatggaccacgcggcggacgcgcaccggacggacctgatgaccatcacgcggcacgtgctgaacgagcagagccggaacccagagtcccgcggcgacttcaccatcctgctctcccacatcgtcctcggctgcaagttcgtcgcctccgccgtcaacaaggccgggctcgcccagctcattgggctcgccggcgagaccaacgtgcagggagaagagcagaagaagctggatgtcctgtccaacgaggtgttcgtcaaggccctcgtcag

SEQ ID NO: 455809 - DNA, 167 bp, Sorghum bicolor
cgtccgagctggtgcacacggtgcgcacgcacaagggcgccgacgaccggtgcttcggctgcgtgacgcaggaggaggacggcgagggcgtcctgggcgtgtcgctgtcgagggacctgatggcggtggccggggacgcgctcaagaccaacatcacgacgctggga

SEQ ID NO: 455810 - DNA, 396 bp, Sorghum bicolor
cgtccgcggagatcgacctgcgcttcgcaaacccaaaggagggccggtgtttcgtcatcgttgccccggttcgccggttcgcaggtggggaactgaaacctgaacctcaagaaatgtgaggtcttcaatttcatagggcagatatggtaactatatggctgcactctaacaatatatgatgttcactgcccattgtgtcccccagatgatctggatgatgcgaccatcgagaagatcggcaacccagagaaggtgattagcgccttcggtccagaggtcatcggagagaatgtggaagggaaggtcctgtcctcggcaactgcagagtattcaggaagaacatactaccagtttgagctggagccaccccatgtgttcattaccgccacagcagct

SEQ ID NO: 455811 - DNA, 215 bp, Sorghum bicolor
cgtccgattaattcagaaagtttactaggaagatttatcaaggaaaggcaacagaaggaacaggtagacgtggctatcgcgacaaagtttgcagctcttccatggaggtttggtcgtgggagcgtcatttgtgcgctgaaggcctcgttggatcgccttggcgtctcttcagttgagctctaccaacttcattggccagggatattgggcaatga

SEQ ID NO: 455812 - DNA, 439 bp, Sorghum bicolor
  unsure (1)..(439): unsure at all n locations
cgtccgagggaagcaagtggatggtctcagcttgagcatggaggagatcatacatgagtgcaagttgttcttcttcgccggccatgaaaacacagcccttctcctcacttggtcagtgtatctgctcagcatataccccgagtggcaagaacggctccggaaggaggtcttgagggagttcggtagggaagctcctaaccccaatgcactcaacaaactgaaagagatgacaatggtgttatttgagacattgaggctctactcgcctgccctcttcatgcaaaggaagaccctggccgacatgaccgtggggtcaacaaagctgcccaaaggcatagcaattgtgatacctattccgatcatgcatcgagacaaggaggcatggggcgacgacgcagacgaattcaatccgatgagattngagaaccggatcacgaga

SEQ ID NO: 455813 - DNA, 346 bp, Sorghum bicolor
cgtccgagggcacaaaattatctgatggaggaacaaaaaaggaaccaaagaaacaatctggtggctcaaaatcgaagacagctgaggctgacattacagttgcaaaattggatattagagtggggcttatcagaaaagcagagaagcatccagatgctgattcgctttatgtggaggagattgatgttggagagggcgcaccaagaacagtggtcagcggccttgtcaaattcatacctcttgaagaaatgcagaaccggaaggtttgcgtactctgcaatctgaaaccggtggcaatgcgtggtataaaatcgcatgcgatggtttggctgcatcaatgaggacc

SEQ ID NO: 455814 - DNA, 327 bp, Sorghum bicolor
  unsure (1)..(327): unsure at all n locations
cgtccggaatgcttagagtgggtcatccattgtgatgttaaacctgagaacatactgttagaccaaacttttgagcccaagatcactgactttgggttggcaaagttactaaacagaggaggttccacccagaatgtatcccatgtaagaggaacactaggttacattgcacctgagtgggtttccagtctccccatcacagcaaaagttgatgtatacaantattgggttgtgcttcttgagctagtgacaggcactagagttttggagttggtggaaagtccagatgaggtgcataatatgcttagaaagcttgtcaggatgctt

SEQ ID NO: 455815 - DNA, 417 bp, Sorghum bicolor
  unsure (1)..(417): unsure at all n locations
cggaacgacccacgcgtccgagggcaccacggcctcatctccgacgagaccctggagagcggcctcaagatttgcccggggagctccttcatccacatcgagccggagtgccagaagatctgggacaaggccgtcgaggagcaaggcaacatcgacggctacagcatctacacgccgccgtgcgacaagggaaccccgtacgcgcgcagacgactgaggaggagccgccgcccattgatgctgccagcatacgatccgtgcaccgccttctactcgaccaagtacctgaacctccccgaagttcagacggccatgcatgccaacgtcagcggtatcatagactacccatgggttttatgcagcgatcctctgtattacaactggacagacacacctgcttncatgctacccatctac

SEQ ID NO: 455816 - DNA, 341 bp, Sorghum bicolor
cgtccgcaaactcatgcttgcccatgctgccagtgcacaaggaatttcagttgttgaacaaatctctggaaaggatcacatcctaaatcatttaagcatcccggccgcatgttttactcatccagagattagtatggttgggctgacagagccacaagccagggagcaggcagacaaagaaggatttgaggtaaatgttgtgaagactagctttaaggctaacactaaagctttggcagaaaatgaaggagatgggattgctaagttgatttaccgacctgacacgggtgaaattcttggggttcacattttgggtttgcatgctgctgatctcatccacg

SEQ ID NO: 455817 - DNA, 414 bp, Sorghum bicolor
cgtccgagaagctgcacaaaggagcaggaggtgcccgtggggaaggaaggaaggagcaattaaattaaactatatatagtatcatcaatggcggatgcagcaagagagatcgggtctcttcctgtggctaacgtacaggcgcttgcagagacttgcaataacggcggccatgtccaggtgccccagagatacctcaccaaggatcctggttctgaggaggtcgttgctgcggacgatagctctcacgcaattccggtcatcgatctccagaagttgcttgaatcccagtcatcggaggaggagtgcgccaagctggcttctgcctgcctcaactggggcttcttccagcttatcaaccatggagtgccagacaaagtgattggaaacctgaagaatgacatagccgagttcttg

SEQ ID NO: 455818 - DNA, 381 bp, Sorghum bicolor
  unsure (1)..(381): unsure at all n locations
cgtccgcgttctcacaggaagcacatgcttgcaagggaggtggaggccgcgacctggacgcaccggcgacagatgtacgctgccggaggagcccccaatggcgtgaagaggcccgattccaacgcgtggaccgtgccgaccatcggcttccctccgccgccgccgccgccgcctcctcctcctccttctcctcatccgatgcagcacttcggaaggccgctgcatgtctggggccatccgacgccaacggtggagtcaccccgggtgccaatgtggcctcggcatctcgtcccccgcaccccgccgccgncgtgggctcctnncgccgcatctgacccggcgttctggcaccatgcttacatgagggggcctgacacatgc

SEQ ID NO: 455819 - DNA, 208 bp, Sorghum bicolor
  unsure (1)..(208): unsure at all n locations
cgtccggngccctggaatgattgtttcaaaagaattgtcagaaccagttagatcacataaggatcttgacaaggacgcagctcctcacttccagaaagccattaaattttatgatggtcttgctaagcagttagtcagccaaggccacgtgttatatgtatntgcatccgctctcgatcaggtttggctagctgagatgaaagttgct

SEQ ID NO: 455820 - DNA, 393 bp, Sorghum bicolor
cgtccgcccacgcgtccgcccacgcgtccgataaaacatcagcactagttctgtttctgagaaagacaatccaaaccaaagatgtctgggtccaggaactcttcccgcaacgttaacattgattccaactggagcaaaaaggagaacaagctgttcgaggaggccctagcctgctatggtgagggcacacctgaccgctggcacaaggtggcccgtgccatgggtggcatcaagacagccgatgaagttcgccgccattatgagatccttaatgatgatgtcacgctcattgaatccggcggagttccattccccaactacaacacacagggagcttggaactaaggagtcaaggatgcatgtgaagaaccaccagacaggaactactgctac

SEQ ID NO: 455821 - DNA, 384 bp, Sorghum bicolor
cgtccggagagattggcgagaagcagtttagcatagttgcatctggtgatacgaaaccgaattcttggacattactggattttggtgatgttgtagtccatatattccttccgcagcagcgagcattctacaacctggaagagttctatggcaacgccacacccatcgaactcccatttgacacccaattgcagtgattgttgattgttatatcattctgagccagcaccaggaagcatcccaatcaagccaacatactgttcgctttactgagaagtgagattttcgtgaagccagatgacattgttaccacaaatttgacatcgtcatcttactggtcatcagatgtggtcagctgtgaaagaaaaaaaaccctgggtgcga

SEQ ID NO: 455822 - DNA, 354 bp, Sorghum bicolor
  unsure (1)..(354): unsure at all n locations
cgtgcgagacgagagacagatattgatcgcgctgatgatgaagagagctcacgaagagttgttgaaacaagttgacacatggcaaatgaatgttgaacaacagctggcacatattgaactagcaagtaaacaaatggctgtatttgaaagcctgaagtctggaaacgctgcccttaagtctatacagaatgagataaacattgatgatgtccaaaagctgatggatgacacagctgaggctaaggcttatcaagatgaaataaatgctgttctgggcgagcagctntcagctgaggatgaagaagctgttatggccgagtttgaaaatntggaagctcagcttgccgttgagtc

SEQ ID NO: 455823 - DNA, 407 bp, Sorghum bicolor
  unsure (1)..(407): unsure at all n locations
gcgtccggttcgtgacgtgcgtcgccaacataggggcggcggagagtacggcgaggactggcacagggccgggtcgctcgccaacaagcagaactgcttcgacgacttcatcgccgccggcgagttcctcgtctccgcgggctacaccagcccggcgaggctgtgcatcgagggcggcagcaacgggggcctcctggtagctgcctgcatgaaccagcgccctgatctgtttggctgtgccctggctcatgtgggagtgatggacatgctacggttccacaagttcaccataggtcgtgcatggacttgcgactntgggtgttcggacaacgaggaagagttccactggcttatcaagtactcccccctncaacaacgtgcggcgccgtgggagaaggaaagtgggc

SEQ ID NO: 455824 - DNA, 274 bp, Sorghum bicolor
cgtccgaaaggttgacccttttacagatgaaatgttcacatttggatattcacacgaacctccatactgtacataccgtgtgattaccaaagaaggagctatgcttgatcctgtgccaataacaataccagaatctgtaatgatgcatgactttgccatcacggagaattactctatttttatggacctccctttgttgttccgaccaaaggaaatggtgaagaacagtgagtttatctacaagtttgatcctacaaagaaagctcgttttggt

SEQ ID NO: 455825 - DNA, 301 bp, Sorghum bicolor
  unsure (1)..(301): unsure at all n locations
cgtccggacatgtgcttctcattcctcgtgttctggaccgcctgcctcagaagattgatccagagagacttcttgcttgcactgcnaaatggnncagctgaggggcagctagcccttacttccaggcttggttacaataggcttgngtgcctttgccaccatcaatcacctccactttcaggcatactacttgtcagtgcctttcctgtcgagaagcactaccctagatcctttttgagcacataaatgaggccgtcacttaaatctgaagctgttagagaccatgagctgatggtcagtg

SEQ ID NO: 455826 - DNA, 267 bp, Sorghum bicolor
cgtccgatacaggttgtccttaatgctaacagccagatcgttccagcatatgaaattgctgcaggtagcatggggctggatatggacccagatgctgttacttcattcaacgcatccatggatacatgccatacagtgatttggaacggcaccatgaatgatctccaatttgacacgtactatgtaagaactgatgctcgtgcaaagaagtcggctcaacttagcaccaatggtgttacagctatcattgaaggtggagactctgtt

SEQ ID NO: 455827 - DNA, 390 bp, Sorghum bicolor
cgtccgcaaaaccactgctggagacatcaaggagaggataccttgctgcaatttcagcatctagttattcttatgtttctttacttcaacacttccttcccataatgaatccaggaggtgctagtatctctttaacttacatagcttctgaaaggataattcctggatatggtggtggtatgagttcagccaaagcagcacttgagagtgatacaagagttcttgcttacgaagcaggtcgaaaaggcaaaatcagagtgaacacaatatcagcatgtccattgggaagccgagcagcaaaagccattggatttatcgagaagatgatagagtattcttatgtcaatgcaccactccagaaggaattattggcagatgaagtggggaaca

SEQ ID NO: 455828 - DNA, 406 bp, Sorghum bicolor
  unsure (1)..(406): unsure at all n locations
cgtccggggagcatgaagaaacattcactgacgatgatgaggccgtagatattgatccagaggaacgggcagatttagctcctgaaattcctgctccacctgaaatcaagcaggatgatgaagagaacgaagaagaaggtggcctgagcaagtctggcaaggaactaaaaaagttgcttgggcgcgctgctggactaaatgagtcagatgcggatgaggatgaagacgacgacgatcaggaagatgagtcatctccagtgcttgctccaaaacagaaggaccaagttaaagatgaacctgtggataacagcccagctaaaccagcaccgttaggacatgctcgtggcacacctnctgcatccaaatccaagcaaaaaaaaaaaataggtgttgatgatgcaaaaac

SEQ ID NO: 455829 - DNA, 344 bp, Sorghum bicolor
cgtccggcaggctgctgagctatctgtggctgctcctacaattgaggcatccttggactccaggttcctgagcggactgaaggatgagcgggtcgaggcttccaaaatcttccaaggggactactccactggcctaccagtcgacaaggcacagctgatcgaagatgtgaggcaggccctctatgcctccaagatctgcagctacgcacagggcatgaacatcatcaaggctaagagctcagagaaaggatggggtctcaaccttggcgagctagccaggatctggaagggtgggtgcatcatccgcgccatcttcctcgaccgcatcaaagaggcctatgata

SEQ ID NO: 455830 - DNA, 348 bp, Sorghum bicolor
cgtccggttggatcatttttaccactcgacaggagttcagttcaaatggctgctgaatcagagaacggcaactgcaatgcttgggcagcgagagatccttctggagttctctcaccatacaagtttaaccgcagagcagtgcaaagcagcgatgttgcgctgaagatcatatactgtggagtctgttatgctgacgttggttggacacggaacatgctcaatgattcaaaatatcctttggttcctgggcatgagatagctggagttgtaactcaagttggtgcagatgtcaaagccctttaaagtgggtgacccatgtaggtgttggaaacatatgtgaaactcatg

SEQ ID NO: 455831 - DNA, 252 bp, Sorghum bicolor
gttcgtcatctgagatcgtcttgtcgctgcagaaacctgcagttgtacatagactccagcaacgtcgacgacttacctggtcggttcatcacggcgccggcggcggaccccaacgccggcgaggtgtactacaggctgatgcgcggtcatgtcgaacagagccggtcacgctggacccgctgttggggaagctgtcgtgcccgctgctgctgctgtggggggccctggacccgtgggtcggccccggccaag

SEQ ID NO: 455832 - DNA, 317 bp, Sorghum bicolor
cgtccggcggcagggccaccaggtcgtcgacttcatcgcggactactacgccagcatggaagactaccccgtgcaccccaacgtgacgcccggcttcctccgccggcagctcccctcggacgcgccgtcgcgccccaagcccgacgcgttcgccgcggcgctggggacgtcacgacctatctgccgggtgacgcactggcagagccggacattcgccttccgggcagcagaccgcgcctgggaggctgcgcgataacgcggcttagggccgtgcgcgcacactaatggcggctgtgagctatgcagctgtgtggggg

SEQ ID NO: 455833 - DNA, 369 bp, Sorghum bicolor
cgtccgggctattacatcagatgaggccttgagcttggaggagcttccaaagcgtgctgtaatcctcggtggcggatatattgctgttgaatttgcttctatctggagagggatgggtgctgaagtagatttgttttatcgaagggagcttcctctaagaggttttgatgatgagatgagaactgttgttgcaagcaaccttgagggaaggggaatcaaattgcatccagggacaaatctgtctgagttaagtaaaacggctgatggcataaaagttgtaactgataaaggagaagagctcattgcagatgttgttctatttgcgacagggcgcacaccaaactcccagagattgaacttgcaagctgc

SEQ ID NO: 455834 - DNA, 454 bp, Sorghum bicolor
cgtccggaacatgatggcattcgtgaagattttgaagaagttcgagaagattactgggaaacaggtcctgtccgtatatctcaaggtggtcgagaccggctacttcaacagctccgacgaggcgctgaagctgatggacgaggtcgaggacatcttcgtccggcacttcgccggcgacaaccggcgcaaggccatgaagtacctgaggcccgcgcagcggatggactcgcacgccgccaccttcttcacggggctcacggccggctgcttcgccgcgctgttcgtgggctactgcgtcatggcgcacatggccgggatgtactactactactccaccccggcgccacggccacggtcaccgcgcgcgcgcggtgtcaccgccggcggcggctttggcgactccgtgtcggtgtacatggagaccgcgtacccggtgctgagcatgttcgcgctg

SEQ ID NO: 455835 - DNA, 407 bp, Sorghum bicolor
cgtccggccgcagccatgggcacggaggcggagcatcaggacagcagcgtccaacacgatggcgtcgtggtggtgcccgcgccgcgcccgcgcaaggggctcgcctcctgggcgctcgacctgctcgagtccctcgtcgtgcgcctcggccacgacaagaccaagccgctccactggctctccggcaacttcgcccccgtcgtcgaggagaccccgccggcccccaacctcaccgtccgcggacacctcccggagtgcttgaatggagagtttgtccgggttgggcctaatccaaagtttgtccctgttgccgggtatcactggtttgatggagacgggatgattcatgccatgcgtattaaagatggaaaagctacctatgtatcaagatatgtgaagactgctcg

SEQ ID NO: 455836 - DNA, 433 bp, Sorghum bicolor
  unsure (1)..(433): unsure at all n locations
cgtccgattgaagggactctaaggggcatgattgagaagagggagagcgcaatcgagaacggtgaaaccagcggcaacgacttgctcggcttgctgctgcagtcgaacatggatagcgggaaaggcagcctgagaatgagcaccgaggacgtgattgaggagtgcaagctcttctacttcgcagggatggaaaccacgtcggtgttgctcacgtggacgctcgtcattctaggcatgcaccctgagtggcaggaccgcgcgagggaggaggtcctcagcgtgttcggtagggacaagcagcccaattttgatggactaggtcgactcaaaacggtgacgatgatactatatgaggtgctcaggttgtacccaccggcagtgaccctaaaccgaagaacattcaaagacatgcagatnggaggcatcacatacc

SEQ ID NO: 455837 - DNA, 408 bp, Sorghum bicolor
cgtccgattaactttttgtgtactagcaatatctctacgtgtgattcgttaaaataggatctttttcctctaaaatacattgaatgcttatcttcctttgcttattctgtattcgcgttggtaagttaaactcgatagctatatgagtgaaacaaaacagcttattaatttgtagtaaaaataaaaaatctcatttcctacgtacaagacaaaagttaaagtaaacataagcagtgtaaactctttaccccaaggttgagattgtttaattagtcatcatatcttgaagcgggcaagaataaaggattcgcgatatggaattccattactagaatattctgagttattactataatttaaacttataaccataaggcaatccatcaaaagttagtgagggattaggaa

SEQ ID NO: 455838 - DNA, 466 bp, Sorghum bicolor
cgtccgccagaggccaggagaagttcctggccatcatggatctcaagggctggggctacgcaaactgcgacgtccgggcctacatcgctgccattgagattatgcagaactactacccggagcggctgggcaaggcgctgatgatcaatgtgcccttcatcttcctcaaggtgtggaagaccatgatctaccccttcatcgacgccaacaccagggacaagttcgtgttcgtggaagataagagcctgcgggagacactgaggcgggagatcgacgagacccagctcccggagttcctcggcgggaagatgcctatcatccccctcaaggactacgcccagcagcagcctcagcccgtttgcgagtgatgagtctgtctgttaacgacgatggctggccggcccgcgtgacatgatgattgatgagcgagccaaagcccaaagctggattcgatcttgactactac

SEQ ID NO: 455839 - DNA, 423 bp, Sorghum bicolor
cgtccgcagagacctatggttgggggccatgaggtggggccctatcggcagtgctcctatacccaaggggtcatgaacggagtgaatgtcttatgtggtgtggggatcctgtcaacaccttatgctgtcaagcaaggtggctggcttggactagtgatactggcagtgttgggtgcactggcatggtacactggcatacttctgcggcgttgcctggacagcaaggatggcctcgagacctaccctgatattggacatgctgcctttggcactgctggccgtatcatcatctcgataatcctgtatatggaactatatgcatgttgtgtcgagtatttgatactagagagcgacaacttatcaaagttgttcccagatgcacacctaaccataggtggcttgactctagattcacatgtgcta

SEQ ID NO: 455840 - DNA, 429 bp, Sorghum bicolor
cgtccggggaaaatactcaggagcttaagctatttgtggagttgtataagcatgagtccactgattccagacagctgatggaatcgagagagagggaactcgctgaatgggctcgagtccacgttctcaaatattctcttaatgaaagtaaattagagcagcgtgtaattgcagccaatgaagctgaagcaatctctcagcagagattggcaactgctgaagcggagattgctgaattagggcagaagctagaaacttctaggagagatctagtgaaacaatctgatatactgaagtctaaacatgaagaatgtgaagcatacgtggtggagatcgagagcattggccatgcctatgaagacataatgtcacaaaatcaacaattgctacagcagattattgaaagagatgatcataatacccagcttt

SEQ ID NO: 455841 - DNA, 410 bp, Sorghum bicolor
  unsure (1)..(410): unsure at all n locations
cgtccgaagccttttcggctgttgcacttgcaaatcaaaagcttctcgggattccttcagaaaagattaatgttcatggaggagctgtatctttaggacatcctctcgggtgcagtggtgctcgcattttggttacccttattggcgttctcagggcgaagagtggcaagatcggagttgctggtgtctgcaacggtggaggcggagcatcagctcttgttctcgagctcgcataagaaatctagaccttgtaagattgaaaacgctgaatatatctcaactcaaatggattcttttactatatgggaaagtattaaaaaggtgctaaccaatatcagttgttattgtcaacttgtaatatgatngcatagtcagctgaacctaattggagtgatcctttctttttattt

SEQ ID NO: 455842 - DNA, 319 bp, Sorghum bicolor
  unsure (1)..(319): unsure at all n locations
cgtccggaccgtcatcgccacggaagagaacagctccatgcctatcaaggaggcgcgaactgctaagtacttgatagctgatacacatggaacggactacagaaagatcaacataggtggcaggccaactaagatgacactggactgctgcgtaactacaactgcgtgccatgngcttgtataatttgacgagacacagacaatgtttcagctctatgtgtagatggacaataaagccgcctataagttggccatgagcgatgacatgaataacttccagaagctcaaggtgatgtacaacgagtggccattcttcagg

SEQ ID NO: 455843 - DNA, 298 bp, Sorghum bicolor
  unsure (1)..(298): unsure at all n locations
cgtccggaaccacccggccatccagtccaagctccgggaggagatggactcggtgctgggcgccggcgtgcctgtgacggagccggacctcgagcgcctnccctacctccaggccatcgtcaaggagacgctccgcctgcgcatggccatcccgctgctggtgccccacatgaacctcaacgacggcaagctcgccggctacgacatccccgccgagtccaagatcctcgtcaacgcctggttcctcgccaacgaccccaagaggtgggtgcggcccgacgagttccggcccgagcgc

SEQ ID NO: 455844 - DNA, 328 bp, Sorghum bicolor
cgtccgcgtcactgatgcaagggagcttgagaagattcgacagagagaatgtgacataatgaaggagcgaatcgagaaaattctcaaggctggagctaatgttgtgttgaccaccaagggaattgatgatatgtcctcgaagtacttcgctgaagctggagcgattgcagtaaggcgtgtgcgcacggaagatatgtgccatgttgccaaagccactggtgcagctatggtgagtacatttgcagacatggagggtgaagaaacatttgatgcatcatttcttggacatgctgatgaagttgtggagcataagaatcgctgattgatt

SEQ ID NO: 455845 - DNA, 472 bp, Sorghum bicolor
  unsure (1)..(472): unsure at all n locations
cgtccggtcgtctctgtagccgatcgatcagcgtagtagccactgtcgtcacagtttctttatttatttcccatcatctgtcggagcacgtaaatcggctgcgggcgatcgaccggcgacgccatgtccaagcaaaagactgtgatcaggctgggcgtacccaacgccaagaaccggtctaaagccatgcagctcgcatccaaagctgtcggagtgaactcggtggccatcgccggcgaagccaaggaccagctggaggtggtaggagaaagcgtcgacatcacctgtctgatcaatcacctgcgcaagaaggtctgccgcgccgacatcgtcgtggtggaggaagtgaaggacangaagaaggaggaggaggagaagaagaagaaggaggaagaagccaagaagaagaaggcggaggaagataagaagaaggcggaggatgcaaggaagaaggcggaagaagagttcaaga

SEQ ID NO: 455846 - DNA, 314 bp, Sorghum bicolor
cgtccgaacaatattaatagataaaacaaattaaaaaaaactaaaaaaacaataaaaaaataaaaaaaccatcataaagacataaaaagtgaaaaatgatgcaaacaaaacatccaatgggggcggccgctttaaaggaaccaagtttacgaacccgtgcttgcaacgccataatttttttataagggcaccaaattaaaattcacgggccgtggttttaaaacgtcggaactggaaaaaccctgttgtaaccaaattaaatggctttggaacaaatccccatttcccaagtgggcaaaaaaaaaaagaggccc

SEQ ID NO: 455847 - DNA, 362 bp, Sorghum bicolor
  unsure (1)..(362): unsure at all n locations
cgtccgaaaaaattggaatatgtgaaggttcctgaaatttactgggagtacactacacctcaagttttaacaatggaatatgttccaggaattaaaattaacagaataaagcagtttgataagtgaggagtcgatagaaaatgattaggccgatatgctgttgagtcgtacctagagcagatcttgtcccatggattatgccatgctgacccgcatccaggaaacattgctggtgatgatgtcaatggagggagacttatcttctatgactttgggatgatgggaagtatcagccaaaatattcggggaggattgcttgaagtattctatggagtntatgaaaaggatcctgacgaagtgct

SEQ ID NO: 455848 - DNA, 431 bp, Sorghum bicolor
gccggtccagcaaagatgtcaacggccaccgtcccacgactctccgtccccaaatccggggcaagctaccaccagaccgccgccgccggagcggcggcggccaagaagaccgtctccttggtcagctacacgaggcagcaggcgccgcacgcgtcagggatactactacggctgtcctgctccagcaggttcgtggcggcgtccgcagcggccgtgcacaaggtgaggctggtggggccggacgggacggagcaggagttcgaggcccccgaggacacgtacatcctcgaggcggccgagaacggccgggtggagctgcccttctcctgccgcgccgggtcctgctccacctgcgccgggaagatgtcgagcggagaggtcgaccagtcccgaggggtcgttcctcgacgagggccagatggccgacgggt

SEQ ID NO: 455849 - DNA, 470 bp, Sorghum bicolor
cgtccggaaccggaagagcctgaagacgcaactaagggtagagatgttttcaatgaaaaaccacctccagaagagcttttgtctgtatcagacctaggaaaaactgctacaacatcattgcctgataatttggtgctacatacttctatgggtgacattcacttgagactatacccagaagagtgtccaaaaactgtggaaaacttcactacccattgccggaatggttattatgacaatcttatatttcaccgtgtgattaaaggattcatgattcagactggagatcctttgggggatggcactggtgggcaatcaatctggggcactgaatttgaagatgaatttcacaagagcttgaggcatgataggccttttacactttccatggccaatgctggacctaataccaatggttctcaattctttatcactactgtggcaactccatggctagataacaaacacac

SEQ ID NO: 455850 - DNA, 464 bp, Sorghum bicolor
cgtccgggcttccagctcgcagctcatcccgttcccctctggccgctctcggactctcccctcctgtcctcttctcgctgcgtttggtttgcagcagaatcgcagcgaccgcgtcgtccccacgcggcgctgccgctgccgctgcccaggcagggagagagatcggaggggaggagatggaaacgatgaagagccttctgaagccgaagccgatgccgcagcagcagctgcgcgagtggcagcgccgcctccgcaacgagggccgcaacatcgaccggcagatccgagatgtgcagagggaggagaagaaggtggagaaggccatcagggaggccgccaagcgcaacgacatgggatccgccaaggcgctggccaaggaggtggtgcagtcgatgaaggccgtcaaccgcctctacgagaacaaggcccagctcaactgcatctacatgcaccttggcgaaatc

SEQ ID NO: 455851 - DNA, 456 bp, Sorghum bicolor
cgtccgcgacggtcaacactgcagcaccgtgccgctcgtgcgtcgccgccgaccgccgcccgccgcaagcgaccgcccggcccgacagaccgaccgatgtgattgattgattgatggcatggtcttgccgcttttgtggtgtgttttttccttaaaaaaaaaatcaggtgacttcgagaagttcacgagggtgaccatgctccttccgctcacgggcgagcagtacgcggggaaagtgacggagaattgcgtggcgttctggaaggccgtcggcctgtacacggacgccgagggcgtcgccgtggagaagttcaaggaggcgttcaagcccgagacgttcccgccgggcgcctccatccttttcacgcactcgtccaccggagtcctcaccgtcgccttctccaagggactcgtcggtgccggcgtccggcggcgtggcgatcgagaacaagcacc

SEQ ID NO: 455852 - DNA, 509 bp, Sorghum bicolor
  unsure (1)..(509): unsure at all n locations
cgtccgatcagcaaagaaagagggagtttatgatgagactgaagcaaggagggaaagagctaagaactctcttgagagatatatgcattactatgaacgctgggcatccaatcagacatcgaggcagaaggcccaagcagatctgctaaaagcggaaaaggatcagcttgcaaatttaactgacatttttgggataccagagacccagcttaagttcataattgaagcttggtcacagattatagaatgcaggcgagtgctgaaatggacatatgcttatggctactatctggatgataaggtcaagagtgaattttttgagtatctgcaaggtgaggctgagtctggcttggaacgtcttcatcagtgcgctgagaaagacttgcaaaaatttttgccttctgtgaaatctgacagcactgaaacgacggcaccaacaccggatgaatntagtgaattccgcgtaaagcttgctgggctcacaagcgttactcgtaattaccttgaga

SEQ ID NO: 455853 - DNA, 504 bp, Sorghum bicolor
cgtccgaccaaggcctgtttcgtcaaagcttgctgctgacacacctctcttaacaggacagcgtgtgctcgatgcattgtttccctcagtgcttggagggacatgtgctattcctggagcatttggatgtggaaaaactgtcattagtcaagcactttcaaagtattccaattctgaagctgtggtttacgtgggttgtggggaacgagggaatgagatggctgaggtccttatggacttcccacaattgacaatgacattgcctgatggacgtgaagagtctgtcatgaaaagaacaactcttgtggctaacacctccaacatgcctgttgctgctcgtgaagcatccatttatacaggaattacgatagctgagtatttccgtgacatgggatataatgtcagtatgatggctgattctacttcccgatgggctgaagcattgcgtgaaaattcaggacgtttggctgaaatgcctgcagaatagggctaccctgcatattt

SEQ ID NO: 455854 - DNA, 490 bp, Sorghum bicolor
cgtccggtgaccaaaagatttcaagaaaccactccctgtcttcctcccccggctgtctgtcatcttgctctgaaacaatggctgtcctgcaagttgctgctgctgcccctccccctgtctcagcgattgggtttgagggatatgagaagcgccttgagatcagcttctctgaggcacctgtcttcgctgatcccaatggaaggggattgcgtgcgctctcacgtgaccagattgactctgttcttgaccttgcacggtgcaccattgtgtctgagctctcaaatgaggactttgactcttatgtcttatccgagtcaagcctgtttgtctacccatataaaatggtgatcaagacctgtgggactacaaagcttctgctcgctattccgaggatccttgagcttgctaaagagctctccgtgccactttctgcagttaaatacctccgtgggacattcatattccctgatgcacaagctttcccacacaa

SEQ ID NO: 455855 - DNA, 449 bp, Sorghum bicolor
cgtccgcaattattctatcctcagacttgggcctttgcactaattgtagctacctgcgtgagcacccagattaactatctaaataaggcattggatacatttaatacagctgtagtctcaccgatatattacgtgatgtttacatcactaacaattatagccagtgtgataatgttcaaggattgggaccatcaaaatccaacacaaattgttacagagatgtgtggcttcatgactatcctatctgggacgtttcttcttcacaagacaaaagatatgactgatagtcctggacaatgtttgtccacacgacggccaaagcatgctagtcagagtgcgtttgcaattgaagtcatgccactaaaatgtcaagattctgtagatgatgagacccttgacgttgtcacttcccaaggttgaaaatggttacctaaaggaaagagcagttc

SEQ ID NO: 455856 - DNA, 462 bp, Sorghum bicolor
cgtccgccaagatcaaggaggccatcaccgccaagttcaccgagtacctccgccgcgccgaggagatccgggcggtcctcgatgagggcggcgcggggccggggtccaacggcggcgacgcggccgtcgccacgcgccccaagaccaagggcaaggacaacggggacgggggcaacggaggggatgactccgagcagtccaagctgagggcggggctcaactccgccatcatcaccgagaagcccaacgtcaagtggaacgacgttgccggtctcgagagcgccaagcaggcgctgcaggaggcagtcatattgcccgtcaagttcccgcagttcttcacgggcaagcggaggccttggagggcgtttcttttgtatggcccccctggaacaagaaagtcttatttggcaaaagccgtcgcaaccgaggctgattcaacatttttcagtatatcttcttcag

SEQ ID NO: 455857 - DNA, 493 bp, Sorghum bicolor
cgtccgctcgcgcgccgtaggcgacggcacaggcgggggtcccgacgcctcctccccgtccgatccgccgagccccgagcccgatccgtccgcgggctcgatggacgcgcgcctcccggcggacctgcttcgcgccgtgcttgagaggctgacgccgattgacctcagcgcggtccgtttgcgtatgacgggcgtggcgcgcggtacattcctaaacaccaagcgtctagacgacgacactgaaaacctcgcccatgagcgagtttcaagtgacttgatgaaaaatcttatgcaagctaggctcagatagaagatgacccatgcacagcttgctcagatgatcaatgagaagccataggtgatccatgagtatgagtcgggcaaggcaatcctcaaccagcagatcattggcaagctcgagagggccctgtgaacgtatctgcttggcatgatattgtttttgtactagtcatgtgttctgtatcatgtatat

SEQ ID NO: 455858 - DNA, 321 bp, Sorghum bicolor
cgtccgggaggggtttccggggcaggagaagaatcagcggaaggttctagcaggttccactcgaagtggtgggcgttccctctcgccgtccacggtgatggcgatcctcgagaggtcgtcgtcccccgccgcggcctccgtcgccgtcgcggccctgatcgcgctcgcgtccgtcgccggcgtcgccggcgaggtcttcttccaggagaagtttgacgatggatgggaggatcgatgggtcaagtccgactggaagaaggacgacaacacggcaggcgagtggaaccacacatctggcaaatggaacggagatgccgacga

SEQ ID NO: 455859 - DNA, 452 bp, Sorghum bicolor
  unsure (1)..(452): unsure at all n locations
cgtccggtgaatttgatcagcaacccagtgaactcaactgtccccattgctgctgaggttttcaagaaagctggaacttatgatcctaagcgtcttcttggagtgacaacgctcgacgttgcgagggctaacacctttgtggccgaagtgcttggagttgatccaagagatgtcagtgttcctgttgttggtgggcatgctggggtaactatattgcccctcctctcccaggtcacacctccaagctcattcactcaggacgaaatcaaatatttgacagaccgcatacagaatggtggcacagaagttgtggaggcaaaggctggatcaggttctgcgactctgtcaatggcttttgctgctgcaaaatttggtgatgcatgcttgcgagctatgcggngcgatgctggcattgtggaatgctcatatgttgcatcagaggtgacagaact

SEQ ID NO: 455860 - DNA, 441 bp, Sorghum bicolor
  unsure (1)..(441): unsure at all n locations
cgtccggttcgatttgatgacacaaacccttcaaaagaaagcaatgagtttgtcgagaacgttttaaaagatattgatactttggggatcaaatatgatgttgtcacatacacatctgattatttcccaaagctaatggaaatggctgaaagtttgataaagcagggtaaggcatatgttgatgacacaccaaaggaggaaatgaggaaagagaggatggatggtattgagtcaaggtgcagaaataatactgtggaggaaaatctgtcattatggaaagagatggttaatggaactgaaaggggcatgcagtgttgtgtacggtgtaaacttgacatgcaggatcctaacaagtcanctcaggatcctgttactaccgctgtatactgatcctacatcgtgtgttcaagacaggctatcacatatacttgctgccattgt

SEQ ID NO: 455861 - DNA, 440 bp, Sorghum bicolor
cgtccgaatggtggctgtcatcatgagtgcaagccataatccaggtggacctgacaatgactggtgtattaagtttaactacagcagtggacagcctgcatcggagacgattactgatcaaatttatgggaacacactttcaatttctgaaataaaaacagcagggattcctgatactgatctatcctctgttggagttgtaagctatggagatctcaccatagaagtgatagattctgtttcagattacctggaactaatggagaatgtgttcgacttacaacttatttaggatttgctttttccgcctgatttcaggttcatattcaatgcgatgcatgcagttactggtgcgtatgcacgacctatttttgttgagaaactaggagctgatccggactgcatattataatggagtgccctctggagattttggaaat

SEQ ID NO: 455862 - DNA, 512 bp, Sorghum bicolor
cgtccgcactatcaacaatggcatgtgtgacattggcgagaattgctgaatttcttgtagtctttcttctatgatcaacgtgttgcacgtgcagcgggttgcgtgcgttaatattagtgactatgttgttactttgagtatacaaatttcttcttttttggtaacctttgtgaatataactgtattgcatttatctttatggattttcaggtgaagaatttgttatcagttagtgctgatgatgaggttcctataaaaagtgtaactattcgcaaaattcctcgtgttctagaagatatgcccctctatgacatcctaaacgaatttcagaaaggtcacagccacatggcagtggtcataaggaaaaacaattcaagttacccaccagctgaacaagctgccaatgatggtggaactttcgaggtgtctgttgcgattgatgataagaacagcgaaaaggtcgtgaaaaaccttccatcaccactgctaagatggaagagctaccctaacac

SEQ ID NO: 455863 - DNA, 544 bp, Sorghum bicolor
cgtccgattttttatcttcgtcctggcagctggcaatgttgacaatgaatcccttcaagtggcattggtgctgactggacttttcctgtgcttttttggtttactgtatggtggcttctggagaattcagatgaggaagagattcaacctgccagaaaacaacttctgctgccacaacccagatgcatcagattgtttccagtggttgttctgctgctcatgctcacttgctcaggaagtcaggaccgcagattactacgatatcacagaggacaggtcacccacagggcaagtaactggcgaaaccccccgcgtaatgatgtccccattgcagcgtgaagatggtctggcccttttcaagtcaagtccaagttcgccatataggagcggcaatgctagtccatcgatctttatcctggagagcccgtcagccccacgcaggtcatctggttcctcgcctcaaggtggttcaccgacaatgggtgatagggtgatgaaggcaccagctccatctgttcttcaaagagaaggtggaccagatcat

SEQ ID NO: 455864 - DNA, 390 bp, Sorghum bicolor
cgtccgggcaactgaggctggtgctaatttcataaacatatcgatgtcaagcatctcttcgaagtggcttggtgaaggagaaaaatttgtgaaagctgtgttttcgctggcaagtaaaattgctccaagtgtaatttttgtggacgaggttgatggcatgctgggaaggcgggagaaccctggagaacatgaagccatgcgtaagatgaaaaatgagtttatggtgaactgggatggtctaagaaccaaggagaaagaacgtgtattagtacttgctgcaactaacaggccatttgatcttgatgaggctgttgttaggcggcttccaaggaggttgatggtgaatttgccagatgcatcaaataggagaaaaattcttagtgtaatact

SEQ ID NO: 455865 - DNA, 504 bp, Sorghum bicolor
cgtccggttggtttgcagttggccgtatccttcagtggagaaggttcaatacttgccattggtggtgaggatgggcatttaagagtctggaagtggcctgctatggggtctgttctcacagaaactgatactaaaacatcgattaaggatcttaccatcagttccgatgagaagtttcttgctgtgaataggagcagcgggccatgtagagtttgggatctgcagtcatctgaagttgtagccagtctgtcaagagaagcaggggaaatatttggattctgcagattctgtaataagactgacaacagtcatgtcctatttataacagtgatgcaaggtgattatggaaaaatagtatcttggaatactacctcatggacgagaatcggttcaaagaaaataactcgtgaggccatttcagcttttgctgtgtcacccaacggcgctcttcttggaattggaacaattgaaggaagcatcatcatactgagctcaaaagacatg

SEQ ID NO: 455866 - DNA, 567 bp, Sorghum bicolor
  unsure (1)..(567): unsure at all n locations
cgtccgcggcataccaagccccacgggttttgtgatgaatatgcaaccttcagaagcagaggttggctttgatctccgcctgggtccaactgaagatattgaacagatcaaacgaagagtcaaagaggaatgggcaccagctcataaaaacttgacctaccagctaatgcagaaaggtccagtaacagatgtggctgggcgtcccatattcaccgcaacaaatgagtcgaacccatggtggtccatattcgagaaggccatcacctccgcgggaggaaagctatctaagcccgagatcttatcttcaaccacagattcacgctttgtgaggcagctgggcattcctgccctcgggttttctccgatgacaaatactccaatactactacatgaccataacgagtttctggaagataaggtgttcctgaggggcatcaaagtgtacgaacatgttattagagcactaagctcgttccaaggctgattcgtgaaaggaaagtgatgtttgcatgattngtagcattgctggattcccgtctcaattactgaatgaaggtaagagcatcg

SEQ ID NO: 455867 - DNA, 562 bp, Sorghum bicolor
acgcgtccgaagcagggctacacccagttcggtggcctccgccccttcggggtctccttcctgttcgccgggtgggacaagcaccacggctgcgagctctacatgagcgacccatctggcaactatggcgggtggaaggccgctgctgttggggccaatagccaggcagcgcagtccatgctcaagcaggactacaaggacggcttgacccgcgaggaggccgtcgcccttgcgctcaaggtcctcagcaagaccatggactccaccagcttgactgccgagaagctggagctggccgaggtgtttctgcagcctggcaccggggatgtacagtaccaggtgtgctctcctgaggcgctggggaagctgcttgcaaagtctggcctgacacagccaacacccgacgcataatgttctggtttgctgcggcttgtgatgcctactactgctcttagacatggtttaagcagttatgcttctcgtgtgtgaacctaaatattcgatgactatgtggtctaaaattctatgttgagcatccctgatctgttaatgttccatctgt

SEQ ID NO: 455868 - DNA, 518 bp, Sorghum bicolor
cgtccggaagatgtggcctctggaagtgaaatccggagtgtggtgttggctgggcggaggttttacgaaaaagagggcctcccagcttttccaatgggcaacattgaccaaactcgcatgtggaaggttggtgaaaaggtgcgcgcaacccgtccagaaggtgatcttggcccgctccatgccttcactgctggagtgtacattgccttgatgatggcgcagattgagatcttgaggaagaaggggcactcctactctgagatcatcaacgagagcgtgatcgagtcagtggactcgctgaacccgttcatgcacgctcacgcttacggggaggaagaaggaggccgacaagctgcagaccgccgacggatggtctaagttcaccggagggttcttcttcggcggcatctccggcgtgctctgggcttactttctcctctacgtgctcgaccttccctactacttcaagttgaaggtgattaataaagatccatatatatatatatatagctccgatg

SEQ ID NO: 455869 - DNA, 488 bp, Sorghum bicolor
cgtccgggaagcttttatatcacagttctcttcatggacaaagcttcaacacttttttaggcaaagtaacgaatggagatgcccagactgttctgattgttaaagatagagaaggatcaatttatggtggatatgcatcacagccttgggaaaggcacagtgatttttatggtgacatgaagacattcctcttcaaattatatcctcaagcatccattttccgccctactggagcaaacaggaatttgcaatggtgtgctataaacttcagctctgagaacatacccaatggtattggatttggagggcagccacatcatttcggactctttttatctgcaaatttcgatcaagggcactcatttacttgtagcacgtttaccagccctcccctttcaaagacaaataggttcaggccagaagtcattgaatgttggggtatacaaatgagaggagcacaagatgaaaaactggagctagtcaagggg

SEQ ID NO: 455870 - DNA, 490 bp, Sorghum bicolor
cgtccggaccgtatccgccaccgccgcacccgcgcctcccccgccctccgccacggccgccgccgacaagtcctcgctcgaccccgaagcgctctatgaagaggggatgtggcaacagatggccatgaacagcggtgccactatgcaacctgggtcatatcctgagcgaccaggtgaacctgactgcacttactacctcaggactggattgtgtcgatttggcatgagctgcaggttcaatcatcctccggataggaatctggctattgcctctgccagaatgaaaggagaatatcctgagagagtgggacagccagagtgtcagtattatctgaagactggaacatgcaagtttggccctacatgcaaatttcaccatcccagggaaaaggctggaattgcaaggagggtgcagctaaacacattaggatatccactccgcccggttcgtctttcatttgcagttatatgtcctcttttatacatgtct

SEQ ID NO: 455871 - DNA, 390 bp, Sorghum bicolor
cgtccgatcgctgcttggagaggccatcaccgggaagggcatccttgcccagctgaacctggagacgggcatccccatctacgaggcggagcccctcctcctgttcttcatcctcttcaccctccttggcgccattggcgctctcggtgaccgtggtcgcttcgtcgacgaggaggtcaccggcctcgacaaggccgtccgcggagacgatggcgacggagaagctgggcatcaaggtggagcgcaacccgcccgagtcccgcctctccgagctcggcgtccgccagtggcccaagtgggggtgcgacaagagcaatttcccgtggacctactccgccaaggagacgtgctacctgctgcaaggggagggtgaagtgtaccccgagggtc

SEQ ID NO: 455872 - DNA, 463 bp, Sorghum bicolor
cgtccgtcggccccgccgtctctccaagaccttggtcgactcctccgcccgggcatgcccccccaccgccgatcgcacacggtcgtatgattgcaatgaatcctgagatcgtactaccgtcttggaaacaattttcggcatcggtcaatcctgtgaaacactagaccgctcatcaccttgcaactggaaaggagagagcaaagtgatttgctgtctcctggtgatcgatgctcttgaggcctagtgatggctgatgctagctcaaggactgacacatcaatcgttttagacgacatcgacaagaatcagaggatgggagaatgaagtgggtgggttctaccttctaattcttcagataggtccgacaggtctgacaaacctctggaccaaaagacaatgcgacggcttgccccaaaatcgtgaggcagcaaggaaaagtcggctgaggaaaaaagcatatgtg

SEQ ID NO: 455873 - DNA, 391 bp, Sorghum bicolor
cgtccgataaccgtcacacggatgacgctcaccatcacacatatggaatggacatgaagcatgaggttaagattgccaagtacggagcgcggatattggcgcaccaaacgagggctctccatccatctattgactatgacaatgcttatggagcaaataggaagaagactggactgaacaagacaaaatctttacatataggacagaaccacagcctacgtgtgccaacatgcccgagataagtatgtatggattatcattctgacgtgaaaagccaagtatggcatagcatgcacacagatgcgcgagcccaatgggccctgcatcgcgcggtcaatgcagctcattaacagcccggattagtggtttacacgcgaggcgctactatact

SEQ ID NO: 455874 - DNA, 448 bp, Sorghum bicolor
cgtccgcggacgcgtggggcaaacttgtcagtatagatagtcaccactaacgtcagaaacagtagtactggcagtagaggctgtagagctagctctcccttaggccaagaactctgaacgaaaatgtcagaggccgaggtgcgtgtgatcgggctatggccgagcccgttcgtgatccgcgttctgatcgcgctgaagctgaagggcgtcgagtacgagctcgtggaggaggtggtgggcaagaagagcgagctgctgctgaggtcgaacccggtgcacaagaagatccccgtcctgctccaccacggcaagcccatctccgagtctctcatcatcggccagtacatcgactaggtctggtcctccgacacgccggccttcctgctgcccgccgacccctacacccgtgccgtccataggttctggtcacagtacgtcgatgacaagc

SEQ ID NO: 455875 - DNA, 466 bp, Sorghum bicolor
cgtccgtcgagtggtcccagcgagctatccatattagtgtcaggaaacagactaaatggtggtatgccaaaagattcctgcatcctgatattgtggcagcttatgtagtacatattcatctgggatgaagaccttggggttgaccattttactgcagaggagtacatcaaacttgttaagaagcataatttggccatctctcaacctggattagagcctgatcggggtttaacatggcagatgaccaaaagaagaggtgacagtgaggttcacaaggatacagaggagaggccgggatggtgctctgaccctcatcttccaccttgtgctgcttttgttgaaataatggctccagtcttctcaagagatgcatggagatgtgtgtggcatatgattcagaatgacttggttcatggttggggcttggattttgctctcaggaaatgcgtggagcctgctcatgaaa

SEQ ID NO: 455876 - DNA, 487 bp, Sorghum bicolor
cgtccgggctaatccgagaaccaaagactactcctgcttggctgctttcatcaactccggcgacttggagaaggcgaagttccagaatccgatcggaagtttggtgctcgcgcgttgagaggttgatttcggtgcggcgatggggcaggctttccgcaagctgttcgatgccttcttcggcaccagcgagatgagggttgtgatgcttggtctggatgccgccggtaaaaccaccatcctgtacaagctgcatatcggggaggttctgtcgactgttcccacgattggtttcaatgtcgagaaagttcaatacaagaatgtgatgtttactgtttgggatgttggtggccaagaaaagttgaggcccttgtggaggcactacttcaacaatactgatggcttgatctacgtagttgattcattggatcgggagagaattggtaaagccaaagctgaatttcaggctataatcaatgatcctctgatg

SEQ ID NO: 455877 - DNA, 379 bp, Sorghum bicolor
cgtccggagatctcgtgctcgccgctatcaattcgttccttatccacagcaacacatccgccttttagaaccttgtcgccgccgccggcgccggcaccacccgtagaagcgaagcatagcaatggccgaggtgggatcgaaggcccggatgcggcggaccagcatgcgctgatcgacgccgacctgcgggagctagatgtaggcgggcggaagctcggcaaccatgccttcgctctgggcgggggactgggtttcgtaacttgcttgctcaagtggctggccttacttgcggcagtggatcttttgatattggaccgcacaaattggaagacgcaacatgctgacagctatggtggttgattacattttcttcactatg

SEQ ID NO: 455878 - DNA, 478 bp, Sorghum bicolor
cgtccgcgccgtgcggtgccgcctcgacgacgtcgactacctcgagtacccgctccagatccccaaggacgacctgctcccgcacccgctgccccggcccagccacgacgaggagtccaagctcatcctgctcgtccaggtgacggcgttcgcgtgcggcggcttcgtggtggggttccggttcagccacgcggtggcggacggtctgggcgcggccaagttcatggccgcggtgggggagctcgcgcgcggggcggagcaggtctccgtgccccccgtctgggcgcgcgacgccatccctgacccgcccggcgcgctggtgggcagcctcccggacccgacgggcgcgaagcggctggagtacctagccatcgacatctccgccgactacatcgaccacttcaagtcgcagttcgcggcggcgacgggcggtggccggtgctcgtcccttcgggtgcttcgccatgaacgcgcgccc

SEQ ID NO: 455879 - DNA, 485 bp, Sorghum bicolor
cgtccgctctagatccatcctgatcctggtggctttgtgggtgaagaaagaaagaagatgctggacaagctgtgggacgacgtggtggcggggcctcacccggagacgggcctcgagaagctccgcaaggccgccactgcccgccccatcctcatcgacaaagacgcggatgccggagccgcggggagctacaagcggacgcagtcgatgccgtcgaccccgacgacgccggtgtgcgccgtcgtcgcgtcgacgatcgacgacgccgcggggcgccagcaacgtgtggcgcagcgtgttccacccggggagcaacctggccaccaagggcatgggtgccaacctcttcgaccgcccgcagccaaactcccccaccgtctacgactggctctacagcgacgagaccaggagcaaccaccgttagatcgatcggatgaggccgaggatgatgaagggcccggcgtctctgtcaggccatcatgttt

SEQ ID NO: 455880 - DNA, 440 bp, Sorghum bicolor
  unsure (1)..(440): unsure at all n locations
cgtccggtaagctcatgcttgctcatgcagccagcgcacaaggaatctcagttgtggagcaaatcagtgggagggacaacatcttaaatcacctaagcatcccagctgcctgtttcactcaccctgagatcagtatggttggcttgacagagccacaggctagggagaaggctgacaaggaaggatttgaaataagtgttgtaaagaccagttttaaggctaacacaaaggctctggcggagaatgaaggagatggacttgctaagatgatttatcgccctgacactggagaaattctcggagttcatattttgggcttgcatgctgctgatctcatccatgaggcatcaaatgccattgcccttggaacccatgtgcaagacaataagtttgctgttcatgcacaacncaaacgtgtctgaagttctggatgaactctt

SEQ ID NO: 455881 - DNA, 484 bp, Sorghum bicolor
  unsure (1)..(484): unsure at all n locations
cgtccggccacggtcgacggtcgtcgtcctcgcgggttcccccacgccggagcgcggcgagcccggaggcaagagatggagaacgcggtggtgctccgggagtggttcgaccgcgtggacgccggccgcaccggcaacatcaccgctgcccagctccagggcgcgctcgctgtcggcaacctcaacttccccatctccgtcgtgcagcagatgattaggatgtatgactttgatcggaatggcaccatgagcttcgaagagtttctggctctcaacaaatttcttcagaaggtgcaaagtgtgttctccaccctggaaaggggtcgtggatttctaagtcttgaggaggtgtatgaggcattaatcaaacttggtttctcgttggattcaccagccttctacacagtttgtgagagcttcgacaagagcaagaaggggatgattcaattggatgagtttatatcactctgncattttgtgcagt

SEQ ID NO: 455882 - DNA, 374 bp, Sorghum bicolor
cgtccgcgctcgctggttcaagaaaccaccgagctaccaagcgcgcaaggcaggagagagaggagcggaaatggaggggaaagaggaagacgcgcgcctgggcgccatcatgttctagcagcggcaggctatcgggacggtggagcatggcgccgtagacgactaggactacagggagccaccaccggctcctctggtcgagcccggggtgctcaagttatgttccttataccacgcgggcatcggcgagctagtggccacattgctatatgtctacatcaccatgctaaaccgaatgggcgtctgcaagtgcaacataaagtgcgccaccgtgctgatgcagagcatcagctggtgcttcggaaggatgatct

SEQ ID NO: 455883 - DNA, 482 bp, Sorghum bicolor
cgtccggtggcaaaggaaaccatgacactgtcatcgaggttcaacttcagttgtctgctttcaagacatttcttgatcttgctgataatgagcttactgggaaggattttacggaggcttttgatgctgcatgcttccctcttacactcttttcaaccaccttcgaccaaggatgggcgtcaggaatatcagcagctgcagtacaagggcttttagagttgttggtagagggtggtgcagacaatgtaaaccaatgctttcttgaagctgcacgctatggcagcactgagcttgtccggatcttacttcagattgctcaaaggaacagcttggacattgatgtggatctagcccttggctttgctgctcactatgggaagatagaaaccatgggatgcttggttgaagaaggtaatgctgttggctttcttggccctttgatgcgtgctgctgaacgtggatgcctccaagttgtggaatgg

SEQ ID NO: 455884 - DNA, 506 bp, Sorghum bicolor
cagggtcgacccacgcgtccggtcatgtgaatagactgtgatacctacctgcaccatcacggccacaatgacaagcttccatggtaccgaggaaaggaatggacctatcttcggggtggcctgacgacgctcgaccgggactacggatggatcaacaacatccaccatgacattgggactcatgtcatccaccatctcttcccgcagatcccacattaccatctcatagaggcaacagaggcagccaagccggtgctgggaaagtactacagagagccgcaaaagtctggtcctctcccctttcatctacttggtgatctggttcggagtttgagacgtgaccactatgtcagcgacacaggggatgtggtctactaccaaactgacccaaaactccattagctgctccattcaaccgaggggaggctgggagttatgcgaatcgcaaggatcagaggctgctagagacatcattgaggcaacacactgcattaatataataagat

SEQ ID NO: 455885 - DNA, 443 bp, Sorghum bicolor
cgtccgaaaccaccgcaccgagcccccgccgcgccgcgccacctccgctcctctcgtctcccccggccggcgtcgaggccgaagcgaaggcgagcatgcatcacgaccccaaccccttcgacgagggcggcgccgaggacaaccccttctccaatggaggaggtggaggcggcaagcagcagtacgggttccggccgactgagcccgtcgggttcggcggcgccggcagggggggcgacgccgtcgtcgacgtcccgctcgagaccatgggggactctaagagcaagtcgagggagctctcgtcgtgggaatcagatctgaagcggcgagaggcggatatcaagaggagggaggaggcgctgaagaatgctggtgtgccgatggaggagaagaactggccaccattcttccccatcatccaccatgacattgccaatgagata

SEQ ID NO: 455886 - DNA, 496 bp, Sorghum bicolor
cgtccggacgcttcacttatctcgagcatctcccgtcctcgtcctcgctcctgactcgccatgggcaagattaagatcggaatcaacggtttcggaaggatcggcaggctcgtggccagggtcgccctccagagcgagggatgtcgagctcgtcgccgtcaacgaccccttcatcaccacggattacatgacctacatgttcaagtatgacaccgtgcacggccactggaagcacagtgaaatcaccctcaaggactccaagacccttctcttcggtgagaagccagtcaccgtctttggcatcaggaaccctgaggagatcccgtggggtgaggctggtgctgactatgtcgtgagtccactgtgtctcactgacaggacaggtgtgacactgaggggggccaagagtgatttgccagcagatcccatgttgtgtggaagagacagcctgcatactgtcatgtctgcacacgctgtcctgtagatatgcactgta

SEQ ID NO: 455887 - DNA, 316 bp, Sorghum bicolor
cgtccgcaacaatgatgatcactgctccccagtacaagttcattttcccgaggatcagaaaatttcccaagttgcatgcggatggaggcatacacttgccctttctgagaagaaaaatgttttctcctggggaaggggtactagcggacagctcggcaatggtgaaatagttgacaggaatacacctgtactgattgatgccttaagcactgatggttctggctgcaagaagttggagtcatcaacggcagccccatttgcagccaaagtttgggtatcgccatcagaaagatatgccatagttcctgacgaaaac

SEQ ID NO: 455888 - DNA, 401 bp, Sorghum bicolor
cgtccgcccacgcgtccgcccacgcgtccgcccacgcgtccgcatgaaggcccggctcgtcggcgcgacccgcggccacgcgctgctgaagaagaagtccgacgcgctgacggtccagttccgcgccatcctcaagaagatcgtcgccgccaaggagtccatgggcgagacgatgcgcgcctcctccttctccctagccgaggccaagtacgtcgccggcgacggcgtccgccacgtcgtcctccagtccgtccgcgccgcgtccgtccgcgtccggtcccaccaggagaacgtggccggggtcaagctccccaagttcacccacttcgtagactctgccgcggcctccgggggcccatccaacgcgtccccgagcctcacgggcctggcccgcgggggca

SEQ ID NO: 455889 - DNA, 324 bp, Sorghum bicolor
  unsure (1)..(324): unsure at all n locations
cgtccgcggacgcgtgggcggacgcgtgggcggacgcgtgggcggacgcgtgggtcgccgtctgcgtctccgactgctcccaaaatttcaccaccggcgcaaagcgaagatcccttcctctccctcctcggctcgctcccgtacccgcagtcagcagctcatctgccgctgaggagagaagaaactcacgagctccccaccgcgacccagcccaggcgggcaaaggccacggccactgcccgtcgcggtgcggctccccaccgncttccaaccccccccccccccctacccccacgcgtgcgatgctgccgctgagtctacctc

SEQ ID NO: 455890 - DNA, 341 bp, Sorghum bicolor
  unsure (1)..(341): unsure at all n locations
cgtccgcccacgcgtccggcgcgctgtactggaccatccccggcgagatataccccgtggaggtgcggtcggcggggcagggcgcggcggtggcgctcaacctggggctcaacttcctgcaggcgcagttcttcctggcgatgctgtgctgcttcaagtacggcaccttcctcttctacgcgtcatggctggtggtgatgaccgccttcgccgtggcgttcgtgccggagaccaagggcgtgccgctcgagtccatggcgcacgtcttcgcgcgccactggtactggngcaggttcgtcaaggaccaccagaagtttgcgaagagtcacctagttaagata

SEQ ID NO: 455891 - DNA, 495 bp, Sorghum bicolor
cgtccgatacaactgagggctatatggtctactgtgctacaacatttaagcatgcatttgactacatgccaacagacatatactgttgcactgcagatcgtggctggattactggacataggtatgtgacatatggtccactattgaatggagccacagctcttgttttggaaggggctccaaattaccctgatcctggtcgctaggcgggacatcgttgataaatatggagtgacaatcttttatactgcaccaacacttatacgctcgcttatgcgtgatggtactgagtatgttgctcggtactctcgcaagtccctccgagtgcttggaagtgtggtgagccaatcaaccccaccgcaatggaggggttctatgatgttattggcgactcacgatgccctatatcagatacttggtggcagactgaaactgctggattcatgataactccattacctggtgcttggcctcaaaagccaggatcagcaacat

SEQ ID NO: 455892 - DNA, 408 bp, Sorghum bicolor
cgtccgggcagtggttttgaagtaatttctgtcgggaggaggaagcttgtgcgttcggttcctaccgaattaaataaagaccacagtgggagacttgggctagctcaggctgagggctatgtcacggtagaacaagtcgaaagggaattctcatggtctactgggcgtgcaattgatgctcttgaaactttgctgaaggaggggcttgctatgatcgatgatggccatagggacggcaaacgaagatattggttcccatgcgttactgtcagctccgacacagctgctgttgaagccaagtcatgacccccaatatgtcaattccacaatgtgttcatgtctccatgaggtggaacaactagtaccacttaaaagggaagaatgacattcctttttgctttttttgtt

SEQ ID NO: 455893 - DNA, 439 bp, Sorghum bicolor
cgtccgcccacgcgtccggaccatctgagagagagcgtttgattgcggatttctggaaagaagctctgatcctaagctcacttcatcatccaaatgtggtttcattttatggtgtagttcgtgatggtccggatggaagcttagcaactgttactgagtttatggtcaatgggtctctcaaacagttcctgaggaaaaaagacaggacaatagatcgccggaagagagtaatattagccatggatgctgcatttggcatggagtatttgcacgggaagaatatagtccattttgacctgaagtgtgagaatctactagtgaacatgagggatccgcagcgaccaatctgcaagatcgggatctcggactatcaaaggtaaacaacatactttggtatctgtgggtagaggaacctaccatgatggaccagactttgagt

SEQ ID NO: 455894 - DNA, 397 bp, Sorghum bicolor
  unsure (1)..(397): unsure at all n locations
gcgctccggggcgggacaaggttctttctactttcctggttcttttcttcaccctgtttgccntccttctactttttaactggttggtgccatggctggtaccttgactcctttcggaatggttcgaaggtttggtggtcttcgtcaagcttaaccgcttgaaccatttcccttgaatcctcggaccccgaccggcgttggctatctggtggcgatgggtctactggtgtaacccggtgttctggaccatctacggggtcacggcgtcgcaattcggcgacctaagcgcgaacgttaccggtactggcagaagcactggcacagtcgtagtgaaggaatttctggaccaaaccctgtgcatgaagcacgactttcttggctacgtcgtgctggcgca

SEQ ID NO: 455895 - DNA, 482 bp, Sorghum bicolor
cgtccgaacggttcaagggtgaacaaacaccacctgcacacataggagctagcagagactacaatgtcgatatggttccaaagtttatgatggcaaatggtgcattggttcgtgtgctcattcatactggcgtcaccaagtacatgtccttcaaagctgtggatggaagctatgttttcaacaagggaaagatccacaaggttccttctaatgatatggaagctctcaaatctccactgatggggttatttgagaagcgaagagctgggaaattcttcctttatgtccaagattacaaggaagatgaccgaagtactcataagggttatgaccttactaaactaacgacaaaagaactcatatcaaaatatggtttggatgataacacgatagacttcattggacatgcagtggctcttcataaagatgatagctatttgacagaacctgcaattgacacttgtaaagcggatgaagcttta

SEQ ID NO: 455896 - DNA, 484 bp, Sorghum bicolor
cgtccgctccgcaagcgggccgccgtcttccggatccactacttcatgctcgccgtgctcgtgctcaaggcgctcaacctccttgccgaggccgaggacaagtcatgcatcgagcgcaccggcaccgcccacggatgggacgtcctcttctacatcttcagcttcctcaaggggatctcgctcttcacgctcatagtgctcatcggcaccggctggtccttcctcaagccctacctggccgaccgagagaagaaggtgcttatggtggtcatccccctgcaggtcgtagctaacatcgcgcaggtggtgattgacgaatctggaccctatgctcgggattgggtcacctggaagcagattttcttgctggtcgatgtggtctgctgctgtgctgtgctcttcccgattgtgtggtccattaagaacctccgggaggctgctcgctcggatggaaggctgccggaacctatgaagctacactctt

SEQ ID NO: 455897 - DNA, 390 bp, Sorghum bicolor
cgtccggtgccgacgtacccgccggggctggagccgtacccgctgatcgggcacctgccacagttcttggctaaccggcaccgcgtgctcgactggatgaccgagttcctcgagcgccagaccacgtgcaccttcgtgctgcgccggccgggcggcgtgcggggcgcgatcaccgccaacccggcgaacgtggagcacttcctgcgcaccagcttcgaccgctaccccaaggggccccggttctcgttgcttctgaacgacttcctcggccggggcatcttcaacgccgacggagaggcctggcgcgcgcagcggaaggtcgccagccacgagttcaacacgcgctcgctccgcgccttcgtggcgcgctgcgtgcacaccgagctacat

SEQ ID NO: 455898 - DNA, 445 bp, Sorghum bicolor
cgtccggtggagaaacagtttggaaagaacttcgatgacatattcgaattcttcgatgtcgagcctgttgggtctgcttctattgcacaggtgcatcgagcaaggcttaaattatcaaaggcagacgttgctgtcaaggttcaacatccaggagccgagcatttgatgatggttgatattcggaatatgcaagcaatggccttgtttctgcagaagtatgacatcaactttgatctattctctgccaccaaagagatggaaaagcagatatgctatgaatttgactttgtgcgtgaagcaagagcaatggaaagaatacgagaattcctacgtgtcaccaataagaaacctccagttatggtgcctcgtgtgattcctgggatggttagcaaaaaaggtttggtaatggaattcaataaagggaccccaataatgaatcttggca

SEQ ID NO: 455899 - DNA, 518 bp, Sorghum bicolor
  unsure (1)..(518): unsure at all n locations
cgtccggtgaaggagccgctcaagtccgatctcctcaacggcaaatgggagcttctctataccacctccacaagtatactgcaaccacagagaccaaagtatctgaggccgtttgggaaaatttaccaagcaatcaacgccgacactttgagagcccaaaatatggaaacgtatccttactttaatcaggttactgccaacttggttcctctgaatgctagaagagtggcagttaaatttgattacttcaagatatttagtttgtttctctgattagataccgatcaaagcancccgaagtggtaaaggtgaacttgaaattacttatcttgatgaagagctcagggtttcgagaggcgacaagggaaacttgttcgtactgaagatggtcgacccaacatacagggttccattataataatgttctgataacattttaggtgtcagctatctgtaacatccttcttcctccactgaggactgaggcaatgtaaggggtgtaaatattaatatcccat

SEQ ID NO: 455900 - DNA, 311 bp, Sorghum bicolor
cgacccacgcgttcggcagtgcctcaagcgtcagtgctaccaccggttcctggcgccactattgttccattcactaccatgcaggctgcagtgagcaagaacatggtggagagcctggcagtgccagcattccgcgtcggctaccccattgtaaccgataagctcgatgcgctgtatgaaaaggttaagccaaagggagtgacaatgacagtgctgctggcgaaggctacagccatggctcttgtgcagcaccctgttgtcaatgctagctgcagggatggaaagagcttcacatacaacagtaacatcaa

SEQ ID NO: 455901 - DNA, 255 bp, Sorghum bicolor
tttccggttcggagcacacgcacaatccgatcgatccccaaatccccttcgtctctcctcgcgagcctcgtggatcccagcttcaagatgcagatctttgtgaagaccctcactggcaagactatcaccctcgagtggagtcttctgacaccatcgacaacgtaaggccaagatcaggacaggaagctccccgccagagcggtatttgcgcagagtgggtgcccctgtgctcacatcaagggcctcactgcccta

SEQ ID NO: 455902 - DNA, 358 bp, Sorghum bicolor
cgtccgcacaaagtgtccaaagtcctagaccattcagagtttgaacaagtcaaccgggcaatttttgataagtgtgaaaagatcatcaaccagtgcttggttgatgcgaagttagtaccagaggacatcaatgatgtcatattggttggtggttgttcgaagatccccagaatcagaagccttgtcctgggtctatgcaagaaggagatctcttacaagaacatagatgctctagaagccgctgtttctggtgctgcgctggaaggagccatcgcttcaggagtgaatgatccttcagggagcttggatcttctcacaatccaggcaacttctatgaacctgggaatccgtgccaatg

SEQ ID NO: 455903 - DNA, 265 bp, Sorghum bicolor
cgtccggatgagggcatagcgtacagctgaaacattaaccatggactaccatcgtggtgccaaccttgaggtaaggattgcccgtatcttcaacacatatggtcctcgcatgtgcattgatgacggccgtgttgtcagtaattttgttgctcaggcgctgaggaaggagcctttgacagtttatggcgatggcaaacagactaggagctgtcaatatgtctcacatttggtagaagggctgatgaaactcatggaagggatcaca

SEQ ID NO: 455904 - DNA, 230 bp, Sorghum bicolor
cgtccggagggctgctcgcttgaacatcatccacagcagctctggagctgccaaggctgtgggtatggttcggcctgctgtgattggcatgctcactgctatgcactgtcggcttcccaccgaggatgtgtcagttgctgaccttactgtcagaatcgcctacgcagcctcctatgtggatatcatgacagctcttctggctgcgtgtgagggcccactctagggtatca

SEQ ID NO: 455905 - DNA, 406 bp, Sorghum bicolor
cgtccgcccacgcgtccgcagagaagcacacgttttctctacccatgatggctactctcttgatgtttttgtagctgatggctggcccattgaggacactgatggtttgcacatagcactggaagcatccattttaagaaatgagggttcatggtctggttcatctcattcctcagcagctgaaagaacactgcccttccaagttaaaggtggcgaatgggaaatcgacaaacgacttctgaagatgggagggatgattgcttctggttcttagggagacttgtatcatgggacttaccttggtgaggatgtagctgttaaagttctaagagctgagcatttgaataagaatgtttggaacgagtttacgcaagacgtatatatactaagaagaggtcaccataca

SEQ ID NO: 455906 - DNA, 229 bp, Sorghum bicolor
cgtccggtgaaagaagggtgggaagaagaagaccgtggaccccttctctaagaaggattggtatgacatcagggccccgtcagggttcagtgtgcgcatcattgggaagactctcgtgtccaggacacaggggaccaggattgcatctgagggtctgaagcatagatcatatgaggggtgcgcacctgatctccatggaggcgagtgccaagctgacccgataagaagc

SEQ ID NO: 455907 - DNA, 440 bp, Sorghum bicolor
  unsure (1)..(440): unsure at all n locations
cgtccggtctgcctttgtggggaaatacacagatgagctgatcaagaccgccaagtacctggcaacgccgggcaagggcatcctggcctccgacgagtcgacgggcaccatcggcaagcgcctgtccagcatcaacctcgagaacgtggagtcgaaccggcaggcgctccgcgagctgctcttcacggcgcccggcgtgttcgactacctctccggggtcatcctcttcgaggagacgctgtaccagaagacctccgacgggacgccgttcgtggacgtgatccgcgccgtcggcgccgtcccggtgatcaaggtggacaagggcaccgtcgagatcgcgggcaccaacggcgagaccgccgcgcagggcctcgactccctgggcgcgcgctgcgccaagtactacgcggncggcgcgcgcttcgccaagtggcgcgccg

SEQ ID NO: 455908 - DNA, 402 bp, Sorghum bicolor
cgtccgcatacctactgtgctcatatcatcatgtctgacggtatcggtatcgcaaatctgcccaaccagaggcataaaataatcagtcagagaggagctcatctgactatcatggtggtcggcccctctggatcaggaaagaccacattcatcaacacgctttttgcttcagaaatatgcaccccacgtaattaccgaaatagatcgatcaaacagatggacaagacgaccgagattgagattttgaaagcagagttggaggagaagcaattcagtatcaagctcaccgtgattgataccccaggattcggtgattatgtcaacaaccgtgacagctggacgcccatcatcgactttattgacgatcaacatgaatcctacatgcgacaagaacaacaacca

SEQ ID NO: 455909 - DNA, 321 bp, Sorghum bicolor
cgtccgcctcgcgtcgcgtgtaaactgtgaaaaagaggagagggagcggtaaagaaaaaagcagagagagggggcgcgtcctccgccgttcgccggtaatggtcgtcagctcactgcgaaccgacgacgttcgatcagcagcacgctgagagatgacctctcattaaagctagattgctagctgcagctggattgcctggggactcaagcatccaacttataatctttgctagccatattgaaaaacagaaaggatctgacatactcattgcattcattccaaaacttagcggcaagaatgctcaaatagttattcttggc

SEQ ID NO: 455910 - DNA, 362 bp, Sorghum bicolor
gtccgcggcacgcatagttcaaacgatattcaaagcaagagcctgggtgcttcgacatggagcggcacagggatataatcagggttgcgcttggcagatctagggacctctcaaaattcactgactacggtgcacttaaagcataattagacacgaggtgtgaattgaatggccaattaatatctgccaacagacgctggcagatcgggtatactgacactgaagctgacatgacgcttgcgtcggatgacccgcgacaagagttctgtagcataaggcgcaagatctacatcgatacgagcgtggaaggccagaagatgaactctagatcatctgcgcccaggaaggaagagcctttaaca

SEQ ID NO: 455911 - DNA, 497 bp, Sorghum bicolor
cgtccgaaacaaataactgggattgacctatccttcacaacaaagtgggatagtcatgccccaaaaactagggatgggtcccatcccacctcatcttgaaatcaaatggatgctagtttggaagtgattgcccttctaacaaatgtcatctgacaggtgaatgtattatcgacactcctcagaaactaaaagctaagctggagatggctgaagcccttggtgagattgaaactgcaactaaacttctggaggatgattccagtgaccaggatgatccgctatatgctcgatacaagcaacttcattgtgatctcgcacctcttgaagctgattcggatgagtactctatgataaaaacatatttgaggaatacacatggaaaaacacactctggctatacggcggacatagcgcaaatatttaatgtttcgaggcatggtgaaacagagcgatttcagaaatttgctagtacaagaaataggatgcttctgcggcat

SEQ ID NO: 455912 - DNA, 379 bp, Sorghum bicolor
cgtccggactctcaatacactttgtgactgatatgcatggagaggagggcggctctgccattattgcgatggctgacactaaccgaactgacatatagagtgcggctgtactcagacctgagcgctatgacagacaggcgtatggcgatgttcctgatgtccagagcaggacagagatcctaaagatgcatggtatcagcacgaaggatgaatctgaggatcatttagatgtcctagcaatgagaacacctgggttcagtggagcagacttggcggaccttctagatgaagcaagcatactgcctggacgaccagggaggtcagcattgtattgagaagagaatgatgattctattgacagaattgtgactacgtatgg

SEQ ID NO: 455913 - DNA, 517 bp, Sorghum bicolor
cgtccgggcggccccgagaatcccaacgcacgagaagaggaacaagggaaccaggcggagcgaagagagcccggggtgatgaattgttacggtttatggacggagcaagcaaggagcctctccgcaaggactactacaaagttctggaggttgattatgacgcttctgatgacaccatcaagttgagttatagaagattagctttgatgtggcatccagacaagcataagggtgataatgatgtcacagctaaatttcaggagattaatgaagcatacaaggttttaagtgacccagctaagcgactagaatacgatgtttctggttgttatgagattgatcaatatactttgcgtgagtaccttgcaaaatttaagggtatgatacttacctgtaatggccttggcatagatcatccttctagtaaatggtaaagacgattcagttgaactgtcacctatttatttatttcaaaataatgttatgtttcctactctcgattattgatggcagcaca

SEQ ID NO: 455914 - DNA, 494 bp, Sorghum bicolor
  unsure (1)..(494): unsure at all n locations
cgtccgcggagttcagctgacactgacctccactttgaagagcacaggcaagacaaggatcagtgcatacgggctgaataatggaaatggatcacaaactaccaaggagaagcatgaatataatggcactttacaaccatcaaaaggccagaagccgcagctgtgcacaacatgtgcaaaagggcatacttgtcaatcggtcattaaccggacaagacaaatgcgagctctaatcgactcaaacaagccctaccaagcacactctgtattcaagcacttaatggaagagggacacaaaccttcattggtcacatatacaattctactgaccgccctgacaaaccagaggatgtttgagtcgatcccatcactgcttgctcaagttgaactagctggaattaggccagactctatcttcttcaatgccttgataaatgcgtntgttgaggcgaagcggatgggtgaagcaataaacacattctggaaaatgaagc

SEQ ID NO: 455915 - DNA, 521 bp, Sorghum bicolor
gccgccagctcccgccgtcagtccaccagtagagaccagttgatgagccaccgtacagcactgactcgaggaagctggaggagctgatgtacaatcttaacccttgagctcatgagttcacgcctgcttcacaccccactgctgctgtaaccgagcctgccatgctcactaatccgagtgctgctggagcataccctgacgcggctgcgaagatcatggctcgtatctgcattgaagcaaaatctttcctggaccacgaggcagttttcaaggcgatgatcatgtccgcgcctcttccaatgagtcctctggagtctcttgcatcatctgctgtgcgaactgccaacatggccaaagcctgcctgattgtcgtcttgactctgcgtggcaccacggtcaagctggtcgccaagtacccgcccagggttcccatcctcttttgtgtcgtacctgtgctaacgacggtttctttcgactgtaccaataacttcgagggcccagctaggcacaacctgatctac

SEQ ID NO: 455916 - DNA, 439 bp, Sorghum bicolor
gcgtccgcacagataccagagcgagaagaaaggagagggtctgtgaggtttctgattttattagaccagatgaaatgcttaatgattttgatgggagagcgcatcatgttgctccaggggtactacacggatcgtacattttagagtcatacatatggacaatatgcggcttatcatacatgcgtgtgctactcatatggatttttatgtgcaggtcagaatctaagatcattactgcattggcccaaacttctcgcaattattgcgggtatagctcatgggcttaattacctacatatgcactccaggctgcgtgtcatacatcgagatcttaaaccaagtaacattctcttggaccacgaaatgaacccaataatttcagattttgggctagccaaaatattcagctcatataacgttgaaggaaacactacaagaa

SEQ ID NO: 455917 - DNA, 419 bp, Sorghum bicolor
cgtccgaagagatgaaagtgctcctatgaagtagattgactttggtctgtctgattttattagaccagatgaaaggctcaatgatattgttggaagtgcatattatgttgctccggaggttctacacagatcgtacagtatggaagcagacatttggagtataggtgtcataacatacattcttctgtgtggcagtaggccattttgggcaaggacagaatctgggatcttccggtctgtgttgagggctgatcccaactctgacgattcaccatggccttcagtatctgctgaagctaaagattttgcgaagagatttctgaacaaggactaccgaaaaagaatgactgctttccaagcactgactcacctcttgttacatgatgaacaaagtcagattccattggacatactcattt

SEQ ID NO: 455918 - DNA, 218 bp, Sorghum bicolor
cgtccggcggcggctcgcttccctgccccgcccgtggtagggccccgccgctgccgcagccgctgaccccgtcccgtggtcggccgacctctccgcggcgctctacaacgtggacggctggggcgcgccctacttcttcgtcaacgacgacggcgacgtcgccgtgcgcccgcacggacccgcagacgctgccgggccaggagatcgacctggccaag

SEQ ID NO: 455919 - DNA, 465 bp, Sorghum bicolor
cgtccggtaagatgtacatcatgtcatgaatgagccaaggactatgtacctacatccagcatgaagatgacctctgcttcatttctagctattccgagagaactacttaagccgagccatgggacaccacctgctgtgacatctggagaagaaggcataggccaaagcacgggcgtgtatggtactgtgctccagacataagtgactaatattggcagtcggagaggcctgacaggatgatctaactgccagatggtctcttggaccgctccgaggtgccggagtacctcaccggagaggtccctggagactatggctacgacccttttggcctgtgcaagaagccaaaggacttcgccaagttccaggcctacgagctgatccatgccagatgggccatgctcggtgccggtggcgctgtcatcccagaggcctggaacaagttcggcgctaactgcggtcctg

SEQ ID NO: 455920 - DNA, 292 bp, Sorghum bicolor
cgtccgacagcctgaactaacgccgccggcaccaccgccgacaggcgcgccgactgaaactgcctgaagaacgacgtcagtggcataagaggcgtcaacgccgccgacgccgtcagcgtgccctacaagtgcggcgtgggcgtgacgtacaccatgagcagctgcaccgactgctccagggagagctaaacctaaacgaggttgatcgatcgatgatccatatcggcgccgccgacgtccacctctatcgccaccgatcatagcatctaccatgcatcgagtttgtgtacta

SEQ ID NO: 455921 - DNA, 511 bp, Sorghum bicolor
cgtccgcttgccactaggacatcacgcagttcgcgagctaagtgggacattgctgtactgcacaactctgctgtatacactaggtctgtgcagagaggaccaccatgagctctgctagcctatcacagtcaattactaccacacataatgagaaactgcttaatgatcgtttgatacatgcgtgactcgcgacaagacacgcacaaagagcgaaggagtacgacgacgctgtatgataaagccatggctggtgttaagacatatctacggtgagaaagtcctgattcaggatgaggacttcgccaatcataatgcctatgatttgctcgaaaaagacagcatgacccatgttgttttcaatgatgatatccagggcacaccatcagcggtccttgcaggtttgttagcagcactcataacggctggtgggaccctggcagagcagacttatttgttcctttgtgctggggaggctggaactggtattgcagaactcattgctcttgagatg

SEQ ID NO: 455922 - DNA, 361 bp, Sorghum bicolor
cgtccgccacgcgttcgagaatgtctgatgactgcacagactagtccattaataagggcttgcagcacaggcgctacaagaatagagagctgggaatcatgcgatccatggatcactggattgttgtaagcttgatgcattgcttgttgtatacctcaagcagagatgaacgtgtccttaacttagtgatggagagagttccagagtcattatatagagcgatgaaacatcacagcaatgtgcaccataggatgccgcttattaatgtgacatgatatacataccaaatatctcgaggctgagcctatatccacaccagacctggggtgggccacacgggtaggccaccacgagagctgtt

SEQ ID NO: 455923 - DNA, 453 bp, Sorghum bicolor
cgtccgagctatgtgaggtgtgttgctgagctaaccgcaccgccggtggatgcgtcacgagagatgcttacagaaacatacaagtctcatgcaccatgaagatctatgctgacctcgactgctgttgacctgattagggctcttgctgaagaataccctaatgatctcaacgacagggttatgtcagatgccgagaagagtgaggtggccgagaaaactgacctgtacgacaagctctgcaaggtgttcgacaagtacatcaagcttgttataatcgaagacacagctaacaggatcggcctggctaagcttgttagatatgagaggtccaaggatgatggcgaccttgcctacgttgatgagtacatttcacgtgtgaagcctgggcagattgcgtcttctacatcacgcgaagcatcaaagaacacgctggagaagtctccattccttgag

SEQ ID NO: 455924 - DNA, 346 bp, Sorghum bicolor
cgtccgcccgaggaaaaatctgttccaatggaaactgatgcaaaggttgagccgtcaaaaaggatagttaagaaaacttcaagtccggtgcatgatttggtctatggggccttggctgctgttgacctgctgaaggctgttgagaaagagtatgagatggctctccaggacagagttatggcagataccaaagagatgaaggatgccgagtaagcttatgtctatgacatgcgttacaagctgtacgacaagtacagcgatcttgtcacacccgaagagaaagataggctgatcgcacatctacaggatgttaaagattggacgtacgaagatggtgaggacctta

SEQ ID NO: 455925 - DNA, 287 bp, Sorghum bicolor
cgtccgagaaggcttcaggtactggagataagaagcgtgtgtccaagaagaaaccgaaacgtcagaagtctggttcaacttgtgaaatgaagtttctcaattcaactgctcaacttgtggagcctgcgagaaatgagaaattctctagttttaatttggagtatgcagaagttgaagaaagacctgttggatcagaatattgggaaccgagatttgccgtccaccaaagtctgcaagaaagagaggagtcatacaaagctcatgaccaacagctgaaatgtgctttt

SEQ ID NO: 455926 - DNA, 443 bp, Sorghum bicolor
cgtccgggcgtacgaagcaaggctcttcggatcgattcgtgaagatgcagatcttcgcgaagactctcactggcaagaccatgacccttgacgttgagtcctcgtatacaattgacattgtcaaggctaagatccaggacatggagggattgctgccggatcagcagagcctgatctttgctggcaagcagctcgaggatgggcggacgctcgctgactataacatccagaaggagtccaccctccaccttgtgctcaggctgaagggtggcatgcagatctttgtgaagaccctcactggaaagaccatcacatctgaggtcgagtcctcagacactatagacaacgtgaaggccaagattcaagacaaggagggcattccaccataccagcagcgcctcatctttgctggaaagcaacttgaggatggccgcactcttgct

SEQ ID NO: 455927 - DNA, 439 bp, Sorghum bicolor
cgtccgattgtctctgacactgtactgtagagatagaatatttcttaagtgcttatagtaggataaattgttgacataatcttcgctgcagtgtcagatttttaaccggacactccagaaatggtgggacagatccactacatgtagctggaagtgcagctgatccagacactactttggttgtgtacatgggtttgtcaacacttccatcactcgctccaaagttaatgaagcacggcctgccgccagatacccctgctgttgcagtagagcgcgggactacacctcaacaacgaacggtagcgactcttaggcccgcaaaaactaaattgtgtttaaccttactctgccatcctgaatgttcctcacactggaggtgttctccttgctaaaggatcttggggatgaagtcaaggcaactgatctagtttctccaact

SEQ ID NO: 455928 - DNA, 414 bp, Sorghum bicolor
cgtccggtctccgcttcccccctcctctaccctcgcctccgcaaccgccgcggccgattcttcgcgtcctcctcctcctcgtcccagatggcggcgcctgccgacgcccccggtggttcttcggacgcgtttgaggtgatccgcgttcaccaggcaaaagctgctcgtctttctccagttgaagaaatacggaccattctggaccgaagtgtcagaggcgttcttgctacccattctcaggatcatgctggttatccatctagttcaatggttgattttgcatgtgatcaagatggttcccccatattagcagtgagtagtttagcagttcattcaaagaatctctccggaaatcctaaatgctcacttcttgtcgccaaagaccctgaggacagaacggatactgtaatcact

SEQ ID NO: 455929 - DNA, 345 bp, Sorghum bicolor
cgtccgcctggagctgctgcgctccatatagagtatactgctgatgatgctgaagcatggcatgccctatggaaagctgctattacggtgagggcggataccaaccctgaagatgttgatggcatgcacgcactttctgtgatccttacataccggggcgggatgacttacgatgctgctgtggtatcccgtcgctggggaaaatactgtgtctcgaaatgctcagacattcctgttaatgatgctgacaagactgctgccattggagaccatgtgctgagcgaaggtaagacgctatcgctgaatggatcaactgctgaaccgatccttgtaaagcatgcgttt

SEQ ID NO: 455930 - DNA, 503 bp, Sorghum bicolor
cgtccggtgattgctacgccttatgcgagcggctttgaccatttcttcattgcagatgaagttcaatttaagtttgataggtgtttgagaaacttggatgagcctgtaaatgatatcccaacatttggtgttggacattccttgggatctgttatccacatgttgattggatcaagatatgctgtgcagcgaagtggaaatgtactgatgtcctttaacaacaaggaggcaagctccgcggttccactattttcacctgtaattgttcccatggcacaaagttttggcccgatactgtcccaattgacatcatatccaacaatccgatttggggcagaagcagccattaagcagcttgagaatctaagcccacctgtggttaagcaacttctacctttacttcaacaacttcctccgttgtatatggacttagtaaatgggagggaggacttcattccaaaaccagaagagacacgccgcctgataaaatcctactatgggat

SEQ ID NO: 455931 - DNA, 174 bp, Sorghum bicolor
cgtccgcggacgcgtgggtgcaagccctacatgcctagcaaaaatcttgcggatctatcaagatactattaagcatgtaaagcgtggcaaggagccaaatatgcattagcttgagacggagactcttccgtttggacggaatatcaccagactctatgatctaaagggatcttc

SEQ ID NO: 455932 - DNA, 383 bp, Sorghum bicolor
gacctcacgcgttctggaggcttttatcagccacaagaagaatcaatgaaaagaacaaacttggtccactcggagtcggagtcgtttattagggaggggtagtcagatggccatacttaacaggtcatagactctctgcgaccactacgcaaggactatgacagatgacgaatgagctagctttgctagctaagctgcagcacaggaatttagttaggatcgcagctgtgagcttggaggaaggcgagcatttgcttgtgtatgattacatgccctacaaaagccttgataccattatctttgatcctgataaaaacatgcagctagactggggggcgcgattcaaaataataaatggaattgccctatgcatgcagtacctg

SEQ ID NO: 455933 - DNA, 526 bp, Sorghum bicolor
cgtccggtctgtccgtacttcggtcagcaacaagcaactttgatgaaaagaacaaacttggtgagggaggattcggtgttgtttataagggtgccctgccagatggccaagaagtagcagtgaagagactctctgagaccacaacgcaaggactaggacagatgacgaatgagctagctttgctagctaagctgcagcacaggaatcttgttaggatcgtgggtgtttgcttggaggaaggcgagcatttgcttgtgtatgattacatgcccaacaaaagccttgataccattatctttgatcctgataaaagcaggcagcttgactggggggcgcgattcaaaataataaatggaattgcccgaggcatgcagtacctgcacgagcattcccagctgaagatagtccaccgtgatttaaaagcgagtaatgttttactcgatgcagacatgagacccaagatttcagattttggtctggcaaagatttttgaggacatcaaaccagacatgtaacaagccgatat

SEQ ID NO: 455934 - DNA, 429 bp, Sorghum bicolor
  unsure (1)..(429): unsure at all n locations
cgtccggaaggaaggagatatcacaggagctttatgagttttgcctcgaccagggttatgcagaccgtaacctgattgcaaagtggaaaaagccaggttacgagcgcctttgctgccttcggtgcatacagacacgtgaccacaactttgcaacgacctgtgtctgccgggtccccaagcatctgagggaggagcaggtgatagaatgtgtccattgcggctgcaggggttgtgccagcggtgactaatcttgtcatcatgttgttgggctcacgaactcatcatcgcaacctaaccacatgagatgtcccgtgagcatggattggctgcggtgattagcatgaatgtattgtggtaactagtggcgaagactaaatttnctgacgttttgatgttttcaactgttatgtactatgacgatttctcatg

SEQ ID NO: 455935 - DNA, 327 bp, Sorghum bicolor
  unsure (1)..(327): unsure at all n locations
cgtcgcgaacaatggccctggagacgtgcttcagagcgtgggcgctgcacgccgcccctgccgctggtggcaaggacagcaggctcctcggcgtcggcagcagcagcggcagcggcagtaacctggttctgccgtcgagagcgggccgtcgncgacgacggtggtgtgccggtgtcccaagcatgtgagggaggagcaggtgatagaatgtgtctcattgcggctgcacgggttgtgccagctgtgactaatcgtggcatcatgttgttgggctcacgaactcatcatctgcacctaaccacatgagatgtcccgtgagcatggatt

SEQ ID NO: 455936 - DNA, 373 bp, Sorghum bicolor
cgtccggttagaaatataagtgtgaggactggggtattagatgagaaagctgctgcaacacaggctattggttttttcgcactacacacagagagtgcctatgctccgtatctggaggagtcactgaagattttgatcaggcacagtagttatttccatgaagatctcaggctgcaagcagtcatttctttgaaacatattctaactgctgttagggcaatacctcctacacatgctgatgtactagagaaacagaaggatgttcttgatactgttctgaacatttacatcaagactatgacagaggatgatgataaagaggtagttgcacaagcttgcatgagtgtagcacacattgttaaagaatgtggtt

SEQ ID NO: 455937 - DNA, 430 bp, Sorghum bicolor
cgtccgggaaaacagcaacggtacctagcaccatggctctcaccacaagcactaaccaagctttgctcgacgctcagctcgagctctggaacaccaccttttcccacatcaagtccatggcgctcaaatccgctctggacctccgtattgccgatgccatccacaaccatgccggcgccgccaccgtccccgacatagtggcgacggtgaagctccacccatccaagatcccctgctttcgtcgcctcatgcgcgtgctcgcagccaccggcgttctcagcgccgggaacccgtcgggcagcagcactgagctcgtgtatgcgctcacaccgttgtcccgcctcctcgtcggctcgcataacctagttcctatcactggcatgatactccatccaagctttgtctccccggtcctcgagcttggcacatg

SEQ ID NO: 455938 - DNA, 260 bp, Sorghum bicolor
cgtacggtaataggctcacggcactgtcagatagcatctccaagtgcaggtccctagttgagcttgatgtgagctacaatggccgcacggatctgccgacaaacattggttatgagctggtaaatctgccaaaactctggatccacatgaacaaatggcgttctcttccatcatctgtctgtgagatgacatcactctacctgctggatgcccattctaatgaattatgaggggttacatctgccgttatgaagcttagc

SEQ ID NO: 455939 - DNA, 426 bp, Sorghum bicolor
cgtccggttgtgctgaacttcttgggaaacttctgttatttattcttgtcaagcaccttacttggagtgttttctggattgctgagtgcgtacataattaagaagttatatataggaaggcattccactgaccgtgaggttgcacttatgatgctcatggcttacctctcatatatgttggccgagttgctagatctgagtggtattcttactgtattcttctgcggtattgtgatgtcccactacacttggcataatgtgacagagagctcaagagttacaaccaagcatgcctttgcaactttgtccttcattgctgagacttttctcttcctttatgttgggatggatgccctcgatattgagaagtgggaatttgccagtgacattccgggcaaatccaatggcataaggctcgattttgtt

SEQ ID NO: 455940 - DNA, 343 bp, Sorghum bicolor
cgtcgcgagcggacttaactacatccacaaccggcgcgatctactcttgcttactacactcacctaagacgcttccactgaccgcgcgccagcttcataactaagaagtgatatatccgaagccataccactaactcgagacttgcacttataatgctcatggcttacctctcatatatgttcaccgagttgctagatctgagtggtattcttactatattcttctgcggaattgtaataacccactacacttggcataatgtgacatacaactcaatacttacaaccaagcatgctctatgcaacttatgtccttcattgctgagacatatctctttcttta

SEQ ID NO: 455941 - DNA, 345 bp, Sorghum bicolor
cgtccggtccgcacagcacaagggatcgagcagccggcgggagcagcacagtgctgcggcaagctaagctaagatggcagactacgtgtgtggccccgggcggaaccacctgttcgtgccgggcccggtcaacatcccggaccccgtgatccgcgccatgaaccggcagaacgaggactaccgctcgccggcgatcccggcgctcaccaaggtcctcctcgaggacgtgaagaagatcttcaaaaccacaaccggcacgccgttcctgatcccgaccaccggcaccggcgcgtgggagagcgcgctgaccaacacgctgtccccggcgaccgcatcgtctcgttc

SEQ ID NO: 455942 - DNA, 249 bp, Sorghum bicolor
cgtccggtgcacgcactggggcagcgactcggtgatggactctggtgtcctgcacgagatcgccaagtccaagggcaaaaccgtggcacaggtgtgcctgaggtgggtgtacgagcagggcgactgcctgatcgtgaagagcttcgacgaagggcggatgaaggagaacctggacatcgtgggctgggagctgacggaggaggtgaggcagcgcatcatcaagatcccccagaggaagatcaaccaggg

SEQ ID NO: 455943 - DNA, 354 bp, Sorghum bicolor
  unsure (1)..(354): unsure at all n locations
cgtccggttcacaatctggaaggttgttgagctgtcaagtccggttgatatctcatccatgaaaagggctcgtcctggggttacaagcatctcagctgcagggacaatttcaaacgtgaatgagttagatcatagagaagtattacctgagaggctgagaatctgaatcttagttctcaaggttcattaccttagttacccgttttttttggcctccggatatgcctctcaacatattgtttccaacgattgtgtcagcacagatatccaaccccaagacctggaanttattggatgtaaaataagcattacgatgtattacgtttttaatcttctgaaaccatttaagaacat

SEQ ID NO: 455944 - DNA, 436 bp, Sorghum bicolor
  unsure (1)..(436): unsure at all n locations
cgtccgagcaaatccaagcgcttaaaccacactcatcagatcaaccacaaacagcctcccgagcagaactcgctcgtagccccgagaacgagacagccctcctcctccccctgcagcgagatggctcccgagcttgccggcaagatgaccgccaaggccgctgccgccgccgccgccgcggcggtgacgaagcccgcgacgagggcgtacgtgacgttcctggccggcgacggggactactngaaaggcgtggtgggccttgccaaaggcctgcgcaaggcccgccagcaaccgncgagctgngcccttcgccggcgctctacttcaacgccgcatgttcgtgcacgagcccagcatggccaccgtcaaggcgctcctcgacaccctccgtgtgacttcgnccaccccctttcgcggagcaggactttctgaacat

SEQ ID NO: 455945 - DNA, 286 bp, Sorghum bicolor
  unsure (1)..(286): unsure at all n locations
cgtccggtcaagacagtgatggacctggcgctttgcaagatggtcaacactggggagacacggctgcttagtgcgggcattgatgggtatgtgaagagctttgattttgggaagcttaagatgacacactcattgcgatcccctcagccgctcctatctgtggctagctcgccctgtggctctgtggtggtggcaggggtctgcgaaagggaagattatatggaaatatgaagaagaggctgtggttgangaagangaaggagggaatctgttgtggtgagataga

SEQ ID NO: 455946 - DNA, 233 bp, Sorghum bicolor
cgtccgcagatactaactggccaacacaaggtgacatcgatggccttgatcttaaggttaggtgtaggcacagcactcctctagtgttgaagggcatcacattaagcatacatggaggagagaagattggagttgtcgatcgaactgctagtaggaaatcaacactgatccacgcattgttacaatagtggagcctctgaggggagaatagtcattcgatggtgttgacatct

SEQ ID NO: 455947 - DNA, 401 bp, Sorghum bicolor
cgtccgctcttctcgcctgctcccgtgcccccctttctatcccgcggcgccgactcgactccacgagagccgccgactcccaacgcctgctgccccggtctccgtcggcctctccgccggcaacgagcgtccaccaggaggcgggcggccatggccaccttcgagctgtaccggaggtccaccatcggcatgtgcctcaccgagacgctggacgagatggtctccagcggcaccctcagcccggagctcgcaatccaggtcctcgtccagttcgacaaggtggaaatgctcctcgtctaatttttttatctcggtgtgtgtggtttcccaacggccaaatctagtcattgatatttgcccttctgtgctggtcgtctagtccatgacggatgctctggaga

SEQ ID NO: 455948 - DNA, 357 bp, Sorghum bicolor
cgtccgcactgacacttgtatcgagaagggcgctagagctcatgcaccgactggtgcactcgaagcctgggattgtcagcttacatgcattcctgtatctgcatagaatcttttctagacccttactaactgagtgacaaagagagacacatgtgctgtgacctatgagatctagcgtaatgcactggtatcaccaagaactgactgtccagagaagctgcccgacgtgacgaagtcactgctgccatctggtcccaaggaagattcatctctctcggaatttcaagtggagttgattcaacttgcctcacagcttaacggtgatcatgtactgaacacgtacccagatattggcag

SEQ ID NO: 455949 - DNA, 420 bp, Sorghum bicolor
  unsure (1)..(420): unsure at all n locations
cgtccgccgagttccagagtcgagactaccgcccctccgccgccgcctctcgctccctcgcagtcgcagctccggccgccctgttttgcggttgattttgtttcccctcatgggtcgcaccatcaagagggccaagaaggccaaatccaagaaggccaagaagaaaactgaagcgtcctcttcgtccaatcctgcggttgcctctggcccggctaaggtctggcaaccgggtgtagatgcactggaagatggggaggagctgcagtttgatcctgaggcttacaattatctccgaggttttggcattggctggtcttgcttgagttttgatgttgtgcgtgatcaacttggactcgtccgatcagagttccctcatacattctatggtgtgctggaacgcangctgagaaagctcatgga

SEQ ID NO: 455950 - DNA, 442 bp, Sorghum bicolor
cgtccggaccttgctgaatacgatgttttggcaatgttaagctatgtatacaattacacagtccaaaatttcatatgtgggacattcacagggaactatcatgggtctggctgcgtttacaatgcctgaaatagtaaaaatgataagctctgctgtgcttctttgtcccatttcttaccttgatcacatcagtgctagttttgttcttagagcagttgccatgcatcttgaccagatgcttgttgctatgggcatccatcagttgaacttccggagtgatatgggtgtccagattttagattcgctgtgtgatgattaacatttggactgcaacgatctgttatcttcaataacagagcataactgttgtttcaattcatctcggattgactattatttggagtatgaaccccatccgtcattaacaaaaatattgcggcat

SEQ ID NO: 455951 - DNA, 414 bp, Sorghum bicolor
  unsure (1)..(414): unsure at all n locations
cgtccgctcttctgctacctccctccactaccagtgcaccaccaccacaccccactgctgccctcgattacccccaaaccctagcctaagggacacggtggccggcgatggacggcgactgaggaggcgctgcggcggtgcaccaccacacgcgctcccccgaggacgtcttccgcgatttccgcgcgcgccgcgccggcatcgtcaaggcgctcaccacggatgtggagaagttctatcagcagtgcgatccagagaaagagaacttgtgcctttatggtttgccaaatgagacttgngaggtcactcttccagctgaggaagtaccttctgagcttccagaacccgtactgtggatagactntgcacgtgatggaatgatcgaaaaagattggctgtctctagttgcaggtc

SEQ ID NO: 455952 - DNA, 401 bp, Sorghum bicolor
cgtccgagaaaaggtgatgactgccaacccagattgtgccacgttagaacaacaattctcgatgcattacatataatgcatgatggcaaattcttgcatattcctgttattgacaaagatggacagattgctgcttgcctggatgtcctgcaacttacccatgcaactattcaattggttgaaggagggaatggaactgtaaatgatgtcgcaaactcggtaatgcagaggttctgggactctgctcttgcattggagcctccagatgaggaatttgatagccgtagtgaggtatccttactcctgcagtcagaggctggagatgggaagagtagtgtttatccccctgtgattggcaatatattttcctttaagcttcatgatcgaaaaagccgtgtgca

SEQ ID NO: 455953 - DNA, 179 bp, Sorghum bicolor
cgtccgcggacgcgtgggcgcgcagtggacggcggcgggaaggccgtggagcgctcagggtgcgcgggtgcggccggttcggtgcctagtgctcgctgtagcacacgaggtgcctgctgcactcaacagaagtaaagtttgtctactacactcacaccctgttgctgtacctgaacctc

SEQ ID NO: 455954 - DNA, 299 bp, Sorghum bicolor
cgtccgcgctcccggacaagctgcgcggtgagatgctggacctgcagcacgcgggcgttcctcccccgcacgcgcctggtctccgacaccgacatgtccgtcaccaggggctccgacctcgccatcgtcaccgccggcgcgcggcagatcccgggggagacgaggctcaacctgctgcagaggaacgtcgcgctgttcaggaagatcgtgccggcgctggcggagcagtcccccgacgcgctgctgctcgtcgtctccaacacccgcgacgtgctcacgtacgtcgcgtggaagctgtc

SEQ ID NO: 455955 - DNA, 299 bp, Sorghum bicolor
cgtccggcagtttccaaaatatccaagcagaagttgggtcagagaaggtaaatgtacccttattgcacgtaggtgcacacgaaggataggattggatagtagttcaccggtttttttaaggtactcgaatgtggagacgaggagctgatgcagagggttatgctgcaaacttcgttgaatcagagcagatagatgcagtcaaaagggtttacagcatcctatgtacaagttcgaggttctatgccattcttgtgggagcagattgttgatttgacatatatacctagttttgacgttcc

SEQ ID NO: 455956 - DNA, 386 bp, Sorghum bicolor
cgtccgcttgtctgtgcactcaagcttctctcttccttggaaactaggatctccttgaagcatttcagcttttgtctagaggtctttctattggtttaaggcaagtgaagctttagggtgatggcgcaaactagcttgcctcctggttttcgtttccacccaactgatgttgagctcgttttctactacttgaagaggaagattatgggaaagaaacttattgtagacgctatatcagaggttgatctctacaagtttcctccctgggatctccctgataagtcctcccttcgaagcaaagatctggaatggttcttcttttgtcctcgtgacaagaagtatcctaatgatgtctggacaaaccctgccacaccaaatggttactg

SEQ ID NO: 455957 - DNA, 415 bp, Sorghum bicolor
cgtccgattgtagccctggttgcccagaggatatgatccctgcactgagagtactccacaaagtactacaacttacctgaggtgcagaaagctttatatgccaatgtcactggaataccatacccctgggtaacctgcagtgacccagtgtatgatttttggaaagattcgccgagatcaatgcttcctatataccgtgaacttatagctgcaggcttaaggatatgggttttcagcggtgatgctgattctgttgtctccctcaccgcgacaagatactccattgatgccctctttctaccaactgtcacaatctggtattcttggtatgactatgaagaggttggtgggtgtttccaagtgtacaagggattgacacttgtgacgatccgaggtgcaaggcacgagggttccc

SEQ ID NO: 455958 - DNA, 421 bp, Sorghum bicolor
  unsure (1)..(421): unsure at all n locations
cgtccgcgacggtcgcatgactgtcacgcagctcgccgccgccggcttcggcaggggccgtctggtggggccgctggtagtggcggtgctcctgtggctgatgtggcgctccggaagatcttcgttgggaacgtcccggcagacatgccgtccgagcgtctccttgcgcactttgcctcctatggcgagattgaggaggggccgctgggatttgacaagcagacgggcaagttccggggctttgcacttttcgtatacaagacacctgagggtgcgcaggcctccctagtggacacggccgcctgggcgaagccacggcagctgagctcgcagctctggatgccgtcgttcccgggtgcgggcctgctccgcgcgtncgacgacggaccggcggcgggcgcggtgacttgagaggccccca

SEQ ID NO: 455959 - DNA, 415 bp, Sorghum bicolor
  unsure (1)..(415): unsure at all n locations
cgtccgattggagaaaataacattgagacaacaagttgtaatatggtggctggactgatgagaggcgccgtgtccatcgctcttgctgacaacaagttcacaagatctggacacactcagctgcacggcaatgcgataatgatcaccagcacaatcactgtagtcctgtttagcactatggtgtttgggatgatgacgaagccattgatccacctactgctccctgcctcgagcaacacggcccactccgagccttcgtcacccaagtccgtgcactcccctctcctgacgagcatgcagggctccgaccttgaggggccgtctgcgcagattgtcaggccgtccagccttgtgatgctgctcancaagtgcgcccagacggggcactactactggcgcaagttcgatgacccgc

SEQ ID NO: 455960 - DNA, 415 bp, Sorghum bicolor
cgtccggtacaaacacatggatttagcagggatggaattcctgaagctggtgcacagttcgaatagatgtgtttggaggctttgtattgcaaaggattacaaaagaaaaaagctttttcagggcaatagctaatatggatattaagctagattttgttccaccatggttgatcaacttcatatcgaggcagctaataggcagtgggcataagctgtatcaaaaggctgtcagtactgtggccactcatgatgatgactacaggaaagctttgagaggaccactctatgtcaggatccgtgaataccaggattctgatgacaaggcaaaggtgaccgcagcagaggaaaatgctactgaggtgccctctgctaatgccactatacaaaatcatttgcactaacaaataccatatcg

SEQ ID NO: 455961 - DNA, 421 bp, Sorghum bicolor
cgtccgcgaagatactcaaagaacacctgataatggaggtccataccctgggctacccagcaagggatgatgcttatcgcactgctgatccaactcccaggggtgctcaacctttgaaagtgcagccaattgctgtccccactattcctgtagaagaaattagagaggtcacaaaggcttttggcgatgaagctttgattggcgaggggtcttttggcagagtatattttggtgtactagaaaatggtaggagtgctgcgataaaaaagttagattcaagcaagcagccagagcaagagtttttagcacaggtctccatggtgtcaaggcttaagcatgacaatgtcgtagatgtgcttggttgctgtgttgatgggaacacccgcatccttgcttatgaatttgctactatgggttctct

SEQ ID NO: 455962 - DNA, 408 bp, Sorghum bicolor
  unsure (1)..(408): unsure at all n locations
cgtccggcacgagcaatcgatcaccatggccgctggtccccggagtccnccctccttgtgccgccgctcgtgctcctgctcgtcgccgccgccggcgtgctcctcctgccgcagcgcgggtccgcggaggaggagtggaaggtctcgctggagctctactacgagtcgctgtgcccgtactgctcgaggttcatcgtgaaccacctcgcggggatcttcgagggcgggctcatagacgccgtccacctccgaatcatcccctacggcaacgcctgggtctggtccaacagcgagatctagttctagcatggtacgtaccaatgccttcataacaccggggaagtctgcgccaattacacctgagcngnnnngagtgggcattgcagtttcatctactgcgtgagggac

SEQ ID NO: 455963 - DNA, 478 bp, Sorghum bicolor
  unsure (1)..(478): unsure at all n locations
cgtccgaatccggtcgccacgcgtccggtgatgtcagattaccagcccgggatgagatacatctggggcaagaaaaataaccggtatgcagaacttacttattccagtccagctctctggttttctctgaatcctggctgaacacactgcataaaactaacctggaacccttcatgccaacatcttatcatcaggttaggcatccacctgcaacatttgtcaaacaacccaacgttcatcgacgaaagatcagccaagccgccgatatggcggngatcggagatgatctccgacgagcgatactatgagccggtccagtggagaatgtttgcccatgtctgcacagtgccggtgaagtacgaccctctctgggccatgcgccggctcgcgtcgggcgggtacatcgtctccggcgcccagcttcacgtgaaggcccacgactcgaccaacatnctgcaccttaggcctctgtacacgc

SEQ ID NO: 455964 - DNA, 298 bp, Sorghum bicolor
  unsure (1)..(298): unsure at all n locations
cgtccgatgaggagcaggttattgaagggcttgacataacggtggttaatatgnaaaaggagaggttgcattggtcagagtaccacctgaacatgcatttggatctgttgaaacaaagcaagatcttgctattgttcctcctaattctactgtcttttatgaagtggagcttgtttcctttgagaaggagagagaatcttgggacttgaagaccaatactgagaagattgaagctgctgccaagaagaaagatgaagggaatgtgtggtttaagataggcaagtacgccaaggcctct

SEQ ID NO: 455965 - DNA, 415 bp, Sorghum bicolor
cgtccggggagtttaaagcatcagccattgctgattttgtgtctgctaaagcttcctttggttaccacactaactcaagaaacttccgcttccatttttggcaatccaatcaagaagcagattttactatttgctattgcaagcgagtcctccaaatttctgcccatctttaaggaagcagcaaagccatttaagggaaagctattatttgtctttgtggagcgagacaatgaggaagttggtgaaccagttgctgtctactttggtattactggacaagagaccacagttcttgcttacactggcaatgaatatgctaagaaattttttcttgatggggaggtgtcacttgtaggtattgaggactttgctgaaggtttcttggaagacaagcttacaccattctacaagtctg

SEQ ID NO: 455966 - DNA, 497 bp, Sorghum bicolor
cgtccggataatcgttgcaatcaggggaactcaagagaacagtgtacagaattgtaaaagacttgatatggaagcagcttgatctaagttatccaggcatgccaaatgcaaaggtgcacagtggatttttctcctcatataacaatacaattttgcgtctagctatcacaagtgctgtgaacaaggcaagaaaatcatatggagacatcaatgtcatagtgacaggccactcgatgggaggagctatggcttctttttgcgcgctcgatcttgctatgaagctttgaagtgacagtgttcaactcatgactttcgggcagcctcgtgttggcaatgctgcattcgcctcatgctttggcaaatatgtacccaacacaattcgagtgacacacggacatgatatcgtgccacatttgccaccttattttttctttcttcccatctgacataccaccacttccccagagaggtatggtccaggattctgatggcaacat

SEQ ID NO: 455967 - DNA, 332 bp, Sorghum bicolor
  unsure (1)..(332): unsure at all n locations
gcgtccgcattattcatggagatgatccttgtntacaccngatggcactgatgctatgactgatgctaaaccgttcgacgcaagcagcattacttgactacaactgatgtttagagcacttgtataccagggaagtactgaccccaacataaactgaaggtgcatgggagcttcctttttcgagtattagagcatacataaacgagccgatcactccaaggattgttcatgtgagttctgcaggagtgacaagacctgaaagaccagggctagatttaagcgaacagccacctgctgttcgattgaacaaagagcttggctccattttaact

SEQ ID NO: 455968 - DNA, 464 bp, Sorghum bicolor
gacccacgcgtggcaagcgcaaatttgtgacgcaacaggtgggcgagaatgaaccatttgtttctgaacttctgtccaaccttgctacaacaattgctgatcttgagccacatcagattcacacgttttacgaatcagttggccatatgattcaagctgaatctgacaacactaagagggatgaatacctcaagagattgatgagccttcctaatcagaagtgggcagaaataattggacaggcaagccaaagcattgatatcctgaagaaccaagatgttatcagatcagttctcaacatcctacagacaaacacaagtgttgcgagttcccttgggccacacttcttcccacagatttcgctaattttcttggacatgcttacagtctacagaatgtacagcgagcttgtatcaagcacgattgctgaaggaggacccttgcctcaaggacatatttgtaaa

SEQ ID NO: 455969 - DNA, 519 bp, Sorghum bicolor
ccacgcgtccgcgtccccggagaggaaagcgtctctcgctagcgcgttcagtagaaaccctaaaaaaaaccccgcttcctcgcctcgcccgcggagccgcactcccctcgacgggggtaagggctacgtggtcgccgcccgccatggatgcgttccggaagcagctggacgtgctcatgggcgcaaaccgcaacggcgacgtcgaggaggtgaaccgcaactactacgaccgcgacgtctgccgcctcttcctcgcgggcctttgcccccatgacctcttccagctcacgaaaatggatctcggtccttgttctaagattcactcgcttcaactgcggaaagattatgaagaagcgaaagcaaagggaacagagaattttgacagagaactcgaggatatgatagaaaggctcattgtggagtgcgacaggaaaattcagagggccctgaaacggcttgcggatgatgatgccaaggctgctattgcaatatctgtctctgaggttactctgacggaag

SEQ ID NO: 455970 - DNA, 359 bp, Sorghum bicolor
tccggatcatccatggcgtcctcctccaagcggtcgctgccatgcgtggtggtcctcctcctcgctgtagtcttccaccatggctgctcgtcggcgacggcccacagaccgtacgccggcgacatggggagcagcaccgacgacaacagcccgatgatcgagcggttccagcggtggaaggcggcgtacaacaagtcctacgccacggtcgccgaggaccggcggcggttcctggtgtacgcgcgcaacatggcgtacatcgaggccaccaacgccgaggccgaggccgcggggctcacttacgagctcggcgagacggcctacaccgacctcaccaaccaggagttcatggccatgta

SEQ ID NO: 455971 - DNA, 338 bp, Sorghum bicolor
tacgcgccacacagctcaatggcactcgtctccgccttctcgtactccaccaccgacgtcgcggcgctccccaggaatgggcagcagcgcgcgtcgtatacgtccttactgggggggaagacgctgctgaggcaggccaactacgccttccggccgtcgttcgccgtgcgcaccatggcagaccccgacaggcatgatcagttgccggagcgcaccgctgcgtttgtggtcaagtactgccttccgggcgacttcagctttgatccctgaggccctcgatctgacccgcatagcatgagttggacaatgcaggagctggtagaccacaggcggagcat

SEQ ID NO: 455972 - DNA, 346 bp, Sorghum bicolor
tccggttcgaggttgaataggtcaactgctgatttgggacaagaggtttctatttaaacagatttattggatggcagaggctgtttatgatatgttgtctgaaacattaactaaggatgaagtgtacctctttgggaacagtcctaaagatgtagatgctctggttttgggacacgctctttttgtgctcaacgtgttgcctgagacatctgtgttgagggctacactacagaagcatgctaagctggtaaaatatgctgaacatcatttgttcgtcttgctgggggtgccactcccgaagtttctcaagaaccctaccggatgtagcctatgacccgggtgtcat

SEQ ID NO: 455973 - DNA, 470 bp, Sorghum bicolor
acgcgtccggccaagaaagtttggtcatgaaattgagtacttggaaagctaagcaattccaatgtcatggtgccattagcttatgtgttaacagaggacaatgcataccttctctatgagcatgtacacaagggcacagtctttgacttcctccatggtgcaaagtcagatattctggactggccttcacgatatagcattgctttgggggtggcccaagggcttacctttcttcatgggtgcactcagccggttctacttcttgacctgtcaaccaggactatccacttgaagacagtgaatgaacctcagattggtgatattgagctttacaaaattattgatccttctaagagcactgggagcctttcaaccattgctgggacagttggttatattccaccagagtatgcatacacttataggttaacgatggctggcaatgtttatagcttttgaagcattttact

SEQ ID NO: 455974 - DNA, 419 bp, Sorghum bicolor
  unsure (1)..(419): unsure at all n locations
ggccggaatcccgggtcgccacgcgtccgcccacgcgtccggggacccaagggcaacagctatgttcctaatattttgcctgattactgcgattatactatatgtgacaccattccaagtgattgcactctgccttgggttcttctggatgaggcatcctcggtttcgccacaaggtgccgtcagcaccagcaaacttcttcaggaggctacctgcaaagacagattctttgctgtaaagttccttggagagcagctgtcaacgatgtctaatgtacctctttgtgcctgtttttgttacccatatattgttgtataatagccttaagtgagacatatataattgccgcttcatgtgagagaacaaaataagttgatctcattagatgattttcctgcttttngaaaaaaaaaaaaaca

SEQ ID NO: 455975 - DNA, 507 bp, Sorghum bicolor
acgcgtccgtgatgatactctgcctggctgttactattggcttcagagacacaaagcacttggcaaatgcacaagggttggcagtaataactgtcatgcttgttaccacttgcttaatgtcactcgttattgtgctttgctggaacaagagtatcttccttgcccttggtttcctgcttttctttggcacgatcgaagtaatctacttctcagctgcccttgtcaagtttcacgaaggtgcttgggttcctattactctctccttcatatttatggtggtcacgtgtgtctggcactatggcacaataaagaagtacgagttcgatgtgcaaaacaaggtttcagtaaactggctcttaaaccttggtccttcactgggcattgttcgtgttcgaggcattgggctaatacatacagaactaatgtctggaattccagctatcttctcccacttcgtcaccaatctgcctgcgtttcaccaggtactggtattcctctggtcaaatc

SEQ ID NO: 455976 - DNA, 451 bp, Sorghum bicolor
ccacgcgtccggtatacataaatcatgacaagaaatttgcttttgtggagatgagatcagttgaggaagcaagcaatgcaatggccctggatggcattatgtttgaaggggcgcctgtgaaggtcagaaggccaacagattacaacccttcccttgcagctgcactgggcccaagccagccaagccccaatctgaatcttgcagcagttggcctaacagcaggatctactggagggctagaaggtccggaccgtatttttgtgggtggccttccgtattacttcactgaagctcaagttcgggagttgcttgaatcattcggtcctcttcgagggtttgatcttgtgaaggacagggaaaccggtaactcaaaaggctatgcattctggtttaccaggacctcactgcactgacattgttggctgactaaatggatcaagatggtgcaaac

SEQ ID NO: 455977 - DNA, 333 bp, Sorghum bicolor
cgtccgggcggcggcaggctgctacttcaccggacgacgtgaggcttctgggtctcctgaggagagccagcatggacgacgacaataccatcataatgaccttcacgaacaaggcgtggacggcgccggggtcgctcatggacctcttcctcgagagcttccgcgtaggcgtgaggacggagccgctcctgaagcacctggtcatcgtcgccgtcgacggcaaggcgtacgccgggtgcacgcaagtgcacccgttctgctaccacctccgcgccaggggccgccggcgtcgacgactactgcgcgggacagtcgttcatgttcaagagctac

SEQ ID NO: 455978 - DNA, 364 bp, Sorghum bicolor
ctccggagctatgcaggccactatgtccctcaactgtctcgggtagtgtatcgaaacaataaaggaaccgagaatccaaccctaaacttcaaaggtttcatggttggaaatgcggtaactgacgattaccatgactacatgggcacatttgagtactggtggacacatgggctaatatccgatgaaacttatgtgaagttgtggtcgacctgtaaatatgatgcggctcagcacccctccgaggaatgtcaaaagatctatgaagttgcatatgatgagcaaggggatattgatttctatagcttatacacgcctacttgtaagaagacttcattgcttaagcgcaggcaaataagaggaagaa

SEQ ID NO: 455979 - DNA, 190 bp, Sorghum bicolor
  unsure (1)..(190): unsure at all n locations
tccgtcaagggcgacggcctgaacgctgaaatcgccggctccagctgaatcatatacaccgcttgntaaggcaccgacgccataaggaactgcgggaactcatatgtaccgattcttgatgccctcccaatctggatggcggtgtttctagtccaagtgagaccacatggcataaaactcaccctcatga

SEQ ID NO: 455980 - DNA, 487 bp, Sorghum bicolor
  unsure (1)..(487): unsure at all n locations
cgtccgatgtcatttaatccttgcatagttctcatttgttggggagtcggcctttagcttgcaggtttatgatacctgtgatgattttgcctgatttgtaggatgaggacgctttctttgctgactacgccgaggcccacctgaagctttccgaattggggtaagtggtgctgatcggtctctccccgtgatcgaatgcctgtttactactagggcaacaaacactaaatctcttgcactgtgcagatttgctgaggcgtaaggtgaggtgctcataaagaaggggacaggcggngcagggctgggcaggtgcggatgaagattgttgcctagctgatttatcttgtcttgctggctatttggcatctaagaccaatgagaaccagaagagtatggtggtgtaataaacaatcgtcggccttgtgaggcagggcccatcttttgtggtttcccttgaatggttagagtaatgtgatttcctttccgg

SEQ ID NO: 455981 - DNA, 427 bp, Sorghum bicolor
ccacgcgtccggtgagtttcatagacaatagctaacaaccagaaaaaaaaattgtagtttaactttgcaaaaaaaaaaaaaaaaaaaaaaaaaaaagaaaaaaaataaaaaaaaaaaaaaaaaaaaaaaaaaaaaaaaaaaaaaaaaaaaaaaaaaaaaaaaaaaaaaaaaaagggggggccgttttaaagaaacaaagtttacgaacacgggcatgcaacataatattttttttatagggaaacctaaattaaatatattggccgccgtttaaaaaaatcgtgattggaaaaaccctggtttaaccaaattaaatccttttgaagaaaatccccttttacccagttgggataataccaaaaaggcccgaacggatcgcctttcaaaaaaattgcgaaacttaaatgggaaatggaaccccccttta

SEQ ID NO: 455982 - DNA, 248 bp, Sorghum bicolor
ccacgcgtccggagagcactgtgctatcgtctaagaatggagggccaccgaccactacttgtggaattggtgaaccgaggtgctgacacagagctgctcgcatcaaacctagctgaggcttctggaaagggtagaccgctggtgttggatgacatcacccttgctctcaagaatcttgagaaacgaatcttgttggtatgagatatgcaggataatgccgcgcatatctaataccgatcgatcataga

SEQ ID NO: 455983 - DNA, 417 bp, Sorghum bicolor
  unsure (1)..(417): unsure at all n locations
gccacgcgtccggggtgaagcttgggaaggcagcctatcaagagctgactggggtaaagaagccaaagctggatgagcagggcgtgctccactggcctgttcttctgctatacccagaggtcatgtcgagtgacttcattgaggattttccagatacagatactttcttgccccaccttgatgtaatgttctcagaaagttctccaccattgccatgggatgagaaccatgcttacacaagggactcagtcgaattgtattatcaaggtggttttggcaaacctttgtccaaaagtgaagtattaagatatcttctagaaggcactgtagatntgaaggcgcttccagatagcctgcttgatggnggagatgaagaacatgacagtagccaatgtangcactgtacatcaactgatg

SEQ ID NO: 455984 - DNA, 444 bp, Sorghum bicolor
ccgggtcgccacgcgtccgggctgaccactatgggccagcagaggatttgtatggcatgttcatcaacagagttaggcgggagcgcccacctgagtttctcgaagaaatcaaggggcttacaaagtgggtaccaccaccggttaagatgacaagaagttatgtcgaggataacatcaacagatccaggaagaggatggatgttgctgcgttggacatgttgcagttccactggtgggaatactcaaatccaggatacttggatgcactaaagcacatcacagacctgaaggaggaaggcaagataaagactgtggccctgacaaacttcgatacagacagactgcaaataattctagaaaatggaatcccagttgtgagcaaccaggttcaacattctatcgttgatatgcgccctcagcaaagaatggcagagctttgccagc

SEQ ID NO: 455985 - DNA, 514 bp, Sorghum bicolor
  unsure (1)..(514): unsure at all n locations
acgtccgcatcagtagaaagtgacattgttcaaacccgcaaacatgctgataagaggaaacgtagggtggacgagaccacaaaaactgtggtaactattgccagccctgatgtgaacgacggctacacctggaggaagtacggttcgaaacaaatcctgggctcaaactacccaagagactactacaagtgcacgcaacgaagaggctgcccggcgaggaagcacatgcagcgccgtgacggcgagccaatactctacgacgtgtgttactttggagagcacagctgcgatcttcagcaggggcactccagtgagcagggatcagaaacaaatacaatatcaggaggatgggaagcagcanggctaccattatcggtaccacacgcacatggaataagttctgtggaggccatgataagcagcggcagcctcaccgcgcgccccaatccagggtctcctccttgcggccgcgtccatggcacgagccaagtagtgtgagcaaccctgacgacat

SEQ ID NO: 455986 - DNA, 340 bp, Sorghum bicolor
gcctcggtccggagttccacgggacgccacgcgtccgatcgatactgatagctagagtctcatctagagcgacatggtcggcgctaccatggattgcacataccacgcgctcgtcggcaagccggcgaccaccagcaccagggacgtcttcggcgagggccgcatcaccatgcgcaagactgctggcaagcccaagccagcggcgtccggcagcccctggtacggggccgaccgcgtcctgtacctgggtccgttctccggcgagcccccaagctacctgaccggggagttccccggcgactacggctgggacactggccggctgtctgcggaccccgag

SEQ ID NO: 455987 - DNA, 443 bp, Sorghum bicolor
ccacgcgtccgcttaatggcaagcgccctctgtttggcccggaccttcccaagactgaggagattgctgatgttctagacacattccacgttatcgctgagcttcctgctgacaattttggtgcttatatcatttccatggcaacagctccttcggatgtccttgctgttgagctcctccaacgtgagtgtcatgtaagacaccacttagagtagtcccactgtttgagaagttggctgatcttgaggctgccccagctgcattggccagactgttctcaatcgattggtatagacagaggatcaatggcaagcaggaggtcatgattgggtattcagattcaggcaaagatgcgggtcgcctctcagcagcttggcagctatacaaagctcaggaggagctcatcaaggttgctaaggaacttcgtggtgagttgaacatgt

SEQ ID NO: 455988 - DNA, 444 bp, Sorghum bicolor
cgtccgactgaagccagctgaaaagtcatggtagccataggatttgctaccagaacctggtttggatggatacaatgcacaagcgaagagcatacggatcctaacgaacgacaagacgccgacgagtactgtcggtgcttgatggctgatatggtcaccgggtaatgctgaacaaggtataaaacattgctttacacccatgatggagggctcgatgaaactgttgaaagtgcaaccacgtgtccgcgttggacaagggcatggacagctgaagagaatagacatggtgacctccttaataagtatatgtaccttactggacgggttgacatgaaacaaattgagaagaccatacaagatctgattggttccggaatggatcctggaactgagaacaacccatacttgggtttcctttacacataatttcaagaaagagcaaca

SEQ ID NO: 455989 - DNA, 277 bp, Sorghum bicolor
cgtcgcagaattggagggagggagaatttcttccactgttcaaaatgcggatgttgctattcaattgctctgaagaatagtcatgcatgtgttgagagagactatgcatcatgactgtccaatctgcttccagcctcgtctccaggtgagcgaatgatgcttctggtctgtcgtggaggactaccattcacacaaagctctcgacagaagtaaaactgctgatgtactgttgatgcccgatttgctaccagtgctgttgtgacatgtcgaacgcatg

SEQ ID NO: 455990 - DNA, 407 bp, Sorghum bicolor
  unsure (1)..(407): unsure at all n locations
acgcgtacgagcgcgnnnaannnnnnattgtggtcactgcaactgaaggaactcattctgatcaaacaagtgatcaagtgggaatcaatggaagcattaacccatgcatccatccaatgctttcttcagatccaaaatttgatagcagtgccacaccacagcattttcctcataattatgctgcctttgctccaatgatgcagtgcaactgcaaccaagatacctacaggtcattcgtcaatatgtcatccaccttctccagcatgcttgtttccacgttgttgtcaaaccctgccatccatgcagctgccaggctcgcagcatcatactggccagcagctgaaggtaacacacttatcgatccaaatcaagaaaatcctgcagatgatgttcaaggaaggaacata

SEQ ID NO: 455991 - DNA, 504 bp, Sorghum bicolor
gccgggaagacccacgcgtccgaggagaagctgccgggccaccacaaggaccacgacggcgaccaccacacggccgccgtaccggcccccgcgcccgtggtggacgcgcacgctcaccaccaccaggaggaagagcacaagccgcagcacttcccggccccggcgccacccccgcacgtggagacgcacgtccaccagcatgaccacggcgtcgtcgtccagaaggtcgaggacgacgtgaagaccgagaccccacccccagcgccggaggaggagaagaaaggcctgctggacaagatcaaggagaagcttcccggtggccacaagaagcccgaagacgctgccgctgccgcaccggccgtccacgcgccggcgccggcgccgcacgccgaggaggtgagcagcccggatggcaaggagaagaagggcttgctgggcaagatcatggacaagatacccggttaccacaagggcgaagaccacaaggacgccgccggcgagcac

SEQ ID NO: 455992 - DNA, 301 bp, Sorghum bicolor
cgtccggaaaaagtcttcgcgcatcgtattcagagcaattattcaaagttaacatatgatggagttgacttgatgggtgaaaggctagctgaggaggttcgacaaattgttcagagaagaagaaacttgaggaaaatatcttttgttgctcattcgcttggcggtttagtaacaagatatgcattaggaaaattttacgaacctgccatggatgaaacatcttcttgtgacaatgataagccttctgatgaacaaaatgtacctggggggggtaaaatagctggttaaaaaccaatcaatt

SEQ ID NO: 455993 - DNA, 468 bp, Sorghum bicolor
cgtccgcgggcaccaaggccgagctcaagggctgctacaacgacgtcgaccgcatgcgccgctgcctcatcgaccgattcggcttcgacgaggccgacatccgggtcctcaccgacgccgaccgctccgcgccgcagcccacgggggccaacatccgccgcgccctcgcccgcctcgtcggggacgcccgccccggggacttcctcttcttccactacagcgggcacggcacgcggctgcccgccgagacggggcagaacgacgacaccgggtacgatgagtgcatcgtgccctgcgacatgaacctcatcacagatcaggacttcagggaactcgtgcagaaggtccctgagggctgcctgttcaccatcgtctctgactcatgccatagtggtggcctgctggacagtgctaaggagcagataggtaatagcaccaggcagaataagacccagtcccgtgaacctg

SEQ ID NO: 455994 - DNA, 535 bp, Sorghum bicolor
cgtccgctttttttttttttttttttttttttttttttttttttttagcctagcacttgcaaaaggtgccaagtcaataataaaggggttggacaaagttcacatgacattgatagagcacataatatatttcaagattccaggcaactatgctgaaagttgaaaacaaaaacaagatcaacaattttcagccgacatgactttaaagatcagcaaaacacaggtgtcagccacaccagagttgcccatacagattatatactatcgactagaaaccaggacaaagcaccatccttcagagaaggagatgaccgtagtgacttaaacgtagatgttgattcatagcaagtaccttactaccaatctagtgcttcttatccttaagggggccctttggaatctttgataggcacttctcatcgaaaatggcataatacttcttcagttcaatcatagccttctcaccaaaagcatcaaccttgtcctcatatttctcatacagaactggtatagtgtaaagtgccataaagacaat

SEQ ID NO: 455995 - DNA, 510 bp, Sorghum bicolor
cgtccgcatcgtcaaggggatcatgaaggtgccctacaactccctcggcggcggcgccaacgcggtggccacgggcccctccgacggggtgctcgcgggctactccgtcggcagcgccctggccgccgagatcgtcggcaccttcatcctcgtgtacaccgtcttctccgccaccgaccccaagcgcacggcgcgcgactccttcatccccgtacggcgaccgcgcctctcgcgcgcgcgcggctcccctggaccgacctccacgcgcgcctgctttcccctgctacaactacaggtgcaaatgtgttaatcccggccccttgtcgtgcgtgcgtgcaggtgctcgtgccgctgccgattgggttcgcggtgttcgtggttcacctggcgaccattcccatcaccggcaccggcatcaacccggccaggagcctcggcgccgccgtcgtgcacgcagcatggaaagaccatgtaattgagataattaatctctataaccacactcttatt

SEQ ID NO: 455996 - DNA, 259 bp, Sorghum bicolor
cgtccgcttcgcgcgcctcgcggacaggtacggccccatcttctccatccgcctgggctccaagctgggcgtggtggtcagctccccgtccctggcgcgcgaggtgctccgcgagcaggacctcgtcttctccggccgcgacgtccccgacgcggcgcgctccatcttctacggcggcgggcagaacatcgtgtggaaccccgtgggccccacgtggcggctgctccggcgggtgtgcgttcgggagatgcttaacccc

SEQ ID NO: 455997 - DNA, 410 bp, Sorghum bicolor
cgtccggggagtgccagcagcgtcgccctacctgctcctggacagaagactcagatgcttgctctgcctgcaccggatggttcaatgcaggctgttggtggtgacccctttgccgcgtcccttgctgtcccaccaccgtcctatgtgcagatggcagatttggagaagaagcaacaactcttgacgcaggaacaagttatgtggcagcagtaccagagggacggcatgcaagggcaatcgagccttaacaagctcgaccgggcttacaacaatggttttgcccccaacccggccatgccttatgggatgcccacagcatacaacacgaaccccatgccaatggcttacacagggaacactgggtattactaccctacttactgaggaagcctattctttgttcatcctta

SEQ ID NO: 455998 - DNA, 429 bp, Sorghum bicolor
cgtccggacgttcgggacagttttggtagcctgtcaaggcgcagctttgaggtgactatcgctggcctttctggactcaccgtgcatcatagggggaaatctcagagcacggtgcatgaggtctgtgatacggatctcataatccaggagagccgctgggctaatctccctcctgagctcctccgcgatgtgatccggaggctggaggccagtgagagcacctggccaaatcgcaagcatgttgtgtcctgcgctgctgtttgtcgagcatggagggagatgtgccgggagagtgtgctgagcccggagttttgtgggaagcttacattcccagtttctctaaagcagcccgggcctcgagatggaatgattcaatgtttcataaagcgagataaatcaaagtccacatatcatctctacttgtgcctc

SEQ ID NO: 455999 - DNA, 219 bp, Sorghum bicolor
cgtccgaggtaactagctgaagaataccctgatgagtacatgatcacgggtaacacatatgaatagaaaagtgaggtggaagagaagaagagtcagtacgctaagttctggaacgagtttggcaaatcaatcaagctgagtatcattgtagacgcaactaacaggtaccgtcttgcaaagcttattagatttgagagttccaagtcagatggcaaactt

SEQ ID NO: 456000 - DNA, 508 bp, Sorghum bicolor
  unsure (1)..(508): unsure at all n locations
cgtccgcagaggaggaggaggaagaagcgtgccgcaagcggtccggtctcatggcgcccttcgccgtcctccgctcgtcgtctccggtggtggccgccgccgccgccgcgacggcgccgtcgttcagtcgtcgcatgtccagccacgcatctgcactgcgcatcatctccagcaagagccgcgtctcgtgcaggggcagggcatccagcaggtcgctgtccatcaggtgcgagcagcagagcgcgaagcagggcggcggcggcggacccgacgtgtggctgggccgcgcggccatggtcggcttcgcctcctcctctgcttcttccttcctttctttctttctcaccgcctgcaagagcaaatccattccatcctctgctttgctgctggatttgttacaaatccttcctaccatcggcagtcaggcaatctgtaattttacatacngacagcaacatgtgatgaacatactttagcactagtacctttttagagagaattgggaatt

SEQ ID NO: 456001 - DNA, 499 bp, Sorghum bicolor
cgtccgcaagtagtgggcgtaagttattttctcgcctgactcatggctttgatatggttgtcattgatgaggctgctcaggctagtgaagtaggagtcctccctccactggctcttggtgcagctagatgtgtcctggttggtgatccacagcagctccctgctactgttattagcaaagcagctggaactttgctttacagtaggagtcttttcgagaggtttcagcaggctggttgtcctaccattttgttgtcagtgcaatacaggatgcatccccagatccgagaatttccatcgaaatacttctatcaaggtcgccttacagatagtgagagtgttgttcaattacctgatgaagcatattacagagatgcacttatggcaccttatatcttttatgacatgtcacatggccgtgagtctcataggggtgggtcatcttcatatcagaatattcatgaagcgcagtttgcattgcgtttgtatgagcaccttca

SEQ ID NO: 456002 - DNA, 513 bp, Sorghum bicolor
  unsure (1)..(513): unsure at all n locations
cgcgtccggcagagagagagacgtaaagccgccgcttcgtgcgcgtcgacgtcacctcgcccgtcgccaggagccgtctcgccgcctgggggccctagggctcccttccctcgcccggaccgggccggcacccgacggatcgggagagtacggcgactggcggctggggatggccgggaagaagcgcaaggcggaggcggcgcgcctggaggagacggaccgggcgctctacggggcctttcgcggcgccgccaactcgctctcgcagctctacacgctcgccatgggcgcgcagaaggcctccttccacgccggcgaacgccacgccatggaaaaactttatgaatggatccttacgcataacgaaaatcacttgaggctagaacttgctgatgtagcctaccatatgcagggaagcttgcaatcggtccttcatatgtgtctatccaatnngaaaatggaaacctgtgtataaacgtggatatattggcattacatgcatcatgtttagct

SEQ ID NO: 456003 - DNA, 235 bp, Sorghum bicolor
  unsure (1)..(235): unsure at all n locations
gacccacgcgagcgggtggcttctcctccccctccagttcggttcggttcgcattcgacaggttcttctggggttccggttcgngggttagcggaagagatgggggggtctgtacgtcagtacccctacttcctcagcggactctcctgggccaccgacgacaacgcccttcacttcgtcttcagcacctacggctaggacctcgagtccaatatcatcccgcatcgggagacgc

SEQ ID NO: 456004 - DNA, 425 bp, Sorghum bicolor
cgtccgcccacgcgtccgctcaaacataggtccagactccattgcaagaaaacatcttcatggtcgacaggctgatcatacttcattgttcattctgttccctccatggactaactagtgctacatctcaggaattcttcatgaatccatgcagggcttccagagacgccacaacatgctggcatgacacggtggaaatacagatgatgaagaaagaaccatcagacggtggcatattcctcttctacccaagtactagctgtgggcagtgtaccatagagtgtttcgctttcccaggctgtcctctgtatcatcgtcgacatacagtgtaccagatagaaaccttgcaccaagattgctgtcgccgtggacagacctgcctaggagtgcatcctggagacctgttcagacaatccatcgacgac

SEQ ID NO: 456005 - DNA, 384 bp, Sorghum bicolor
  unsure (1)..(384): unsure at all n locations
cgtccgaacgtgtcatcgtgtggttcactttacgcctacatgtcatcaggccgtcaaggttgccaatgtgcagagctacatgggcggtttgaggagatcacattccaagcagatggagagcagtgtgatttgcaggaatctgcaggcagctctgatgatggaggtggccaaacagagcattatgtcaaaagcaaggagtccactcatgtgaatggccttgtacagatgggtagaagagatctttctaatcagctntgcttcagttcatttcaagagcaatcatgttcatctaaccgttacgagaatgacaataaccatcacacaaatgggttcgacatgaagcatgaggtaaagattgccaagtcaaagcacggaaaatggcac

SEQ ID NO: 456006 - DNA, 436 bp, Sorghum bicolor
  unsure (1)..(436): unsure at all n locations
cgtccgatccacgacctgtccaccgtgcagagcggctccgctgtccctaccttgttctaccctgacaaatccatcgccgacatcttcccgccgcacctcgggaagaaggtgatctcggaggtggtggcgacgttcctgctggtgttcgtgacctgcggngcggcgtccatctacggcgaggacaacaagcgcatctcgcagctggggcagtcggtggccggagggctcatcgtcaccgtcatgatctacgccaccggacacatctncggcgcgcacatgaacccagccgtcacgctctccttcgcatgcttccggcatttcccctggattcaggtgccgttctactgggcggcgcaattcacggtggcgatgtgcgcggcgttcgtgctcaaggcggtgctccaccccatcgncgtcatcgggaccaccacgccgt

SEQ ID NO: 456007 - DNA, 493 bp, Sorghum bicolor
cgcgtacgcgaaagcagacgacgagacatgctgactacgctgcacgccatgtcgtcggtggcgagcgcattggacgctctcctatatgacacatgaagagagctgaaagagctcatgtgtcagacaaattatcggagagatgaaaactgtcaaagaattacgagaaagcattggatgtcataaacaagcatcttgaaatttggcctaagttacttgtgcacaagatcaaacaacggctgacaaaaatgactcagtatcgtataagaatgaggaaacttcaactgaaagtgagggagaaggtcatgacaatgcccaggaaacaaacacagcgtgatctccggagattagacaaagcttaaagggctgctcaactagaaaagaatattgaaaatgaattgaaggaacgcctgactaaaggtgtttatggtgacaactacaattattctttcaaagcgtttgatgtttttcttgatatggaaaaaggtgaagtggc

SEQ ID NO: 456008 - DNA, 439 bp, Sorghum bicolor
  unsure (1)..(439): unsure at all n locations
cgtccggnggagtggtggagactactaacaccaatgtgcctgcactctggtttcttacatatagcccttggttgttgggcattgcttttatttggacctcgagtatgccgggcatatggtcaaatgacattttttctgatatacatacttggaggaatctgtggtaatttgagcagtttcgttcacactcctgagataaccgtttgtggcacaggcccagtattttctttaattggagcgtggctggtgtatcagagtcaaaacaagcaagtcattgacaaggacgtttcagaaagcatgttctggcaggctgtgatagctgcagctttgagcttcttattgagcatttttgggagaattgacaactgggcacatcttggggcaaccatttctggacttttctttggttatctgacatgcccaagtgtagaatttgaca

SEQ ID NO: 456009 - DNA, 496 bp, Sorghum bicolor
cgtccggtcgtgctggccgttccgcgatccgccggcggcatccgtcagcagcgccaccgagcccctcttctcgcgttgttgctggtcaatcagtgagctgcagcaatggccgcgggtgctgcgccgaccaatttgcagaaggagcaggaatttttgtcagctgatggttccaagtgatgtttggattggcggagaaagagatggagtatagggttgaccttttcaatcggcttacacatacatgttttgacaagtgcatcgagaagaggcacaaggatgctgagctcaatatgggagagaacagctgcattgaccgatgtgtttctaagtattggcaggtgactaatctagttggacagcttcttggaaatcagcctaaaatgtgaactgagatgaaattttgttcgtggtgtacttctacaattttggttttaggggttgatggattactagttaaactaaggatacatgataaattcaagagagaaattatctc

SEQ ID NO: 456010 - DNA, 499 bp, Sorghum bicolor
  unsure (1)..(499): unsure at all n locations
cgtcncgtggacgacatgcatcagaggaaagccgagatggctcgccagtccgaagcattcatcgctcttccaggggggtacgggacgatggaggagttgctatagatgatcactctgtgccagctcgcaattcatgacaaatcacttgaatttcttaacgttgatggatactactaccttttgaatgttttgctatagatcatgtaaattgacgtacttcttttttctttttatttcttttaaatagatttgcttttatttatctccaatttgttccctttccgtttcttttttttcttcttattataattttatgtacttttcagttttattcattttattattttttttctttccatttattattccgctaatttttcttcatattaattgtcgtattcacttcaatttcatttgaatttctcttatttatcttaattttctcatttaatttatatcttaaatttttcattttttttttattctctttttttttttt

SEQ ID NO: 456011 - DNA, 350 bp, Sorghum bicolor
cgtccgcccatcttcggcggcagcacgggcgggctgctccggaaggcgcatgtggaggagttctacgtgatcacgtggacgtacatgaaggagcatacgttcgagatgcccacacacataacatgcatacttcctaagggcacataccgtgtgcagctgtagcgctacgagcattaccagtggctaaggagaagtacgctcggcatggacaagatgaaatacatcaatgcattaggggagctactgaattcagtgagaagtctcagaatgatgatggctgatggtcagtacttttatacatgaccatagaaaggtttcaatttgacacatctaagccttattggattgct

SEQ ID NO: 456012 - DNA, 232 bp, Sorghum bicolor
cgtccgcttgtccgacgtacttggcgcacagctcgacgccaagggcactggagagaacgcggtgagggcactcgctgaggcgacactgaaggtcgacatcaacggattccgtcgcataggtcggaacttcctgcggagctggcacaagcgcgaggactatacagtcgacgtcgtcagagtcaacgacactacatgcgtcaaggacgctgatgactttctgaaggacgacttt

SEQ ID NO: 456013 - DNA, 483 bp, Sorghum bicolor
cgtccgctcagggatggtggatgacgagttccttcagagattgagcatagagaagggcacgagaaaggtcataaaccatgaggagaggggacgggtcttgcgtgccatggatgggtgcagctacaaggctgcagctggaggctccctgcccaactcgctcgtggcgctggcaaggcttggtagtagccagtctgctggctaccctgagcttaaaattgctatggccggtagtgtgggcagtgacccactaggtagtttctacagggcgaagttgcgccgtgctaatgtgcacttcttgtctaagccagtcaaagatggaacaactggaactgtaattgttctaacaacgccggacgcacagcgaactatgcttgcgtatcagggtacttcgtcaactctgagttacgattcagacttggccaagttagtgtctaaatcaaatgtactaattgtggaagggtatctatttgagctgcctcatac

SEQ ID NO: 456014 - DNA, 508 bp, Sorghum bicolor
  unsure (1)..(508): unsure at all n locations
cgtccggttccagatggcgatactcgctttaaatgttctcctcccatacgtgatgacacatacagagaaaatctttggaaagctctacttgatggacacatagacatgctaagttcagaccactcaccatcaactcctgatctcaaactaatggaggaaggcaactttttaaaggcatggngaggcatatcatcattgcagtttgtcctccccgtaacatggtcatatgggcgaaagtaccgcattactctgaatcagctatcctcatggtggagcgaaaagccagccaagcttgcaggccaaaagaacaagggagctattctaccaggataccatgctgacatagtagtatggaaacccgaaactgagttccaactcgatgacagccatgttatatatcataaacatcagaatattncggcgtatctaggaaagcaactttctggtaaggtcctgtcaacttttgtgagagggaaacctgtgtttgctgaagacaagcatgcaaatg

SEQ ID NO: 456015 - DNA, 358 bp, Sorghum bicolor
  unsure (1)..(358): unsure at all n locations
acgcgtccgctctcgcacggtgtataatgtgtaaaaaggtcctcctcccatccttaacgacaaaaccggataaaatctttggaagcctctactggagggacacatagacatgctaagttaaaaccactcacaatcaactcctgatctcaaactaaatgaggaaggcaactttttaagggcatggggaggcatatcatcattgcagttcgtcctcccggaacatggtcatatgggnaaagtacggcattactctgaatcagctatcctcatggtggagcgnaaagccagccaagcttgcaggccgaaagaacatggtagctattcttccaagataccatgctgacatagtattatggaa

SEQ ID NO: 456016 - DNA, 340 bp, Sorghum bicolor
cgtccgaaggtttttaatgatgcaattgaagcactgagggtctcttacaagaaaatgaacccattttgtgttccttttgcaactacgaatatgggctctgcaatccttgcaatggatctgggatggatgggaccaaactattctatttccacagcttgtgctaccagtaacttctgtattcttaatgcagcaaaccacatcagaagaggtgaagctgacgttatgctctgtggtggttctgatgcacctcttatcccaatcggattgggaggttttgtggcctgcacagcactttcacagaggaacagtgacccaacgaaagcttatcgcccttgggaca

SEQ ID NO: 456017 - DNA, 200 bp, Sorghum bicolor
  unsure (1)..(200): unsure at all n locations
cgtccgggctcagatacacccagcagctagctagcacagatagcgacgacgacgccgncgacgacgacgacatggcggggttggggaagaacgggacggggggcgccggcgaccacggcagcgcctacgacatcacgggggcgccgcagcggctggagagcatctccctcgttacggcagacatcgacagcattctttct

SEQ ID NO: 456018 - DNA, 494 bp, Sorghum bicolor
  unsure (1)..(494): unsure at all n locations
cgtccgggctttcctctacctcgccgggttcttgtccgactcatccggtggtgccagtgtgctcacagagacggagaagaccaccgtcctcaagctacaggttggcttgctgggcatggcacggtcatttcagaaggagcttgatcaaatagctgagaaagcagatacatctaccccggctggcttgagctatgtgttgacagagacaacattggcattacttcggcatccggattgttgtatctcagcttactcatcggtggatgtgaaacgaagcatggatgatggtgagaaacgtttcaatcagctttcaattgaggagaggggcaagtttgatgaagagacactngtgaacgtgaacagcatcaagaggaataaaggaggcagccaaagatcaagtggttttagcaacgagtacattgtgataaccatattgggtgctgctgagggagtacataagcttgcaggtataaatagcagcaatgacttaaaga

SEQ ID NO: 456019 - DNA, 366 bp, Sorghum bicolor
  unsure (1)..(366): unsure at all n locations
cgtccgcggacgcgtgggattntgagaaactaggttcaaaatcttttgcagtttattctatcgcagagactgatgcagataacacggcctggatcgtgaaaagaacataccggaattttgaacgtcatcatcgacagctgaaggagatacctaattattcattacatcatcctccaaagagttctttttcatctagtgttgataaacaccttgtgcaccacctatgcattcttcttgacatatatatttataatctcttgtctatagctaatattgcagaacagcatgaagtttatgatttactgagtgcatactgaaagaattactccgctagaaagatcacctctgttataaaaacctcagctg

SEQ ID NO: 456020 - DNA, 317 bp, Sorghum bicolor
cgtccgaccatatccagtgcatcaccactcacgagctcttctccatccagattaacaggccatcatcgcctttgtttctgatcccaaatcatttacggcgcaagtgccttctgttccaaaccccagtcccacagcaatggcgtgcgagaacggccgcgttgctgctaccaacggcgacggcctgtgcatggcgacgccccgcgccgacccgcttaactgggggaaggccgcggaggagctgatgggcagccacctcgacgaggtgaagcggatggtggccgagtaccgtcagcccttggtgaagatcgagggcgcca

SEQ ID NO: 456021 - DNA, 363 bp, Sorghum bicolor
  unsure (1)..(363): unsure at all n locations
ttccggtcgaccacgcgtccgcttatgatttcagttcctgcaattttggatcgtatcagagatgcagtgtttaagaaagttggtgagaagggtggcctgacaaaaaagctgtttgattttgcatataagcgaaaccttgcagcaattgaggggagttggtttggatcttgngcaccggagaggatgatatgttgtggcaattgtgcgagaattatgtgctcaaaccgtagccgacgaggaagaagccctcgtacgagttgtaaagcttgcataagttaattccatgctttgttttcgtgggtgcaagtttggtttctcggactctgtattaacagaaatgcaagctcgtgtcatttttgaagc

SEQ ID NO: 456022 - DNA, 516 bp, Sorghum bicolor
cgtccgcagcttcagcagatcttcaagcaagtgggagtcgtcgccgttgttggtgctttgtctcgcaaccttgcttatctacaagatcatcaaggatacttagcaaatatctatgattacccatcactcatcttgaaggatcccgtcatagaacaaataaatcattcagtacagaaactcacacactccacaagctttctgcaatttttagggcaacatgcacttatcgttccggaggatatgcagagtggctcagatctcgatgatgacaaggattaccatttcctgtcactgctgctaaacttagtaaacacgtttctgtacatggttaacacatacatcatcgttccaactgctgatgactattcagtgagcctcggagctgcagcgactgtttgcggtgtgattatcggatcaatggcagtcgcccaaatcttctcctcagtataattcagtgcctggtcgaacaaatcgtacttcagacccctggtatttagcagcattatgctatttctg

SEQ ID NO: 456023 - DNA, 234 bp, Sorghum bicolor
cgtccgcttatactaccaatgctcaattctggagctacctagcgcttaacagagcactaagttgtatgccatccatggattcacgatcagtggagtaggttctgaccggccactggatccagctaacttatcatgcatgaagcaatcctctgcaatgaataagtcgaagaaaatggctctacgagtaatacctgagagcctattacaagaggaatttgtggggtttaaggacat

SEQ ID NO: 456024 - DNA, 308 bp, Sorghum bicolor
cgtccgcgtgcatgcatgctttgatgctccttggcggattggccgtaccttgtaccatcaaggcggtcatcgagctcggcatcatggaccttctcctcgccgcggaccgcgccatgaccgcggaggagctcacggcaaggttgccatgtcctgctgctgctactgctgctgctatggtcgaccgcatgctccgcttcctagcttcgcacggcgtggtcaggtgcgccgccgccaccaaggagtcgtaggagctgagctccgatggtggcaagagctcgcggcgctactcggcggagccggtgtgcagg

SEQ ID NO: 456025 - DNA, 263 bp, Sorghum bicolor
cgtccgagtttaccggtgcacctatgatggacaggacgtcgcagtgaagcttctggactggggagaagatggctttgccaccgaagctgaagctgcggcgttacgaacatcattcaagaccgaggttgctgtttggcataagctcaaccaccctaacgttacaaagtttgcgggtgcatttatggtgaccacagaccttaacattgcaacaaacaattgcaatggtggcgcacatacaaatcttcctgcgagagcatgttgcg

SEQ ID NO: 456026 - DNA, 164 bp, Sorghum bicolor
acgcgtccgcactgtcactgcaaacgaatgggctgatgctttagaggcctccgttgctgctgtgagcaaatatggtggtgtcagcgcaggataccgtacactgttgtatgccctaactcctgcttctggtgcgctgatacacagacttgagggtggggatgata

SEQ ID NO: 456027 - DNA, 333 bp, Sorghum bicolor
cgtccgctgcagaggcctgtaccactaggagtacgcgcacaagaaaatggaccgtgcctactaggtgcatgaactgcgtgcgggccttaccaaaaagatgcgccctcattggccaggacgacatctacctcctagccatgcaacggctgttcaaccaccagccgaactggccggcaacaccggtggacatggcgctcgactactttatctacgactactagttcacggagccgacgcgcgtgactaagcctctaaacacgcagccgacgcccaccaacgccgacttcggtgaggacaactacttcgtctgggaccagcgtgggttcgagatca

SEQ ID NO: 456028 - DNA, 306 bp, Sorghum bicolor
cgtccgaacatatgccctagtccaagtcgaatctccgcgcagaccataaaggccgctgcctacgcggttcagaactggccgcggagcggcgaaatatccccacatgatccaggacacatctatatcttagctcatgcaacggctgttcaaccaccatctcaacgggtccggaacgccggtggacatggcattggactactttatctacgactacgagttcacggagccgacgcgcgtgacgagcctgctaaacacgcagtcgacgcccaccaacgccgacttcgtcgaggacaactacttcttcgc

SEQ ID NO: 456029 - DNA, 436 bp, Sorghum bicolor
  unsure (1)..(436): unsure at all n locations
cgtccggtgaacagccccgtgacggtttgcggtgacatccatgggcagttccatgacctgatgaaactcttcgcgacggnggggcacgtgccggagacgaactatattttcatgggtgattttgtggaccgtggcttcaacagtctggaggttttcaccatcttattgctactaaaagcgaggtatcctgcacacataacccttctgcgtggaaatcatgaaagtaggcagttgacacaggtttacggtttttacgatgagtgtcagaggaagtatggcaacgccaatgcatggcggtactgcactgatgtatttgattaccttacactatcagcaatcattaatggccaagtcctctgtgttcatggtggtctttctcccgatgtacgtactattgatcagatacaaacgattgatcgcaattgtgaaattccca

SEQ ID NO: 456030 - DNA, 395 bp, Sorghum bicolor
  unsure (1)..(395): unsure at all n locations
cgtccgtgcaaactcagtgtatcattgatcatcaagctcttcctcgcctcctgaatctattgacacagaaccacaagaaaagcattaagaaagaggcatgctggacgatttcaaatattactgctggaaacaaagatcagatacaggctgtcataagtgctggcattatcgctcctttgttgcaactgctccaaacagcagagtttgatatcaagaaggaggctgcttgngccatctcaaatgctacctctggtggttcccatgagcaaatcaagtacttggtggcagagggctgcatcaagccattgtgcgaccttcttgtttgccctgatccaagaattgtaacagtttgtcttgagggtcttgagaatattcttaaagtgggggagtatgac

SEQ ID NO: 456031 - DNA, 492 bp, Sorghum bicolor
  unsure (1)..(492): unsure at all n locations
cgtccgcgggaagcactaatagcagtgctctctacaaagttgatcatgaagcggattgtctggattatgagatcctgtgggaagacctcgtcattggagaacaaataggtcaaggctcttgtgggacagtataccatgctttgtggtatggttcggatgtggctgttaaagttttctccaagcaagaatattcagaagaagtgatactgacctttcgacaagaggtatcccttatgaagaaactacgccatcctaacatactgctcttcatgggtgcggttacatctccacaacgcctttgtattgtaacagagtatctccctcgtggaagcttgtttcgcttacttcaaaagagtgctaccaagttggatgtgagacgacgtgttcacatggctttagatattgcaaggngcatgnaatatcttcaccattccagcccacctatcattcatcgangattaaaatcatctaatctgttggttgacaggaact

SEQ ID NO: 456032 - DNA, 147 bp, Sorghum bicolor
  unsure (1)..(147): unsure at all n locations
taccgtccgtnatcccggtcgacccacgcgtccgcccacgcgtccggngatgctcagccattcgtgtcaatgatgctgagaagactgtagcgattggagaccatgtgctgagcgaaggtgagtggctatcgctgaatggatcaactg

SEQ ID NO: 456033 - DNA, 293 bp, Sorghum bicolor
cgtccgctcagagatgttaaatctccaaccagttgtcaagcattctgttccaacctgtacagacgcaaagaatcttatggaagcagggaaagtcaggatggctgagggaacattgaatgaggcatatgcattgttttcagaagccttttcactgcttcaacagataactggacccatgcacaaggatgctgcaaattgttgccggtaccttgctatggttttgtaccatgctggtgatacagccggagcaattgtgcagcaacatagggaactcattataaatgagagatgtc

SEQ ID NO: 456034 - DNA, 145 bp, Sorghum bicolor
cgtccggacgcgctgggcctcatctttcgcaacctgccgctgcaggagatgctcaccgtcgtgccgcgggtgtgcaagtcctgggggcgggtggtcgcccgcccctactgctggcatgggatccacatctacgagtggagccagc

SEQ ID NO: 456035 - DNA, 322 bp, Sorghum bicolor
cgtccgcccacgcgtacgccgatctgaggttgttgggaattcaattgcattttcactaggactagcaacaaccttagctattcttggtgttgctgcttcttttgctggaaaggcttatggtcaggtaggtcaagggctcccggtggctgcttctggtttggccatcatcatgggattgaaccttctggaggtacttgagttgcaacttccctcatttttcagtgattttgaccctcgagctgctgcagctaacctcccttcaggtgtacaagcataccttgctggtcttacatttgcattggcagcatcaccttgcagcaca

SEQ ID NO: 456036 - DNA, 416 bp, Sorghum bicolor
  unsure (1)..(416): unsure at all n locations
cgtccgacctgatgggcgtttctggtggcttgctctccaccatgaaccacaaccttgcttacaatttgacatggagaaaattaactgatccaactcgcatgtcatccaattccgtacaggaggaattaggacatagccttttgtcctctataaagtacgcatacaaggttgaccaaagggactcaagcataagacctacacgtggatatgcttttctgtcgtcttctcaagttggaggccttgcaccagggagcaaatattcacgatttcttaggcaggaatttgatgttcgtgtggctttgcctctgggtgtgctgaatggcgctctcaatgccggagtggctgcnggagtcattcatccattggaaaggggatccacangatctgtctcaccacttttagaaagatttacttgg

SEQ ID NO: 456037 - DNA, 293 bp, Sorghum bicolor
cgtccgtgctcttgaaagcgagtcagactccgacagcgaatcactctacgaggtagagggagttccatatgagcgaggcaacaaatctgtagaaacaaagcgaataagaaggatggtgtccaacagggagtctgcgcgacggtctatgcggagaaagcaggcacaattgtcagaacttgagtcacaggttgaacgacttaaaggtgaaaatgcaactctgttccagcgactttcagaagccaaccagcagttcagtactgcagtcacagacaacagaatcctcaaagtcgatg

SEQ ID NO: 456038 - DNA, 308 bp, Sorghum bicolor
  unsure (1)..(308): unsure at all n locations
cgtccgncaccacatcacaccacggtggctgaaccacgtcgggcataatcttgtattggattcagacattctactcctacatgttgaggagcgtaaatacgccacggtagggcttgatcactggcagaaagctagctatgtgcccacatcgtcagacagcatgctggctcgcttcatgaactgtttcaaacaattctccaagaatcagatcggacgggcaaccccacacatcgatcagctgtcaccaacacctaccaaggatcagctcatggagaggtactggtcacacgcggcgcagtgcacgagct

SEQ ID NO: 456039 - DNA, 564 bp, Sorghum bicolor
cgtccggcaagctggaacagcttttgtggactatgagttccttggagagatcaatacaggcaagctatctgcaacgatggtgaacaagttctcgtgtatagcactagctggagtcgcaacagagtatcttctgtacggacttgcagaaggaggattagctgacatcaataagcttgatggattgctcaagagtttgggtttcacccaaaagaaagctgattcacaggtgaggtgggctgtgctgaacactgtcctcatactgcgtcgccatgaaaaagctagatcgcagcttgcagaggcaatgtctacaggcaagtcagtgggctcttgcatccaagtcatagaagagtgtataagcactgacgatatttaacgcggatgaagttaacagttcacactaatgttcctattatcaacaacagatcaagggtaagcaaggaatgtattctacatgttagtgtgtttggatatgcttaaattcagattccaggtggaattaggcgagaatcccacccaaacgtctcgattagtttttatttcctgactgcatgctgagaaaatcat

SEQ ID NO: 456040 - DNA, 519 bp, Sorghum bicolor
cgtccggaccatttacctgagtgctctgctctcgctggagcccgtggtgcacgctcatggaggccgccattcccaatcccagtgccctgaaaacaaggatcgccgtggtcaccggcgggaacaaagggatcgggctagaggtttgccggcagctggccggcgacggcgccaccgtcgtcttaacagccagggacgagacgaggggcgcagccgctgcagagaagctcagggaagcagggctctccaatgttattttccatcagctggagattactgatgctccgagcatcgctcggttgtttgagttcctcaagactcgttttgggaagctagacatactgataaataatgccgcaattggtgctgttgagtacgtccaagatcctgccgacagtccagctagcgaggaaaagttcagtggcatggatcagggccaaaggcttgaatgcatgtttaaaggtgtccgggagacctacgactctgcaagagaaggtgtgaagaccaacttctattgcgtat

SEQ ID NO: 456041 - DNA, 457 bp, Sorghum bicolor
cgtccgggacgtcggcaacaacaactacctccagggggcaaccgtcggcagggccaacagcccctacaacggcgtcgacttcccgggctccgtccccaccggaaggttcagcaacggctacaacatcgccgactacgtcgcaaagaacatgggattcgcgtgtagccctcctccttatctgtcgatggtgcagagctcatccggccctctggtccagaccgctctcaccagtggtatcaactatgcttctggaggagctgggatccttgactccaccaacgccggaagcaccatcccgttgtcgaaggaggtgaagtacttcggcgccaccaaggccaagatggtcgccgcagtgggacccaacacggcgaacccagcaatctctcagtccatcttcctcatcggcatgggcaacaacgacccttacgtcttcgcggcatcggagcgggcgcggaac

SEQ ID NO: 456042 - DNA, 470 bp, Sorghum bicolor
cgtccgctgaatgtggcaaaaccagtaaagggttcgacagtggcgattttcggtcttggtgctgtgggccttgctgctatggaaggtgctagactggctggagcatcaagaatcttcggtgtggacatcaacccagcaaaatacgagcaagctaagaaatttggctgcactgatttcgttaaccctaaggaccacgacaagccagtgcaagaggtactgattgagctgaccaatggtggtgtcgaccgcagcgtggagtgcaccggcaacgtgaacgccatgatatctgccttcgaatgtgttcacgacggatggggggtgtcgccgtgctggttgatgtgccacacaaggagggacagttcaagacccaccccatgaacttcctcaacgagaagactctcaaggggaccttcttcggcaactacaagccccgcactgaccttgccaatgtcgtcgagatgtacatgaag

SEQ ID NO: 456043 - DNA, 392 bp, Sorghum bicolor
cgtccggcgacccaaaccctcctcttgcctcccacgccaccgccgccgccgccggatcacgcgatggccgacccgcggctgtaccctacggggtccgggtccgacgaccgccgcgacgccgcctaccccggctccgagcgccgcctctacaacccgtaccaggacctcaacctcccctaccggcagctctacgaccttcccacctccccggagttcctcttccaggaggaggccgtcgcgcagcgccggtcctggggcgagaacctcacctactacacgggcgtcggctacctcggcggcgccgtggccggcgccgcgatggggctctgcgacgccgcctcgctagctgaggcgggggagcccgccatgagtcgtgccaacggtgtactcaa

SEQ ID NO: 456044 - DNA, 400 bp, Sorghum bicolor
tttttggtgcaaaatagattcttccatagtacgattagctcattaacaaagctaagcttaaatagttgggcgactggaaagtaccaaacagacgatatagctcacgacttcaaaaacttgacaacattacaatttttgccaaataagactgcctagaccttcaacattgaagaggctgtactcgctggacgcgggctctatcatccactccctctgcttctcgcccaaccgctactggctctgggctgcaacacaggactctgtcaagatctgggaccttgagtcgaagcacgttatgcttgacctcaagcccgacattcagatctccaagaaccagatcctgtactgcttcaagcttgagctggatcgcggttggaagcaccctttacactggttacac

SEQ ID NO: 456045 - DNA, 535 bp, Sorghum bicolor
  unsure (1)..(535): unsure at all n locations
cgtccgtccattttgggcagaaacacaacaaggaatatttgatgctgtattgaaaggtgtcattgattttgattctgatccgtggcctgtcatatctgatagtgcaaaagatcttataagacgaatgctgaatcctcgtgctgccgagcgcttaacagcacacgaagttctatgccatccatggattcgtgatcatggagtagctcctgaccgtccactggatccagctgtcttatctcgcattaagcaattctctgcaatgaataagttgaagaaaatggctttacgagtaatagctgagagcctatcagaagaggaaattgcggggttgaaggaaatgttccagaccatggacactgataacagtggcgcaattacttatgatgagctaaaagaaggattgagaaaatatggctccacactgaaggacactgagattcggatcttatggacgcagctgatattgacaacagtggaacaatngactacatagaattcattgctgcaactttgcatctcaataagcttggacgtg

SEQ ID NO: 456046 - DNA, 563 bp, Sorghum bicolor
cgtccggcccaaactcccacaccgccgcgaaccacgcatggccgccacagccgccgccacggccgccgccgcgacgacctccacgccatccacccccctcctccgccgcgccgctgcggcgccgaccacaagccaccactaccagctcaggtgctccaccaagccctcgcagttcgtgctgcggcaccgcgccgcgcgagtcgctcccgcgcgagctctgctccctgaccgcgtcacgccgttttccttcgacgcggacggcgacgaccatccccgagaggagtgcggcgtgttcggagtcattggcgacccggacgcgtcgtcgctgtgctacctcggcctgcagaagctgcagcaccgcggggaggagggcgctggcatcgttgcgtcggacgccgacggcaagctcaattcagtgacggacctgggtctctgtcgggacgttttccgcgacccggcgcgcctcgccaagctccccggaaacgccgccatcgggcacgtgcgctactcaacggccggcgcctctttcaggcgcaacgtgcagccgttccttgccgcgtaca

SEQ ID NO: 456047 - DNA, 499 bp, Sorghum bicolor
cgtccgatagactttggtttgtctgactttgttaaaccagatgaaagacttaatgacattgttggaagtgcatattatgttgctcctgaagttctccatcgatcttacagcactgaggcagatatgtggagcattggagtaattgcatatattttgctttgtggaagccgccctttctgggcacgaaccgagtcaggaatttttcgagctgttctaaaagccgagcctagctttgatgaaatcccatggcctaccctttctgctgaagcgaaagactttgtaagaaggctactcaataaggattaccggaagcggatgactgctgcacaagccctctgccatccatggatccgtggcacacaggaagttaagattaatctagacatgataatctacaggcttatgagggcgtacttaagttcatcttctctaaggaagtcggctttgagggctcttgcaaagacactgacgacagatcaaatcttctacctaagaagag

SEQ ID NO: 456048 - DNA, 528 bp, Sorghum bicolor
  unsure (1)..(528): unsure at all n locations
cgtccgattttgcattccagttgcaccatcttcctgacgagagtgtttcaattatgaatgaaagggaccagctcctccgtatggtgaagggactccatccaaagctagtgaccctggttgagcaagatgccaatactaatactgcaccgtttctgccaaggttccgtgaagtctatgattactactctgcgctttttgattctttagatgcaacacttccaagggagagcccggatagaatgaatgtggagaggcaatgtcttgcacgagaaattgttaacatcttggcttgtgaaggtcctgatcgtgtggagaggtacgaagttgctgggaaatggagagcaagaatgacaatggccggtttcataccatgcgcatttaacagcaatgtcatcagtggaataaagtcgacactgaaatcatattgtgataggtacaagttccacgaggatcatggcgggcttcaacttggttgggggngggagactctcattgtctcctctgcatggcagtagagaattagagctc

SEQ ID NO: 456049 - DNA, 551 bp, Sorghum bicolor
cgtccgactagttctaaactgcgagaggacgaggaggacctggaggtgaagctcaggcgcatcatggagaatgtccctgtgcgtgtcagtaacacatcagggtcctctgctggctctggctctggtgatttccaccagtatcggcaaatgcggaggagagagcaggaccggctagctcgaatggatgctgactaccagaagagaaaagagatggctgagtttgaactgcggagggaggagaggatcaaagctgctgaggagcggacagccaagaagcgcctgaaacggcaaaagaagaagcagcgtaagaaagagaagcgagctaaaactggtaataatggtggtgaagatcctaacagagtggattcgtctgatgatgatgaaggttcagatgacgatgacaagtccaagcaatgacacgccaatttgcatctgaagatgatttctcactctggttgtctgggcaatgaactaacgcctgtaatgcagttgtaacaagctgaatctggtgctgtatctgttagaagtgtcatttgagcagagatggagag

SEQ ID NO: 456050 - DNA, 488 bp, Sorghum bicolor
cgtccgctatcgctgggaagctatacgctaacgctgtagctacaccagaatctgtgaaaaatattctatgccagtgttatcatgacacatctgcagcgacagatgagctaggtcagattattctacagcctgctcttgatcctcgagcaccggatgacttacttgcgttcatttgatactgtggaggacctgtacctgaagaggggcaccataggttaagcgtgcacttttggtagccaggggggagaacgacacattgaagcctgttgagctctgcagagcttatgcatctttggatacaagctaagatgtggctgctatgccagatgtggcacactgtcctccggatgaagcaacctgccttgtatgtacacttgtctaatgattaggccaggcccatacttactacatgggtgagtatttctctatgtgtatgaatgccctgtcccagtgcggactcaatctgctggaacatgggtatgctcggc

SEQ ID NO: 456051 - DNA, 460 bp, Sorghum bicolor
cgtccggaagactgtatctcaattggcatctggaaaacaacctgttggtacaatggcttacatgggcaatgtacaatatctgatgcaatgcaaatgtgctgttaacacagccgaagattggcttaaccctgttgccatacaagaggcatttgaagccagggctctcaggatggcagtaaactgtgcccagaacataggccaagcagcaagccaagaagaaggtttctctgagcggtccccagatttgctagaggctgcagtagctcacatccagttgatcattgtaaccaagttcattgcaaaggtacagcaggacattcctggacatggagtgaaggaacagctccagaacctttgcaatgtttatgccctctacattcttcacaagcacctgggcgacttcctggcaactgggtgcatcacaaccgagcaagggagcgttggcaaatgaagcaacttg

SEQ ID NO: 456052 - DNA, 568 bp, Sorghum bicolor
cgtccgttcttggtggtttatgccggttaacatagggatcacgttcattattggtggcactctgggttggatagcatgcaacatcttgaagccaccacagcactttaggggattgatcatggccttctgctcagcagggaaccttggaaacctgctactgataattgtcccggctgtatgcgacgaagacgggagcccctttgggaaagatccaagcatttgccgctcacgtggtctctcctactcgtccttgtccatggctctgggtggcatttacatatggacacacacgtacagcctcatgcagaagtcaggcaagctgtatcacaagatgcattccaaaagcatccaatgcccagccgacagcgacgaggagcattcatctgactaccctgacgaggaggcacctcttccgacgtcagttaagcctggcgatcacgagcacggtgaagaaaaccaaatggaggcccctctcttgtcctgtgagagcgaggtcgctgacaaggtgttctggacgaatctgaaggacgctgtccaccagttcatcgaggagctgatggcgccaccc

SEQ ID NO: 456053 - DNA, 557 bp, Sorghum bicolor
cgtccgcacagggtctacagaatgaggagttttccccaagccagctaagtaaaatgtttggatctcatgcaacgatgatggcaaacacccttcgcacaccaatcattgtatttacacagaccggctccatggctgtcctcctgagccactatcggccctcgtctacactatttgcatttacaaacgaggaacgagtgaagcaacggctggcactctaccagggggtcatccctattcacatgcagttctctgacgacgcagaagaaactttctccagagcaattagcagcttgctgaaagcacaatatgtgaagaagggagactacgtcactcttgttcagagcggagtgacttccatctggagagaggaatctactcaccacatccaagtgaggaaagttcaggtctgatgtgccggtgggaattggtcgtcggagaaattttgatggcgccgctagaagtgttatcatcatcaaatgcgagtaattttaatgttttaccaggagattgccacgtcgaagtatatgtgtgtcgaattcacgtgtagactctgaatc

SEQ ID NO: 456054 - DNA, 514 bp, Sorghum bicolor
cgtccgcacagatcacgcgcgactgaccggccgagagcgcacggcgagctagaactagaatggtcatcacagccggcgccgtatgcgccgtaaagctgaaactactagccgcgtggccgagcccataggtgaaccacgtgcacgtagcgctgcacctaaagggcctcgagtaccagaacgtgcaggaggacctcacaaacaagagcgaccagctactaccctgcaaccgcgcacacacgaaggagcccgggctccttcacggctacacgaccgtctccgagttactcgtgatcacggagaacctcgacaacgcctttgccgaggcccgccaagccttcctcgccgcggactcctatgaacactctgtcggtctcttctgggccggctacgtggatagtaagttgtacaaggatgatggtgaaggcgatcctggaggcaacagaggaagagagggcggcggctacagctgacgcgttggcagctatggaaacgctgaaaggagcgtttgccgagt

SEQ ID NO: 456055 - DNA, 566 bp, Sorghum bicolor
  unsure (1)..(566): unsure at all n locations
cgtccgcgcgcggctgcagcaaccttcgtcgccgccgacgacgaccgtcggaacccttctccgttcccctgcggctggcccttcccctcgtcctctgcactgcagtggctgaagaggcaggagtgagggcttgatcagagatgaatgccccagatcgctatgagcgctttgtcgtgcctgagggcaccaagaaggtgtcatatgagagggacacaaagatcgtgaatgcagcatctttcactatcgagcgcgaggaccacaccatcggcaacattgtccgcatgcagctgcacagagacccaaatgtgctctttgctggctataagctccctcatccacttcagtacaagatcatcgtcaggatccatactaccagccagtcctccccaacacaggcctactcccaggcagtcaatgatctagacaaggagcttgagtacctcaagcaagcttttgaggacgagaagaacaggtttgagatggcgagactntaggtgcaaagaagactcgaaggttatgtatgtagatgatgatgatgacctcagactgtgttccccgaactagta

SEQ ID NO: 456056 - DNA, 505 bp, Sorghum bicolor
cgtccgggaagacagagagagaagagagagatgcggtaacccaagaactgctcttatgcatgaagtagccataagcattactattagggtttcatgcagggcaaagcagctggtttctgccgcctgaacgccgccggaatctgcgaggtcttcccgagcagcgtcatcgcataaggcagccggcacggcaatgccggttccccttgccccgtatccgactcctccggtgccattcacgccgcctaatggggcccaaagccagcttgtctgcaccgggtgccggaatctcctcatgtatccagctggtgcgacgtctgtctgctgtgccgtttgcagcaccgtcactgccgtgccggctccaggaactgagatggcacagttagtttgtggaggatgccacactctcctgatgtacatacgtggtgcgactagtgtacaatgttcttgctgccacaccgttaacctggctatggaagcaaatcaagttgcgcatgtaaactgcggg

SEQ ID NO: 456057 - DNA, 517 bp, Sorghum bicolor
cccacgcgtccggcaatgcttcttgcattcaaagaggcaataaaagattacactacacctccaaataaaacactcagcagagatcttactgcaaaaatcagcagttatgtgtcatttcttatcgagtgtaggcctctttcaatcagcatgggtaatgctattaggtttctgaaaagcaggattgcaaagctaccacatgcactgtcagagtctgaggccaaaactcgtcttcagtctgatattgatcgttttataaatgagaagatagtccttgctgacaaagctattgtcagccatgccatcacaaaggtcagagacaatgatgtcttactgacatatggatcatcatcagttgttgaaatgattttggagtatgctcatgaacttgggaggaactttcgagttgtagtggtagattctcgcccaaagcttgagggacagggattgctgcggagattagtggcaaagggcatcaactgcacatatacacacataaatgccatctcatacatcatgc

SEQ ID NO: 456058 - DNA, 435 bp, Sorghum bicolor
cgtccgctaccctcggtaccaggtttcttgctactttctctggtgctttttgggcttaagcagaggacacaaggaaagcttgctgcacccattggcctgcgttctggaatcatgactgccagttacttaatacaaagcagcggtgttttaacaccgaaacccgaaactccgttttggatgattagcacttgccgtctgcatccttttgatggtgttatcggcttaagtatctgctccttgcttgttatctttttcttccctcaaaagcctgttcagaaggatacatctgtgtgatgagggtcagtcggtcagaagagtaaaacactaatgctggagtgagcttccaacaaggatgaatcaccatgcacatatttgtgcgatgaagagtttttcctatgtaccatgttaaaatgcaactgattattctgatgcact

SEQ ID NO: 456059 - DNA, 414 bp, Sorghum bicolor
  unsure (1)..(414): unsure at all n locations
gactgcccaagaagctgcagggttggtcagctccttcaatgatgagattggtataactggtgctattctgacaaagctggatggtgactcaagaggtggagctgcactgagtgttaaagaggtgtctggaaagccaattaaatttgtaggacaaggagagcgtattgaagatctagagcctttctacccagatcgtatggcacaacgtatcctgggaatgggagatgtgctttcatttgttgaaaaagcacaagaagtgatgcgtcaagaagatgccgaggaattacagaagaagatcttgagtgcaaaatttaactttaacgactttctgaagcaaacacanatgatcgcccaaatgggttcatttcagcgtttaattggcatgattccaggcatgaacaaggtacccctgca

SEQ ID NO: 456060 - DNA, 230 bp, Sorghum bicolor
cgtcgcggtcctacccgggctacgccgacgaccccaccgtgcccaagggcagcgtcacgcccaccttcgccgccgccgcgctcttgatgggcaacgcgcgctgggacggcgtgccgttcctcatgaaggccggcaaggcgctgcacacacgacgcgcggagatccgggtgcagttccggcgcgtgccggggaacctgtaccggtggaacatttggacggatctggacaag

SEQ ID NO: 456061 - DNA, 220 bp, Sorghum bicolor
cgtccgcccacgcgtccgcttgatgacattagtaatgaaatggctaggatatattcagccttcctatttaccattaccagaactagtggaaggtgccttttttgcgaacctgtcgattgttgggatgaatgtaagtttgatgtggaactccgctggattctatcagattgcaaagttgtgtatcattccagtcttgtgcattctggaaatcatattctac

SEQ ID NO: 456062 - DNA, 350 bp, Sorghum bicolor
  unsure (1)..(350): unsure at all n locations
cgacccacgcgtgcgcgacatatacagggatttggctgagaagtatggagttactggatttcctacattgaagtttttcccaaagggaaacaaagctngggaagattatgatggcggtagggacttgtgtgactttttcaagttcattaatgagaagagtgttaccagtcgtgacacaaagggtcaactaacctcatatgctggccgcatagcaagtctgtatgtctctgttaatgagttacctggtaccttcattttcatacttaaggtatttcactctagtcattaattatattaaattcatttttattatgtctattcaattttttctaatatttttctctattttt

SEQ ID NO: 456063 - DNA, 477 bp, Sorghum bicolor
  unsure (1)..(477): unsure at all n locations
cgtccggtcgcacccgtgggtagcagccgcgtacctaccaacctgcgtgctgccgggggagctctgcacgtctcctgtcgcctcgcctgtcggcatggacgccgggggagagaagttcagcgacgcggcggcggcggagggcggtgagggcggcggcgacctctacgccgtcctcgggctcaagaaggagtgctccgacgccgacctcaaggtcgcttaccggaagctcgccaagaaatggcacccggacaaatgctcctcctccagcagcgtgaaacacatggaggaagccaaggagaagttccaagagatccagggcgcctattccggtctcaatcttccttctctcagcaccctgcatccgccccactgctctgttccatctctattcacaaaccacccnttttttgagaagcaacacaaaccacccttcacctgttacaacgactgaccaacaactaataaactgaacaccag

SEQ ID NO: 456064 - DNA, 541 bp, Sorghum bicolor
cgtccggaaggaagggatcggagagcccaccccggctgggagagctaggaagaacacacagttactagctagctaggatccaatccaaggatccaacgatcgatcgatcgacatggacaggccagaccaccaccagcaccagttcttcatgccggcgccgacgccggtgcaggtgccgcagccacagcagcagcagcagatttgcgtgccgatgatggacgagccgtcgtcgttcttggcggggatgggcggcggaggtggcgggccgtcgtcgtcgtcggcgaggggtgagaggaagcggcggttcacggaggagcagatacggtcgctggagtccatgttccacgcgcaccacgccaagctggagccccgggagaaggcggagctggcgcgggagctgggcctgcagccccggcaggtggccatctggttccagaacaagcgcgcccgctggcgctccaagcagctggagcacgactacgccgtgcttcgcgccaagttcgacgaccttcacgcccgcgtcgagtccctcaagcaggac

SEQ ID NO: 456065 - DNA, 360 bp, Sorghum bicolor
  unsure (1)..(360): unsure at all n locations
cgtccgcgacgacgcccggtggcttgcctgcgcgcaccatcctcacgcgcatcttcaccagcgacggcgtctggaagctcccctacaacgcccgccgtggcctcacgagtccggcggcggccgtcgtctgcgaggacacgttccagagcatgtacgcgcagatgctgtgcgggctgtgccaccgccactccgtgctgcgcgtcggcgccgcgttcgcctccggcgtncttcgcgccatccgtttctttcagcggaactggccggagctcgccggggacattgacgccgggacgatcaccgaccgcgtcactgaccacgttctgcgtcaggcgctgtctagtgtgatacacatatttacct

SEQ ID NO: 456066 - DNA, 481 bp, Sorghum bicolor
  unsure (1)..(481): unsure at all n locations
cccacgcgggctttgcagtgacgcgctcgctcgcttcgaggacaaggggaaacgcccagatggcttgtccgacgagtacagaaaactctcgggtggtagacatatgaaaacgatcagtgtagctcattatcctgttaatagaggaaagaaccgatatattgatgtcttaccatttgatgataccagagtacggctctcagcacgacctccaaacaatgattacatcaacgcaagctttataaggctactgagaacaacagagttgcaccatgtatttatacacacaggacactagtgaagacanttggagatttctgggaaatggttcatgaatatcagtgccctgcaattgtcatgctcactcaatttgacagtattaagtgtgataaatatcttccaactgaaagtggacgacaaaaatatgggaattacgatatcaagattacgaagacaagaacagatagcccccacttacaggtgc

SEQ ID NO: 456067 - DNA, 471 bp, Sorghum bicolor
cgtccggaggaactatctctactcattccagtttttactcgatgacaagagctggagggcttcagtacacagatacagagctggaaagacgaggtatgcacatttccggcaaacagatgaacttctggctgattcagggtggcactgcagcttctgcttccgctacataaatgacttcatcttcaagatgaaagcctacagccacgtcgatcggatcagattcaagtacttcctaaacccgaagaggattcagcacgtgatttgcgaaggggctgatcttttcgacatgctccctgaagaatacacattccaagagatcattgccaagctggggcctattccaagtacattctctgctgttcatctccctgcctatctgctggagcagaatgatcggtacagatatctccttccaggcaactgcattagagagagtggctaggcagctgctactgtctgcatcatgaccct

SEQ ID NO: 456068 - DNA, 414 bp, Sorghum bicolor
cgtccggaggcattgcgtgatccatacttcaaaggtctttccaggattgaaagagaaccatcctgtcagccaatcagaaaagtggaatttgactttgagcacaaaagaatgtcaaaggaagagataagagagttgatattccgtgagatactggaatatcaccctcaattgctgaatagctacattaatggcacagagaggacaacctttctctacccaagcgctgtcgatcaatttaagaagcagttttctcatcttgaagaaagtggtggtaacgtcccatcagttccaacagacaggaaacacgcatccctgcccaggactactgttgttcactcgaatccaattcctgccaaggaacaacctcttgctgcctcatcaaaagttagaccagtctctgatgattcaatgtag

SEQ ID NO: 456069 - DNA, 335 bp, Sorghum bicolor
cgtccgctcaagacgcacggtcccaacgaccgcacgctggcgcaggggctcaggggtgacccgacgtacctggtggtggagcgggacaagacgctggccacctacgggatcaacgccctaagctacgccagcgggtcgtcgtcggtccctttgctaggtattcgtggaccggcgcctctgtcgctggcgctggttcacgccgacgtcgacgacggcaaggtcctcttcgtcccgtgggtggagaccgacttcaggaccggcgaggacccgtggtggaaggcatgatgaggatcccacaccagcggtgctcagtgctcacaaattacctatgtatg

SEQ ID NO: 456070 - DNA, 274 bp, Sorghum bicolor
  unsure (1)..(274): unsure at all n locations
cgtccgaagcaggcgaagcagcaatggcgcatcaggagatcgagcacacccagctccccgtccgcgggatcaacctccacgtcgctcaggtcggcaaaggtgacctgngcacggtggtgttcctgcacggcttcccggagatatggtactcttggcgccaccagatgctggccgtggccgccgcggngtacctggccgtcgcgccggactggcgcgggtactggctgtccgaccagccgtcggtgaacgaggaggactcctgggtctgggacga

SEQ ID NO: 456071 - DNA, 327 bp, Sorghum bicolor
tccgatcccggtcgacccacgcgtgccgcccacgcgtccgcaaagcagctctcagaaagtacaggaaagctctgcgctacttggatgtttgctgggagaaagaagagataggtgaagataagagcacagcactgcggaagaccaagtcaataatactcactaatagctctgcatgcaaattaaggttaggagattcaaagggtgctttattagacgcggattctgcactgcgtgaaacggagggaaatgctaaagctttttttcgacaaggtcaggcacacattgcactttaatgacattgttgcagcagtggagacctttatacat

SEQ ID NO: 456072 - DNA, 305 bp, Sorghum bicolor
  unsure (1)..(305): unsure at all n locations
gattcggagcggaataaggcacctcaaggccgtacagggcacaaggtacggccgcaccactctcgccgcccccgccggcgacctncgcttcaaggcctccgccaccgaggccgccttcgccaacgggccttccctccggggcctcaccctcaccctcgagaagcccggcgccttcctcgtcgacctcaagccccacaaccaggatgtgcgcttccagttcatgaactccgcgctcgtgctcgacaagcgggtcagcctcacctacacccactccaccagtttcgccccgggccccgcgccccccg

SEQ ID NO: 456073 - DNA, 345 bp, Sorghum bicolor
caccctccagtaaccctagcgacagcctcggctcgtttgatccccgcggggagctgtagatctgcaagcgggcggtccggcgtccggatccccaccaccttcggtgccttcgcgtatggcatgtaccaggtcggccaggggaacaaggtccgccgggcactcaaagaagagaaaattgctgctcgtagtgctatactgccaatgctccaagctgaagaggatgaaagatttgtcaaagactggaagaagtatcttgaagaggaggcgaggatcatgaaagatgttccagggtggaaggttggccagagcgtgtacaatttccggaaatggatgcccccggctact

SEQ ID NO: 456074 - DNA, 338 bp, Sorghum bicolor
cgtccgagaagactgtgaattcacctatttgtccacccagatacttcactttttgggaaatgaaggcccaaaaacatcagatcccagtaaatacatacgttatatatacaatagggtgatacttgaaaatgctacagttcgagctagtgcagtcagcacattggcaaagtttggtgccttggttgactcactcaagcctcgcatatttgtgttcctgagacgctgcctgtttgatggggatgatgaggtccgggacagagcgaccctttacctcaaattggtaggtggggaagcttcagttggtgagacagaaaaggatgtgaatgaatttctctttg

SEQ ID NO: 456075 - DNA, 473 bp, Sorghum bicolor
cgtccgctgtgaccgtgccacttctctacggctcgtccctggctgagcccaagtccatcccgtccaagtccatgtacccgaccttcgatatcggtgatcggatccttgcggagaaggtctcgtacatattccgggatccggaaatttcggacattgtgatcttccgggctcccccaggacttcaggtgctatttcctgcccccctggattgtttttctcatgatgtctgaattgaacgttttcattgcaggcttatggttacagctcaggtgatgtgttcatcaagagagttgtggccaagggaggagactatgtcgaagtgcatgatggcaagctgttcgttaatggagtagttcaggatgaggattatgtgctggagccacacaactacgagctggaaccagtgctcgtaccgggagggtttgtgttgtgctgggagacaatcgcaacaacaagcttgattcccataactg

SEQ ID NO: 456076 - DNA, 262 bp, Sorghum bicolor
cgtccgcccacgcgtccgcgacgacgacatggcggcgttggtgaagatcgggacgtggggcgccggcgaccacggcagcgcctacgacatcacggtggcgccgcggcgggtggagagcatctccgtccgccatggcatgatcgtcgactgcatctccttctcctaccgggaccgggacggcaagctgcacaccgcggggccctggggcggcacctgaggcctgaaagaggagaccatcaccctgggccccgacgagttcgtg

SEQ ID NO: 456077 - DNA, 263 bp, Sorghum bicolor
cgtccgccggcaaggacgccggccgcctgtccgcggcgtggcagctgtacgtggcgcatgaggagatggccaaggtggccaaggagtacggcgtgaagctgacggtggtgcacggcctctgtctcaccgtctgcagggtcggtggcccgtcgcacctcgtcatcttgtcctagccgtctgtcactatttacgggtgcattcttttgactttttcttgttaggttattttttctctttaagaatttgagcttttgctcaatttt

SEQ ID NO: 456078 - DNA, 202 bp, Sorghum bicolor
  unsure (1)..(202): unsure at all n locations
ctctggccagggtctccctccatagcgaggatgtcgagctcttcnccgtcaacgaccccttcatcaccacgcttttctttacaaacatccgcgagggttacaccntnctccctccacttaaccacatttaaatcaccctcaaagactccaanacccttctcttcttttataagccgggggccctccataccatctttttttt

SEQ ID NO: 456079 - DNA, 502 bp, Sorghum bicolor
cgtccgcgtgtcaattgagaaagaggtcttccctcaaattgcagctgatcagaagctctatgcaatggtccttccaggtttttggatggatgtggggcagccaagggactacattagtggcttgcgtctttatctagactcacttaggaagaaatcagctgccaggctagctactggaacacatgttgttggcaatgtgctggtgcatgagagcgccaagattggagaaggttgtctgattggtcctgatgtcgccattggacctggatgtgttgtggaggatggcgtgaggctttcccgctgcactgtcatgcgtggtgtgcgcatcaagaagcatgcttgcatctcaaacagcattatcgggtggcactcaactgttggaaaatgggcacggatagagaatatgactatcctgggggggagatgttcatgtgtgtgatgaggtatacaagcattgggggggtgtgtctcccacataaagagatcaagtcatgcattctga

SEQ ID NO: 456080 - DNA, 507 bp, Sorghum bicolor
  unsure (1)..(507): unsure at all n locations
cgtccggagttctacgaccggacctacgaccgcgtcacccccagggcggagcgtcgcctcgagcgcttcaagtcgcggaacttcttcaaggtcaccaccaccgacgaccccgtcatccgccgccttgccgagaatgacacggccacggtattcgccactgacaccatcctggccgcactcatgtgtgcgcctcgaagcgtccagtcctgggacatcgtcattcagcgtgttggcaacaagttgttcttcgacaagcgtgatggttctcagcttgatcttctcactgtcaatgaaaccgcccaggagccactccctgaggccaaggaagacatcaactctgcgcattcactagcagttgaggccacatacgtcaatcagaacttctcgcagcaggtgctgctccgcaatggtgagaaggtcactttcgatgagcctaacccgtttgccactgaaggggaggaagctgcttccgttgcttatcgctaccgcgctggaagctngatgatg

SEQ ID NO: 456081 - DNA, 351 bp, Sorghum bicolor
cgtgcgggcaaagttccaggcttcccctcctgttcctctcccagaactgaacctgcatccagatacatggccaagccactgcattgcagtgaggagcttctcgggtgtggcacgggacaagaatgtggttgaggaagctgagaagcttgccatgagcttgagtcgatcgccctgggctaactccacaaactaccccagcaatagcgcttactcagttgcacagtacagtagtccattccgcatcattggccgtgtcaatgaggtgtggttcgacgtcgactgcatatctactggtgttgagacgtactgaaatgtttatacaaggtggtcgtcgctcgttccttaaaacta

SEQ ID NO: 456082 - DNA, 412 bp, Sorghum bicolor
cgtccgcaagtttataaagcacggttgaaatactctgggaagctggtagctgtgaaggtgcagaggcccggtattgaggatgccattgggcttgatttttatctacttagaggacttggctttcttataaataagtatattgacattgtaaccagcgatgttgttgctctaatggatgaatttgctcgaagagttttccaagagcttaattatgttcaggaaggccaaaatgcaagaaggtttaaaaaattatatgccgataagcaagatgtattagtgcctgatatattttgggattacacaagtgcaaaggttctaacaatggagtggattgagggtgtaaaattaaaccaacaagcagttattgaaagtcaaggaattgaaggttcctggatttggtcaaccattggta

SEQ ID NO: 456083 - DNA, 378 bp, Sorghum bicolor
cgtgcgcggacgcgtgggtgcttgttgtgtcagagttcatcggttgctcgccctcactgagcggtgctatccgtgtgaaccctgggaacgttgattcagtggcgcgggcggtggactatgcattggagatgcccgaaggggagaaggtgttgagacatgagaagcatcacagatacgtgagcacacatgatgttgggtactgggctaacagcttcctgcaagatcttgagcggatttgcctggaccataacaggaggcgttgctggggcataagatttgggctaaagttcaaggtcgtagcgcttgatccaaacttcaagaagcttgccgttgagcacttggtctcggcctaccggaggacaacaaaacgcgtcattc

SEQ ID NO: 456084 - DNA, 377 bp, Sorghum bicolor
cgcgtccgcggaattccgccagggtcaatctatcaaggacagttaaaccttgctcagctggcgaccgcccaggaatttctgttaggcggcaacttgttgtggtctggggaaacatcgcctgacttgagtcagcactttagaggatattcatcagcatcagaggcagttcttactgcccaatcagatttgagaaaacttttggttggcaatgagaaaatcggtgttctcttgctgaatcttgggggcccagagactcttgatgatgtgcagcctttcttggttaatctttttgcagatccggacattatccgtctttctaggctctttctctttctgcagaagccacttgcaaaattcatatctgtagtgagagctcc

SEQ ID NO: 456085 - DNA, 488 bp, Sorghum bicolor
cgtgcgatggttagtatggagcctcagatacccagagtttggttacagacaaggaatgcatgaactcttagctcctcttctctatgtacttcacggtgatgtgcagcacttcagacaagtcagggaccttcatgaagagcttttgggtgatgattttgatggccaaacttttccagatcgttcaaagctgaacagaagtgacagaaaaaacaatgttgagggtagaacagctaaatttagaagtttgtctgaccttgatcctgatactagagatcttttcttgatcaatgatgcatatggagcagagggtgagttgggtattattttatcagaaaagtttatggagcatgatgcttactctatgtttgagaatttgatgaacggtgcgcaaggagtggttgctatcactgacttctattctctgagtcctgccccaaaatcaagcacgggtttaacaccttgtagagaggcattatttgcaatatatc

SEQ ID NO: 456086 - DNA, 275 bp, Sorghum bicolor
  unsure (1)..(275): unsure at all n locations
cgtgcgcttggaggcagctcctacatgaagcttgccaagaagctcggcgagctggacccgctgatgaagcccaagcaggaccggtgcgggctcctcacgtcgccgcaagggcttggcccccanattgaggttatccctgccgccaccaagtccattgagcgcgagatcaactccgtcaacgacaacccgctcatcgaggtcgcccggagcaaggttcttcactgtggcaacttccaagacacgcccatctgggtgtccatggtctacaccctttt

SEQ ID NO: 456087 - DNA, 334 bp, Sorghum bicolor
cgtccgggcctggcggcggcgccggcgctgctgatgacgctggccgggctgttcctcccggagacgcccaacagcctcatcgagcgcgggcgcgtggaggagggccggcgcgtgctggagcgcatccggggcaccgccgacgtggacgccgagttcacggacatggtggaggcgagcgagctggccaacaccatcgagcacccgttccggaacatcttggagccccgcaaccggccgcagctggtgatggccgtgtgcatgccggcgttccagatcctgacggggatcaactccatcctcttctacgcgccggtgctgttccagagcatgggct

SEQ ID NO: 456088 - DNA, 330 bp, Sorghum bicolor
attactctctagatctgcatcactgagctcgacaagaacaaagcttctgtcttcttcaagacatctgctgaggggtacacatcgtatgctgaggagatgaccaacctctctggtatctcggacattattccagagatggacatctgtcactttgatttcgagccctgtggctactccatgaatgctgttcatggccctgctttcttgaccattcatttgaccacagaggattgcttcagctatgcaatctactatgtcatgagctttaacccatgctcttcttcttatggtgacctgattaagatggctctgacgttctttatcccattt

SEQ ID NO: 456089 - DNA, 351 bp, Sorghum bicolor
cgtccgagcatgtctcgtaacaacgctgtttgcaactgatttcttcgagataaaggctgtgagtgaaatagagcctgctctcaagaaacaacttataatatctactggtgtgatgaccattggcattgcgctcatcagttggcttggtcttccatacaccttcaccatttttaactttggagaacagaagacagtgcatagctggcaattattcttgtgtgtggcggttggtctctgggctggtctagtcattggattcgctatcgagtactacacaagcaatgcctacagccctgtacaggaagttgcttgattcttgcataactggagcttccactaatgtcatttttg

SEQ ID NO: 456090 - DNA, 393 bp, Sorghum bicolor
cgtccgctaacctcagaggctggccgcatagcaagtctggatgtcctggctaaggagttccttggtgcttccagtgacaagcgaaaggaagtcctttccagtatggaggaggaggcagctaagctcagtggtccttctgcgaggcatgggaaggtctatgtaaacatcgcaaagaagattctagagaaaggcaatgagtatactaagaaggaaaccgagaggcttgatcgcatgttggagaagtccatcaacccctcgaaggccgatgagtttatcatcaagaagaatgttctctcgactttctcatcctaaagcatctgctagctccattttcacgtttcagatataggtgacacaacactgcaagattagaagtgtgataatgagttaagt

SEQ ID NO: 456091 - DNA, 341 bp, Sorghum bicolor
acccacgcgtacgtgcatattgccagacatttgctattgatataatggctctctcatcgtagagacacgcactgcctctcactgatgaagatgacgacgacgggcagcgatgtttcactgcttctactgcgtgcagatgggtcactccatcctttctacattatggcttgggcaattagcagcttgcagcgccgaatacagagacaggaggcagctgctctagtgtaacggacgtggtattatcctgcattcgggcaaggaggggaggcactgactatcgtaccggctactctgcccactacagtatgtaccaccgaaccataattatatctatctatgtt

SEQ ID NO: 456092 - DNA, 127 bp, Sorghum bicolor
gtcgacccacgcgtccggtgatggctgctgcccccaagaaggtgtccaagatctcctctgaccggccgctgtggttccccggagccgtggcgcccgactacctcgacggcacgctgttctgcgacta

SEQ ID NO: 456093 - DNA, 492 bp, Sorghum bicolor
cgtccggaaatagagaaagctcatccagatattttcaacattcttctccaagtatttgaagatggacacctgacggactcacaagggcgcagagtttccttcaagaatacgctgattgtcatgacatcaaatgttggttctacatcaatctcaagtggaaggaggagtataggtttctcgacacaaaaggatacagaggaaaccacctatgctgtgatgaagtcccttgtgatggaagagctgaaggcatttttccggcctgaattgctcaatagattggatgaagtggttgtattccgtcctcttgaaaagactcagatgatggctattctcaacctaattctacaagaagtcaagagtaggcttttagcccttgggattggcctagagatatcagattcaatgaagaacctgatttctcagcaagggtatgacagaagctatggcgcacggccacttagaagagccgtacttaacttgttgagatgttat

SEQ ID NO: 456094 - DNA, 155 bp, Sorghum bicolor
  unsure (1)..(155): unsure at all n locations
cgtccgcgctccaagccgcggccaccttgatgcagccggccaagatcggcggccgggcgcactccgcctcgctgccgtcccggccgtcgtcgcacctggcagggcgttcgcgtcncccccggcccgcagaacactgctcctcagctgacatagga

SEQ ID NO: 456095 - DNA, 430 bp, Sorghum bicolor
  unsure (1)..(430): unsure at all n locations
cgtccgatttatcactgtgtctgctgcgacacccctctgtttgagtcatcaaccaaatttgatagtggtactggatggccatcctactataaaccaattggcgaaaatgtcaagagcaagcttgatatgtcaatcattttcatgccccggaccgaggtgctctgcgccgcctgtgatgctcatctggggcatgtctttgatgacgggccaccaccaacagggcagagatactgtatcaacagtgcatctctgaaattgaagcctcagtcgctggatcctttaggaagaagttaagtataacactggcccgcccaatgtaaaactgtgggttngtatataaacctattcgagttgaccatatntattattcctctattatgcatatcangtgcacaaactgatgaacctctanggtgtgtgtgttttctta

SEQ ID NO: 456096 - DNA, 156 bp, Sorghum bicolor
cgtccgctgactcacggttttcaaggtgaaagggataagttgaacaagtacggtcgggctttattgggatgtactattaaaccaagatgcgattatccggtaagtattacgtagagcgtgtttgagtgtctcgctgggacttgtttaccgatatga

SEQ ID NO: 456097 - DNA, 462 bp, Sorghum bicolor
cgtccgattatgttgagatccaaacaccaattgactgtgtgtctgcaatttatacggtgctatcccggcggcgtggtcacgtaacagctgatgtgcccaagccaggcactccaatatacattgttaaggcatttttacctgttatagagtcttttggatttgagacagatctcagataccatacccagggacaagccttttgtttgtcagtattcgatcactgggctattgttcctggtgaccccttagataagagtattgttcttcgcccccttggagccagcaccttatacagcacccttgcccgtgagttcatggtaaagaccaggcgaaggaagggcatgagtgaagatgtgagcatcaattaaattcttcgacgaggccatgatgaatgagctggctcaacaggctgctgatatccacttgcaaatgatgtagtccaaaagcgagatgaggtgcaca

SEQ ID NO: 456098 - DNA, 136 bp, Sorghum bicolor
  unsure (1)..(136): unsure at all n locations
cgtccggactagttctagatccctcgcaacaccaccataccgacgaagaaggagcaggtgttctncacctactccgacaaccaaccctgggtgctgatccagtgtacgagggagagcgcgccaggaccaagacaac

SEQ ID NO: 456099 - DNA, 314 bp, Sorghum bicolor
  unsure (1)..(314): unsure at all n locations
cgtccgcgcaacaatatctgctcctcacatgcatgcaacctgcttagagctattgaaggatcatttgcaaccaggaatgcatgctctggatgttggatcaggtagcggctacctgacagctngttttgccatgatggttggaccaaaaggccgtgctgtgggaattgaacacattcctgagcttgttgcttcttctattgaaaatgtgcaaagaagtgctgcagctccactactgagggatggatcactctcttttcatgttacagatggcaggcttggcttttcagacgcagcaccctatgatgctatccatg

SEQ ID NO: 456100 - DNA, 382 bp, Sorghum bicolor
cgtccgagcttctagagagaatggcggcaagcgtcgagtgcttgtcagagaaggttagagattgtttccttgatctgggctgcttcccagaggatgagaagatcccccttgatgtcttgatcaacatctggatggagattcatgatcttgatgaaccagatgcttttgccatcttggttgagctttcaaacaagaaccttcttacccttgtcaatgatgcacagaacaaggctggagatttgtacagtagctaccatgactactcggtgacacaacatgatgtgttgagagatcttgctcttcacatgagtgggcgtgaccctcttaacaagcggaggctgttggtgatgccaaaaaaggaaagaacactttccaaggattg

SEQ ID NO: 456101 - DNA, 381 bp, Sorghum bicolor
  unsure (1)..(381): unsure at all n locations
cgtgcggttagctcgtctgccaccttctacgccgacgaaggaacaaccgaggagcccatgggacgcgagagccttcagtcactctggcagaagcacagaggtggacatcgctatgtatggccacgtccacggctacgagcggacctgcccagtatacgagaacgcgtgtgtcgccaaggggtctaacctctacaccggcgctttcacggcgacgacgcacgtcgtggtgggcggcggcggcgccagcctcgccgactacacagccgtgcgggcgcggtggagccacgtgcgggaccgcgactntgggttcgcgaagctgacggcgttcaaccacacgacgctgctgtttgagtacaagaagagccgggacgggagcgtgca

SEQ ID NO: 456102 - DNA, 299 bp, Sorghum bicolor
aagctcaatgagaggagagctaagcttgctggtggtgttgctgtcattcaggtgggagcacaaacagaaactgaactaaaagagaagaagttgagagttgaggatgccctaaatgcaactaaggctgctgttgaggaaggtattgctgttggtggagggtgcactcttttgccgcttgcaactgaaggtcgtggcactcacagatgcagtggggaatgatgagcaccaggctgcagctgcaatattaagaagggccctgagctacccacttaaaattgattgctaaaaaccgctggggt

SEQ ID NO: 456103 - DNA, 456 bp, Sorghum bicolor
cgtccgagcagtcattgttgctccttccagagaattaggaatgcagattgtgcgagaagtggagaagattttgggtcctagtgataaaagactgggccagcaacttgttggtggagctaatcgttccaggcaagaagaagcattgaagaaaaacaagccactcattgttgttggaacacctggccgtatttctgaaatttcagcagcaggtaagctacacacccatggctgccgttttcttgtactggatgaagtcgaccagcttttgtcttttaattaccgtgaagatatgcatagaattttggagcatgttggaaggagatctggtgccacatctagagatgttcttggcccactagctaggcgatctgagcgtcagactatcttggtttctgcaacaataccattttcagttatacgagcagcaaggagttggggtcatgatccagttctcat

SEQ ID NO: 456104 - DNA, 393 bp, Sorghum bicolor
  unsure (1)..(393): unsure at all n locations
cgtccgcgcaacaataataggcagccaccagcccaccatccccaccagcccagcgcaggtagaaaatagcggcgagcaaaagcgggcggaaagaagagggggaaagccaggctcgccgctcccncaccgcgccaccagccgcaaaagcgcaaatccgatctctatctctatctctatctctcgaggttttcggtttcgatccggcgagcgggcgagatcttcatggcaacgtctacgtcggtggaacgactgggcttctgatctgggccatcaccctcgcttggctcctcngcggcggcgccctcctcgtgtacaacaccagcgccctctccgctaaggatacctcatttcaatcgtgatcatgcgctcttcttgatcggtcatcatgtaaat

SEQ ID NO: 456105 - DNA, 464 bp, Sorghum bicolor
cgtgcgactgctgtcaccacagaggagcctgcaccggcggcggagcctcagcctaagccatcccctggatcttctcgtggacacagacgagggggacctccccgtgtggctgggagtcggcgccgccttcaagtgggccatcgacaaggacatcaagaacttccagaagctcaaggagatgtacaacgagtggccattcttcagggtcaccctggacctgctggagatggttttcgccaagggagaccctggcattgccggcttgtacgacgagctgcttgtcgccgaggaactcaagccctttgggaagcagctcagggacaaatacgtggagacacagcagcttctcctacagatcgctgggcacaaggacattcttgaaggcgatccttacctgaagcaggggctgcgtctgcgcaatccctacatcaccaccctgaacgtgttccaggcctacacgctga

SEQ ID NO: 456106 - DNA, 394 bp, Sorghum bicolor
cgtccggcctcgagtcgatcaccaaggctccggtgatccaccacttctctgagacggttcaaggtgtcatgaccatcaggtgcttcaggaaggaggacagcttcttgcaggagaacctgaaccgggtgaactcaagcctgaggatggacttccacaacaatggtgccaacgagtggctcggattccgactcgagctgattgggagctttgttctctgcttcacagccgtgatgatggtcacattgccaagcagcatcgtcaagccagaatatgttggtctatcactatcatatggtctatctctcaaccaggtgttgttctgggccatctggatcagttgcttcattgaaaacaaaatggtctcagttgagaggataaagcaattcacaaatat

SEQ ID NO: 456107 - DNA, 204 bp, Sorghum bicolor
cgtccgcccgccatggctcgacggctcgctccccggcgacttcgggttcgacccgctggggctgggcaaggacccggcgttcctcaagtggtacggggaggcggagctgatccacgggcgggggcgatggcggccggctggcatcttggggcagctggacggatccgggtcgggcgcccacccgcgcagccctttctcgtgtgt

SEQ ID NO: 456108 - DNA, 509 bp, Sorghum bicolor
  unsure (1)..(509): unsure at all n locations
cgtccggtagaaccagacatcatgaccttagcaaagccattggccaacggtattccgataggtgttgtcttggtcaaggagaaggttgctgcaggggtggactatggcgaccatggtacaacgttcggcggcggccctcttgcctgccagactgcgataaccgtgtttgacaaaatcatgaaacctgggttcttggctgaggtgtccaagaaaggggaaaacttcaagcagctcctccgcactaagctgagtggaaacccacacgtaaaggaggtccgtggggttggtcttcttgttggcattgagctagatgtaccagctggtcctctggtcgacgcatgcttggacgctggcgtcatagtgctgacggccggcaaaagcaatgttgtgaggctggtgccaccactcatcatcttanaaaaggagctggagcatgccgcggatgttataagggattgtctaccggtgcttgatgttgctgctgcttaatgttcgcactggtcttttat

SEQ ID NO: 456109 - DNA, 249 bp, Sorghum bicolor
aatcccggtcaccacgcgtgcgtatagtatgtataacattgcctgccgcaaccatgattgatgcatatgcaggaaagatagcgccaattgtactgaattgaaggaagcagattgtttcatggaacgggacaggggattggtgcacagtctagacatcttagtggggcaagcgtggagcgggatcccgtggttcgaggccggctccaacccgggcgccataacgcccttattcttcggatctctgggggg

SEQ ID NO: 456110 - DNA, 484 bp, Sorghum bicolor
cgtccgcctggcttcttcatccttgcttgcaccctcatttttctagccatcgcctactacttccagtacgcacgctggcagaaggggagaggccgcggcggcggcggccatgagaagcaggcttcttcttccttgaagtcgctgcctcctggctccatgggctggccttacctcggcgagaccctccagctctactcccaggaccccaacatcttcttcgcctccaaacagaagaggtacggcgagatcttcaagacgcacctcctgggttacccctgcgtgatgctggcgagcccggaggcggcgcggttcgtcctggtgacgcaggcgcacctgttcaagccgacctaccctcggagcaaggagcgcatgatcgggccgtccgcgctcttcttccaccagggcgactaccacctccgcatccgcaagctcgtccagggcgcgctcggacccgacgcgctccgcgcgctcgttcctgaggtcg

SEQ ID NO: 456111 - DNA, 460 bp, Sorghum bicolor
cgtccgggccaaggaaatcggaaaggcttccttcaagtacgcctgggtgctcgacaagctgaaggctgagcgtgaacgtggaatcaccatcgacgtgggtctctggaagttcgagaccaccaagtactacttcaccattatcgatgccccaggtcaccgtgacttcatcaagaacatgattaccggtacatctcaggctgactgtgctatcctcgttattgcctcccccaccggagagttcgaggctggtatcgacaagaacggacagaccagagagcacgccctccttgcctacacccttggtgtcaagcaattgatcgtcctcgtcaacaagatggacgagaaggtcaccaactacttcgaggctcgtttcaacgagatcagaactgaggttcattctttcattaagaagatcggatcaaccccaggagggttccttcttcccatctctggatggaac

SEQ ID NO: 456112 - DNA, 366 bp, Sorghum bicolor
cgtccgagaagaaggccgtgctgtgtattttactggagagatggtgtttccttgcttgtttgatgagatccctgctctacgagacctaaaagaggctgcccatttgttggctgagaaggaagactggcctcccctatatgatgtcagcgtgttgaacaataataaggttccagtcgcggctgcagtatactacgaggacatgtacgttaacttcaacatcgccaaggagaccgcctcccagataagggggatccggctctgggtgaccaacgagtacatgcactcgggcatccgcgacggcggctcacatgtcttcgagcatctaatgggtcttctgaacggcaagaagcctttgtttaagctgtt

SEQ ID NO: 456113 - DNA, 239 bp, Sorghum bicolor
cgtccggtgcgcggtggcaccttcggcttgtgcagtggcccgacccacctcttcatgctgtcccagccggccgacaccatcaacgaatgcatgcgtgtgacgtatcatggcaaggtcatcgaattcatgttcctctaggagaacctaggcttccagcccctgcatgcgatcacggtcgcctctcttgatcacagcttgcatccgtcagtgtctcccaagccccagcggcgcaagctcat

SEQ ID NO: 456114 - DNA, 277 bp, Sorghum bicolor
cgtccgggtgcttacatgttaaacaagccagagtgcaaggttgaattcgacatggaggggaaagtgtgcggtgtcacatctgaaggtgaaactgcgaagggcgagaaggtggtctgtgatccttcatatttaccaaacaaggttaggaagatcggtagagttgtacgagcaattgctatcatgagccacccaatccctaatacaaatgagtcccactcggttcaaattattttgcctcaaaaacaacttggacgcagatcaaacatgtatggtttct

SEQ ID NO: 456115 - DNA, 313 bp, Sorghum bicolor
cgtacgctcttgggctgggacaaatcactgcaacgagggccaactcgatgacctaacaatcatgaaggagactctaagagcgaaagatgagggagtgcaacattcggcgaaggatatccgctctcgagattctacaataaaggaaatagcacacaaattaacagaaactgcagaggctgcagaagctgctgcttcggcagctcatacaatggatgaacagagacgacttttgtgtttggagattgagcgactaaaacaagccttggaaagacaaatagaacaatcaatgcttaagcttggacactctgaagag

SEQ ID NO: 456116 - DNA, 322 bp, Sorghum bicolor
cgtccgaaatgaagctatgaagaagcaaatagttgtagcatcgaaggctatgcctttttactgtgctcttccaactttatctgaatatatgattgagagcggatggacccagtgttactttaatatcagtgaagttggtttttctatgtacctctgttatatggctatgtatctcatttttgtggagtttggaatttactggatgcacagagagttgcatgacataaagccattatacaaatatctgcatgcaacccatcatatttacaacaaggaaaatactttgtcttcatttgctggacttgcatttcattcactggat

SEQ ID NO: 456117 - DNA, 404 bp, Sorghum bicolor
cgtgcgcaacacacacgatgtgcgacttcctactgcgcggctccacgtgcagaaatagcataatacgcaacgattgacaacccatagtgatgaggaggcacctggatgctgcgagtgtgaagacgccaatgaatcataatgctgtttacaaggtcaagtagcatgcacctattattgacaaccccaactacaaggggatctggaagcctcatgagatccccaacccttagtactatgagcttgacaagcctcattctgatccaattgatggtattggcatcgagatctggacaatgcaagattgcatcctgcttgacaatatattgattgctgatgatgaaaacgatgccacctacattctggagaagacactgaagcccaagtgtcatgttaagatgaaaaag

SEQ ID NO: 456118 - DNA, 298 bp, Sorghum bicolor
cgtgcgaaggagacgctgcggctgcacccggcgctgccgctgatggtgccgcactgccccagcgccgacgccacggtgggcggctaccgcgtccgggcggggtgccgcgtgttcgtcaacgtgtgggcgatcatgagggaccccgccgtgtggaaggacccgcaggagttcattccggagaggttcctgggcggcggctaaaggcgcaagtgggacttcaacggcagcgagatggactacctcccgttcgggtccgggcgcatgatcttcgctgggaacgccatggccgaccggatga

SEQ ID NO: 456119 - DNA, 368 bp, Sorghum bicolor
cgtccgaaaagattgtaacagagacccaaggagttccagggatgagaactgaggatgttcttgccaaggctgcagatgaagcacggtgccctggttcttccactgttttagttgctcactttgatggccaggtccttcatgcatcaaatattggagattccggattccttgtgataaggaacggagaggtccataaaaaatcaaaaccgatgacctatggtttcaatttcccgttcaaattgaaaggcgatgaccctttaaaacgacagaacacccatcactacaagagggtgtatgacacatagaggctttgcacgcataaaaaagacagctgctcaatataaactgtctagcccacgaatgtgtta

SEQ ID NO: 456120 - DNA, 355 bp, Sorghum bicolor
  unsure (1)..(355): unsure at all n locations
cacgcgccgttcgagacacccacccgatcccaatccctcgtttctaccgcttgcgatctcgttaagagagatcttggaagacctaccgcagactatacctgaggggagttttgacaccatcgacacgtaaggcaagatccagacaagggggatcccccgaccagcagcgctatcttgctgcaagcagtcgaggacggcncactcttgtgatacaacatccagaaggagagcaccctccacttggtgctgcgtctcaggggaggcatgcagatcttcgtgaagaccctnactggcaagacgatcaccctngaggtggagtcctcggacaccatcgacaacgtcatagggccaagat

SEQ ID NO: 456121 - DNA, 281 bp, Sorghum bicolor
cgtccgtgacagcatgcacattgtgctccttgcagtagcagctcatgctgctgcaacaaacagccgcttcacaatcatctatgatcctacggcatggccatcagaattagttatacccctttcgaaatacatcaaggctgcatttcacacgcggatatcaggtgggatgcgattcatgatgtagactgagactgaggaatctagtgttcgcatgtacatggagacaatcacagaagtgagtgatgctgacccagtgcgtcggcctagctcctattggagat

SEQ ID NO: 456122 - DNA, 476 bp, Sorghum bicolor
  unsure (1)..(476): unsure at all n locations
cgtccgggcaattgctctgtctggtcaaccgctgcttggacaagcagtgatggttaagccatctgaggctgaaaagaacttggttcagtcaaatgcgacttcaggtggtgcggcttcaggtggagcaagaaaattgtatgttggcaatcttcactcaaatattactgaagaccaattgagacaggtatttgaaccatttgggcaagtggagcttgtacagcttcctctagatccaatgactggattgtgcaaaggttatggttttattcagtttgcacggcttgaagatgcaaaagctgcacagagcttgaatgggcagcttgatattgccggcagagttattaaggtttcagctggtactgatcatgtgggagtgcaggctagtggagcaactactggagatttagatgatgatgaaggtggaggcttggcactaaatgcaagctncagagctgcccttatgctcaaattggaca

SEQ ID NO: 456123 - DNA, 415 bp, Sorghum bicolor
  unsure (1)..(415): unsure at all n locations
cgtccgggctatcgtgcgctgttttcgccagaaccctcaactgagggtgaactcgaccaaatcaatgaccgggcatcttataggagcagctggtggaatagaagcagttgcttctgtacaagctataagaactggttgggtccatccaaatttgaatttagaaaatccagaggatactgtggatgtgggcgtcttggtaggatcacagaaggagagatgtgaagtgaaggtggcgttatccaactcaaattggattggtgggcacaactcatcaattctatttgcccnctttaagtgaacatgaccgacgaactgccatcttcctcatcgttcatatggcttaatatatctgngactccacatagaagacatggggactctgcaacttcctccgttccacacatactatcatgga

SEQ ID NO: 456124 - DNA, 401 bp, Sorghum bicolor
  unsure (1)..(401): unsure at all n locations
cgtccgggccctcggccaaggactggagaggtggaagggctgcaagtttcaacatcattcccagcagcaccggagctgctaaggctgttggcaaagtgcttcctgtccttaatggaaagttgactggaatggctttccgtgttccaaccgtcgatgtttctgttgttgatctcactgttaggcttgagaagtctgctacctatgatgagatcaaggctgcagtcaaggctgaggcagagggtagcctcaagggcattctgggttatgttgacgaggaccttgtttccaccgacttccagggtgacagcaggtcaagcatctttgatgctaaggctggcattgcctngaatggcaacttcgtgaagcttgtgtctctggtacgacaaccgagtgtgtgatac

SEQ ID NO: 456125 - DNA, 519 bp, Sorghum bicolor
cgtccgggagagcatggataatggctccaaagttcatatccttctgagctttgggcagcatggcagagaacttattacctctgaagttgcattacatcttctctatattttaacggagaagcctaagatcgctggtgtggatctttcatcctttgagaaactgttggagaaccttgtgatcaaagttgtgccaatggaaaatttgaatggtcgcaaacgtgtcgaagaaggggacatttgtgataggagaaatggaagaggagttgatcttaacagaaattggagtgttgattggggaaagaaagaaaaggactatgatccatatgaggagaatcctggtatggctccttttagcgaacctgaagcccagatcatgagggaactatccaggtcgtttaaacctcatatttgggtgaacgtgcattctggaatggaggccttatttatgccatatgatcacaagaataccacaccaaatggagcccttgcgcatttgatgcgggcaggtctggagaattt

SEQ ID NO: 456126 - DNA, 448 bp, Sorghum bicolor
  unsure (1)..(448): unsure at all n locations
cgtccggaagatcaagggccccgtgcggatgcctaccaaggtgctccacatcaccaccaggaagtctccctgtggcgaaggtaccaacacctgggatcgctttgagatgaggattcacaagagggtgattgatctcatcagtacaccagacgtggtcaagcagatcacctcgatcaccattgaaccaggtgtggaggttgaggtgactatcagcgacgcataatgtggtagtctgcaccttatcatataatgatgaacaggatgttttcagtttctagtgagagaactnggtgtaacagaggaattccctcctgatcgataagctnnttgcatcagagttaagtcttatcgaggttntgtggcacgatatggatgtagcctgtttcaatggatggtagtgcatgaatggaaaatggttaatggatgatccccctaatgcatngctttt

SEQ ID NO: 456127 - DNA, 453 bp, Sorghum bicolor
  unsure (1)..(453): unsure at all n locations
cgtccgggagaacatcaaggcgttcgtgctggacatcttcacggcgggctccgacaccacggcgacgagcgtggagtgggcgctggcgctgctcatcaaccaccgttcctgcatggacaagctgcgcgcggagctggacgccgtggtgggcgcgtcgcggctggtcggtgagcaggacgtggcgcggctgccctacctgcaggccgtcttcaaggagacgctgcgtcttcagccgccggccgtgatcgcgcatcgggagaccatcgagccggtgcacgtccggngctacgtgatcccgcccaagacctccgtcttcttcaacatcttctccatcggccgcgacctcgggtgctgggaggagccgctgcagttccggcccgagcggttcatgctcggcggcgagggcgccggcgtctacccctatgggcaagacacgcagctcatgctcgttcg

SEQ ID NO: 456128 - DNA, 458 bp, Sorghum bicolor
  unsure (1)..(458): unsure at all n locations
cgtccggcaaaatcaggctctattctaagagctcgatgcgtatggcgaagacagcattcccagggcttgggtccccaattacacacgtggatgttacttatgatgggaaatggattttgggaacaactgacacatacttgatcttgatctgcactatcttcaaggacaaagatgggaaagaaaaaactgggtttagtggccgtatgggaaataagattgctgcaccaaggctgctgaagctgactccacttgattcaattntagcaggaactgacaacaaattccatggtgggcaattctcatgggtaacggagaacggaaagcaggaaaagcactcttgtgctacagtcggcaaattcagtgtcatttggaatttccagcaagtcaaggacagcaactcatgagtgctactcgtgatcatgcagggcctcaagagcttgctactggctacaaaagtt

SEQ ID NO: 456129 - DNA, 334 bp, Sorghum bicolor
cgtccgatcatttttggatgagcacttttacaatggtacatcacacagctcctcatataccattcaagtcatctgaagaatggaatgctgcacaagctcaattaaatggcacagttcattgtaactatcctcaatggtatgtttttatgttacattgcactcacactaagaacaaagtttatctgctggacatatgtgactcttattaagataacaaagtagtgctcaaaagttccttataatctgtgccagagcactgagtgactgtgcaacaaagcctgcatatgcgcattacccaataaaactaaatatacaatgaggaggccaaaacatg

SEQ ID NO: 456130 - DNA, 494 bp, Sorghum bicolor
cgtccgcatcattgtccaaccagagagggtggggatcgggcatggccctgcgtttgggtgtgttctgatgaaggatttcctggatgccctcgcaactcgtctgaagaagaacactgctgcgtatgagaacttccgtcgcatttatgtacctcctggcgagccactcgcgtctgaacctggagagccattgagagtgaacatactcttcaagcatattcaggcaatgctgtctggcaacacggctgtcattgcagagactggggactcgtggtttaactgccagaagctgaagctaccagaaggctgtgggtacgaattccagatgcagtatggatcaattggctgtgcagtgggtgcaactctaggatacgcacaggctgctaaggataaacgtgtcattgcctgcattggagatggcagcttccaggtaacggcacatgaagtggcaacgatgcttccatgggagcagaacaccatcatattttcggttaaac

SEQ ID NO: 456131 - DNA, 527 bp, Sorghum bicolor
  unsure (1)..(527): unsure at all n locations
cgtccgataattcagagccttatttcagcaagcttgttgcagaccagtagctcattgtcatcaaaggtaaaaatgcaccatgtaatcaggcatatggggatttggttggttaacaagacaggtcaaaagtttctcgttcaagcagggatggctttggatagtgctccaccagcagaagagtggaaggaagctacaaggatctccatcatgtctaatgatatcaaagagcttcttttctcaccggaatgtgaaatcctcactacattattgatccagaataacccaaatttgaacaagctgagttcaggttttttcaagtttatgccgtccttgaaagtgctggatctttctcacactgcaataacatcacttccagaatgcgagacattggttgcattacagcatctcaactggtcacacacacgtattangatattacctgagcggctgtggttattgaaagagttgaggcatttggatctcagtgtgactgctgaactcgaagattccctggaataactgctcaa

SEQ ID NO: 456132 - DNA, 273 bp, Sorghum bicolor
cgtccgcatctgatcaataaccagaacgagtattgcatggaggttactccaaagacgctggctgatgttaagggcggtacactcatctcttacgaaggaagagttcagcttttggagattgcccaagtacctgatgagcatgtcaatgaatttaaatcaatcgagaagtttaagatattcaacactaacaacttgtgggtgaaccttaaagctatcaagagactgtaagctgggctttaaaggaatattcaacccaggagcgagggaaggtct

SEQ ID NO: 456133 - DNA, 316 bp, Sorghum bicolor
tccgtccgaattccggtcgaccacgcgtccgctgataggtctactgcgtgggatcgaaaagtaggatgcctgaaggagatcaaggatgaccacctatgagtattggaggcttcggcagggcgtgctaagagcattgtctgatcactcgaaggcaaacaggctccctacttatgggcatgagaagttgatagcaattcgtggagcaaagtatgcgtagagaagatcaaggaattgctccgacagtagaggtcacgaggaggctctcttgctgaaggcatgatcattgccgacccagctaaccgtatagtattgcaag

SEQ ID NO: 456134 - DNA, 390 bp, Sorghum bicolor
cgtccgggctaccgcaaggatgagatagaaaattgtgttaaaaatgcaacaaagtttattgaaaataaacagcaaccggatggctcatggttcggtacttggggtatctgtttcatctatgggacactgtttgcagtgaaaggactagtggcagctggaaaaacatacaaaaatagttactcaatccgaaaagcatgcaattttcttttatcgaagcagttaagtagtggtggatggggagaaacatatctttcaagtgaaactgggatttatgcagaggcaagcagtcctcatgctgtcagcactgcttgggcaatgttggctttactttatgctgggcaggttgaaagagatccaacaccattatatcatgctgcaaaagaattaatc

SEQ ID NO: 456135 - DNA, 267 bp, Sorghum bicolor
cgtgcgttctgagcactctgcaatatttcagtgtatacaaggcttgtccaaaggagcacttcgtcgcattattctaactgcatcaggtggtgctttcagggactggccagttgacaggctgaaagatgtaaaagttgctgacgctgtaaagcatccaaactggaatatgggaaagaagatcacagtagattctgctactttattcaacaagggtttagaagtattagaagcgcattatgtatttggtgctgaatatgatgacattga

SEQ ID NO: 456136 - DNA, 373 bp, Sorghum bicolor
cgtccggaaaacatagcatctaggggaattctgctgaatgatttctttttatgcccattgattaggcacctctgcaagcacaagaaagctcttgaagcacatcaactcttcaataagtttaaaggtcttggagtttcactaaaaactggttcatataattctcttatccgtggccttgtggatgaaaacctgattgatatcgctgaagacttgttcactgaaatgaaaagactaggatgtggcccagatgagttcacttacaatttgattcttgatgccatggggaaatcgatgcggattgaggaaatgttaagagtccaagcggagatgcatcgtaagggatatgaatcaacttatgttacttataacacta

SEQ ID NO: 456137 - DNA, 324 bp, Sorghum bicolor
cgtccgcgaatcactcccgatcctctcaagatgcagatcttcgttaagaccctcactggcaagaccatcacccttgaggtcgagtcctcagacactgggcgcactgtctagaggttccatgcttgcctacgcgggcatgcctcctgaccagtatagtctaatgtttcgctaaaaagaatctacgggccggccgttcacatacctgactacaggaaaaacccggagttgacccaacataatgggcttacgctaaatggcggtatgcacagctggggtaataccctaaatggccagaccattaccttttacgaagagttctcaaac

SEQ ID NO: 456138 - DNA, 285 bp, Sorghum bicolor
cgtccgcccacgcgtccggtcgtggagcttatcgtcatgtaccctatccaacacaggggttacagaccaggaattgacaacctgttggtgcttctgattggaggaattccaattgccatgcccactgtcctttctgtgactatggcaattggggctcatcgcttggctcaacagggagcaattactaagagaatgacagcaattgaagaaatggctggcatggatgttctttgcagtgacaagactgggacattaaccttgaacaagttgactgtggacaagagt

SEQ ID NO: 456139 - DNA, 275 bp, Sorghum bicolor
  unsure (1)..(275): unsure at all n locations
cgtccggaacgacgcaaccacattctcgacccaaaaaccagcggcaccacccatggcttcggcggcggcgagatccggcctccggtcgctggcggcgcgcgctgccccgttgaggcgccgcatgtcctcctccgtccacgacgacgcctatgagacggccaagtgggagaagatcacctacgccgggatcgtgacctgcaccctcctggcggcctacaacctctccaagggccacccncacttcgatgagccgncggcgtacccctatctgcaca

SEQ ID NO: 456140 - DNA, 425 bp, Sorghum bicolor
cgtccgaccaaccacaaggcagcaagcagacagacgggcagcgagggcaacccgagagcgggctaccggaggaagcgtgagcgatcagcaatgggcaacttcatctcgagcttagtgacgccccctccggccgccgacgacccgaactgcgccgtgtggccgcgccactccaagaccacctacgacgagcagtgggcggcccacaagaacgggggcaagctgatggtgatcgacttctcggcgtcctggtgcgggccctgccgcttcatcgagccagccttcaaggaactggccttccgcttcaccgacgccatcttcgtcaagatcgatgtcgacgagctcgcggaggtcgcaaggacatggaaggtagaagcgatgccaactttcgtactaatgaatgattggaaggaggtaagccgtgtgat

SEQ ID NO: 456141 - DNA, 305 bp, Sorghum bicolor
  unsure (1)..(305): unsure at all n locations
cgtccgtgaagagaacaacactggtggctaacacatcaaacatgcctgtcgctgctcgtgaagcctccatttatacaggaattacaattgctgagtatttccgtgatatgggctacaacgtcagtatgatggctgactccacatcccgatgggctgaggcattgcgtgagatctcanggcgtttggctgaaatgcctgctgatagtggttacccagcttatttggctgcacgtttggcatccttttatgaacgtgctggtaaggtaaaatgcctgggaagtccagacaggactggcagtgtcaca

SEQ ID NO: 456142 - DNA, 391 bp, Sorghum bicolor
  unsure (1)..(391): unsure at all n locations
cgtccgagaaaaagttatgctgatgcaaaccatgtatctgctatcattttgggtggaggcactggatctcagctctttcctctgacaagcacaagagctacgcctgctgttcctgttggaggatgttacaggcttatcgatatccctatgagtaactgcttcaacagtggtataaacaagatatttgtgatgactcagttcaattctacttcgcttaaccgccatattcatcgtacataccttggaggcgagatcaactttgctgatggatctgtacaggtattagcggatacacaaatgcccgaagagcctgatggatggttncagggtacagcagactctgtcagaaaatttatctgggtactcgaggattattacaatcacaaatcta

SEQ ID NO: 456143 - DNA, 182 bp, Sorghum bicolor
cgtccggaggtctcgtgcatggttgatgccatcgatgcgcctgctgtcggtcagctcaaggagtttgagggccagaagcttgtcttttgcaccaacgtgggtcttgagctcgactagaccgaggacgtgaagaccaggaatgaggcactgtacgaaaagtttgagggttgtgcaaagtcatc

SEQ ID NO: 456144 - DNA, 445 bp, Sorghum bicolor
cgtccgctcatttctttatgagagagggtggcgacaaaactttaatcggagtggtttccctggtcttgatgaagagtttgaaatggctcaagactattttcaacccgttgctggtggtatccttcttgatgtcagctgtggcagtggcttgtttactaggaagtttgcaaaatctgggacatactcagctgtgattgctttggacttctctgagaatatgctccgccaatgctatgagttcattaagcaagatgatactctcctcaatgcgaatctagcacttgtgagagcagatatttcaaggctccctttcgcttcttgttcagtagatgccattcatgctggagcggctatccattgttggccctcaccctctaatgcggtagctgaaataagccgtgtcctgaggcctggtggagtttttgtgggaacccacctttttatc

SEQ ID NO: 456145 - DNA, 312 bp, Sorghum bicolor
  unsure (1)..(312): unsure at all n locations
cgtccgcttggctgctgatgttacagactacgtattacaagagacatttagggcacattacccttctgtgaaaggtgcaaaagttgtaacagacaagctgacaatgcgctcaaagggttatggctttgtgaaatttggtgatcctaatgagcaagctcgtgcaatgactgagatgaatgggatgctatgttcttctaggcctatgcgtattggacccgctgctaacaagaaagctactggtgttcaagagaaagtaccaagtgctcanggagttcagtctgacaatgatcctaacaatacaaccatttttgg

SEQ ID NO: 456146 - DNA, 311 bp, Sorghum bicolor
cgtccgttcggttctgaagaagacgcgtcgtctctgcgtcagtgcgtgttggccgctctccagaagctgaccgtcgcgcacaccgagaaccactatgacgggagtggcgtcaagaggctgctggccaacaaattcgagttggacaagctgctggattctgtttggaaaggtttaccagtagaacataagaacaaggcgtccaaggagtacctcatagctgcgcttgataagatggccgatgctgcaagcctgccatactatggtgcttgtaaagaggtggatgctgtcgtggacgagtcgatcaaaacagc

SEQ ID NO: 456147 - DNA, 397 bp, Sorghum bicolor
cgtccgggatgtgtggctgcatcatattcctagaggagggcggagccttgattgggcaatgagaatgagagctgccactactcttgctcaggggattgcattcttgcacgacaaggtaaagccgcaggtggtgcaccgtgatatccgtgcaagtaatgtcttactcgatgaggaatttggttcacatttgatgggggtcggcctttcaaagtttgtaccatgggaagtgatgcatgagagaactgtcaaggccgcatcctatggctaccttgctcctgagtttatatacaagaacgagttgacaaccaaagagcgacgtctacagctttggtgtgctgctcctagaaattatcagtggtcgtcgccctgcacagatcaagtgagtctggtgggtggc

SEQ ID NO: 456148 - DNA, 364 bp, Sorghum bicolor
cgtccgcccacgcgtccgcgatgtcggccgccccaaccggcccagcccctccggtggccactccgatggcgccccctccgtcctacccggcctgctccacgatctccgcctccgtcgccgcgtccgtcgaggaggaggacgacctctatggccgcctcaagtcgctccagcgccacatggagttcgtcgagatccaggaggagtacgttaaggacgagcagaagaacctcaagcgcgaactcctccgtgcgcaggaggaggtcaagcggatccagtccgtaccgctcgtcatcggccagtttatggagatggtcgacggcaacaacggcatcgtgggctctaccacgggcagcaactactacgt

SEQ ID NO: 456149 - DNA, 333 bp, Sorghum bicolor
cgtccgcccgaagttttcaatcagttcatgtggtcgctaggcgtccccgaggacgacgtggagttccatgatgtgtacggactcgacgacgacgcgttggatatggttccccagcctgtgctcgccgttgttctctgcttccccgatccaccacaggatgcaagttacccttcagaacaactcttattttctggagaaaaggaaacacaggaccaggtttactttataaaacagatcaaatcattgggaaatgcttgtggaactattgctctactccatgctgttggaaatgcatcttcagaagtcaatttagtgggaaattcatgcttggac

SEQ ID NO: 456150 - DNA, 347 bp, Sorghum bicolor
  unsure (1)..(347): unsure at all n locations
cgtccggngccacttaccaaggaggggtttatatcaggcactggctattgcagcaatgtgtttgcaggagaaagctaaaaaccggcctcccattagggaagttgccgcagctctctcttacttagcatcacaaacatatgacaggaacaacactgctccccgccgtaaccgtgctggggcttcaacatcaagagttctggacgatcagattggccaggacaccacactggctaatcaacaaggagctcagatgtccatgcatggccagacaaatcacgtcatgcctgaagtgaaggaaacttcctggagtgggaaggncacatcgcggaggaaggggcagagtactc

SEQ ID NO: 456151 - DNA, 339 bp, Sorghum bicolor
cacgcgtccggaggagcagccatagcagcgcggcgacatcgcgaggccagacgcaacagccgaagagaaggggcagagtcgaccgccgggagtcccggccaccaccatggacaccttcttcctatcgcacggctcgcccacgctctccatcgacgacaagatcccggcgcggcacttcttcaagtcgtgggtgccggcgaaggtcgcgggcgaccaggcaccgcgcgccatcctcgtcgtgtcggggcactgggagacggccacgccggcggtcaacgtcatccgaggcagcaacgacaccatctacgacttctatggctttcccaagccatgtacagc

SEQ ID NO: 456152 - DNA, 330 bp, Sorghum bicolor
tacatcttgataagaaggtcccaactggtgctggtctcggtggtggaagcagcaatgctgcaactgcactttgggctgctaaccagtttgctggctgtatagcttcagagaaggatcttcaagagtggtctggtgagattggatcagatatcccctttttcttttcacaaggagcagcatattgtactggtagaggagagattgtccaagatatcccaaatcccttgccggaaaatttaccaatggttcttataaagccgcctgaagcatgctcaactgctgaagtttacaagcgattcaaattggaacaaacaagtcaagctgatccct

SEQ ID NO: 456153 - DNA, 377 bp, Sorghum bicolor
cgtccggcaaagttgctctgcgtccctctggtaatgtcataccacacccacgttccaatttatatacccagatatacattcagctggcttgtcaagcccatgtggctaattataaaattcttgcaccgagctgcggacctcacgctggtaccatccgttgctatcggcagggatcttcaagctgcccatgttacagcagccaataaaatacgcctttggaacaagggtgttgactcagaaagcttccatcctcgttttcgcgatatggaaatgcgttcaaggctaacaaatggcgaaccagaaaagccacttatattttatgttgggcgcttaggagttgagaaaaagcttgattttcttaaagagtcatggccgac

SEQ ID NO: 456154 - DNA, 424 bp, Sorghum bicolor
cgtccgcggacgcgtgggcggacgcgtgggcgcgatgcagcacgagcccgaggtgatgtacgaggtgctgaagcagaggaccgacggcgccacggccgccgccctcgccagagccttcggcgcaatgccgtacctggtgttcgacccggaggccgcggtgttgtccagcggcgagagtagcggcatgagcagcgactcggaagggtcagccgccggcgccgccgaggaggaagacgatgaggagtgggagttcatgcgcggcctcaccgtctgatgcatggctgcagcagcagcgcccctgttcccgtgtccgtcctggtgaaacaagtccagtcgccagcaagttgtcaagtcgccggccggcgttggtaatctaacccccaccggccggtgttgtatcgtgtcatggtcgtagtcgtcgggt

SEQ ID NO: 456155 - DNA, 445 bp, Sorghum bicolor
cgtccgcgacgccgtggaaggcgagccagtcgtcggagccgtactggtactcggtgaagctagggccggcgcacatcatcgtgctgtcgtcctactcggcgttcggcaagtacacgccgcagtacaagtgggtggaggcggagctgaagcgcgtcgacagggaggtgacgccatggctcttcatcagcacgcacgtgccgtggtacaacagcaacaacttccactacatggagggcgagccgatgagggcgcagttggagaagatggccgtcgacgcacgcgtcgacgccgtcttcgccggccacgtccacgcctacgagcgcacccacaggtactccaacatcaagtacaacgtcaccgacggcaagtgcacgcccatcgtcgaccggcgtgcgcccgtctacgttgttattggcgacggcggctacgtggaggggctcggcta

SEQ ID NO: 456156 - DNA, 397 bp, Sorghum bicolor
  unsure (1)..(397): unsure at all n locations
ccacgcgtccgtccttacaaactgccgttgcctccctccaggctccagcttcctccgcgcatggcctccatggcgttcgctctggcggnggccttcaagggcctctccctggcgcccaccaccacctncttcctgcgcggcgaccgcgtctcgctctccgtcggcggcggcagcggcgccgtgggcgtgtcggtgccggcgcggcggctcaccatccagatggcgcacaagatggtggccgggagcaccaaaaacggacgagactccaagggacagcgcctcggggtcaagatatacggcgaccaggtcggcagcccggtgccatcatcatacggcagcgcggcaccagggtgtatactggaaatacgttggaatgggcaaggatcatacactcttt

SEQ ID NO: 456157 - DNA, 335 bp, Sorghum bicolor
cgtccggaagccgcaacccgcaggacaggtcggcagaaagctcgacctctcgccgacggcgacatccggcggcggcggcggcggaggaggaggacaggatggtggccgagggaaagaggtggcggttcgcaatggtgtgctcctcgaacatgaaccggagcatggaggcgcactcgcagctgggccgcgcggggctcgacgtcgagtcctacggcacgggcacccacgtcaagctccccggtccctccctccatgagcccaacgtctacgacttcggcaccccctacggcgccatctacgacgacctccggcgcaaggaccccgacctgtacaag

SEQ ID NO: 456158 - DNA, 447 bp, Sorghum bicolor
cgtccgagacatacaagacaacaatcaagacatggctgtcatgagttttaagatacttcaatgtgattggatcagacccagagggacgtctaggagaagctccacggccagagcttcgtgagcatggacggatatctggcgcttgctttgatgcagctctgggaatcattccagggctaaaggttcgtggaactgattaccccactgcagatggaacttgcattagggactacatcgatgtcacagatcttgtagatgcccatgtcaaagctctcggtaaagctgagccaggcaaagttggaatctacaatgtcggaacaggacaaggtctatcagtgaatgagtttgtgaaagcttgcatgaaggcaacaggagctatcatcaatgatgaatatcttgcccgtagacccggagattatgctgaggtatacagtgttccatcgataa

SEQ ID NO: 456159 - DNA, 363 bp, Sorghum bicolor
cgtccgggcagagcgaccagtctccagagcgctccccatggcgtcaggagctgcggcggcccctggcgttcaggtgagcctccgtccatgcctctctcacctctccccacaagcactatgctcttcgatcccgtatcatcatatgagctgccaatttggttgtaaatgctaacccctcgattgctctgttctttccagaccgtggtgctgaaggttgccatccactgccatggctgcaagaagaaggtccggaaggtgctcaggagcgtcgaaggcgtgcagaacgtgacggtggacgcctcgcagcacaaggtgaccgtggttggcaccgtggacgccgacacgctgattcagaggctgtac

SEQ ID NO: 456160 - DNA, 449 bp, Sorghum bicolor
cgtccggctgttcgccttcgtcgagaagtgggcgcagcagaggtggcccaagtcgagctacatcaccggcgaggtcgacgtcccgctctccctcgccggagccgccggccggtgctacaagctcaacctgttcaggctcacgtggcggacggcgttcgtggtggccacgacggtggtgtccatgctgctgccattcttcaacgacgtggtggggctcctgggcgcgctgggattctggccgctcaccgtctacttccccgtggagatgtacatcgtgcagaagaaggtgcccaggtggagcacgctgtgggtgtgcctgcagctgctcagcctcggctgcctcatcatcaccgtcgcctccgccgcgggctccgtcgccggaatcatctctgacctcaaagtgtacaaacccttcgtcaccacctactgaagtgtactgatgactgatc

SEQ ID NO: 456161 - DNA, 471 bp, Sorghum bicolor
cgtccggtgagtactacgactaccgcaagtccatctacggcgacgtcacgcaccgcgccctcctcgtcgacgccgtcggcaccctcgtcgtccccgcccagcccaccgcgcaggtgtataagagcattggtgagaagtatggagtgaagtactcagaagatgagatcttgatgagataccggcgggcatacgagaaaccatggggtggatcacggctcaggtatgtggatgatgggagacccttttggcagcacatagtcacttcttctacaggctgttcagatgcacaatactttgaggaactttatcagtactttatgacagaaaaggcctggaagttttgtgatcctgatgctgaaaatgtatttaaagctttaaggaaagctggtgttaaaactgccgctgtctgcaattttgatacccgtctacgaccacttatgcaagggttgaaatgtgaccactgtgttgatg

SEQ ID NO: 456162 - DNA, 482 bp, Sorghum bicolor
cgtccgggaagaactgaggtggagcaacttcacaaaattttcaagctctgtggatcaccttctggtgactattggagtaaactggaagtaccacaaacagggatgttcaagcccagccgccagtatagggtgtgcattgctgagacatttaaagattttccacaatcagctgtagttcttctagataacttgcttgcactacaaccagatgctcgtggaacagctgctgaggctctccgaagtgattttttcaggaaaaaaccacttgcttgcagcccctcaagcttaccaaagtgtcccccaagtaaagagtatgatgttagacttggaagggaagaagctaggaggaaaagaaaggcagctgagagtgtaagtggatttcgatctgtcgaaacagaagatggaaattcttttgcaagcgagataacaaaggttgctatgattagacctgaatctgctgttgtaaggaatgaagtacttgg

SEQ ID NO: 456163 - DNA, 509 bp, Sorghum bicolor
  unsure (1)..(509): unsure at all n locations
cgtccggccgtctcggcgcctcgagctcgtgtcctcgctgccgtggtcaccacggggaagcatgaggaggaggcctgggatcgctggcttgcagaatgcggcggctactcgcgaccaattccggctggtcggggagaatgtggccaaggtcaggaccgatgtcatgaaggagcagcttgcgacgttccggtcacagctcgaggaatttgctcgcaagcataagagtgacatccgtaaaaacccggtatttagacagcagtttcatgagatgtgcgcaaaagttggagtagatccattggcatccaataaaggagtctgggcagaacttctagggattggtgacttctactatgaacttggagttcagatagttgacatatgcattgcaaccagatcgcataatggtggcctgattgatttatgggatctccgcanactgcttggtcagaagagaaaagctaccctggaatctatatttgaagatgactgttacgtgctataagcaagct

SEQ ID NO: 456164 - DNA, 545 bp, Sorghum bicolor
cgtccggccacagttcaatggagctgcacatgtatatgagcattttgtgaggccaatgattgtaaatcagcaagttgtaaacatctggtatattccaaagaaggatgaatcaggcaggcctgatgatgtaatttcagctgcacagagatacattgagcaaaatggatcaaaagcgtttgagaatcttgttaacaagtttaagagttcaaacccaaagcgctcaattctggaggaggtagaggttgaaaggagagccaggattcaacgagaatctgaagcaagggaggtgaatcctttcttcaatccagaatatcaatactaggcaacctgttttctttcactctccaggaatgtgctaggatcagtttggaggaagatgtctggatattagcactgcattttgcacctaccgagtcgataatattgtgtagctgtaaaaccatgcatgattgttgtaaatatgttgtagcgatggaactccttcatataatggcatgtcatgaatatttcatgttgctcaaaattatgtattcgtgacactggac

SEQ ID NO: 456165 - DNA, 555 bp, Sorghum bicolor
cgtccggtgtatgcattattgtttgatttgaagccaaaaggtagctctataagttcaaacgaggattttaattattagcactggtcttgaacatgcatggcaggcatcgctgcttggagaggccatcaccgggaagggcatccttgcccagctgaacctggagacgggcatccccatctacgaggcggagcccctcctcctgttcttcatcctcttcaccctccttggcgccattggcgctctcggtgaccgtggtcgcttcgtcgacgaggaggtcaccggcctcgacaaggccgtcatccaacccggcaagggcttccgcggcgccctcggcctcagcgagggaggtaaaaaagaagacattctgtcgcttgtttgtcgatcgatttgaacatttttcttattcttatatggtggtggtgtgcctgcggcgcatgcaatgcaaggccgctgtttgggttcaccaagtcgaacgagctgttcgtggggccgctggcgcaacttggcgtggccttcttcatcattggcgagatcatcacggggaagggcgcgctg

SEQ ID NO: 456166 - DNA, 534 bp, Sorghum bicolor
cgtccgggagtaccgctccgtcgtcgtcaaggagccgcgattcgtcgagtacttcagatcggctacccctgagactgagtacgggaagatgaacatcggcagcaggccagccaagaggaagccgggcggcggcatcaccaccctgcgtgccatcccctggatcttctcgtggacacagacgaggttccacctccccgtgtggctgggagtcggcgccgccttcaagtgggccatcgacaaggacatcaagaacttccagaagctcaaggagatgtacaacgagtggccattcttcagggtcaccctggacctgctggagatggttttcgccaagggagaccctggcattgccggcttgtacgacgagctgcttgtcgccgaggaactcaagccctttgggaagcagctcagggacaaatacgtggagacacagcagcttctcctacaggtacctttttttttaccaacaagttcactgcaggaatgatattcatgcactgcagactgcacgatatatatatatatatatatata

SEQ ID NO: 456167 - DNA, 483 bp, Sorghum bicolor
cgtccggacagcccaatgtcaccgaggctgccaggccggtctccatctccatgccgtggaagcaggggtgccgcgagtccatcaagagggcgcagtggggaggtgtcgccaaatgggcatatggtgcaggctccagcaaatgcgccgtctatcatcagctttgcagcagaggtgagaagggcgaaaaagggcgagaacagaattgaggaggcacacagattgcggctgctggacaatcggcatttgcagtggcgatgcatcaacgctcggacagatgcaacgcttctggtgcagagcttcactgctgagaaaacccttcacagtgcatggaaagaaatatcaagattgcgtgacatcgtcagcaccagaaggagcagactccagcttcaaaagcaaaaactcaagctgtttgctattcttaggggacagatgtcatatctagaggactggtctcacattgaaaaacatcattcaagtgcttta

SEQ ID NO: 456168 - DNA, 428 bp, Sorghum bicolor
cgtccgggaaagacgcgatggccatctggagctacctatgagggtgagtattctggtggctacgtattcggtgaaggcacctatacgggtccagataaaatcatctataagggacggtggaagttgaatcgcaagcatgggcttggacatcagacatatccaaatggagacatatttgaaggttcgtggattcagggagaaatagtaggtcatgggaagtacacatgggcgaatggggacacttacgttggcaacatgaaaagtggcaagatgtcagggaaaggaactcttacatggaaaaatggggactcatatgagggtaactggatggatggcatgatgcatgggtatggaatctatacatggaatgaatgcgggtattttattggtacatggacaagaggtctgtatgattggtaaggtaattt

SEQ ID NO: 456169 - DNA, 461 bp, Sorghum bicolor
cgtccggttaccatcggtaatgaatcaggttacagaaggcgtgtctgaattcaaaccaacaccacctgaaaaccgtgaattctgcaagaatgcctacagcgtacccaatacattattggtcaaattcagcgtagatgctattgatgatacagacatagttgaagatgtcctgagaccccgcattgactcaatcggtggacaaataaagaaagtaatactatcaggaacacatctaactccatgtatacaggatgtcaaatggcaagttggttcagaatacactccagcagatgccattgcacaaggattgaaatcattggctctcagtgaaacatgagtcctttcaagaactattgctgattggtttacatccctctaaattttgagttactcaatacatctgttggagttcagagtttcaaaggaatgcctttatcagctcttaactttccatttttgtt

SEQ ID NO: 456170 - DNA, 516 bp, Sorghum bicolor
cgtccgctggggtggaagtggtggcaccatatttgatgacggtgtatacactggtgtgtggcagatcaatttgacacgcgcagtgggaatttcttctattaaggttctgtatgatcgaaatgggcaggcagtatggggtaacaagcatggattcagtggaggtgttatacctgacaagataatatttgatttcccgtcggaggtgttgactcatataaccgggttctatgattcagcaataatcatgggcccaaccgtggttagatctctaacgttccacacgaacaagcggacatatggaccatatggggatgagtatggcacatacttctccacaagttttacaaatggaaggatagtaggatttcatggcagtgaggggtggtacatcgatggcatcggagttcatgttcaagaaggcaagttggcatcacagcgatttgttagcagaccaaagaccgcgactaacccatcggtacagtacaacatgcttgctcaagcgccgagcaatacata

SEQ ID NO: 456171 - DNA, 450 bp, Sorghum bicolor
  unsure (1)..(450): unsure at all n locations
cgtccggagaacctcaacccaaaggtcttaaaatgtgagtatgcagtccgtggggagattgtcatccatgctcagcgcttgcagcaacaactacaaacgcaaccagggtctcttcctttcgatcagatcctcttctgcaacattgggaatcctcaatctcttggtcagcaacctgtgacattcttcagggaggttcttgctctttgtgatcatccatgcctcttggaaaaagaggaaaccaaatcattgttcagtgctgatgctatttctcgagcaaagcagattcttgcaactattcctggaagggcaaccggtgcatatagtcacagccagggtatcaaaggactgcgtgatgcaattgctgctggtatcacctcacgtgatggattccctgcaaatgcagatgacattttcattacagatggagcaagtnctggggtccacatgatg

SEQ ID NO: 456172 - DNA, 468 bp, Sorghum bicolor
cgtccgagctcacgccagtagagatgagggccgcgtcgtccccattgcccgccgccgtcctcgcggccccctccgccgccgccgccctagtcgtaaagcctctgcctcgtgccgcagcgaatggcggcggcagcacaggcaggcgcgacgtcgtgcttgccgggaccgggctgggcgcggcgctggtgctggcgctgggtcccgtgtgcggcgcggcgcgtgcggcggacgatgagtacgtgagcgagaccaaggaggtgatcgggaaggtgcggtcgaccatcagcctggacaagtcggacccgagcgtggcggacgcggtggcggagctccgggagctgtccaactcgtgggtggccaagtaccggcgggagaagtcgctgctggggcggccgtcgttccgggagatgtactcggcgctcaacgccgtgtcgggccactacattagctttgggcccacggcgccca

SEQ ID NO: 456173 - DNA, 500 bp, Sorghum bicolor
cgtccgcgccaagtgcgagtgctgcggcatgtcggaggagtgcacgcccgagtacatccgcggcgtgcgcggcaggttcgcgggccgctgggtctgcggcctgtgcgcggaggccgtgacggaggaggccgagaagatgaacggcggcggcggcgggacgctggaggaggcgctcagggcgcacatgggcgtgtgcaagcgcttcaacggcttcggccggacgcacccggtgctgttccaggccgaggccatgcgggagatcctcaggcgccgggccaagctcggccccaggtccaggtccagcatcaaccctagggaggtcagggaagtcgccgtcggcgccaaggccggcagcggcggcggcggcactactgggatcgctcgcagctccagctgcatgcccttcatcaccgacgacttcaacgaacgggcaacgtcgtcgttcatcaacaaaaactgattcgaacaggttgtggttgacgatgatgagttttagcatg

SEQ ID NO: 456174 - DNA, 311 bp, Sorghum bicolor
cgtccgatatctctcgtgagactcttcagcagaacaagatcctgaaggtgatccggaagaaccttgtgaagaagtgtgttgagctcttctttgagattgctgagaacaaggaggactacaacaagttttatgaggctttctccaagaacctcagcttggcatcatgagactccagaacagaccaaatcgcggctttgaatacatcacagaggggtagtgcactagctcgcgatgaggcgacctttttatgggaagggatcttgataaagttgtgctgtcttattgatagtggaatgtcaggtactcgcgca

SEQ ID NO: 456175 - DNA, 395 bp, Sorghum bicolor
gtcgacccacgcgtccggttagaccgccgatatcagacaccagagagcggcgaatatacaactcacttgtgggtgctgggacatatatgttcaggatagatgatgaacgtgttatagatgctactcgggctggaagtatagctcatttgatcaatcactcatgtgagcctaattgctattcacgtgccataaccattcttggggatgaacacattatcattttcgcgaagcgggacatagatccatgggaagagctgacatatgattataggtttttttcgagtgatcaacgacttccgtgttattgtggattccccaaatgccgtggtgtagttaatgatgttgaggcagaggaacatgcagctaaaatcagggttaaagaagtgaatttgttt

SEQ ID NO: 456176 - DNA, 388 bp, Sorghum bicolor
gtcgacccacgcgtccgaaactgttgatgactatgacgagtattgtcactatgtggccgggctagttggttatggactttccagactcttttatgctactgggacggaagatcttgctccattcactgtcaaattcaatgggtctatttttacagaaaactaatataatcagggactatttggaggacataaatgagataccaaggtcccgcatgttctggcctcgagagatatggagtaaatatgcagataaacttgaggatttcaaatatgaggaaaattctgaaaaggcggtacagtgcttgaatgatctggtgactaatgcattgattcatgctgaagagtgccttcaatacatgtcagctttgaaggggtatgccattttccg

SEQ ID NO: 456177 - DNA, 382 bp, Sorghum bicolor
cgtccgcaaaaacctcctaagttttcgtggatattgtgccgatggacccgaacgcattctggtgtatgactttatggcaaactcaagtctctatgcacatcttcacggaccacattctgcagagtgtctccttgactggcggaggagggcatctattgccatcggcactgctcgggctctcttgtaccttcatcaccatgcaacacctaagataatccatggaagcatcaagaccaccaatgtgttactggattcaaacttccaggcacatgttggtgatttcggtctgataaagcttattcctgatggaatggaccaggaaaagataaccagcgaaagccaacgaggctatcttgctcctgaatacattatgttcgggaaa

SEQ ID NO: 456178 - DNA, 453 bp, Sorghum bicolor
cgtccggaaaaattccccattcgttccccttctcgcctccacgagccttccacaaatcggcctccccgattttcctcctaatctcactcaaacgctagccgaatcccagatccatccccagctctagcgtccccccctctcgccggcgacgaccatgggcaacccggagaagctgatgaaccagatcttcgacctcaagttcacctccaagtcgctgcagcggcaggcgcgcaagtgcgagaaggaggagaaggagcagaagctcaagaaggtggcgctcgtggtcctgaccggcgagcgcggcctctgcgggagcttcaacaacaacgtgctcaagaaggcggaggcccgcatcgaggagctcaagcagctgggcctccagtacagcgtcatcagcgtggggaagaaaggcaacgcctactttcagcgccgcccctacatcccgctggagcg

SEQ ID NO: 456179 - DNA, 429 bp, Sorghum bicolor
cgtccggatttgcacataccagttgttgctgcgcaaaatgcggaaatctacatgtgcgatgagccatcaagttaccttgatgtgaagcagaggctgaaagctgcacatgtcattcggttcttgcttaggcccaacagctatgtcatcggtgtggaacatgacttgagtgtcttggattacttagccgacttcattcagcatgttatatggcaagccaagtgctcatggagcggttaccttgccattctcagtccgtgagggtatcaatattttcttggctggattcgttcccacagaaaatcttctgtttcgagacggatctcttacattcaagattgcagagtctcaagaaagggctggagagattgatacgtatcaactgtacaaggtccctactatgagcaaaacacatggaaatttcaagcttac

SEQ ID NO: 456180 - DNA, 304 bp, Sorghum bicolor
cgtccgctcgtacctccagcagcagcagcagcagccagccaacaaccgcaccgcagcaagaaccaaccaacagcgacgaacatagcgagggagccaatggtgatgacgacggcggcgcagcagcagcgccgggacgcggaggcggagctgaacctccccccggggttccggttccacccgacggacgaggagctggtggcgcactacctctgcgcgcgggcggccggtcgccgcccgccggtgtccatcatcgccgaggtcgacctgtaccgcttcgacccctgggacctccccgagcgcgccc

SEQ ID NO: 456181 - DNA, 448 bp, Sorghum bicolor
cgtccggtcccgactgcctcatcgccgactggtgcaacccgtggacggcagcggtgtgcgcccgccacggcatccctcgcctggtgatgcactgcccgtccgcctactacctcctcgccacgcacagcctgtccaagcacggcgtgtacgaccgcgtcgccgacgagctggagacgttcgaggtgccggacttccccgtgcgcgccgtcgggaacagggccacgttccgcggcttcttccagtggccaggaatggagaactacgagcgcgacatcgtcgaggccgaggccaccgccgacggcctgctgatcaacacgttccgcgacctcgagggcgtcttcgtcgaccactacgaggcggcgctcggcaggaagacgtgggccgtccggccgacgtgcgccttccgcgggttggacgcggacgcaatggccgggcggggcaaacgcgc

SEQ ID NO: 456182 - DNA, 510 bp, Sorghum bicolor
cgtccgcctgcctcccatggccaccggcaccgagactatcgccgccgctaccctcggcaccaggcgcccgcgtcattcccgcactggcgcctgcttcctctccttccgcttccgtccctcaccgcagctatcagtcgccgtcgccgcttccgcgtccctccgcggcaaggccaaggctcacgcggagggcgccgacagcaaggcctccgccgccatcgacgaccaacacgtgctggatgtagcagagtcgacctgggatgacctcgtccttggctgcgagtgtccggtgcttgtcgagttctgggcaccatggtgcggcccttgccggatgatgcaccctatcatcgcggacgtggcgagagcatacaccggcaggctgcgctgcctcaagctcaacactgacaagaaccaagaagtggcgactaggtacgggatcaaaagcatccccaccatcttgattttcaagaacggggagaggaaggagaccgtgatcggggcttgcacggacac

SEQ ID NO: 456183 - DNA, 517 bp, Sorghum bicolor
cgtccgctctcgcatcggcatcgcatgccatgccctcgtcgacctcgagatcccacaccgcgtgccacgtcatcttcttcctcctgcgcgcaagaaggagaaggagactatactagtataagtagcctggagctggtggagcaggggggccgggccttgttgagtgagtgaggtgcatgcatcgctgcttgcttcgaggttcgtcgggggaggaggatgaactggattcaatgcacgggatgttgagggaggtgaggtgagagcacggcgacttttgcttgcttcaagtgccgtgccgggcagcagtgtagcagaagaagaggatgatgggagctctgcaagtgcagaggaagagcaacaatggcgaccgcgctgctgctggtgctgctgctgacgagctctttccggacccgggctacgtcgaggttgatcctaccgggaggtatggcaagtacgacgagattcttggcaagggattctcaaagactgtgtaccgggccttcgacgagcaccgggg

SEQ ID NO: 456184 - DNA, 524 bp, Sorghum bicolor
cgtccggaggattttggtctatgaatatatgccaaatggaagccttgactccttcatctttggtgcaaggacaagcaggttgcatctggactggcctacgcgctttcagataattaaaggaatagctgaagggatgctttatcttcataagctttgtggactacatattatacatggagatttaaagccaagtaacattctcttggataccaacatgaagcccaagatttctgattttggcttatctagaacatataatccgggagtagatgaagagtttgctgaccgcatagtgggctcaattggttttactgctcccgaatgtcaggaaagacgtgttttctccgtcaagtctgatgtgtatggctttggagcattgcttctcgagataataagtggtcacaggtgcttttctcttgcaagtggagaatctggagatgatcatggatttctgaataagaagggcgtgaagttatggagagcaagcggattgattaagtttgtcgattctcccccaggcgatg

SEQ ID NO: 456185 - DNA, 460 bp, Sorghum bicolor
cgtccggcgctctgcaccgagtaccctaagattatgcagcagggcttcgcatacctccccggcggcgtgtgtgtatcgagtatgggtcgggcggtgtcctacgagcaggcggtggcgtggaaggtcctgagcgacgacgacaccccgcactgcctcgccttcatgttcgtgaactggtccttcgtgtgagaaccggcccctacttagtagagccagtcagtcgcctagcatttgcagctgttatttgaactctgtgcccatgtactactgtcgcttttgcctgcctgtgtccaggccacctatatgaaacgcacctccccccagttcatcccgtggaacaaacagctttgtagttcgtctttgcttgcttgcttgctatcttatgatgatggaacctggtttgctgcattttctcctgaaaattggttggaccacttaaaaataagggctttctgtagtc

SEQ ID NO: 456186 - DNA, 462 bp, Sorghum bicolor
cgtccgtttttttatacacgatcaaattcaagtccatataataattaaaaagtgcatgatccttggtcttaggtatttaatacaatagcccacacataaagacaagtctagaataagcaataatagctagggaacgcaactagccactagtagaaagaacgtagatgcatgattagtagtttgtaattgggctgtgtgaccctacagttaactaaattcggtttaaacgaaattttgaattcgaaatatttcaaattaaaagtagaaaagcagaaaacggtcgaaaaatatcaaaaccattttctacttttacatttaaaatataaaacatctaaaatacgaaaacgaaaacgataaagtcggacaagaaaatacgaattcgatcggatcaaatatagaaagcgggtcagttcggttcgagatatttccggtccgttttcatccttatagccatgtatactt

SEQ ID NO: 456187 - DNA, 468 bp, Sorghum bicolor
  unsure (1)..(468): unsure at all n locations
cgtccgatcttcgccatcatgtgtgggtgtgtatgtatgcagctcgtcggctacgtgtcctaacccatggccagcagaagaacccgagtctctgcacagcacccatcaagtatcaattcgccaactactctgaaaactacatcttctggggcaagggcagcatccggctgcagctcatcaaccagcgctccgacttctccttcgccctcttcaccggcggcctcgacaacccgaagctgatcgcggtgtcggagccgatcgccttcaagaaccccaaggcgccggtgttcccacgcctggcgcagggcaagtcccacgacgagatgaccgtgacgtggaccagcggctacgacatcagcgaggcctacccgttcgtggagtggggcgccttgttggtcgccgccgncgcgcgccgncgtcgncggggcagaagtcgctgcaacggatcatcgtgtcggcgacatgggg

SEQ ID NO: 456188 - DNA, 364 bp, Sorghum bicolor
cgtccgcttcccccgattaccttctccgacggccactgcccaccgtcgctgcagcagctcctccctgctctccggtgactttcccgacgccggagtcgagcccccggtgccataagcccaaggttcgattgcatttagtgacgcctttgcctatatcagccctgtggtcataactctttagtagagaaaggagaagatgcaggcatctagggcaagacttttcaaggagtacaaggaggtacagcgagagaagtcagctgaccctgatattcaattaatatgtgatgattctaatatattcaagtggactggtcttatcaagggcccttctggaacaccttacgaaggtggggtgtttcaactt

SEQ ID NO: 456189 - DNA, 396 bp, Sorghum bicolor
cgtccgcttttctctctctccagaactctccccccgcagccatggcggaggacgcccccaacgccgccgccgagggcagccagcccgctccccccgagggatccgccgactccgcccccgccccggcggctaccgcgggcgccaaggccgcggaggcgctgctcccgtcgctcagcatctggccgccgtcgcagcgcacgcgcgacgccgtggtgcgccgtcttgtgcagacgctcgcggcgcccagcgtcctctgccagcgctacggcgacaagtacggtgctaacgtcgaccggatacagccaatctacaacgagaatgagtggtcttccagcggcaacgtctacgtcggtggaacgactgggcttttgatctgggccatcaccctcgctgggc

SEQ ID NO: 456190 - DNA, 495 bp, Sorghum bicolor
taccgatccgggattcgacccacgcgtccggctctcgcaactggacaagatgagagggatgcttgaatttattgcttccagttctatcgcacagattctatcaaaacatggcagaattacaagttacctacagaagttccatcctgatgaggatggtccttttggtataacagctcaatgtttggagacattcataaaaagctgcgccggttactctgtcatcacatatatattgggggttggagacaggcatctggataatcttcttctaactgatgatggacgcctttttcatgttgactttgcttttatcctgggtcgagacccaaagccatttccaccaccgatgaaactgtgtaaagaaatggttgaggccatgggtggtgcagaaagccaatattatacaagattcaagtcctactgttgtgaagcatacaacattctaagaaagttcagcagtctcatcttgaatctattcaagctgatggaacgatc

SEQ ID NO: 456191 - DNA, 391 bp, Sorghum bicolor
cgtccgctccttcgcccgccgcgccgtgacctccatcacctcgcgctcgcggtcatcgtcgccctcgccgctggggagcggggcgaaccggctgataacgcgttcgacggagggggcgcccactgcggacggcttccccgtggcggagaagacgacggcggcgacgcgcgcgccgcagaggagggagagctccgaggccttctttaaaagccccgacttgcgcttggagaaggtcaccaggcggctcttggggtcctcgataaggaccagctccctgcgcctccgcccctggctagcctttcctgtcccgcgcggcgacaccatcgcatggcccgcggcgttttcttggtcccgtacgtactgctctctccctctctcgctcttaatagcg

SEQ ID NO: 456192 - DNA, 372 bp, Sorghum bicolor
cgcgtccggctctcgcaaccgaacagatatggatgggttagtgttgctaatgcatctgatcttacttctgccttgaaggagatgaatggtaaatatgtcggaaaccggccaatcaaattacggaagagcacatggaagaacaggatagacttcgaatctttggagaagggaaagactcaaccacagaagaaaatcaaactgcagaaaaggagtgttcttcacaagtgaaactgaaaaaaatctgcttcttcatcgtctgtcagtatctatcacagttgggagggttgtcggcagctttaacagtttagcttaacatcaggtgtaccgtgtgcgtctactctgccaatccctgttgatgctatgttgatgact

SEQ ID NO: 456193 - DNA, 344 bp, Sorghum bicolor
cgtccggacgaacgtctggaacaagtcgtagagctagtagaaaagcttgcaaagctagattccatgctgggcatgcttgggttctcgctcggtgtattaacccatgtgttaacacatacgctctctcaagctattatagaagctgctatccaaatggtcaaccagggtgtagaaatcatgccagatatcatgggaacactagatgaatcaccacatgaagtgaatcatatcaagcatgctgttaaacaaactgttgacaatgcggttgacactgtgggttacactattggctctataattgaaactatgatggcaattctaatggctgatctagtggctgatca

SEQ ID NO: 456194 - DNA, 496 bp, Sorghum bicolor
cgtccggccagatgcagctgagatacagctcaaaagcccgaactggttgtttggtcaaagaaaacatacagagacaatgccaactgcaaaagttgccctagttgaaaacgtgaacgaggggaacagagatgagccaaatgtctctctttgtggggaattaaattggctatcctcctcaggatcatgcgaggaggacattttcagaaggtatcttgcattcacaacagcggatgtagagaatggctggtatggtggaacacttatatatgaccgagatgaaaacagcggagcttacaaacactactctgaactctgccagggagctgtcatggatcctttcgagcacgaccctgagaaagagcggcattatgcagaggcccttatcggggatcttgcgtttcaaatgatgcacgggtagaggccgaaatgcaagctgcgctggatgactaccagatcatagggtcagacctgagcattatcccttcatgcggagcac

SEQ ID NO: 456195 - DNA, 413 bp, Sorghum bicolor
  unsure (1)..(413): unsure at all n locations
cgtccgatcgggcgacggcgagctgagatagaggcaaataaggcggcagcagggagcatacaccggcgtgcagttccgccatgggcatcctggaccacttgtcgcatctgtgcagcctcacggagacgaaggaggcgctcaagctcaggaagaagcgaccgctgcagacggtgaacatcaaggtgaagatggactgcgagggttgcgagcgtcgtgtgaagagcgcggtgaagtcgatgcgcggggtgacgagcgtggcggtgaacccgaagcagagcaagtgcacggtgacggngtacgtggagccggccaaggtgctgcagcgcgtcaaggccacgggcaagaacgcccgaatgtggccctacgtgccctacgcgctcaccacctacccctacgtcggcggcgcctacgac

SEQ ID NO: 456196 - DNA, 381 bp, Sorghum bicolor
cgaattcccgatcaccggcgcgggcaaaaaacttccataaaccaaaacctgccccccccctacaattcacaacctaatatctgcggcctggacattctggggcggttccttcattctagtgggcctactgcgactaacgacacgctccatcccaggcccaattatcgcctggccatcgctacacccaactggaaccatcaattgcaccgtcgtgcccgatgcctccccaattgtctgaagccgacacctccgaccaccactcctgctccccaccgcactgataccatgttcacagtcacccaataagcacaatctgcccacggtctgcacaacctccaagtccgtagcaaaagccaagagttttctgcataaataccctac

SEQ ID NO: 456197 - DNA, 494 bp, Sorghum bicolor
  unsure (1)..(494): unsure at all n locations
cgtccgacttctggaccatctacttgccgtagaacctgggaataggggtaccgctgcatctgcccttgacagtgaattctttacaacaaagccgtatgcctgcgatccatcaagtctccccaaatatcccccaagcaaggaatacgatgctaagcttcgagatgaagaagctaggaggcaaagagcagctgctaaaggacaggaagctgaagctggacggaggaagcaacttcctgcacccgatggcaataatggattgcagcaccgccgagttcaggtgaatcccaaaagcagcagttacaagttcactccaaaggaggatgctgtttctggatttccaattgatccgcccgcaagagctgcagacaatggttacccttagcgtgttcctttgatgcaagctggccgttcttcctccactctgggcagatcaagtggaatggatccaaaggcccanaagatttcacacctnccaaattattactgctggagat

SEQ ID NO: 456198 - DNA, 469 bp, Sorghum bicolor
cgtccgagacgctgtccaaccttgggtccggtcattgcaaggccaccacttaatggctgccattcaaaatcgtttgcaaagcctgttgtcaaggtacagaggtcgatttagacatcacgatgtaaacaatgagatgctacatgggtctttctatgaagatagactgggaagggacattagagcttacatgttcagagaagcacataagcttgatccttctgctgtcctgtttgttaatgattacaacgttgaagatggatgtgacacaaaatctacccctgagaaattcgttgaacaggtcgttgatctccaagaacggggtgccccagttggtgggatcgtgtgcaaggtcatatcagccatccagtgggagaaatcatatgcgattccctggacaagctcgccatactaggtctcccgatctggattactgaattggatgtcacagcagagaatgaacacatacgag

SEQ ID NO: 456199 - DNA, 289 bp, Sorghum bicolor
cgtccggagaaaaaaaaaccaaagtagacggaatccaaaaacaccatgatacgggcccaaaccgataaaagtacctaagccctttatacggcgggccggcgggctacctgaccggtgagtccccccgcttctacccatggaactcctctttgctgtcggccaacccaaagacctgcgccaagaactcgaaactgaaggtgttccactcccgttgggccatgctggtaactctagggtgcgtattccccgacctcgttgaccatggatgtgacacaaaagctaaccccga

SEQ ID NO: 456200 - DNA, 187 bp, Sorghum bicolor
cgtccgggtaacggaggcgtgcaaagactcctggacgcaaaggtcatcagagaagtcatgtacccggaatggttggcaaatgtggtcttggtccccaagaaaaatggcaaaatgagaatgtgcatagattttacggatctcaacaaggcttgtggtcaaaagacatcaactataatccttttttcat

SEQ ID NO: 456201 - DNA, 514 bp, Sorghum bicolor
cgtccgacggcagggtttacgcattcagcattgacaattttaaaagggacccaagtgaggtggaagccttgatgcagttaatggaggaaaaagggatgaactattcgagagcgcgagagtgtaatcaacaagattaactgtaagatcaacttttggggcaacttggacttgttatgtgaaccaaagatgttgacggctgataagctgatggcgagcacagctgggaacacagggctggtcttttctgtctgcatgccatacaactcaacttctgagattgtaaatgctgtcagtgaagtctgtgcagaaagaagggaactgttgcagagtgaacatgctggcgagtgtaatggtcacgctgcaaataacggtgtgcattcagagatttcagtggcggatttggatcgccacatgtatagcgctggctgcccagatcctgatatcgtcatccgaacttcaggcgagactcgactgagcaatttccttctgtggcagacaacgtttagtcacctgc

SEQ ID NO: 456202 - DNA, 481 bp, Sorghum bicolor
cgtccgtgcttgcctacctgtttggcatgtttgttccctggagaattcttgctgttctaggcattttaccttgttcaatcctgattcctggactgttctttgtccctgaatccccaaggtggctggcaaaaatggggaagatggaggattttgaatattcactgcaagttctgcgaggatttcagacggacattacagcagaagtaaatgaaataaagagatcagtagcatcatcaaggaggaggacaaccgccataaggtttgctgatatcaagcagaagagatacagtgttccccttgcgataggaatcggtctccttgtcctgcagcagctaagtggtgtcaatggcattctattttatgctgggagcatcttcaaagctgctggtattacaaacagtaatctagcaacctttggtttgggggctgttcaggtgattgctacatgagtgacaacctggttgactgacaaagctggtcg

SEQ ID NO: 456203 - DNA, 383 bp, Sorghum bicolor
cgtccgcccacgcgtacgctttgtacaacgcccttcgatagatattagttcttgagcttcttggtttttgcaccaaaggacaagcaggatgtcttgcagctgcggatcaagctgcaactgcggctcaagctgcaagtgcggcaagaagtaccccgacctggaggagaagagcaccgcggcgcacgccaccgtcgtcctgagtgtcgccccggagaagaaagctgctgccaagttcgaggccgcggcggagttcggcgccgagacctcccacggctgcagctgcagtgacagctgcaagtgcaacctatgtacctgctgatcgcccgaacaccaacacgccgaggccgaaggcgcggagaagaatagcatcaacgcgttggcgg

SEQ ID NO: 456204 - DNA, 354 bp, Sorghum bicolor
  unsure (1)..(354): unsure at all n locations
cgtctcttgtcctcgcgcgnagcatgatcttcatgcgcgcgctgcaccgaccgcttcgcgcaccgacggccaagccgctgtcaggccgctcgtcttcccgccgaccctcccgtcccactctctccggctccgcgccgccggccgccggtcaactcgggcatccaaggttgtggtggcagcgttggctgacccactcaaggtcatgatatcaggggctcctgcatctggcaagggcacgcagtgtgagctcatcaagaccaaattcggtttggtgcacatctccgctggagaattgttgcgggccgagatcgctgctggctctgacaatgggaaggcggccaaggattcatggag

SEQ ID NO: 456205 - DNA, 516 bp, Sorghum bicolor
cgtccgcgcgggagaaaatctttctatcaggtcctggctgatgtatacgttgatccagaactgctggttgcatatgtcgcggaagaaaatcgttctgcatctgaagaatcagaaacaggaaggtttgatcacccctacattgaatgactcttttacggcgaggacacagctggggatttcatccctatcaagcagctccgtgagaagtatgaccagccacgttatgaagcttctggagatgaaagtgacaacgatgacaacacacatatgctgaagggccagtgccttcatgttgctagagttgtgttggaaccattttgattcaccaccaccaactgagatgcgaagtgatgaactatctggtacagcttcagacggcagatgtaagacatggcaaccatcggcgaactgtgcatcctcagcaactctgacgtattctctgcatatgccggccaacctagcagatcggagattaccgttttagagttgtaccctcaccactcgattaagccatgc

SEQ ID NO: 456206 - DNA, 489 bp, Sorghum bicolor
cgtccgctgggaccgtaatattgacgatgaaaatcggcagacaaaggacttcttgattcttgaaagtcatgaagaggctgcagaagaattggcgggcaaagcaaagtttttcttgagtgctgcagttgaaacctgggatgcagaattctatgtcaaagttgaggataacattaatcttgacttagctgggttaatcgagatgctcgaaggccgtcgaggtagccaaggattgtatatgggttgtatgaaatcaggggttgtcataagtgaagagggtcaacaatggtatgaacctgactggtggaaatttggagattcaaaaacgtattttcgacatgcttctggttctttgtttatcctctcaaaaaatttggctcgctacatcaacataaatagtgcatcggtccagagttatgcacacgacgacatatcagtaggttcatggatgatgggactgaatgcacttacgtcgacgatgaccgggtgtgc

SEQ ID NO: 456207 - DNA, 457 bp, Sorghum bicolor
cgtccgctcgtctctttcaccggcgactccgctctcctccgccgccgccaagagatcgaatccgacgccgagcgcccgatcccccaaatccacgcaccaaccgccggggcgcgcggaagattcagatttggcccctcaccggtaaagggatgggcgcgtggatgtcgcgcgtgtggttcctcatgttcccggcgcgggagtacaagctcgtcgtcgtggggctcgacaacgcggggaagaccaccacgctctacaagctccacctcggcgaggccgtcaccgccgcgcccaccatcggcagcaacgtcgaggaggtcgtcttcaagaacctccgcttcgaggtctgggatctaggagggcaagaaagcctgcgcacctcgtgggcgacatactaccggggaacgcacgccgtcatcgtggtgatggacagcacggaccgtgcgccgatcaacatcat

SEQ ID NO: 456208 - DNA, 401 bp, Sorghum bicolor
cgtccgctgacgtccgcgatcatgttccgcgccatcagcctcttgctgctggcatgcgccgccgaaggtgaagccgccgccgtcgtccacgccgtgccctcccccgccgtactcgccgtcgacgccgacgggcaagtgccccgtgaacacgctgaagctgctggcgtgcgtggacgcgttcaacggcctcgtgcacgccgtcatcgggccaaggccagcgcacctgctgccgctgtctcgggtggcgcctgacgcggcttgcttgacacataagcaaggctaggaggcggctccggcattggtgacaggcgacctcctcgtacggcgatacctctgatgtgtcttgcattgtgtaattccaatatgtgtgctagtttttggcgtatagcgttctttttgtc

SEQ ID NO: 456209 - DNA, 252 bp, Sorghum bicolor
  unsure (1)..(252): unsure at all n locations
cgtctcgccactcaancaggtacacgaccgtgcgatcgtatgctattgatgacgcacatatacgattagctgtacgctctagcttgatagatgcagatggctcacaatgacaacaatgcactacatgctgacagctgattctggatgaaagcatatatcaaactagccttgatcaacttgttgaggtatacaaacaagtccgaattgcggatcccgtggagaagggcaccttactgngaccactgcacactc

SEQ ID NO: 456210 - DNA, 343 bp, Sorghum bicolor
taaccttcgcgatcgtcatcggcgttcttgagttggtgctgtttgcgctgctcatcggcaacatgcagtcttatctccaaacaacgatggtgcggctggaggagtggcggacgaagcggacggacatggagcggtggatgcaccaccggcagatgccgcagccgctgaagcagtgcgtgaggaggtaccaccagtaccagtgggtggcgacgcgcggcgtcgacgaagaggccctgctccaggacctccccatggacatccgccgcgacatcaagcgccacctctgcctggacctcgttcggagggtgcccctgttcgacgagatggacgagcggatgctgga

SEQ ID NO: 456211 - DNA, 462 bp, Sorghum bicolor
  unsure (1)..(462): unsure at all n locations
cgtccgcagaggacttgtttggcagttgatttcaggcagtcgggacctcttactaatgaaccctgnggtttatgagacactggtgatgtatgagacatcagcttctgaattggaaattattcgtgacatatcacgcacatttccatctcatatattcttccaacaaaggcatggtccaggccaaagatccttgtataacattttgaaagcatattctgtctatgacagggatgttggatatgtgcagggaatgggatttatagctgggctgctgcttctttatatgagtgaggaggatgcattctggttattagtcgcatngctgaagggagctgtccatgcaccaatggaaggcttgtatcangctggtttgcccgtcgtgcagcaatatctgtctcagtttgagaaattaagtattgagctcatgccaaaattgggaccaaccacttgtgaagaaatgat

SEQ ID NO: 456212 - DNA, 294 bp, Sorghum bicolor
cgtccgaaatgtctgccgagtacgagaactgcaagcttcttttggttgacaagaagatcaccaatgcaagggatcttatgaacgttgtggaagaagccatcagaggtgcatacccaatcctgataattgctgaggatattgagcaggaggctcttgctactcttgttgtcaacaagcttagaggatcattgaagattgctgccatcaaagcccctggttttggagagcgcagatatacttgatatatgcatctactgacactgataagaaagtgctgatgcaggtcaatctgac

SEQ ID NO: 456213 - DNA, 277 bp, Sorghum bicolor
cgtccgccggagaccggcgaggtcatcggcgtcttcgagagcgtgcagccgtcggacaccgacctcggcgccaaggcgccgaaggatgtgaagatccatgggatctggtacgcccatctcgagtgattcgttcgttctaactgctactaggcgtcggaaccgtcatggatcggatcttgggaaagtgtaccacggagaactttggagagcagaggggaggagtcggttgacctataatgctattcgctgtggttaattcagtgagtttttctggtta

SEQ ID NO: 456214 - DNA, 364 bp, Sorghum bicolor
cgtccggaacggtgtgcctatagttttgcgccgtgtggatacagccctgaagaatatcggcatcaatgagcgccttccctgcgatgttgctctcattaagtgctgttcttggatgggtggtgaccgtgatggaaatccaagagttactccggaggtgacaagagatgtgtgcttgctgtctagaatgatggctgcaacttgacatcaataggtcaaacctgtgttgagctttatgggcgctgatgtgagctcgctgaccaaaagcaagactcactaagaagacagatacataactgacaatcccaacagctaccgggcctgggtgaggacagatcaaaaccagcgcacccttgtgcactgattt

SEQ ID NO: 456215 - DNA, 204 bp, Sorghum bicolor
  unsure (1)..(204): unsure at all n locations
gcagcggatccaagccaccgccgccaccatgggtatctcgcgtgactcgatgcacaagcgcanggcgaccggtggaaagcagaagggtggaggaagaagcgaaagtatgagctcgggcccagccggccaacaccaactgcaagcacaagacaggagaggtcgtgtcgggagaatgaagggagctctcgctgatactggactact

SEQ ID NO: 456216 - DNA, 430 bp, Sorghum bicolor
cgtccgcgcagggaccaaggagcaggaggaggagcttcagccatgggcggcggcaacggccagaagtccaagatggcgcgggagaggaacgccgagaagaacaagggctccaaaggcagtcagctggagacaaacaagaaggccatgaacatccagtgcaagatctgtatgcagacttttatctgcaccacctctgaggccaatcaaagagcatccaggcgagcatccaaaatgaccttacaggcttcccactaaaatataacacacattcttctaacaagcattctactacaaaagaaggcgatcaaagctgcgttataggacgtgcaaactatggaaggctactgtgtgtgtgtgactgcttcgtggtgccattaaatgaagaatctcgtgcagctgtgctaaaaataatctgggggctaacataatc

SEQ ID NO: 456217 - DNA, 285 bp, Sorghum bicolor
cgtgcgcgcctcgtcgcgtccaagcctcactcctcctcctccgcgccgtctccgcctccgccggcggcgaaggcagcggccaacacgaagacgttctcgatctaccggtgggacccggactcgccgtcgacgaagccgcacctcaaggactaccaggtggacctgtccgactgcggtccgatggtgctggacgcgctgctcaagatcaagaacgagcaggacccgtcgctcaccttccgccgcagctgccgtgagggcatctgcgggagctgcgccatgaacatc

SEQ ID NO: 456218 - DNA, 486 bp, Sorghum bicolor
cgtgcggtgtggtaaagatcggacaatcgttgtaccgcgaggctcctggaagtgatccattcagacctgatcagaagacgcctgttaaagacttcttcctctccggatcttacacaaaacaggactacattgacagcatggaaggagcaactctctctggcaggcgaacagctgcctacatctgcggcgccggagaggagctgctggccctccgaaaaaagctagtcatcgacgacagcgagaaggcgctggggaacgtccaagtcctgcagactagctgaacaaccaccctctgcagacaagtttaacctttccaaccacacatgctggaatggccaaatcatgtcttttctcgcttcaaggtgctggcgattcccgcagcgaccctctgtatatccaatttgagcattagatcttgccccctgcaggcggttcctatccctgaattcgaaaaggcagggtgtctaggtggcatacgggattaca

SEQ ID NO: 456219 - DNA, 369 bp, Sorghum bicolor
  unsure (1)..(369): unsure at all n locations
cgtccggngaaatgccaagtggaactgtcataccagttggaagaaggcttttactgtttgtggatgatcatggaaattcatctctcagccatggtagtggaagtgaaattggaagctttcttggttgggctatggcaataatttatatgggtgggcggcttccccagattntgttaaatatgcaaagaggccatgttgaggggctgaatccattaatgtnttgccttgcttagtggaaatcaacatacgtagaagatactgtaatagcatgactggcaaactagccatattccgggctgaacctggagaggttgtgatcttatatctcagtcttattatatggagaaggagctcgatacatacatcaat

SEQ ID NO: 456220 - DNA, 437 bp, Sorghum bicolor
  unsure (1)..(437): unsure at all n locations
cgtccgggggagaggctgcgagagggaagcgaggagagagagagggtgagggtaaggggaggcgccgacgccgagttcttgctccatcccgcggcggcggggcggatcgtgatggagctgtacgcgaacgaggtgcccaagacggccgagaacttccgcgcgctgtgcacgggcgagaagggcgtggggaagtccgggaagccgctccactacaagggctccaccttccaccgcgtcatcccgcagttcatgtgccagggcggcgacttcacccggggcaacgggaccggaggcgagtccatctacggcgacaagttccccgacgagaagttcgtgcgcaaccacacggcccccggngtgctctccatggccaacgccgggcccaacaccaacggctcccagttcttcatctgcaccgtcgataccccctggctcga

SEQ ID NO: 456221 - DNA, 487 bp, Sorghum bicolor
attcccggtcgaccgacgcgtccgtatgtcaatatccaagagctctccttcctacttggccaagctgcaatgggatgaggtgcaagccactgttcagaaaatccagggtatctttgagcaatgcttagcagttcatgataaactggaggcctcgttgcgtgatttgtctaggacaggagacattcagtcttgcaaggcagctcgtaaagctgctgacgcacagtttaaggagctatcaaaagatctgaagccgctgttgatgactctacagtcatctccccagtcttatcagatatggccaaaggtagaggacttgattgcaaaggagagagagatgcaggctctaatccaatatccagatataacaaccgcagccgttgctaaacaagctttggagggacactgcatatatgatggtggttactgtaagcttcatctgtcatactctcgtcatactgatctcaatgtaaaggcgcatgatgagaga

SEQ ID NO: 456222 - DNA, 430 bp, Sorghum bicolor
cgtccgaccgtggtcacgttccgggggccctcggagtctcaccttgactcgcttgtcggccaagctctcttcggtgacggcgcagctgcggtgatcgtcggcgcagaccccagcgagcctgctgagcggccattgttccatctagtatcagcgagccagaccattctcccagactcagagggtgccatcgagggccacctccgtgaggtggggctcaccttccatctccaggacagggttccacagctcatctccatgaacattgagcgcttgctggaagacgctttcgcaccgcttggcatctccgattggaactccatcttttgggtggcgcaccctggcggtccagccatactgaacatggtggaggctaaggttggccctgacaaggccagaatgtgtgccacccgccacatccctggcagagtat

SEQ ID NO: 456223 - DNA, 492 bp, Sorghum bicolor
cgtccgatggggtggtttcccaggcctagagagagagtttgaaatggcaaaaacttatttgaagccaacatttggagggactattgttgatgcaagttgtggaagtggcctgttctcaagattgtttgttaagagtgggctatattctcttgttgtggcactggatttctcagagaatatgttgaagcagtgcaatgaatacatcaagcaggaaaacatttcagatgagagattagcattggtgagggctgacatatccagactcccttttgtgagtggttcaattgatgctgtgcatgcaggtgctgcaattcattgttggccatccccagcttgtgctgttgcagatatcagtagagtccttcgcccagggggagtttttgttgcttcgacattcgtagcagatgttattccaccagttattccagtattgaggatcggacgaccgtacattagccaaataactggcaacaataccttcttatctgaagt

SEQ ID NO: 456224 - DNA, 511 bp, Sorghum bicolor
  unsure (1)..(511): unsure at all n locations
cgtccgcaaatggtgaagtctcaattaaagagaagattttggatgagggtgacaggattttgtcagtaaatggccttgtgaagtcacatgttttgaatggactttgcacagctgtgtataatgacaatgcgatgaacattaaatatcgctacaaggatgatgaaatatcatttgtccccagcatctcgttaccatccaatactctgtcatttgcattcaagcgccaattaacgcctttggacaagttgagctattggtacaattttgacacaaactactggagcgccatctacaaacacaaggctaacaagcatctcaagtggaaagctggctatgagtcagacaacaggcttggatgggcatcgctttgggttggagatgctggtggcagtacaaaggaggtgccattcaaagccaaagttcgcctcacgcttaaagttccccaggacaatatgcggaattcaacctgagtgtttcatgtgaagaaaagatgggattnttagtttctatg

SEQ ID NO: 456225 - DNA, 564 bp, Sorghum bicolor
  unsure (1)..(564): unsure at all n locations
cgtccgcttcctcgcagcgccggcgctccatcttctgctccgtcccccactcgcgctcggcatgacggcgacggaggcggcgctcaggctcgggctctcagcgacggcggggcagtcccaggctcggcggcggcatcagcggctcctcctcccgcctctctccagtagcctcacgacctcgcctccgtcctccgcacaccggccggcgaccctgcgattcaaatctgtatcacatggtgtttcttcacagcatgctgagaggatacactgccgttcttctctcaggcaaaacacaatagttgcatctgagaacgaaaatccacctttaatgccggcaatcatgactcctggtggtgctcttgatctcgcaactgtactactgggaaatcgtgtaatctttattggtcaatatattaactcccaggtggcacaacgtgtgatatcacagcttgtcacactngctgccgtcgatgaagaggctgatattctgatctatcttaattggcctggtgggaggctctattcgatcttagcgatttatgattgcatgtcctggataaagcc

SEQ ID NO: 456226 - DNA, 432 bp, Sorghum bicolor
cgtccgcgacatgctgggcatctacctgcagcgctccacgatcctcctcatggcgaccggcgtcccactcgccgtcatctacgccttctcccgcccgatcctcgtcctcctcggcgagtccccggcgatcgcgtccgccgccgccgtcttcgtgtacggcctgatcccgcagatcttcgcgtacgcggccaacttcccgatccagaagttcatgcaggcgcagagcatcatggcgcccagcgcctacatctccgccgccacgctcgccgtccacgtcgcgctcagctacctcgccgtctaccggtgggggatgggcctgctcggggcgtcgctgatactcagcctcagctggtgggtcatcgtcgtcgcgcagttcgtctacatcgtcaccagcgagaggtgccgccctacgtggacgggcttctcgtggga

SEQ ID NO: 456227 - DNA, 225 bp, Sorghum bicolor
  unsure (1)..(225): unsure at all n locations
cgattcccgtcaccacgcgtcggctcgctgtccttgcggatatctcgcctcgtctactgaccgtcgcatctacggcggcacatcaacccggcggtgaccttcgggctgttcctggcgaggaagctgtcgctcaccacggcggtcttctacatcatcatgcagtgcctgngcgccatctgcggcgcgggcgtcgtcaaggggttccagcaggggctgtacatgggc

SEQ ID NO: 456228 - DNA, 448 bp, Sorghum bicolor
cgtccggttccgatcctcagcagcaagctcactagctcagcacaccggcgatggcctccaccgccaccttcctgtccaccctcgccaccaggtccgcggcaaccgttagcccgcgcagcgccgccgagccgtccggcgccaagatcgtcaggttcttgcccgcccagatcagccgcacggggcgcgcggcggcggtgctgcccacgccgagggcggcggtctcgggcaccgagaagcaggcgccgtcgagcaagcacgagcgcgtggtcagggtgcacagcacccaggagttcgacgacgcgctcaaggccgccaagaaccggctggtggtggtggagttcgcggcgagcgacagcgagagcagcagccagatctacccgaccatggtgcagctcagacgaacctgcggcgacgtcgacttcctgctcgtcctgagcgacgagtcgga

SEQ ID NO: 456229 - DNA, 410 bp, Sorghum bicolor
cgtccgggagccttgtacccaacaaggcacaagggcccgtcagcgacgacaacctgcgcgacatggcctacctgagagcggtggtaaaggagtcgctccggctgcacccgccgacgccgatcctgacggcacacttcaccatggccagctgcagcgtcgacgggttcgcggtcccggccggcgtgggcgtcctggtcaactcctgggccatcgccacggacgcgcgcttctgggaggacccggaggccttcgcccccgagaggttcgtcctcgacggcggcagcgcggcgggcatcgacttcagggggggccgacttccggctcctgcccttcggttccgggcgcaggatgtgccccgggatgaactttggcgtcgcgtccgtggaggcgatgctggcgaacctcgtgca

SEQ ID NO: 456230 - DNA, 411 bp, Sorghum bicolor
cgtccgaaagatggaaatcttataataagcatgagtagggagagcacaattcttctatttgatagggagacaaaacaagagaggttaattgaagagggtagtacaattacttcattttctctatcagaagatggtgatttcctgcttgtaaatcttataagcgaagagattcatttgtggaacataagaaatgatcctgttcgagtcaaccggtacaagggccataagcgcaaccggtttgtgataaggtcttgttttggtggatctgagcaggcgttcatttgctagtgggagtgaagattcacaggtctacatatggcatcgagcccactgtgatctcattgagactcttgctggtcactcgggcacagtcaaactgcgtaagttggaaccctacgaatccccacatgc

SEQ ID NO: 456231 - DNA, 396 bp, Sorghum bicolor
cgtccggcttctggtactgctattggatatggttcagcattgactatgactgatacatcaaacaagattaagaaggggacaaaaggagatgtttctgtactgaatcctactcttatgatttcagttcctgcaattttggatcgtatcagagatgcagtgtttaagaaagttggtgagaagggtggcctgacaaaaaagctgtttgattttgcatataagcgaaaccttgcagcaattgaggggagttggtttggatcttgggcaccggagaggatgatatgggataacattatttataaaccaataagggcaatgcttggaggacgtgtaagatttgttctttgtggggtgcacctctatcaagtgacacgcagagatttatgaatatatgtctag

SEQ ID NO: 456232 - DNA, 362 bp, Sorghum bicolor
  unsure (1)..(362): unsure at all n locations
ccacgcgggcgcaaactgcctaatccaccctccaagctagagcattctccgcgcatggcctccatggcgtacgctatggcaggggccttgaagggcctctacctggcgcccaccacgacctccttcctgcgcggcgaccgagaatcgctctacgtcggcggcagcagcggagccatgggcgtgtcggtgccggcgcggtggcttaccatccanatggcncacaagaagggggccgggagcaccaagaacggacgagactccaatggacaaaactttantgtcaagatatacggcgaccaggtcntcaagccctgggccagcataatacggtaggacggcaccagggactatactggaaataa

SEQ ID NO: 456233 - DNA, 405 bp, Sorghum bicolor
cgtccgggcttcttcttcgaggccgtgcggcgcgagtactaccacccgatccgggtgaacttcttcttcgcgccgtggatcgcctgcgcggatgctagtcatcggcgtgccgccggtcgttgccagggagcccctgccgcagtggctctggtacgcgctcatggcgcccgtgctcaccctggagctcaagatctacgggcagtggatgtccggcgggcagcggcgcctgtccaaggtggccaacccttccaaccacctgtccgtggtgggcaacttcgtgggcgcgctgctgggcgctagcatgggtctcaaggagggccccggcttcttcttctccgtcggtctggcgcactacaccgtgctggtcgtgacgctgtaccaacggctccccaccaaacgagacgc

SEQ ID NO: 456234 - DNA, 431 bp, Sorghum bicolor
cgtccgggaagctgatgggccggagggaacaacattgctaaaatacaagattcctaccagaggcctcattggacttcggaatgcagttcttacagcttctcgtggcagagctatactgaacacaatctttgacagctatggcccatgggctggggatcttagctcacgtgatcagggatccttggttgcttttgaagatggaagcactacttcttacgcacttcttaatgcacaagaaagaggtgtgttgtttgtccaaccagggcaggatgtttacaaaggtcaaattgttggtatccatcagagacctggtgatttagcaattaatgtgtgcaagaaaaaggctgctacaaatgttcgttccaacaaggaaactacagtggttcttgatgaagctttaagctacagtttggatgactgcttagagttta

SEQ ID NO: 456235 - DNA, 429 bp, Sorghum bicolor
cgtccggcattctttgacagaccctgtggctatgtggcacgtccgtgctgagattgctcccgcaattcttttggtggttgattttggaggatggtataaagttgactcaaagtccgcaaacagaaactcgtctcgtatgatacagcacacccaagtgtcattgcttaaggatgttattgtgccttacacgcatttgcttccgacactcctcttatcagagaataaagatcgtcccacccttctctacttcaagggtgcaaagcataggcatcggggtggtttagtgcgagagaaattatgggatttgctaggtaatgagcctgatgttatcatggaagaaggcttccctaatgccaccggacgtgaacaatcgataaaagggatgcagacatcggaattttgcttacacccaactggtgacaccccaac

SEQ ID NO: 456236 - DNA, 445 bp, Sorghum bicolor
cgtccgaaagaagcgcttgaaggttcagaggaagaaggaaaagaagaagaggaaggaggcaaataaaaatgatccacggcgcatcaggcccaagggaaagaagataaaacaaaaatttcccacaccagaagctaggctcaaatataagatcgagaaggccaaactaaaggaagttaggttggtcgaaaaactaaagaagtatgaggttgccaaagctcaaggccctatggctaaaccagatgatctcagtggcgaggaaaggttttacttgaagaaggtttcacagaaaaaatcaaattatgtccctgttggaaggcgaggagtgtttggaggcgtaattctgaacatgcatttgcattggaaaaaacatgaaactgtgaaggtcatatgtaagccctgcaaaccaaggcagatccaggaatatgccaaatgagatagcacgact

SEQ ID NO: 456237 - DNA, 191 bp, Sorghum bicolor
cgtccggcgcgagtgtggcattcgccagacgctccccgtggtgccgctgttcgagaggctggccgacctgcaggcggcgccggcgttcgtggagaagctcttttccactgactggtacattactaccctgcgtgccatcctttggatcttttcgtggacacagactaggttccacctccccgtgtggctgg

SEQ ID NO: 456238 - DNA, 369 bp, Sorghum bicolor
  unsure (1)..(369): unsure at all n locations
cgtccggctctacgcgatggcgtacgggaccgtgcccgtggtgcacgccgtgggcgggctccgggacacggtggcgccgttcgacccgttcaacgacaccgggctcgggtggacgttcgaccgcgccgaggcgaatcggatgatcgacgcgctccatcactgcctcaacacgtaccggaacttcaaggagagctggcgcggcctgcangagcgcggcatggcgcaagacctgagctgggaccacgccgccgtgctgtatgaggacgtgctcgtcaaggccaagtaccagtggtgactggtgagtgggtttaactggcgacgccgacgccctcctgtcgcgggacctggacgcgttggggcatgtatttc

SEQ ID NO: 456239 - DNA, 413 bp, Sorghum bicolor
cgtccgggaattcattgtctctgtcttggttgttattggatggatattggttactgggacgtttatcctgtgcggtgtctttcttcttctgcacaatgttgtttcagatacttgtgttgcgatggaagagtgggttgctcatccaacagaacacaccgccctggatgaggttatcccctgtgtcgagcctgccacagcaaacgaatccctgtacagaagcaggcaggtcaccttcgagctggtgaacgtggtgaaccaggtgatcaccaacgtgtcgaatagaaacttccctccacagttgacacctttctactacaatcagtcagggccattgatgcctctgctctgcaatccattcacacctaatctgagggaccgcaactgcaccccgagggaggttaccttgtacaatg

SEQ ID NO: 456240 - DNA, 524 bp, Sorghum bicolor
  unsure (1)..(524): unsure at all n locations
cgtccgaaaacactggcttccatagaagggagaccctatgcggcaggaggttcaccaaagactacaaggaagactgggacagaggaatcaagacagagcacagctgcatagaaaagactgaagagaaagcaaagtcattagcaacttgcacttacgaacataacacgcagtggggagatgagatgggactgaaatatggctgcccagtggaagatgttatcaccggactggcgatacattgtagaggatgggagtcggtctatagcaatctcccaagatctggatttatcggtgtagggccaacaacacttgctcagacaatactgcaacacaagcgatggagcgagggtaatttcagtatttttctttcaaagttctgccccttcttgtatgggcatggaaaaaccaagttaccccatcaaatgggatactcaatctatggtttatgggcacccaactcactgcctacactgtattatgttgtcatcccctnncnnttccttctcaagggcatccccttgtcc

SEQ ID NO: 456241 - DNA, 394 bp, Sorghum bicolor
cgtccgcacagagccgagccatctaccattgacagcacgcagacgaaggagcgcgagcttgtttacacagctggccgtagaaacacaggcagccaaagccgacaccgcttttaccgaccgaccgatcgttgttgccgccgcctgtcgggtttaagcaaccaaccagaccaagccatgggattgccggtgatgaggagggagagggactcggaggcggagctgaacctggcgccggagttccggttacaccccacagaccacgagctggtggagcactacctgtgccggaaagcgcacgggcagcgcctcccggtgcccatcatcgcggaggtggacctatacaagttcgagccatgagacctgcctggtcacgcgctgttcggtgtcagggagt

SEQ ID NO: 456242 - DNA, 422 bp, Sorghum bicolor
  unsure (1)..(422): unsure at all n locations
cgtccgattggtgaccgcatgagcaaggagatcactgcacttgcccccagcagcatgaaggtgaaggtggttgctcccccagagaggaagtacagtgtttggattggtggctccattctagcctccctcagtaccttccagcagatgtggatctccaaggcagagtatgatgaatctggtccggcatcgtncacatgaagtgctttgaattttggagcagttattgtacttgatttcagtatggatgcagatgtcatggtcttagctctggtctttgacatgaagctgtaccatgatttggaaaggtaagtcacgtgtctcatgaaaacattcattcttagcatataatcgcaggcagttagtttttttcccaacagcacctatcagggcgttctgagtgtgcagttgatctggtttttaca

SEQ ID NO: 456243 - DNA, 382 bp, Sorghum bicolor
cgtccgagccctcacaccgcgccgtacgcgcccggatgcacatgcaggggctaatactggaatcgaagcgtatactgaccgaagggaatgacctgcgtaaggaccctccgacatcatgcatcgcaggtcctgcttgcgaggatatgtgccactgccaagcgaccgtcatggatacttcagatagtacatatgctgcaagtgttatagtagcgaacattcatttatggacagactaccggttcaagtcttctaaggcctgttgcacgacgaatgtgttagatcctaacatcaataggaatgaaagcatctgtctcgacattcttacagtgcatacaagccttgctctgacaagccataaggatctgctttatatttgatgaat

SEQ ID NO: 456244 - DNA, 452 bp, Sorghum bicolor
cgtccgctccagccagccagcagcacaagcgaatcgagtgctcttgagcttcgcccccgatggcgtggtgcctctcggctccggccgccgccccgccggtggcggctgtgcccggcgcccttggcgtctccgccctcgcgcgtgcgccggttcccgccggtaggcggcgcaggtgggacgcgctcgtggtctgcgcggcccccgatgaggagaagattaccaagcggtcgcccctggatttccccatcgaatgggagagaccaaagcctgggaggagacctgatatcttccctaagttcagcccaatgaagacaccattaccgcatccattaccagctgatgatcctctggatgatgatgaagaggaggaagaggaagaacaaccacaacctcaggaggagccacaagaggatgatccagacaaggaagaacctgaggaagatgacccggac

SEQ ID NO: 456245 - DNA, 435 bp, Sorghum bicolor
  unsure (1)..(435): unsure at all n locations
cgtccggagaatataaagctgcaataaaagattatgatgatgtacttgatttggaacttgattccatggataaatttgtgttgcaatgtttgtccttctaccagaaggaaatggctctatatattgcttcaaaggccaatttggagttctctcagttcaacattgatgatgatgttgacccactatttaaggaatattggtgcaaacgattacatcccaaaaatgtggctgaaaaggtttatcgccagccaccattgcggatctcattgagaaatgggcgccttaacaagcaagacttcaaattcacaaagcatcaaacaacccttcttctagctgcagattcaattgggaagaagattcaatacaattgccgtggcttcttaccaaatcaacgtcagnaccgcatggctgggttggctgctattgagattgctc

SEQ ID NO: 456246 - DNA, 490 bp, Sorghum bicolor
  unsure (1)..(490): unsure at all n locations
cgtccgtgcagatatggctgctaagttagcctcagagcttatgccgtctgatgttgccaaggcattgtggggtacaaccaagagttcttcaaagataaataaagaagttcaggagcttttaaggcttacgttaagcaaggcccgagtcaagctgaccgagaataccatttttaatcggatcattatggacactaacagcacggatccatttaatggtctctatgtgggagcatttagtccatatggaccagaaattgtgcagctccgtcggaagttcggccactggaatagtactgatgacgttgagtttttcgagtatgtcgaagcagtaaagttgactggtgatctgagtgtccctgctggccagataacgttccgtgcgaagattgggaagggcaagcgacttgagaatcggngcgcgtatcctgaggaattcggtgtggtgctagttattaaggtcagggtagaatagctcagcctggattcaaaa

SEQ ID NO: 456247 - DNA, 457 bp, Sorghum bicolor
cgtccgggtttctgaacctgttcgccctggaatatcaagtggaagaaatgccaaggggaaagtaatctgcttgaacaacacaggctttgctctgaggattggttggctcaatgcaatccgtgagtggcaggaagagtttgttggtaatatgagttctagggaatttgtcttacctgaaaaaagttctgcacatgtatcccgactgcagtttagtgaggaaccaacttggatccctgctgctgtggagtggagattggatggcttctcataaagcaataagggttaccactctgttgtcacatggacacgcatccagtatgggcctaagatcaccacatcatgttcaagcctgtgcaatggtttcttgctatgctacctgcccaaattacgcaaagttctctttcgcaacatgtgaacaccaatacctaagtggacctgatgcaatacaccacctgca

SEQ ID NO: 456248 - DNA, 402 bp, Sorghum bicolor
cgtccgattgaggaatggcattcaccatatgaccaagaggatccatacttcgaatctttgatggacaacttcctcagtgcatccggagatgtttgcaaatctatgttaccagcaaagaacactatatataaagagagaagtcatcaacaacaatctattgattatgcagtgagtgccctaaaacattacaacaacaatgagaataacaaggttaaatatgagttaattgatgctatcacaagcggtggaatgatagatatgaatgacggctatggtcatgtgaattttacagcaaaagcaaatcaggaaaattcaaaagaggagcttttctttgctgagttacgattccacgacaataatacctatatagcaacctgtgtgctttctctggagggggagaaa

SEQ ID NO: 456249 - DNA, 451 bp, Sorghum bicolor
cgtccggccgcatacacataacctcgcccgcgccgcctgcccaaggagactcgatacctctcgcttacggcaacgccttcacgctctcgcttacggtgacgacgcccgccactccctcgtcgacgagatgacgaagcgcaccaagaaggcaggaatcgttggcaaatatggtaccaggtatggtgccagtttgcgtaaacagatcaagaagatggaggtctcccagcactccaagtacttctgtgagttctgtggcaagtttgctgtgaagaggaaagcagttggtatctggggatgcaaggactgtgggaaggttaaggctggtggtgcctacaccatgaacactgccagtgcggtcactgtcagaagcacaatctcgggcctgcgggagcagaccgaagcatgagtatggacagtttgaaaagggaatacctggattttgtagttcagc

SEQ ID NO: 456250 - DNA, 199 bp, Sorghum bicolor
cgtccgctgaaactggtccataatcaggtcgaagacctgatgtttgagctctctatgtggcgctgcaatgatgagcttcgtgctcgagccgaagaagtccaaagtcctccagcttcaaagaaagttaccaagttttccatagaattttggaagcaaattcccccaaacgagccttaccgggtgatccttgttgctgtag

SEQ ID NO: 456251 - DNA, 196 bp, Sorghum bicolor
cgtccggaattaattcatcactggttcatatattacacatcaccaagtccctacagcgaggtgtttggactgcagcggttcctccagtgcgagctcatgcacgtgcgctaggccatgctcgccacgctctgtgccctttccgtggagtggctcaccggcgtgacctgacacgacgccggcaaagttgatctactgg

SEQ ID NO: 456252 - DNA, 172 bp, Sorghum bicolor
  unsure (1)..(172): unsure at all n locations
cgtccgctagttctagatccaccaacgtgtatgcttacatcttaataattgctctcattgtttgcattccacctgcaataattgggagtgngatggaattaccacaagtagaaaaaaataggatccatgtgtcatacttaattgtatnngngaaatacttccataattgtgc

SEQ ID NO: 456253 - DNA, 461 bp, Sorghum bicolor
cgtccgaattcatagcggaggcagccggaaacggttcacagctagtgctatttccagaagccttcattggtggctaccctcatggatctacatttggactggctattggcaatcgcactgccaagggaaaggaagacttccaaaagtaccatgcagctgccatagatgttcctggtccagaagtgtcccgcttagcttcattagccggaaaatacaaggtgtttctggtgatgggggtggttgaaagggcaggctacacactctacaacacggcgctcttcttcgatcttgtgggaaaatttctagggaagcaccgcaagctcgtgcctactgcactggaacgtaccattctgaggtttcggaagatggatctacgctgcccgtctttgataccccgttgggaaaaatcggtgccctcctctgctgggaaaacaagatgccacttgccaggacagccatgt

SEQ ID NO: 456254 - DNA, 411 bp, Sorghum bicolor
cgtccggggagatcgccgtttggttcctctacaacgcgcccgccggcgagatccactacgtcgccaaagatgtgcgcgcgctgctgggggacgacgcggtgtacgaggccgtcgacgcggaggcctttccggagtacaacaaggcccgcctcgtctacttcgagctccccgaccgcagtggcgacataatcatcttaacttatggggagattgacaagaataattatctggaccccaggactgcacaagttgctactatagatcatttgaaacagacctgtacaaaactgaggcctgctgaagatgaggagcttccatcagcttacattgaagagtttaggtgtgctttagatgttgaattgtcaaaatacgttgttgaagcttagtccaaaggggcgctgtgccatttat

SEQ ID NO: 456255 - DNA, 393 bp, Sorghum bicolor
cgtccgcccacgcgtccgcatcacccaagcttccaaactcactctctcatctcgagcattctactcgtccaacctcggcccatttgccaaaaaagtcaccgagttgtttggtttcgacatggtcttacctatgaacactggcgcagaagccgtcgagacggcaatcaaattggcacgtaaatggggatacgaaaagaagaagattccagaaggaagggcaaaggtgctcagcgtcgaaggtaatttccacggtaggactattggaatcatctcaatgtctacggatgaagagagtcgacgtgggtttggcccgtttttggaaaacgtctgtccgcaatggggcgagactttgatccggtacaattatgtcgaggatcttgagaggggtttgga

SEQ ID NO: 456256 - DNA, 284 bp, Sorghum bicolor
  unsure (1)..(284): unsure at all n locations
cgtgcgcaacgccctccgaaggatcaaacttttacccaaatgcattaagagcagttgtgctgacatctgcagtctcacaatctttgcatgaacttgcagtgaaggttgttgcagctaatatggttagaacggacacattgctgtctggcacgcatcttctctgtgctgttggaagatatcangaagcatgttcacagcttcaagatgctgtgtgctggaatgatgctgctactctggccgcatgccatctacatggatctgactatgcaaggatactgtacagg

SEQ ID NO: 456257 - DNA, 205 bp, Sorghum bicolor
cgtccggccgtcgtccacctcccacatgacggcgctgcggtcgctggacgcgcgcctcaactgcctgcgggcgctgcccgacgggctggagaacctgggcgggctggagacgctgaacgtgagccagaacttccagtacctgcgggagctgccctacggcatcggcctcctcgtctcgctcagggagctggacgtgagctacaac

SEQ ID NO: 456258 - DNA, 401 bp, Sorghum bicolor
cgtccgcgatccatcagtttcagaaagcatcacgtggctggtgcgaaaagatggtggatcttgcagaagattcctcgtttcggctcgttctgtgtccccatcccacaccctgtttaatttaccttgccaagcgttctgtgtgtgctagctctgaggagcttgagaggattgagcatattgaagtctgccccaaagcgatggagcttactgaacaaattgcagatagaattagttcggatggtggaggtgctcttattattgactatggaaaaaacggaatagtatctgataggctccaggctatccgcaagcacaagtttgtcgacatattagattatcctggctctgctgatttgagtgcctatgctgattttgcttgaatcaagtactctgctgtggaa

SEQ ID NO: 456259 - DNA, 213 bp, Sorghum bicolor
  unsure (1)..(213): unsure at all n locations
cgtgcgcaacagcaccgtcctgtacggcctcgccgccgacaagctcgactcacgccgtcgnaggcaccatcacgcgctacacctactgcggctacacgtccgggtgcgtggagcacgctacactaacgaacctgcatcacngcaccaggtaccactacgccgtctgtgtgggtgtgtacgacacgttgcgcgcggggtggttcacgactccgt

SEQ ID NO: 456260 - DNA, 490 bp, Sorghum bicolor
  unsure (1)..(490): unsure at all n locations
cgtccgggcgcccaggcacaccacgccatgggcacccacgcatctctagccgtctggcgcatccctactagagcacagctgcacatcacggcggcgtccacacagagggtggacttcgcctacttgtcctggctcaagccaggatcttgctccgtgagcactgccgcgagggaggtactcttatgccacgtccttgagagcgcacctcctcgtcaaggcgcactcgagagaacgcggtgagggcgcccgctgaggcaaagctaaaggtactcatcaaccgcttccgacgcattggccgaaactatctacattgctgtcactgccgtgaggactctcccctcgacgtcttcttcgtgaacgacagcacatgcgttatgaacgtacgtgaatttcgacgatgccaactgaatccacctcactcgtatgtagaagttcagacgctcgccactaatactgacataaattagcctcatatgngctgacttcaaga

SEQ ID NO: 456261 - DNA, 372 bp, Sorghum bicolor
  unsure (1)..(372): unsure at all n locations
cgtgcgggtgactcttgtagagcatgaggcaaacacaaacacggcacctttctttgttagatacatggagactcttgattattacacaggggggtgtnaggcaatagagtgggcttgccccatggatgataagaaccgcattancacagagcagcactgtgttgcaagggatatcgtcaatttaattgcttgtgaaggtacagaaagaatagagaggcatgagccttttggaaaatggagggcaaggcttgcaatggctgggtttagaccatacctcgtaagtgcaggggtgaacagaaccatcaaagcacttctctgcaggtatcacagctatttcaaggcttgaggagagagatggcgttctttatcttt

SEQ ID NO: 456262 - DNA, 246 bp, Sorghum bicolor
cgtccgcattgttggacggcgaccaaatggatagatatgggttgctattttcaggctggacgttctatgaaaccagcatctatagatgccggacagagcacatgttctttgcttcagatgagaggattaacgctgtatagcagatgattattgctcccacagttgaactgaggcagtacgcactagatcgtatttagccttaccagacgtctgactctgatggcattatacctgctatgcatggac

SEQ ID NO: 456263 - DNA, 319 bp, Sorghum bicolor
acgcgtggcggcacgcatgctagccatttctgcgaaggaattcgcataacctgtcgcaagttatgtccaccttagaacactatactcgtgtgtgaggcctttaaggtgcggcgttagattctgagcctatcatagatatggcccaacacctctacatgatacaaccctctggagttctatataaacactcacctgctccattgcggaagcgacgacaggctgaccaaactcaaatagaaaaatatatactttaacagcttacctcgcgggtaggcattcttgtagctccacacatactttatcgagatcctcatcaaac

SEQ ID NO: 456264 - DNA, 321 bp, Sorghum bicolor
  unsure (1)..(321): unsure at all n locations
cgattccggcacacgcgtgcgggcatctggaggtgaagcaggaccaagcctcaagagggaggggcaagaaggcgggggatcaacaggtggtggggatcgagcaaagcagcaagctngtgctgtactactgcactgagtggaagtggacttgctttaggccatgggagacgtacacggcggacacgtncattgacctcaccaggcaccatgagcccaagacgctgatggataagatcgcctactggaccggcaagtcgctacgctttctcacggacatcttcttccagaggcgggatgggtttgccggcgatgaatgctgga

SEQ ID NO: 456265 - DNA, 368 bp, Sorghum bicolor
  unsure (1)..(368): unsure at all n locations
cgtgcgggttccctggtgttcctggtgatcttgttaactacttcctctttgttgccgaggaggttcgagctacattagcccanttgggtggtgagaagctggatgacgtgattggtcgaacagatttgcttaaaccaaagcatgtctcgttggtgaaaacacagcacatcgatcttggatacctcttatcaaatgctggattgcccaaatggagcagctcccagattaggagccaggacgtccacactaatggtcctgttcttgatgagacaatccttgcagatcctgagatagctgatgcgattgagaatgagaaggaagtttccaaggcatttcaaatctataatgtcgatagagctgtctgtggt

SEQ ID NO: 456266 - DNA, 401 bp, Sorghum bicolor
cgtccgctttggtgcatcaagatcagtcccatttgatcaaactcatataaccactcttattcaggggactattgggtacctagatcccgaatatttccaaagcagtcagctcactgagaagagtgacgtttatagttttggggtcgttcttgcagagctgttaactaggcagaaacctatttccgcagcaaggcctgaagaatcatgcaatttggctatgcacctggtggttctatttaatgaagggcgcctacttcaggagatagagccacacattgtggccgaagcaggtgaagaccaatgttatgccgttgcagagctttcagtaaggggcttaaacgtggagggagaagaacgacctaccaatggtggtggtggctgttggtagacatgggctcata

SEQ ID NO: 456267 - DNA, 379 bp, Sorghum bicolor
gtcgaccacgcgtcgcggagaacctcctcctcgacgagtccggcgcgctgatggtggccgacttttggctcggcgccgtggccggcaccgccgacggaggcggcagtctcctccggcgcacgatgtgcggcaccccggcgtacgtggccccggagatcctgtctcggaaagggtacgagccggcgaaggtggacatctggtcgtgcggcgtggtgctgttcgtgctgtcggcgggttacctccccttcaacgacgcgagcctcgtgaacatgtaccgcaagatctacgcgggccggttccggtgccccgtgtggttcttgacggcgctgatcgatcctgctgatgtgcgtgctggacccggacccgtcggcgcgcattg

SEQ ID NO: 456268 - DNA, 455 bp, Sorghum bicolor
cgtgcgcgacgacgccccaccgccgcaccatccccctatcgccatggcttccaccgccaccgctgctgtttctctccgcctcgccttccctctcgtgtccacaccggcctgctcggcgtcgtcctccaatacccttcgcttccctctccgccgccgccgcgcctcccgctcactcgccgtagcggccttcaagaagctctccgaggcgtcccccgtggccatccctgaggagcccacccagcccctggtcgacgaggacgccctgccccctaagcccggggtctacggcgtctacgaccccgccggtgagctgcagttcgtctggatttcgcgcaacgtcagagcgagcgtctagggccaccgccggaaggtccccgccaacctttgcgcctcctgcaaggttgcagtatcagatgaggagacaccagatcgagctgcccttaaacatgcctgga

SEQ ID NO: 456269 - DNA, 419 bp, Sorghum bicolor
  unsure (1)..(419): unsure at all n locations
cgtgcgggatatacaatctggtgactttttggctctatcaaagattcgaggacgatggggcggattcgagacattagagaaatgggtgactggtgcatttgctgggcatacctgggtttgcttaaaagacgagaagggtgatctttgggttgcagagtcaggctatgaaaacgagaagggagaagaaatcattgcaatagttccttgggatgaatggtgggccatggccctaaaggatgaatcaaatcctcagatagccctgcttcctttgcaccctgatgtacgtgccagattcaacgaaagtgctncatgggaatatgcccatagcatggttgtgcaaccntatggctatcataacatgatatttagctggatcgatacaatttgngataattatccacctcctcttgatgctaacc

SEQ ID NO: 456270 - DNA, 461 bp, Sorghum bicolor
  unsure (1)..(461): unsure at all n locations
cgtccgcatttaaagaacaacaaaactgaagagtgattcttatagaaatggcagtagtgcatgtgttttttcagtttctagtgtgtgctctaggagctagttcaacatgttttggctcagcaactgtcttctgattctcaaatgtcatgtacatattatcaagacttattgatctacaggttgctagtcatccgaatatatatgtgttggacactcctggtgtgctgtcaccaagatttgcaaatgatggttctggccccagactagctntgacaggagctatgaaggactccttgttagaggagtatgatatcgtacagtttcttcttgcaattgtgaactcagggaaagaatataggaagtgggagaagttgaataaagcaagagatacattttcttgtggcaacacaattacgttcaggggccacaacaatgaagggcaatatgcttcaaatcacact

SEQ ID NO: 456271 - DNA, 539 bp, Sorghum bicolor
cgtgcgcggccactcgcactcgcacggtccgggcacccgcaccgcaacaaaaacgtgcccccgccttgcgttgccttctcgaactctcccgccgtccccgtcgcggatcgccatggccgccggcctcgccttgcccgtccccgccgcctactctccactcgcccgcgtctcctcacctgcccacaccgcgcaccgcatctgctgcgcgatcccgtcgtcgtcctcgccccgcaccgtcaaatacccgccgctccgcgcggctaccgtcctctccgggaacagacggggcacgggccgtggcgcgtccgtagtgtgcgccgtccaaggccaggacgcgaacgcgaccattcaagtcccagatgtgacaaagtcaacatggcaatcacttgtgattgagagcgagcttcctgtccttggtgagttctgggcttcatggggcgggccatgcaaaatgatagatccaggtgttggcgagctctcaaaggactaccagggaaagctgagatgctacaagctcaacacagatgagaacccacaca

SEQ ID NO: 456272 - DNA, 532 bp, Sorghum bicolor
tcgtccgctgaaggatttcatgacgaagttaaggagctcagagaacgtgccaaggaaatccctgatgattattttgtttgtttggtgggagacatgattactgaggaagctcttccaacataccagactatgcttaacacccttgacggtgtcagagatgagacaggtgcaagccccactgcctgggctgtttggacgagggcatggactgctgaggagaacaggcatggtgatctgctcaacaagtatatgtacctcactgggagggtggatatgaggcaaattgggaagacaattcagtatcttattggctctgggatggatcctaagactgggaataaatcttatcttggtttcatctacaactcctttcaagaacgggcgacctttatctcacaccggaaccccgctcgttacgccaagggctttggcgacttaaagcttgcgcaaatcttgggcctcatcgcgttagatgagaagcgacatggaactgcgtacaccaagattcgggagaaactggttgagatcgacc

SEQ ID NO: 456273 - DNA, 332 bp, Sorghum bicolor
cgtccgaaccttccaggtggaagggtctacagtgcttgcagcgctgcattaggagatcatcacatgtccgtctccaggcgtggacggccgggggaggacaatgcaaagctctgtacatggtgccatggtggtgtaatgtaacataactgctaggcatgcaactgatgctgatctatctgtatcatctcccttccataaaagagaagtgcgtactgacggcatgcatggtcaggacttatgagctagcatgtggctagtgtgcgtgcatgtgtatccctagtttgttcgactattacatggagcaacctgagagcttagctgagaccaaatat

SEQ ID NO: 456274 - DNA, 543 bp, Sorghum bicolor
cgtccgccgccctttttttttttttttttgagtcaaaggatagagtgatagagcttgaaggtttggacagcagcaacagccaacagaaatgcaagcttgaagaatgaaagaaaacgctgcttttattctccccgtacgtactacgcaccagaacctcgtcgcacaaaaacaaggcggcgaaatcaatcgcgcgatcacacagcgtctccacaagacgaacgtaatcccgatggggatccatcggtcacataattagggggggcatgggtcacacaggcaggatcagagcgccgtcacggacacggtggcctcatcagcctcggcctcgccggccggcgagcgtgtctgtgtctccgtctcctgccgctgccgccgcttcgtcgtcgtctcgctctcgcactcgtcgacgacggcgtacaggcggtacggcgacgcgtcggtggcgagccactgctcgacggtgaagagcgtctgcgcgcagcccaggtgtggcccggtcaccgtcacctcgaggtagttgcagtaccagcccgggtgcgcgcc

SEQ ID NO: 456275 - DNA, 346 bp, Sorghum bicolor
cgtccggtcatcctcgcggtttcctgcttcgtcatcgtaagaagcttcaggtcaggccgcaaagatggcagccgagtactgccgccttcccctgcggcgctgcccatcatcggcaaccttcaccagctcggccggagccaccaccaccggacactgctggagctagcgcggcgccacggcccgcttttcctcctccacctaggttccgtacccactctcgtggtctcatcggcctccatggccgaggaggtgctcaaggcccaagaccacgtgttctgcagccggccgcagcaacacacggggcgtggccttctttacgggtgcccggacggtggcttcagcgcct

SEQ ID NO: 456276 - DNA, 380 bp, Sorghum bicolor
cgtccgggcactgaccggcccaagtacctaggcccgctctgcgagcacacgcgcacgtacctaaccggcaagttccccaggcactaccggtggaacacgacaaggctgtcagagacaccaagacgttctcgcagaaccgagagctggaggtgatccacttacggtgggcgatgcttggcgcacattgggagcagctgccacgaatcctgaccaaagacggggtacatgttcttcaggaccgagtggctcaaggccctacacacagatgttttccgatggcaggctggactacctgggcagaccagaacctggtgcacgcccagaggatgctgtacatcttggcctgccacgtcctgctaaatggcttcgactacggatac

SEQ ID NO: 456277 - DNA, 346 bp, Sorghum bicolor
cgtccggggaaatctcagtaatgttggaggcaagtagagctcagtactcaacctcaaatgatctttctgtgaagatgctgaacccagttgcacttttgcgctctgcgtcatcgcgttcatcatcttctcgtttccttcttgctccctctagctcaatagatgatctctatgataatgagactagcagctgttactctgaagaatcttgtagtaccatgtctggaagtcaccactctaccttagacagactctatacatgggagaagaaattatacaaagaagtaaaggcaggtgagcggttaagaatcgattatgagaagaggttgacacatttgaggaaccaaga

SEQ ID NO: 456278 - DNA, 478 bp, Sorghum bicolor
cgtccgcatccctccatctcgggcgcaacgatagttacaaagatatggttgtggagaaaaacttgagaggagttcttagatcagaagttgacaggtctgtgtcacgtgacagcataattatcgtcgactctttgaacaatattaaggggtaccgttatgagttgtggtgtcttgcgcgtgcatctggtgtaagatattgtgtgcttttttgtgatacagaagtggaccattgtagggaatggaacagcaaccgccaggagaaaggagagccagcatatgatagtaatatatttgaagatcttgtaaggagatttgagaagccagataggcgtaatcgttgggattcccctctttttgaattggttccatctagagatgaaatagtagaaacggctcctgttattgctgaagctgtgtcgtatttgacaaagaaagtggattccaaaacaagagacgtaaaagttctccagcctacaat

SEQ ID NO: 456279 - DNA, 435 bp, Sorghum bicolor
cgtccgcggacgcgtggggcgtcttgccgaccccagcgacgtcgaggaggccgacaagctccggtcggcgctccagtcctggggcctcttcaaggtgaccgggcacggcataccggtggcgctgctggacggcgtccgggacgccgggctggagttcttccacctgccggcggaggagaagctgaggcacgcgaaccgggacgacgccggcgagttccagcccgaggggtacggcatcgaccgcgtggacacggacgagcaggtgctggactggtgcgaccgcctgtacctgacggtgcagccggaggaagcgcggcgggcgcggttctggccggcgaacccgccgtcgctcgcggggctcctgcacgagtacgccctgggcaagcagcatgtggcgaggcccgtgatcatgggcatgggacggcttctcgggtt

SEQ ID NO: 456280 - DNA, 526 bp, Sorghum bicolor
cgtccgagcgacctccgggtgaacaacaagctgctcgagatgtatgccaagtgtgcagccatgccccatgcccgcaggacgttcgacaatatgcctgaccgtgacatggactcgtggcacatcatgatcgacggctactcggtcaatgggcttggggacgaggccctgcggctgttcgagctgatgaaggagtgtatggcacccacaagtcagacctacctgcttgtgctcaatgcttgtgccaactcggaggccatcgaggaggcactcctttactttgatgccatgtccagggaccatggcattgagcctggtgtggagcactatgttgggatcattgaggtcttggggaagtcagggcatctcaatgaggctctggagttcattgagaagctgcctttcgagcccaatgccatggtgtgggagtcactcttgaacctggcccagatgaatggagacattgatcttgaggaccgagcagaggagttggtggtgtcgcttgatccattcaaggcaaaccccaaga

SEQ ID NO: 456281 - DNA, 467 bp, Sorghum bicolor
cgtccgcggacgcgtgggggagtcaggtttttgttgagatgagggagcatgagcgacgtgtgtggtcggtggacttctcaattgtggacccaacaaaattggtcagtgggagtgatgatggatctgtgaagctgtgggatatgaatcaggctgggagtattggtactattaggacaagggcaaacgtgtgttctgtgcaatttcaacctgatacttctcgctccattgccatcggctctgcagaccacaaaatttactgctatgatcttcgtaacatacgagctccttattgtacactagttgggcacacaaagactgtaagctatgttaagtatttggatgcatcaacaatagtatctgcgtctactgacaactcattgaagctttgggacctgtcgatgagtcgaggaaggataattgacagtccaattcaaacatttacggggcacacaaacacaaagaacttt

SEQ ID NO: 456282 - DNA, 441 bp, Sorghum bicolor
cgtccggtgaacaatgcaatcttccttgtcaaagggttagggagcctcgttgttcacatccttgccctttgccatgccatctgagcgattgtccatcttgtaaagtccttgttaaaagaccatgccattgtggtgctatggtgcatgcttttgaatgtgtatattttaacaacttaaatgcaaaggaacagattaaagtaaggacgtgtggcggcccatgtcatagaaaactaccaaattgcccccatctgtgctcagaagtatgtcaccctggtatatgcccatcggttgatcagtgcatgaaaaaagtcaacatccggtgtgcatgccacactctgaaacaagaatggctatgtcaagatgtccttaaggaataccgtaagtctggtcgcgatccaaaagaagtacctaaaagtcaatttggagttgtcttgcttgcct

SEQ ID NO: 456283 - DNA, 476 bp, Sorghum bicolor
cgtccggagggtcagtcagtatggtggctcgaagcaatcctagcatggccatggtagacaaggaacagaccacagccttctcatgatggcgagccacaaagaattcattgctgtggacacacttacacagctacaaatattaatctaggccctaaatgctgacgatcgggcgaatgctgagaagctcaaaagcattctgtaagccagtagttactctaacatgcacatttgcgacgtgtgcccatacaaggtgatagactacaacgctgacagtaacaatgtgtttgaacaacactagcgtactgatgaagagatacgatattgctttgacggtaggggctactctgatgcgagggaccaaaatgatcaggggatccctttagcagcgaataaagggggcatgattgctctgcctgcaggaatgtatcacccctttacattggataccgtcgactacctcaaggcaatgccgctct

SEQ ID NO: 456284 - DNA, 395 bp, Sorghum bicolor
ttttcaggaattggccccttttattgcagcttttatacagacagcatggttcggctcttgaatttgttgtacacaagaattaacagttgcctatccagtttccaccaaactacaattgggctatatttgacaggtgctagtttacagaaagtggccaataatagtcatctgaattttcactcagccagcaaaatgaagtctgaagtttctgaacaatgatgtggtgatgaagaatagaacatcattagaacctaacccaacagcgggtgcactgggccatgcaatcccctctgcagtcaatattgtatcccaaaacctttggattcctcaggagaaggctcctcagagttttcccatttatcccccagtcactgtccagcttgctcacattcagc

SEQ ID NO: 456285 - DNA, 491 bp, Sorghum bicolor
  unsure (1)..(491): unsure at all n locations
cgtccgcatacagtgctttgttgctgttgagaaagaggaatggaagtttgatactctttgtgatctttatgatacactcaccatcacccaagctgttattttctgcaatactaagagaaaggtggattggcttactgagaaaatgcgcagcaacaacttcacggtgtcagctatgcacggtgacatgccccaacaagaaagggatgccattatgggtgagttcaggtctggtgatactcgtgtgctaataactacggatgtttgggctcgaggactggatgttcagcaggtttcacttgtcataaattatgatctcccaaataatcgtgagctctacatccatcgcattggtcgatctggtcgttttgggcgcaagggtgtggcgatcaatttcgtgcgcaaggatgacatccgtatactgagagatatagagcagtactacagcacgcaaatngatgagatgccgatgaatgtcgctgatcttatttgag

SEQ ID NO: 456286 - DNA, 502 bp, Sorghum bicolor
cgtccgatcgttgccaaatccagctattgtgagaaccaatatgacgaccaggatggataaaagcatttgtagttggtgggatggccctggtatctctgaagttatggaccgtatcgaactttctttacgcgaccggaaaggtacaagaaggatgccgatgatcgataaatataaggatatgggcactagatgaatgggcaaaatagagtctgacactatcagagagggtgacagattgctgcttatgccaaacacgttccatgtgaaagacagacacttgaactcggatgaaagcaaaatacaccgtgctggacctgctgagaatgtacgcgttaaattgtgcgaactcgaagaggaagatgctatggctggataacgactctcaagaagtgctaatgctgcaggtgcagctagacaatacattgatgcactacagattcttgagtagttgacaatgctatcctcactgatagctacaaagctgtgatacatatccactctg

SEQ ID NO: 456287 - DNA, 534 bp, Sorghum bicolor
cgtccgcactagtcccctctactccgctgctgtcaaggatcacttggatgtggtaaatgctatactggacactgatgatagctgcataaggattgtgcggaaaaatgggaagacatcactacatactgccgcaagaattggataccatcgtattgtcaaagcactcatagagagggatccaggaatcgttccgatcaaggataggaagggacaaactgcccttcacatggctgtgaaggggaaaaatacagatgtagtggaagagttactgatggctgatgtttccattctcaatgtgcgtgacaagaaaggaaatactgccttgcacatagctacacggaaatggaggccccagatggtacagcttcttcttagctatgatgaaacacttgaagttaatgctatcaatagtcaaaatgaaacagctatggatttggctgacaaagttccttatggtgagtccaaaacggaaataatagagtggctgacagaggctggtgcaaagaatgccagaaatgtggggaaaattgatga

SEQ ID NO: 456288 - DNA, 329 bp, Sorghum bicolor
cgggcgggccttgccaactccagccattgccagaaccaatcggactaccaggaccactaaaagcacttctacgtcatggcgatgcgagcggggccactccaattactcgcacgtatggaacctcctacccgccacggcaaacgagcagctcagacaccatgactccctgatcgtagaccgattgctacacatcctacaggacactacatgatcccagccctatcaaatatggtcacaagtgctacgaggtgccaaacaactaccatggcaaaaaagacacgttcaaactgggggagatcagagcccaacttactgggcttgcccccaac

SEQ ID NO: 456289 - DNA, 477 bp, Sorghum bicolor
gtctgctcagtctaaaaagtatgctttcaagtgtcaccggaaatctgaagctggcagggacaccgttggggctgtcaatgcaattgctttccatcccatatatggaacatttgccactggagggtgtgatggatttgtgaatgtgtgggatggcattaacaagaaaaggctatatcagtactcgaagtacgcatcaagcattgctgctctatcattcagtaaggatggccatctgcttgctgtggcatccagctacacctatgaagagggagaaaaaacgcatgaacctgacgctatatttatccggacagtgaatgaagtcgaggtgaagccgaagcccaaggcattggctgctccccagtagtgttgtgacttggtggcggcatcagtcacatggttagatgacccgtacttctctaagagtctaaaagtgatgtcaattgcattagttgacgcagagcttgtttgtgtggaaag

SEQ ID NO: 456290 - DNA, 437 bp, Sorghum bicolor
cgtccgcacatgctagtgaagctattttatcgatcctactggacaaggacaaaagcagctcgacaatcctctcactgaaaaaggctggtgcggagatcactgaacttttaacgcagtgctctatcggcatagcttgaactgacatcggctgttctcctgtctaatatgctcacgatggctactggcgtgaggactccatttgcttcggctaggctgcttaccaccagcgttggatacagactctcatgcctatcctgggctgtcactggctcgcgtgataccattgccagcatttttagaagccctagtcacacgaatatcccggatcacttggccgcacccgaaatccagaaacgtgggtacgaattcctctttagggccttaactctcttggctatcactgcactcaattatgcatgagctgccatcatggtttc

SEQ ID NO: 456291 - DNA, 523 bp, Sorghum bicolor
cgtccggcagatatttgtggaagaaacaaatacataaactcttgtatggtggtaaaaagacatcgattcaagaagtactgtgcctagataaagagggatcacatttagaaatatgcgatcaggatttcttcaagttggagattagtaaaataaaggaaaccaccctgcagtggctggctaaagcagagaaggttgcatgtgattctggtgagcttgcactggatcttgtgtatggacttatagctgaaggggaaaatctctctgtacattttgagaaggaactaaagttactgagagatcgctgtgtcctctactgcatttgccgtaagccctatgataacaaggccatgattgcatgcgaccaatgtgatgagtggtaccattttgattgcatcaacttgcttggaccccctccagaaaccttcttctgtcctgcttgccatccaaataatgaagaatctgtattgcttgcacgctcagagcacgatgaggatagatcaagcactggagccagagctcacac

SEQ ID NO: 456292 - DNA, 522 bp, Sorghum bicolor
  unsure (1)..(522): unsure at all n locations
cgtccgggccaaggggatgtaccacgcgctcttcaactttggggactcgcttgccgatgccggcaacctcatccagaacggcaccccggagatcctggccaccgcgcgcctgccctacggccagacctacttcggcaagcccaccggccgctgctccgacggacgcctcgtcatcgaccacctcgcgcaagagtttggcctgccgctgctgccgccgtccaaggccaagaacgccagcttcgcgcacggcgccaacttcgccatcaccggcgccaccgcgctcgacacgccctacttcgaggccaaggggctcggtgccgtcatctggaactccggagcgctcatgacccaaatccagtggttccgtgatctcaagcctttcttctgcaacacaacggaggcatgcaagaaattctttgccaaggcactgtttgtggtcggtgagtttggcggcaacgactacaacgcgcccctctntgccggcatgggcatnccagaggcctacaagttcatgccggatgt

SEQ ID NO: 456293 - DNA, 496 bp, Sorghum bicolor
cgtccgctttgaaggaattcttcaggctgggtcaacaattgtcgagaaccttaggacatataatcagcctgcgtttgtctacattcctatggctggagagcttcgtggaggagcttgggttgtggtcgatagcaaaataaatccagaccgcattgagtgttatgctgagaggactgccaaaggtaatgttctcgaacctcaagggttaattgaaatcaagttcaggtcagaggaactccaagactgtatgggtaggcttgaccccgagttgataaatctgaaagcaaaactccaagatgtaaagcatggaaatggaagtctaccagacatagaatcccttcagaagagtatagaagcacgtacgaaacagttgctgcctttatatacccagattgcaatacggtttgctgaattgcatgatacttccctaagaatggcagctaaaggcgtgattaagaaagttgtagactgggaagaatcacgctctttcttctat

SEQ ID NO: 456294 - DNA, 531 bp, Sorghum bicolor
cgtccgtggttctggcacttttggaacagtgtaccatggaaaatggaggggaagtgacgtggccattaagcgtataaagaaaagctgttgtcacaggccggtcttctgagcaagaaagactagcacatgagttttggagggaagctgagattctgtcaaagcttcatcatccaaatgttgtggcgttttacggtgttgttaaggatggtccgggtgggactctagcaactgtaactgagttcatggttaatggttcacttcggcacgtcttgcagcgcaaggacaagtatcttgatcgccgtaagcggcttattatagcaatggacgcagcctttggaatggaatacttgcattcaaagaacattgtgcactttgatttgaagtgcgataacctactggtgaaccttaaagatcagacacgttctatctgcaaagttggtgatttcggcttatcaaaaataaaaaggaatacattggtttcaggtggtgtgaggggcaccttgccatggatggctccagagttgctgaatg

SEQ ID NO: 456295 - DNA, 528 bp, Sorghum bicolor
cgtccgacttccaccactccaccgccaccacctgtcgccggaggccggaccagccatgcggcccgccggccggctactcctccgggtgctcccgctcctcctcctggcagccgcaaccgccggctcgtgggaggacggccatgggagcatcctccgcctcccctcctcctcctcctcctcctccccgcgccggttcccccgctccgccgccgtcgacctgatccgcgcgctcaacctccacccctccgacgcctccccgccctcctccaccgccggcgtcgagggcgccctcgcctccgcggggaccctcgtcgagaggcccatccgcctcgcgtccttcgcggacgcaggcgacgccagcacgtcggtggaggacctcggccaccacgcggggtactaccgcctccccaacacccacgacgccaggatgttctacttcttcttcgagtcgaggggccaggaggacgaccccgtggtgatctggctcacgggcgggcccggctgcagcagcgagctcgcgctcttcta

SEQ ID NO: 456296 - DNA, 533 bp, Sorghum bicolor
cgtccgggttgccaaggtggttgatgagatcctaacagaacaaggtggaaagcgccttgttccagttggtcttggagacgatgaccaatgcattgaggatgacttcaatgcatggaaagaagctctctggccagagttggatcgattacttcgggatgaaaatgatgcctctacaggcactacatacacagctgctattcctgaataccgggttgaattcatcaaacctgaggaggcagctcatttggagagaaacttcagccttgcaaatggccatgcagtccatgatgcccagcatccttgccaggctaatgtggctgtgcggcgggagctccacacccctgcttctgatcgttcatgcacccatttggagttcgacattgctggaactggtctcacgtatgagactggggaccatgttggtgtatacaccgagaactgccctgaggttgtagaggaagcagagaaggtgttgggctactctccagacacatttttcaccattcatgcagacaaagaggatggtacttcac

SEQ ID NO: 456297 - DNA, 524 bp, Sorghum bicolor
cgtccgcaccccggcctcctcctcctcgacgcgacggagacgcaaaccctagcccccacaccatccagccagccaagccaccctcctgccggatcactctccttctctccccgatctctataaaagaccgcggatttcgaaattctttccgcgggatctctaacggcctccactttcccgcgcgaatcggcctcggattgagccgtttcgtcccgttgctgtaggggggattgggggatttcatctggtggtggtggtgggggattcgagccgcggatggcggagccggcgttggacgggagccagccggtggatctgtccaagcatccctccggcatcgtccccacgctccagtaagtcagcaggaccttgctggattgggcgggcgccctccaccgaaagatctgattgggttggattggggatgaacgccggctgagatcttgctgcttttgagtgtttgcttgtgctctagctggtcgtagttcgctgggcttggtgtatttgattggcggagccagtgg

SEQ ID NO: 456298 - DNA, 446 bp, Sorghum bicolor
cgtccggtttatctgctttgcaaggagggttgcaagtgttgtccagcatcttgcagaagtatttggaatttcctttcgtggttcccaagtactttttcagagtaaggccttgccttggtgccgaactttacatgtttggttcgaatcctgtgaatgaaaaaggaatgtcaatagagcctggttccctattgtctctaaccctctgcatgaagtggaagcgcatgttagaaagaagcgccattcgcgccgtgaaattgtactgcattctagccacaagcttagagacctgcctggacgcagcaggaacgagaagcaagcagtttgatccacgtaggaccactgaaatggtcgaactgaattccaagctgctgcagtacataaagagtgatctgaggaaggccaagaatgaaacgaagaattcccattgtggcatggacatggtgact

SEQ ID NO: 456299 - DNA, 309 bp, Sorghum bicolor
cgtccgctgctggcagagagtaggatctgcggatggacttataaatgtcaaggactacgaaggcgatccggttctgaccataccggacgctaaagctctgctacacgacatctcctccagcgcggtggacaacccgtagcacgccctacaaagggcgctggcatatatgctgaacaacccgaaggtgacggccaaagcgacagatgagctggaccgtgtctatagacggcaaaggcttgtgctggagactgacattgctaagctatactacgtcaatgccttcattcctgaggctgtacgactgcaccc

SEQ ID NO: 456300 - DNA, 528 bp, Sorghum bicolor
cgtccgtgaccttccattcacaaataactatggtgtgtgggaggatgaatttaaagatcttggtctagcgagtagtatcgagcacgtctggaaggatactattgtctacctagacaataacaagcccatactgattggccgatcttatggcagggtgcaccgtgacttgctccatgaggagctactgagaagatgctatgaagctggcgtgacatacctgaactccaaagtggacaagatcatagaatctccagatggacacagagtagtctgctgtgataagggtcgtgagataattagcacgcttgacattgttgcttctgtggcagcatatggtaagcttctagagtatgaggttgggggttctcatgtttgcgtgcagactgcatacggagtaaaagttgaggtggaaaataatccatatgatcccagcttaatgggtttcatggactacagagattgtttcagagaggaattctcacacactgaacaagaaaatcccactctcctgtatgctatgcccatgtc

SEQ ID NO: 456301 - DNA, 167 bp, Sorghum bicolor
acggtatccaagttgaaagggataagttgaacaagtacggtcgtcctttattgggatgtactagtaaaccaaagtgtgcattatccgcgaaaaattacggtggagcatgctatgagtgactttgcagctgacttgattttgccagctgcagctaagaccaatgatct

SEQ ID NO: 456302 - DNA, 482 bp, Sorghum bicolor
cgtccgcccacgcgtccgcttggaccaaagggaaggaatgtcgttttggagagcaagtatggctctcctaagattgttaacgatggtgttacagttgcaagagaggttgagctggaggaccctgtggaaaacattggagctaaattggtcaggcaagctgcagctaagaccaatgatctagctggagatgggacaaccacctccgtggtccttgctcagggactgattgctgagggtgttaaggttgtggcagctggtgctaatcctgttcagattactcgtggtattgagaaaacagcgaaagcactagttgaagaactacgtaagttgtccaaggatgttgaagatagcgagcttgcagatgttgctgcagttagtgctggcaacaactatgaaatcggtaacatgatagcagaggccatgagcaaggttggtcggaagggtgtggttacccttgaagagggaaggagttctgagaactt

SEQ ID NO: 456303 - DNA, 486 bp, Sorghum bicolor
cgtccgcccacgcgtccggtccatcacatggttgggaagctggcatctgtttaccaaaggttctaggtgacgtaattgagtctatcgctggtgcaatctacatcgataccaagaacgacaaaaaggtcgtttggagaaagatgaaacggctactagaacctcttgccacccgcgacactctcgaaattgatcctgtcaaagagctgcatgaattctgcgatcctaaaacgtgcagtatcaagtacacagtagctcgtgaggaccgggtaaccttcgtggctcgagaaatacagaccaaagggactacatacaaggccactctgacaggcctcaccaagcgtgacgccaaaaagttagcagccaaatccgtgctcaaagatatgaaggccgcgaatagcacgcagcattttgcaaatggtatcagctgcacttaaaacttatagatctgacggtgtacttctggatataagatatagatggcatact

SEQ ID NO: 456304 - DNA, 372 bp, Sorghum bicolor
  unsure (1)..(372): unsure at all n locations
acatcagaacaggttgtacgatttacaactcgcacttagctgctgcagtagtnatcaagctataagtatctgtcgagcattatgtgctgcaagaagtaccccgacctgtaggagaagagcgccgcggctcatgccaccgtcgtcctgggtgtcgccctcgagctcacacttgctgccgagaactaggccgttgaggagtcctgcgccgtgaccttccacggctgcagcttccgtgacagctgcaagtgcaacccctgcaactgctgatcgaccgacgaccacacatggggaacgaagaccaacgagttgcatgctgctgcttatttgatggtgatttcctttttggaccggcaacttacgggactactagct

SEQ ID NO: 456305 - DNA, 235 bp, Sorghum bicolor
taaaacatttatgagaatccaaagcctagaaaacttaaggtatccttcgcatggttcgggcacagagggtgagtaagagccttagatcaggcctaaaggcttaatccttggacaatagatcaattatttctgttctaccacattgtggtacagatggacagaggaggctaggtcatcaaaatagggttgatatgtttaaggacacaatgtgactcttattttgtacgttatgaag

SEQ ID NO: 456306 - DNA, 317 bp, Sorghum bicolor
  unsure (1)..(317): unsure at all n locations
cgtccgcttccacagttcgcagatagaatggccgagctgctctcgtggctggcatggcttatcgcctccctccttgccgtctccttccttgatcacctagcacatncacgccgncgcggcctnccaccgggacctcgccctctgccccttatcggcaacctccacctcctcggtgaccagccgcaccggtcccttgcgggcctcgccaagctctacggcccgctcatgtccctccgcctgggcacggtcaccacggtcgtcgcgtncttcccggaagtcgcccgcgagctcttgcagaagcacgacgccgtcttcgc

SEQ ID NO: 456307 - DNA, 454 bp, Sorghum bicolor
cgtccgtggtaatcttgcgaagaatgtaacaacggaagttcttaaaaacttcttctctgaaaaggggaagatcctcagtgcaacagtctcccacattccggggacctcgaagtcaaaggggtatggctttgtcacattctcttctgaggaagaagttgaagctgctgttgctactttcaataacgcggaattggaaggacaacccatccgtgtgaatagagcttagattatcagaaatttgcaggagcactgaaggagggggagtatcttggcgaatgcatgtagtacgagggatacttagaggctagattttgataacaaagtgatcaattcgatatgtcaaacaatttttgtaccataacagtgtatgagaaggattttgcttgttcatatgattacatttttcttaacggcacttatatatgataacacaacagcagcatggtttcgtttc

SEQ ID NO: 456308 - DNA, 241 bp, Sorghum bicolor
cgtccgaacatctctacgctcgcagagatggctcactactggtcgtctctactcatggtgatctcttgcacggcgattgacgatagccagattaaggagggctcattcggtgagggccgcataaccatgcgcaagagctccgacaatcccaatgtggtggagctctgcagcccctgatacggtcccgaccgcttgaaggacctcggccccttgtgctgcgagccgtctagctacgcttacc

SEQ ID NO: 456309 - DNA, 405 bp, Sorghum bicolor
cgtccgggtctatcgaaagttgtgggacaagtcatggtcttatcactaactgtactctacaatcgatatcttaaaaggatcccactgaggtgccttaccactggacttcagatactatatgctttggcagttttgtcagatttggtccttgtgaaacaaataaatcttgtgctagggataccgaatgagattcatgtcctttgcttctcagctctagctgaagctctagctcagttcaaggtcttgccattctcggttttgttgtcaagtctttgcccaccaagctgcgaaagttctttgttcgccttcttcacatctggactggtggtttcagcaatactaaatggagtatttggagttggattgttcaccctgattcgtgtgtcttttggggactacttaagc

SEQ ID NO: 456310 - DNA, 260 bp, Sorghum bicolor
tccggccggattcggtcgccacgcgtcgggtcctaccgagcggctggttgccaatctacatacactgacgtcacctcaccaacgtagacagttaaggcccgaccgcgtgtcaagagtcgcgcagaacaagcccgcgactgggagtgacccgcagcggtcccgcgggctggaaccctatctacatgaggatcgcgcgcatcaaacaccgctggccgcttcccttactcacctgcagagtactgcacggcaataataatcac

SEQ ID NO: 456311 - DNA, 281 bp, Sorghum bicolor
cgtccggccaccggcccatccgcctcgtcgacgacgccaacgtcggcaccgccaagcacttcgagtacatgttctacgtcgacttccaggcgtgggtcgcggagccccgcgcgcagaacgcgctggccgaggtccaggagtacacgtccttcctccgggtgctcgggagctaccccatggacatgacccccatgaccggcgggctcatccaccaccatttcctcgtccgatggtccctcgtcgtcgtcgtcgtcgtcgtcgtcatgattactccttctgga

SEQ ID NO: 456312 - DNA, 351 bp, Sorghum bicolor
cgtccggccgcgcgatgggtgtcggcggcggcccgtccggcgaggccggcggcgcggagcacgccgaggcggaggacgacgccggggaggaaggcgagtacgaggacgagtccatcgtccaccacacggcgagcatcggcgacgtcgagggcctgaagaaagcgctggaggatggcgcggacaaggacgaggaggactcggaagggcggcgtggcctccacttcgcttgcggctacagcgagctccagtgcgcgcaggcactcctggaggccggcgccgcggtggacgccgtcgacaagaacaagaacaccgcgctgcactacgccgccggatacggtctgaaggactgcg

SEQ ID NO: 456313 - DNA, 421 bp, Sorghum bicolor
cgtccggttggtgacaaccgggcacacgcggctagtgctcgagtgccgcatctaacggcactcctagtggacttcaggcaagctcgtcctgtggctggtactgaccgatgtgaccttcctcgggccgatgtccattgtacagctctactggaaagacatacattacggagcaagggcgcatatggtgatccagatgatatcgataccaggtacatcatgtggctcaactacttgctccagaatgagatcagtcaccttagatgcctaacactgatcctggaggcggacatggaaacgcacattgtgtacctgatgactgtcgttctcaagtacgagctgaaaccgcccggactgaacatcaaggttaacgtggaaacaatacacgaatctgtggagcttgtgccggtacatatactgacca

SEQ ID NO: 456314 - DNA, 355 bp, Sorghum bicolor
cgtccgcggacgcgtgggtgcaagtctcactattttgcataaacccagtgcatcaagcagcgcaatggctagcagcaccatgggtttcttctagacggacttggcctgcaaggaccagaacgtgccataatcccttttacgcgaggcccgcgtgactatgcgcaagactgcagcgaaggccaatcctgacgacgcatacggcagcccttggtacgggcccgaccgcgtgctgtacctgggcccgctcttcggcgagccccccagctacctgactggcgaggttcgcggagactaccgctgggacactgcccgggtgtcaggtgaccccgagacgttcgccaagaaccgggagcta

SEQ ID NO: 456315 - DNA, 325 bp, Sorghum bicolor
cgtgcgggtggctcaacatattgccaatggggatgttcctgaaacaattgaatgaaagaaggttattactcttgacatggtgcgggggggtggtggaaccaaataccggggagagtgtgaagagagactaattaaacttatggaggaaattaagcataatgaagacattattctttttattgatgaagtgcacacactgattggagcatgtgcatcaaaaggtgcagttgatgctgctaatattttgaaggcagctcttgcaagaggtgaactgcagtgcattggtgcttcaacactggatgagtattagaagcatatataaaaa

SEQ ID NO: 456316 - DNA, 179 bp, Sorghum bicolor
cgtccgagggaggaggacgagacgctggtcatgactggcttcgtgagtggccggcgcatctagcacattcttgggcacccggctgtccgacccggcgccggagaacaggcgcatagtggcccggttctgcttctgaaagccgaaataggcttctgtccccaagaaggtgtccaagatct

SEQ ID NO: 456317 - DNA, 259 bp, Sorghum bicolor
  unsure (1)..(259): unsure at all n locations
cgtccgggagaccggaaggaggcttggcatgggtaccaacatgtatccttcctcagcttntgctcggcccaaaacaaggattctacgcttgaagcacttcctgttgatgagctcattgagaaggctgatgggtttgccggagtcttccctgaacacaagtatgagattgtgaagagactgcaagagaagaaacacattgttggtatgactggagatggtgtcaacgatgccccagctcttaagaaggccgacatcggta

SEQ ID NO: 456318 - DNA, 266 bp, Sorghum bicolor
cgtccgttctctacttcctctccctcctctcatcggaagcaggcaggcaggcagccagcaatggccatggcgtcgtcgagcgggctgaggagctgcagcgccgtgggcgtgcccacctcctggcccgtcgccggggggtcagccgctgcgtctgcccacgccacactcggcggtaccattcgcagtgatgccgcagccgctgcactacgtctgcggctcgtcacttgcgccggcgaatacgtaggcaggcatcggcacggccgacg

SEQ ID NO: 456319 - DNA, 453 bp, Sorghum bicolor
  unsure (1)..(453): unsure at all n locations
cgtccggacgaatccaagcacacgccccgactctgcttggcttgaaactgcagcggagcccccaaaggcccccgactgaaactgcccccgcgacgcacgagcgcacctaaaccccgcccgcccgcccgcccgcgttttctcgtcgccgggaagaatcttcgccttcgcgaagtctctccagtctccagtctccactccccatcgccggcgcttnctcgcggggacctcggagcaatgcagctataccaccacccctattcgctggacagtcagaaagtgcgaatggcactggaagagaagggcattgactacacctcatatcacgtcaatccactcacgggcaaaaacatgaatgtggacttcttccgcatgaacccttcagcgaagctcccagtctttcagaatggagcgcacgtaatctatcgcgccatcgatattattcaagacatagac

SEQ ID NO: 456320 - DNA, 123 bp, Sorghum bicolor
  unsure (1)..(123): unsure at all n locations
cgtccgggcctataccttcctgtattggcttcccttttatatcagccacacagctatcggtggacaatacttgtcagactcggaagccggggtactgtcaactctgttcgnacgtgggtggcg

SEQ ID NO: 456321 - DNA, 333 bp, Sorghum bicolor
cgtccgggtgtctgcacagcacaccttcatctttgaggattctccttctggtatacgggcaggcgtcgcagcaggaatgcctgttgttggtttagtgacaaggaacccagagaactcattgctggaagcaggagccgcgttgctcatcaaggattacgaagatccaaagctctgggcagcacttgatgagatcgacagagaggaagcgaagctgaaggctagcgcatgatatgatctgatgataaacaattgataaattagatttattgccgatcgaagtggctcaaatacatttctgtttctagttatgctgcagctgtgaccgtgagtaac

SEQ ID NO: 456322 - DNA, 463 bp, Sorghum bicolor
  unsure (1)..(463): unsure at all n locations
cgtccggagaccagagagcagtgagcggagcagagcagagcagagcagaggaggagaaggcggccatccggaggcagacgcggagacgaggaagaggaagcgagcgaggatgccgtgcctgaacgtgtcgaccaacgtgaacctggagggggtggacacctncgtcatcctcgccgaagcctccaagtccgtcgctaacatcatcggcaagccagaggcctacgtgatggttgtcctcaagggttcggtgcctatggcatttggaggtacccaggagccagcagcttacggtgagctggtttccatcggaggcctgaaccctgatgtgaattagaagctgagtgctggcattgcttccattctggagtcaaagctgtctgtttccaagtcacgcttctaccttaagttctatgactcaaaggcccattcggcacaagaacatgctcaatgtttgcatgctttg

SEQ ID NO: 456323 - DNA, 420 bp, Sorghum bicolor
cgtccggccatgtacgccaaagggattcagatatattgtgctcccacagctgatgcgtccccaacttgggtggcttccatgacgcatatcgccctcgaagggggatgctttgtggtgtcggcgaaccagttctgtcgcaggaaggactacccaccccctccagagtatacattcggtggcctcgacgaagagccatccccggagactgttgtgtgtcctggaggaagtgtcatcgtttcaccgtccgggacagtgttggcaggccccaacttcgagggcgagggcctcgttacagctgacctcgaccttggagagattgttcgagccaagtttgatttcgacgtggtggggcactacttgcgacgtgaggtgctgagtttgggtgggaagactgatccaaagtctgctgtctctttcact

SEQ ID NO: 456324 - DNA, 353 bp, Sorghum bicolor
  unsure (1)..(353): unsure at all n locations
cgtccggtcgctcggcgccgccgcgacaggaggaaggagaaggagcggcagcggcagaggcaggcccggcgatctcggctgctgcggcgcggtaagggagggagcggagccgcgacaggatgcactcctttgggcaccgcgccaacgcggtggcaacgttcggtgtcaccatactggccgcgatgtgcttngncgacttcttcttcgacaacttcaacaccctgacacccaccgtcttcgtcaagatcttgaatataaactggttccagaaggaagccaacggcaacgacgaggttagcatgacgctgaacatttcggcagacctttcatctcttttacgtggaacacaaaac

SEQ ID NO: 456325 - DNA, 208 bp, Sorghum bicolor
cgtccgcgtccttcctcggcggcaagacgctgctgaggcaggccaccgaggcggcccggccgtcgttcgccgtgcgcgccgcggcggaccccgacaggccgatctggttccccgcagcacccctccccgtggctcgaagcagccttcggcgacttcgcttgatcctgggcctcgatctacccggaagctgcgtggacggcagcgagct

SEQ ID NO: 456326 - DNA, 327 bp, Sorghum bicolor
cgtccggccagacactatcttttcaaagattggcctgcagctgcacaggagggataaccatccccttgggatcctgaagaacacggtttatgattactttgacaagaacttcactggacagtttgacaagtttgatgacctttgcccccttgtttccgtcaagcagaattttgatgatgtcttggtcccatctgaccatgtaagtcggagttacaatgacacatattatgttgatggtcaaacagtcttaaggtgtcataccagcgctcatcaagctgagctgctaagggatggacatacacactttcttgtaactggagatgttta

SEQ ID NO: 456327 - DNA, 370 bp, Sorghum bicolor
cgttcgaacaactccattttaacttacactttcaatgcttataacaaattcttgttttacacatgctaatccatacagtacgcacagggtacgaggggtactatattaaaactcaccaaacatactagtatataatcttaaacggctctattttattgtgccacttcatatctactaaaaaactatcataccgagttgctttaccactaaaacttaaacttactaacacatcctatcatatgtactcttaatactcctttttgactgagttaaatcatgtataacagtgaccaaaccatagccactatatcagcttagctataactatcaaccattccctattcttcgatgaccaaaacctttagaaact

SEQ ID NO: 456328 - DNA, 307 bp, Sorghum bicolor
cgtccggtcttatgcactgactgttacatcaaccacatcaacggcaagctgcaggtgatggtccagctactctgactccgctaaggacgaccgccgtgtgtccatggtgtggcatgttgacgtcgcgctcgatgagatatgcaacgtggacaataagtacagggtgcatctgaccttagtccactgacgcagacgcatccttggcccgtgctgtggcccgacccacctctgcataatgtctcaggccgcggacaccagtaacaggtctatccgtatgaccgtgcacatcgaggtcatcgagctcatg

SEQ ID NO: 456329 - DNA, 367 bp, Sorghum bicolor
  unsure (1)..(367): unsure at all n locations
cgtccgcacggtcgaccatggcatgccaccagcttctgattcctgggtcatggagaatgttgtggagcctgcgttgcaagagctgtctgctaatcagctcgatcagcctgtttcccaggaagtcttcttccaagaattcaggaaatttctgggcatcatggctctaagactgcaacagcaccctgtgatcgtcgcccatacagagaacacctttgacgggagtggtatcaggaggctactgtcgaacaagttcgaattagacaagctgctggattctgtatggagagacgttccgaaagaacacanagataaaacgtcgaaggagtacctccggattgcgcttgataggattgccgattcaacgagt

SEQ ID NO: 456330 - DNA, 265 bp, Sorghum bicolor
  unsure (1)..(265): unsure at all n locations
cgtccgagaagcacgaggtcattgttgctgataaccttttcactggttcaaaagacaacctgaagaagtggatcggccacccaagatttgagttcatccgtcatgatgtcacccagccgcttcttgtggaggttgaccaaatctaccaccttgcttgccctgcttcaccaatcttctacaagcacaatcctgttaagaccatcaagaccaatgtcattggtaccctcaacatgnctggactngcaaagagagttggagctaggat

SEQ ID NO: 456331 - DNA, 321 bp, Sorghum bicolor
cgtccgggaatcatgtgcctagctgagggcctttttgtagctatcatcacagtattagtgcgagatgtctggggttatttgtacagcaatgaagaagacgtagtgaagcatgtatcgattatgatgccaattcttgctacttctgacttcatggatggaacacaatgcacgctatcaggcgccgctcgaggatgtggctggcacaaagtatgctcgggtatcaatctgcttgcttactatgctattggtctcccttcagctggtacttctgcattgattctgaatataggtggtaagggcctttggctgggactcatatgt

SEQ ID NO: 456332 - DNA, 406 bp, Sorghum bicolor
cgtccgccgtcacttcgactcttccactcctctgtcgcttcgctgccgtccgccacctgagtcttgtcgccgccgccgggatggccggagtcaccgccaccggggtggccggagttccctccaccttctcctctgccacctctcagatcgggggcttcctctcgaagaagccttacgcgccgccgtcgtgggccacgcacctatcccccatgccttcccataccttctcgcttggccagttcccaacgccgattcacaagtggaatctgcccaatttgccggaaggcacggaagtatggatcaagcgagacgatttatcaggaatgcagttgagtggaaacaaggtccggaagctggagttcttgttggcagatgctgtagcacaaggggcagactgcgttattac

SEQ ID NO: 456333 - DNA, 338 bp, Sorghum bicolor
  unsure (1)..(338): unsure at all n locations
cgtccgcccgcgccgccgctcgccggagccccgcgtctccgccccagcctcgccgcgccgcgtcctgtagcaaaaatgacggctggctacattgtgggctcactggtcggatcctttgccattgcatacctgtgtgacacatttgtttctgacaagaaggcttttggaggttccacccccaagactgtctctgagaaggagtggtggcaggccacagacaccaagttccaggcctggcctcgcactgctgggccaccggttgtcatgaaccccatcagccgccagaacttcatcgtcaagtccactgagtaggctggagaagtnggttcaacaacgtg

SEQ ID NO: 456334 - DNA, 422 bp, Sorghum bicolor
cgtccgcggacgcgtggggccgcggcctaacacacccgcgcgctagctagtgtcatccacactctagctagctagtgtcatccacgcagcgcccagctgttcgtctgcaaggcccagcagaagcagcagcaggacgccgccgccgtggatcagagcgacgtctctcgccgcgccgcgctcgcgctcttcgccggcgtcgccgccgtcggcgccaaggtcagccccgccgccgccgcctacggagaagcagccaacgtgttcggcaagcccaagacgaacacggagtacatcgcgtacaacggcgacgggttcaagctgctgatcccgtccaagtggaaccccagcaaggagcgggagttcccggggcaggtgctccgctacgaggataactttgacgccaacagcaacgtctccgtcatcat

SEQ ID NO: 456335 - DNA, 381 bp, Sorghum bicolor
  unsure (1)..(381): unsure at all n locations
cgtnccggggaaggtacatggagcccgtgacgtcgagcattccgatgatggtggtggagggcaaccatgagatcgaggagcagattcacaacaggacattcgcgtcctacagctccaggttcgcgttcccgtcggaggagagcggatcgttctccccgttctactactcgttcgacgccggcggcatccacttcgtcatgcttgcgtcttatgtcgactacaacagatcaggtgcgcagtaccgatggctggaggaggacttggtgaaggtggacaggtcggtgacgccgtggctgatcgccggctggcacgcgccctggtacaccacgtaccaagctcactacagggaagccgagtgcatgagggtggagatggaggagc

SEQ ID NO: 456336 - DNA, 200 bp, Sorghum bicolor
  unsure (1)..(200): unsure at all n locations
cgtgcgctcggcgctcgccagcagcgccttcaccacccagcggcgcggaagctccgccccgcgctcgggcctcgtggagntgcncggaggggggagggccagaatgacatagactacatcactggcgagagcaagaaggctgtggagaacgggccgagcgagaagagcagaagaagaagggctatgaagtcctgtcatgg

SEQ ID NO: 456337 - DNA, 418 bp, Sorghum bicolor
cgtccgcggacgcgtgggtgaacccacttgaactggagttccgaagaggagaggaggtcacaaagggtacatatctggcaaaatggtatggctgggaagtgtttgttaagatacttgacaaagacagcttctcggatgctgatagcataaatgcgttcaaacacgagcttacctgacttgagaaagcacgacatcccaatttggtccaatttgttggagctgtcacacaaaatgtcccgatgatgattgtttcagagtaccatcaaaagggtgatttagccagttatcttgagatgaaaggtcgcttgaagcctcacaatactataagatttgctctaggaatttctaggggactgaattatctccatgagtgcaagcctgacccaatcatttacggacatttgtcaccaaagttgca

SEQ ID NO: 456338 - DNA, 264 bp, Sorghum bicolor
cgtccgagacggttctcctaagaaaccgcctgtaaaaatcttatttctacaggcggtttgttaagaaagccgcctctatgaaataatttgagaatggaatttttttagttttttaaatgaccttgtttgaaaaaactgtcaaaaggaaagttgtatatctcgaaaagttatgaaactttgtagttgataatttttttcatttaaaaaaaaaaaaaataaataaaaaataacaaaagtaaaataaatgatgtcagtaataaagac

SEQ ID NO: 456339 - DNA, 390 bp, Sorghum bicolor
cgtccgcatacgttggtgatcaagaccaagcttttgaagaccagcagcaggctcagaagagctttgatcaagatgccaccaggtacccggagtgctgcatgtatgactattgaggagtgccctattcaacccacgggggcagcatgtggagggtgttcctgagctagcagatgaggaatcaacggtggaagctcaggaggatgtgcctgaagatgaggagatgcaggatccacctccatcacagcctgctcagttagctaatgcaaggttggggtggactacagtgctatggtttccagaatcagaccccaaggctttcttccatgagcatttggtgttgacattgaaccactactacccggatctacaagccactctggagtattgctg

SEQ ID NO: 456340 - DNA, 460 bp, Sorghum bicolor
cgtccgcattgatggttcattagtcgctgcacaaactgctggagctgaggacataatgatgctaaataatggctgcctttgctgcacggtgcgtggcgatttagtccgtatgattggtgaattggtgaacaagaagaaggggaagtttgatcatattgttattgaaaccacaggtctagcaaatccagcacccattatacagacattctatgcagaggatgtagtttttaatgatgtcaagctggatggtgttgtcactttagttgatgcaaagcatgctagacttcatttggatgaagtaaagcccaagggtatagtcaacgaagcagttcagcaaattgcctatgctgacagaattatagttaacaaggttgatctgggcaatgaacctgaagttcgtatctggttgagcgtaataagggtatcaatcgcatggctaattgaagcgagctgatatggt

SEQ ID NO: 456341 - DNA, 354 bp, Sorghum bicolor
cgtccggtggaggccatttctcctgagcttggcaaccgcgtgcagagagtccgtgtgcagctgcctggtctaagccaggagcttcttgagaagttgagggagaagaacattgattttgctgctcacagcaaccatgaggactctggttctcttctgttcaaccttataggaaatttggcattcccacttatcctcatcggtggtctatttttactctcaagaagggcacaaggtggccttggtggacccaatggtcctggatttcccctttgttttggtcaatctagggccaaatttcatatggaaccaaacactggcgttacattttgatgattgttattgtgtcgatgaaac

SEQ ID NO: 456342 - DNA, 351 bp, Sorghum bicolor
cgtccgcaagacattgaatgtggtggtgcttacatcaaacttatgtctggttatctcaaccagaagaagtttggcggcgacactcctgacaggggcatgtttgggcctgatatatgtggggatcagaaaaagaagcttcatctcatactttcataccaagggcaaaactaccctatcaagaaagatctaaaatgcgaagcagacaagttgacacatttttacacatttattctaagacctgatgccacttatagcatccttattgataaccgggagagagaatttggaagcatgtacactgactgggatatccttcctcctcgtaagatcaaagatgtttgtgcgaaaaag

SEQ ID NO: 456343 - DNA, 386 bp, Sorghum bicolor
cgtccggtttgtaaaagagtccaggaggagactggtgctgttcttatccatcccttcaatgataaatacactatcaggtttcgcgttgtgcgtggctgagatgtactcttaatgcatggcaatttgtgatgattttccagtggtcagggtacagtatctcttgaacttttggagcaagtccctgaaattgacacaataattgttcctattagtggcggtggtttaatttctggtgtgacccttgctgcaaaggccataaacccttcgatacgcattctggcagcagaaccaaaaggtgctgatgattctgcccagtctaaggctgctggaaagatcatcacattgccttccacaaacaccattgctgatggtctacgagcttttct

SEQ ID NO: 456344 - DNA, 219 bp, Sorghum bicolor
cgtccggctattacatatcttcatacctattcagggacatcaaatcctcaaacattcttctaatgaacaattgtcgagccaaggttgctgactgcggatgcgccaaactggccccaactgatgctagtcatatttctactcaagtcaaaggaacagcaggttatcttgatccagaatatctcagaacataccagctcaatgagaagagtgatgtctact

SEQ ID NO: 456345 - DNA, 437 bp, Sorghum bicolor
cgtccgcactcgcactcgctcaaccacaccatactccgacacaatatgatgcgaagtatacaacctggggacaggacaggggacatcaaagggggcaatggtggctgcattcgagaaggtatctgagaagaaaatcccactgaagattgctgtgctaatacctggacacacacatatcgactctgccataactgacaacgcagataacgatctcaaatgggaggcaaaatacaagatcaaggacatgtgcaaagatctgtgcaattgtgcaagcaataacccatacaggtatgcttgctcacatgacaactgacaatgcatcaccgaaccatgcatcctgccatacgtgcgagcatcatactgagcagcaacctgctctaccaccagtcttaacaacttattatatgaactatgaactcaaacagtcactcatttaa

SEQ ID NO: 456346 - DNA, 385 bp, Sorghum bicolor
  unsure (1)..(385): unsure at all n locations
cgtccgggcatttgggacatgccaagacacatttcgaagaagccttatctgtacgagatagaacaatcgaggctacaaagttggtattgcggtgtgctcggaataagagcgcacctggaaaaatgaccagggaaacgataatgaaatattccactcgggtttcttatcagatggatgtggtgaaggccctcaatagtatagatggtcctcagtggaaaacttccctttttgggaatccaactgaccctgaaactctgaggcgaaggtgcatcgtgngtgaaacgctggctgaaaagcatattgatttagctttcagaatgcttcatgaggtngatctgccagctgttgatatttatgctggtgtagctgcatccctcgcagaaag

SEQ ID NO: 456347 - DNA, 264 bp, Sorghum bicolor
  unsure (1)..(264): unsure at all n locations
cgtccggtcgtctcgtctcgcgtcgtctgcgctcgtcacaggcctcgactgccgagtgggaggagaggggcggcggccggtccgtcatccgttggttcgggaatggcggcgcangcggtggtgccggcgatgcagtgccaggtcggagtgaaggcggcggctgcgggcgcccgggcgaggccggcggcggcgggaggcanggtgtggggcgtcaggagtaggaccggccgcggcggcggcctcgccgggggttcaaaggtcatg

SEQ ID NO: 456348 - DNA, 278 bp, Sorghum bicolor
  unsure (1)..(278): unsure at all n locations
cgtccgcacatgctagactgatagcagacttccgtcctgggggtgaatgatcagcactacttgatatgcaacctatgaaacttttcagagaagagtctgcagggttatatgctgccgaggttgtaattggtcttgagtctatgcatctccttggaataatataccgngacctaaaaccagataatatcttgctccaagaggatggccacaattgtctgactgattgtgacctctcgtttttgacttattcaaaacctgatgtcataaagcattctaca

SEQ ID NO: 456349 - DNA, 374 bp, Sorghum bicolor
cgtccgaaaatttcttgatctagcatacaataaattttctgggagcataccatcatggattggggaaatttcatcggatttgtcgtttgtacgggtacgctcaaatatgttttctggtggcattcccatccaaatcactaggatgaaggggcttcaatatctagaccttgcatgtaacaacttcacagggaacataccactgtcacttggaaacctggaagctatggctcatactcccaataacaatagtgcacttttcagtgttaccaacactggattttgtggtgttttcctgtacagacctgtacgaactgatagtttattagtggtcaccaaaggtcaacagcttgaatttgcaagtggaattgcttaca

SEQ ID NO: 456350 - DNA, 396 bp, Sorghum bicolor
  unsure (1)..(396): unsure at all n locations
cgtccggcgcggaagctccggnggatggagatccgcgctcttcgtcgtgggcgttgagatcgccgggagcttcgcctacttcggcatctcggcgaacctgatcacgtacctgacgggcccgttggggcagtcgaacgcgtccgccgcggcctccgtcaacgcctggtcgggcacggcctgcctcatgcccctgctcggcgccttcctcgccgacgcctacctgngccgataccgatccgtcatcatcgcctgcaccctctacgtcctggggtatggcatgctgacgctgtcngcgacggtgccggtgctgcggccgtcgcacgtgccctgcagggaggaggatgatggtgatggcggcgtctcgtggtcgtggtcgtcggctcattcatgccatca

SEQ ID NO: 456351 - DNA, 383 bp, Sorghum bicolor
  unsure (1)..(383): unsure at all n locations
cggacgcgtgggcagatatccagcacatagtatcgtcatggactggcatccctgtggagaaggtttccagcgatgagtcagataagcttcttaagatggaagagactntgcacacgcgtgtcattggccaagatgaggctgtggtagccatttagtcgctccatccgccgtgctcgtgtgggtctcaagaaccccaacaggccaattgcaagctttatttttgcaggtcccaccggcgttgggaagtcagagcttgcaaaggctcttgcagcctattactttggctctgaggaggctatgatccggcttgatatgagtgaattcatggagaggcacacagtatccaagctgattggttcacctccaggatatgtaagatacac

SEQ ID NO: 456352 - DNA, 460 bp, Sorghum bicolor
  unsure (1)..(460): unsure at all n locations
cgtccgatcaattttggttgcccacagcgtattgcaagacggggtaactatggagcatttctcatggacaaccttcccctcgtaaagagcccgtgtgcagaatctagcagctaatcttcatgttccagtctcagttaagattcgtgtatttccacgactggaagacacattagcctacgcgaagatgcttgaggaagctggtgcttctcttgtggctgtccatggtcggacaagagatgaaaaagatgggaagaaatttcgagctgactgggatgccatcaaggctgtgaaggatgcacttagagtccccgttcttgcaaatggaaacatncgccacatggaggatgtgaagaatngcctggaacatacntgtgctgatggtgtgctttcagctgaaactcttctagaaaatccacactttttgctggtttaggacaaaggatgggaagaagatggtgat

SEQ ID NO: 456353 - DNA, 394 bp, Sorghum bicolor
cgtccgattgtataactcactgattgttgccaggccatctattgcttcagaaataaaacaccttggtcttttggctgaaccaatgccatctgtggatgacttagtggcaaggcagaatattcatgttgagggcttgcctgctacaccatctaaaaaacgtgatgctggtccagatgacaatgctgatcctcgatcaccaaagagatcgtgcaatgaatctaggaacacagtggtagagcacaatttgctgacacctccacccaagcaccacatggtgtcgactagtttgaaagcaaaatgccatccactcgagtccacatttgcaagtccgactgtcagtaattcctgtggggggaatgaaaaatgtgctgacgtggcaattcagatattcttt

SEQ ID NO: 456354 - DNA, 321 bp, Sorghum bicolor
  unsure (1)..(321): unsure at all n locations
cgtccgggttcctgatggaactggaggaacactggcaaccgtgactgaattcatggtgaatggctcactgaggaatgttcttttaaggaaagacagaatgcttgatcgtcggagaaaacttaccattgctatggatgcggcgtttgggatggaatacttgcactccaaaagcatagtgcattttgatttgaaatgcgacaatttacttgttaatttgagagatccctcagaggccaatttgcaaggttggagactttgggttgtcaagaatcaagcgcaacactttggtttctggtggtgttcgcggcactcttncatgga

SEQ ID NO: 456355 - DNA, 406 bp, Sorghum bicolor
cgtccgattccatggaattcgaaatggaattgatcctgacatttgggatccatatactgacaaatatattccggtccattatacatgagagaatgtcatcgagggcaagagtgctgcaaaaaaggcattgcagcagatgcttggattacagcaaactgatacccctgttgttggaatcatcactcgtctaacaggccaaaaggggaatccaccttatcaaacatgcaatttatcgagctcttgaacgcaatggacaggtggttttgctcggttctgcaccagatcctcgcatacaaggtgactttacaaatttagccagtaggctacataatgaatatcatggccgggtgaagctatgtttaacctacgacgagccactgtcgcatttgatatatgccggcgcgga

SEQ ID NO: 456356 - DNA, 370 bp, Sorghum bicolor
cgtccgcccacgcgtccgcccacgcgtccgcccacgcgtccggcagccagcgacggcgcgagtccttgcgtgcgtctcccgttcccggcccgcgctccctcgccttgctttcctcggcgccttcgtcgtctcttcctctcgccactagtagccagccattggaggcgcgtagggctgggcggttgcagtgagcagcggtagcatggggatcaggaggcagcacggtgctgctacgatcgtcttggggatcatcctggagctcgtcctcttccgcttggcgacgtcgcagtcgttcatcggggtcaactacgggacgatcgcggacaacctgccgccgccggcgtcgacggccagcctgctcatgtccacg

SEQ ID NO: 456357 - DNA, 413 bp, Sorghum bicolor
cgtgcggtccttggtgcgcagctcgtcgccaaggtcactggagagaacactgtgaggacccccgctaaggcgaaccttaaggtcgagatcaagggcttcatccacattggccggaacttcctccggagctggcaccggcgctaggactgcccgctcgacttcctcgtcgagaacgacagcggaagcgacaggaacgcctttaaccttctcaagtatgacttgatgcttgacaccttgaaggctgacgtcaagatcgacgacaacaccaccatcaacgtcaatggcaagcccattagcatggtcttcagcatggaccctatcaagctcccatgggctgagctatggattgacatcggcatcgacggcaccatagtcttcatcgacggccccggcgacggcaagcacatccaggc

SEQ ID NO: 456358 - DNA, 458 bp, Sorghum bicolor
  unsure (1)..(458): unsure at all n locations
cgtccgttggcatttggtgcagcatttgcagttttcttgacattggagatgatacgaatttgggaaatataccctcttggacatgtggtgcatcagtttatgaacgcctttactgatcatcgtgattctgagattcttattgtcagccatttttcactcttactgggctgtgcacttcccaaatggatgtcatctggattaaatgatcgaccacttgccccttttgctggaattctcagcttggggataggtgataccatggcatcgatgatagggtacaagtatggtgtgttaagatggagcaagacaggaaagaaaacaatcgaaggcacggcagcaggcataacttcagtgctagcagcctgctcgatccttgtgtcactcttagcttccagtgggtacattctttcgcagaaatggttatcacttctgatagctgtcacatngagcgggttatt

SEQ ID NO: 456359 - DNA, 376 bp, Sorghum bicolor
  unsure (1)..(376): unsure at all n locations
cgtccgcaccgatgaccagagggatccgttcaggctgccgaccaaggagaacatccggatggcgatgcactggctggtgcagggctgcagctacggcgactccctggtgttccacttctccgggctgggcgcgcaggtggccgacgacgacggcgacgaggcggacgggtacgacgaggccatctgcccgctggacgcgttccagaggggccccatcctggacgacgagatcaacgaggccatcgtgcgcccgctggtgcacggcgtcaggctgcacgccgtggtggacgcctgctacagcgccacggtgctggacctcccctacgtgtgccacatgtncaggaacgggttctggcaagtggaggacgagagcccc

SEQ ID NO: 456360 - DNA, 461 bp, Sorghum bicolor
cgtccgcgagctcaccggagaaatacctcaggagttgaacaacctccgtctcagtttcctcaacctctcttccaaccaactcaccggcgagctgccccaggcgctgcagagcccggcgttcgaggactcgttcctcggaaaccatggcctctgcgccgcggcgagcccgaacataaacattccggcgtgccggtaccgccgccacagccagatgtcgactggcctggtcatcctgttctccgtgctcgccggcgccgtcctcatcggcgccgtcatcgggtgtttcatcgtccggcggaagaagcaacaaggccgcgacgtgacgtcgtggaagatgatgccgttccgcacgctggacttcagcgagtgcgacgtgctcaccaacctccgcgacgaggacgtgatcggcagcggcggctccggcaaggtgtaccgcgtccacctccccggacgcgggcgcg

SEQ ID NO: 456361 - DNA, 343 bp, Sorghum bicolor
cgtccgactttgtacaacgccctttgatagatatttgttcttgagcttcttcgtttttgcaccaaaagacaagcaggatgtcttgcagctgcggatcaagctgcaactgcggctcaagctgcaagtgcggcaagaagtaccccgacctggaggagaagagcaccgcggcgcagccaccgtcgtctgggtgtcgcccggaaagacagtgtgcgagttcagcgcgcgagtcgcccagactcacgtgagtgcgacgtgaggccctgactgtgcacgcacacctggacaacgcattctctgtgtatagaatactgcggcgcgctcagtctatctgtgttgatgttgg

SEQ ID NO: 456362 - DNA, 370 bp, Sorghum bicolor
cgtccgctcgaccccatcccattcgggcgttgtctgcttccgttgttgttgggatgggattgctgattcggttggctgatgcgtgtgtgtgttgttggttctcgtctggtaggtggaggagatgatcactaatgcggcgaagaagggtcagatgccgtcgcagatcggcgtcctgctccgtgaccagcacggtatcccccttgtcaagagcgtcacgggcagcaagatcctccgcatcctcaaggcccatgggctggcgccagaaatcccggaagacctctacttcctcatcaagaaggcggtggcgataaggaagcaccttgagaggaacaggaaggacatagacttcaaatcaagctcattcttgttg

SEQ ID NO: 456363 - DNA, 393 bp, Sorghum bicolor
cgtgcgcgcgttgcccactgcattgcagacagacggacaggaccacaacagctgctgcccacagcaccgaagccaggaatccacggcgtctgggatccatccatggggaggcgcgagatgaacgggcggctatcggccgagtaccagggcctggaggtgaaggtgcccaacctcttccggtgccccatctcgctggacgtcatgcgctcccccgtgagcctctgcacgggcgtcacctacgagcgcgcctccatccagcgctggctcgactccggcaacaccacgtgcccggccaccatgctcccgctcccttccaccgaccttgtccccaacctcaccctgcgccgcctcatcgcgctctgggcgtccacggccgcgccctcctctccctgc

SEQ ID NO: 456364 - DNA, 493 bp, Sorghum bicolor
cgtccgctcgacgccgacggtcacggcatgctctccgtgagcgagctgcgccccgccgtggaagacatcggcgccgcgctcgggctgcccgcggagggggcgtcgcccaacaccgaccatgtctacgcagaggtggtgagcgagctgactcatgggacatcccagggggaggtgagcaaggccgagttccaggaggcgctgtcagacatactcctcggcatggcggccgggctcaagagggaccccctcgtgatactgcgcatggacggcgaggacctcagggacttcgtcgccggcagcagatacgaacccacagctgctgccgttttctcgaaggtcggtttcggttctgaagaagacgcgtcgtctctgcgtcagtgcgtgttggccgctctccagaagctgaccgtcgaccacggagtgccaccggcttcagacacctgggtcgcgaagaacatcgtagagccggcgttgcagcaactttctgcggatc

SEQ ID NO: 456365 - DNA, 232 bp, Sorghum bicolor
cgtccgattgccccgatccgtacctgctgttgcaatcatggcgaccaccgaggcgctcttcacaggcatcaaccacacccagatttgccggtggcgcgctacactgggcaagccaatgcaggggcatggcctggggatggacagggagcgcgcccagagcatcacgtgccaggcggccagcatgatcatagccggccgcgtcccaaacatggcgaagcagacgctgatgaac

SEQ ID NO: 456366 - DNA, 359 bp, Sorghum bicolor
  unsure (1)..(359): unsure at all n locations
cgtccgcagagatccatggaaggaataagagacacagagattgcgatgggagcgtatcagccacaatatacatgggctaataagctgtctgccccacgtggacagatttatggctacagaatgtccttatgggctgagcatattggaagcattgaggaagacttccactatccggagagcctggaatgcatgaggcgtgtacggcatcttggggaagagaactggaagcagtttgttgccgatgaggtgacagagatgagaggccacctcatgaagtatccagtaagcgtngaccgtataggcaaggtgaaaccactaccaggatgcacaacattcccagatttaggtgggaacatctg

SEQ ID NO: 456367 - DNA, 354 bp, Sorghum bicolor
  unsure (1)..(354): unsure at all n locations
cgtccgattgcagtcacgatctgtgtttgtcaagaacttaaatttcaagacaacagatgaatcactgaagcagcatttcagtgcaaaactaaggagtggcagtcttaaaagtgcaacggtgaagaagcatgttaagaagggcaagactgtttcaatgggatttggtttcgttgagtttgactctgttgaaactgcaaccggngtgtgcaaggatctacagggaacggttttggacgggcatgctttgatcttgcaactgtgtcatgggaagaaagatggtcaagctgcaaagaagaatggcaaggataaaagttcaacaaaactgcttgtgcgtaatgtagcatttgaagcaac

SEQ ID NO: 456368 - DNA, 419 bp, Sorghum bicolor
cgtccgatggccatggcacgagatggtctgttgccatccttcttctctgatgttaacaaacaaactcaagtacctgttaagagcacaattgtgactggcatttttgcagctgctctggcttttgcaatggatgtttcacagttagcaggaatggtcagtgtaggcacacttcttgcattcactatagttgctgtctcaatcttgatactcagatatgtccctccagatgaggtccctttgccaccctctatgcaagaatcattccatttgaaccaggaatgcgatgaggaaacggacaggggccttcttggcgttgggaactgtaacttgtctcagacaaagaatgtgattgtggtagtagaatcagtgaaggaccctctcattgataaaagactgcataaaggcaagatggatgagac

SEQ ID NO: 456369 - DNA, 410 bp, Sorghum bicolor
cgtccgggtcagtaaccggagatcacgaaagtggttgaatgaccgcttgctgattgaacttgtcccccgtcttcatgttgaagaaatcaaagggcttttcgcacctccaccgtggggtgaggaagtacccttgtcagcattctgcaggacaagtgttggtgaatgggatgccttcaggagcattgacatggatgctgaggcaagattgatgcaaaatatgaaaagatcatcccaaaaaaccaggaatcatgtggacgaaggggaattgattgcgctgaatgcctggcaccggatagatcgccaaactagagaagcaataaagagaaattttcttcctgatctgcttgaaatatatgaggaacgagttaaggccttcattgaagatactagtgacaaggatgtgcttatgc

SEQ ID NO: 456370 - DNA, 369 bp, Sorghum bicolor
  unsure (1)..(369): unsure at all n locations
cccacgcgtgcggtaccattccaagtncccgctcccggattcccgacgacgagctcggagctcctcctcccctgcccctgttcggtgctcgaagcaacagctgccgccatgtctgccgccaaccagctcgccgcgctcatccacaacatgttcgccacgggtttgcttgacgaccagttccagcagctccagatgctgcaggaccccagcgctcctaacttcgtcgccgaggtcgtcacgctcttctgccaggacggagagcggatcatcggagagctggccaagctgctggacatgcccgtcgtggattttgacagggtcgacgcctntgtgcatcagctcaaaggcagcagcgctagcgttggtgca

SEQ ID NO: 456371 - DNA, 520 bp, Sorghum bicolor
cgtccgcggacgcgtgggcgcgatgccgatgccccggaagcggttccgcaccaagttcaccgccgagcagaagcagcggatgcaggagctgtcggagcggctcgggtggcggctgcagaagcgcgacgaggccatcgtcgacgagtggtgccgcgacatcggcgtcggcaagggcgtcttcaaggtctggatgcacaacaacaagcacaacttcctgcgcgccgctccaaaccccaggcggcgctgctgcaccgtcgtcattcaacccgtccaggatcacccctccgcctcccgtcctcacctcttccccgaccagcgccacaggcttcaacatcaacggcgccgcctcctcggcgcccaccgtcgtcaccgccgaccacacggacaacgccgccaacggagcttcatcgccgcagtccgcttaaactactagagaagagagggaatggagaatggagagagaaacatgtagcttaatttcagtgatctgatcactccgtttcattttttttttctttag

SEQ ID NO: 456372 - DNA, 348 bp, Sorghum bicolor
cgtccgggaaaataataagttagacctggagagcacactgaaagaactgaataacaccattttaggaagaagcacgaggaccaggacaagaagcgaggaggaggagctggccaccggcatggagaaggtcacggtggccgagcccgagaaggaggaggaggagcacgaggcctgctgcgagaagaatgagagccttgtcgccaagctgcaccgctccagctgcagctccagctcgtcgagcgaccaggaaaaggaggcgatcgatgagaacggagagatcgtcaagaggaagaagaagaacggccttaaggagaagatcaaggagaagctgccggtgcaccacaagga

SEQ ID NO: 456373 - DNA, 514 bp, Sorghum bicolor
  unsure (1)..(514): unsure at all n locations
cgtccgcccacgcgtccggattcctgttacgaacatactttcccggttctgcaaaggctcaggatttgcttcctctaagaatggtgagtcctggtcatctgcaactttccaggttctactgagggagacatgtattcatgaacaagagctgttcttttcctttctcaatcgacttttcaatacactcagctggacaatgactgagttctctatgtccatccgggagatgcacgataaaaaccaggttgctgatttgcagcagaggaagtgcagtgtcatttttgatatatcatgctgtcttgcgcgaatcttggaattctgtacccgagagattccatgtgcatttctcatgggaccagatatgnaattgcggggttggctgaattggtgtctttattctcaaccacatcatatcagcagctgatgcgagttctttgcatgacactgaacggcagggagcatcaagagaaacaaatcgactatgacttgctcctttngcgcatatcctcagcta

SEQ ID NO: 456374 - DNA, 477 bp, Sorghum bicolor
  unsure (1)..(477): unsure at all n locations
acgcgtgcgcttggagaggtcctgggtggaaatgagctgattgatagtcagcttgaaattaagttcttaaaaaacgtggagaagggctcgatttgtgcacttgagctagatgctaaaaaggtccagcagtttgctgatgccattgaaagctcatattggttcgaattttttatagatgatctgcctctttggggttttgttggggagactgacaagaacagtgaaaacaaacattatctttacacacacaagaacatccttgtcaatacaatgataacaggataattcatgtaaatctcacccaagagtctcctaagcttcttgaagatggtaagaaattggaaatgacatattcagtgaaatgggtagcaacagatgtgtcatttgcacgcgcgttttggagtgtacctggactattctttctttgaacaccaaatnaactggttttcatttttaaactttttatgatgggtattt

SEQ ID NO: 456375 - DNA, 356 bp, Sorghum bicolor
cgtccggacggcggcgtcgtcttcgacgccggcgcgcgcaccgcgctcgccttcgtcaccctccgcgccgacggcgagcgcgagttcatgttgggccgcgggggcatcgccgacatgctactaaccgccgacgagctcaacgtccagctcatcaagagggctgcagtctttcactactgatcaataagcttgattgctgagccttgccggacggcacatcttcgtgccatggagattgccaaagaggccggtgcactgctctcttatgacccaaacctgagggaggcgctatggccattccgtgaggaggcccgcacccagatcttgagcatttgtgaccaggcagacattgtcaa

SEQ ID NO: 456376 - DNA, 453 bp, Sorghum bicolor
cgtgcgctccaattagtgcagtagtaagcaatggtttttcttcatgtgcttggagttggttggtggtggctcaggacagtatgtttgggttatgtgtattcgcttgttataattacacctcaatgaatcaatgccatattcaagttagtcagtgcagaagtgttgttagatggagacatctttgttgccttccatgctctccgcaggcatctagtgacatgaaatttgtagacacaccatgtttttacttcagttaatgataatttctccatcaatcaggttccaaaatcggctgtcactaatcccgatgatctcgagctctggctaaaggtagatgatgaactaaggcattaagtaccgacaagtgacatgctattcaagattccttttctgatcagctatatcagttcctttatgacattaatggagggtgatgtgatactaacaagtacc

SEQ ID NO: 456377 - DNA, 311 bp, Sorghum bicolor
cgtccgccttactttgcgaaaaggctactcactgatcccaatccatatctcagagatgctttaattgagcttctattcaaggatggaggatggagatggaataggcttgaaaatcttcttgttcaagggcgccaagatagagagtttgcagccaaagatgcactgcagcctgttctaaagcttctccttggtcctgatggggaggaactgcgtgtgttagttgtgaaagaggcagttcgtgtaacagaagccatcactattggaacactgatcgattcatacaatgctgcttcagcatttttgaggccact

SEQ ID NO: 456378 - DNA, 406 bp, Sorghum bicolor
  unsure (1)..(406): unsure at all n locations
cgtccgctcctatgggcctttgatccggagcttcgtggatcttgggaagaggaggtgtggtgggcagccggcggcgatctggcggngaggatagggccggcgggaaggagccgatcgaggtcaggttccggctcttcgacggcacggacatcgggcctaccaagtacgatccctccaccacagtctcctcgctcaaggagttcatcctcgctcggtggccacaagataaggatgtagctccaaaaactgttaacgacttgaagcttatcaatgctggaaggatattggagaattaaccggacacttgcagagtcccgtgttccagtaggagaggtcccaggaggtgtaattacaatgcatgtggtagtgcgacctccacaagctgacaaaaatagtgagaagcagc

SEQ ID NO: 456379 - DNA, 349 bp, Sorghum bicolor
  unsure (1)..(349): unsure at all n locations
cgtgcggtatgatgacagcatctactcaagcatattacacacattgtcgaatccgactgacgttgtgcctcatgctgatccttcaaagagcagagtaatgctagttgacggaacgtcggttatgtacagatcctactacaagatattagcacagctgcagcacggncagttggagcatgctgatggaaaatgggattgggtttaactatattaaagctctatccctgctcttgacatgctggaagtcatttcatctcatgctgcggntgtgtttgatcacgatggagttccatatggtcattatactggcatgccatncaaagaatgtcacatggcaaaagggatgacc

SEQ ID NO: 456380 - DNA, 292 bp, Sorghum bicolor
  unsure (1)..(292): unsure at all n locations
cgtgcgattgagctcgagtgaagaatcttatggtgacattgaaaagctctacgagcgtggggtgcaagaatacctgtccatcaagttatggcgggagtaccttgattatgttgaagagcatgatcagtcngtgtctcaatgtacaccttctggcctctccaagatgagaaatttgtttgaaagtgctattactgcaggagggctgcatattactgacggtagcaaactatgggcagcttatatagaatatgagatgggcattttgatcacccattgctgatgccaatgatga

SEQ ID NO: 456381 - DNA, 326 bp, Sorghum bicolor
cgtccgctgctgttgaggaaggtattgttgttggtggagggtgcactcttttgcggcttgcagctaaagtcgatgccatcaaagatacactggagagtgatgagcagaaggttggagctgaaataataagaagggccctgagctacccacttaaattgattgctaaaaacgctggtgtcaatggcagcgttgtcactgagaaagtcctttctaacgataacttcaagtatggttacaatgctgctactggacagtacgaggacttgatggctgctggtatcattgaccccaccaaggtggtgagatgctgcttggagcatgccgca

SEQ ID NO: 456382 - DNA, 293 bp, Sorghum bicolor
  unsure (1)..(293): unsure at all n locations
acaacacactacaagctattatctgatcgacatggccggcgccaccatggatcgcaccttccgcgcgctcgtcagggagccggcaacaaccatcaccatggacgatttctgcgatggccgcatgaccatgcgcaagactgctgctttggccaagcagcggtcttgtggaggccctggtacggggccgaccgcgtcctgtacttgtttccgttctccggcnagcccctaancctcctgaccatcgagtttctctgcgactacggctgggacactgacgggcttgatgcggaccc

SEQ ID NO: 456383 - DNA, 230 bp, Sorghum bicolor
cgtccgacaagaagttcctttttgaggccttccctgttgagagcaatcttcaccatttcttgcatgatcacatgaatgctgaggtggtggttggtgttgtagaaaataagcaagatgctgtggattatcttacttggactttcatgtatcggcggttgacaaagaattctaacttctacaatcttcagggtgtaagtcacaggcatctgtcagatcatctttttgagcta

SEQ ID NO: 456384 - DNA, 301 bp, Sorghum bicolor
  unsure (1)..(301): unsure at all n locations
cgtccgctccagctaggaaactcagngcagagaaagggggaaaagcaancggcccacgnctattctgaggacataactgaaaaacaagctaaaatggggctagtgtggcgagttcactcaaacgataagagcanattcaagttgctatattatgagctaagagaaaatgggaggctgagtcttgcactacaggaagacagtgtgaaggcaggagaagatactgctgcaaggatggatatcctaggtantcctgagaaccggtgagaacaaaagaacctggcagctgctgcaaaggatnctg

SEQ ID NO: 456385 - DNA, 383 bp, Sorghum bicolor
cgtccgggctgaaggagcaatgtaccttttccctcagattcatctgccacagaaggcaattgaggctgctaaagctgctgagaaagcacctgatgcgttctatgctctccgtctccttgaatcaactggaattgttgtggtccctggatctggatttggtcaagttcctggaacatggcacatcagatgcactatcctgccgcaagaagacaaaatccccgcggtgatcacccgcttcaaggctttccatgaggcgttcatggctgagtaccgcgactataactgtacagtgtgaattaagatggagattcagtagaagagtccatcttttttccctcctttgttccccctttgtacttcttgtcctgtgttttaaaataatt

SEQ ID NO: 456386 - DNA, 334 bp, Sorghum bicolor
  unsure (1)..(334): unsure at all n locations
cgtccgaccttcctttgttgttccgaccaaaggaaatggtgaagaacggtgagtagatctactagttgatcctactaagaaagctcgtttgggtattctcccacgctacgcaaaggatgaaaaagtcatcagatggtttgaactccctaattgcttcagattccataatgctaatgtttgggaagagggtgatgaagttgttctcattacctgccggcttgagaatccagatttggacagngtggatggacatcaaagtgactagctcgaaaacttcgggaatgagctgtacgagatgagattcaacatgtaaacgggggcgtgtttacaaaag

SEQ ID NO: 456387 - DNA, 196 bp, Sorghum bicolor
cgtccggtcggaatgatcctcgccaacaccgaggagagcggcgaggagctcatcgccgactcccacctcgtgccggcgactatggtcgggcagaagttcggcgacaagatcaggtattacgtccagacggacccgtcgccgacggcgaccatcatgttgcgcggcacaggcatcggcaagtcgccgtcggcgccgc

SEQ ID NO: 456388 - DNA, 494 bp, Sorghum bicolor
cgtccgcttgtcttatcaattgcttcagcgtgctacataatctgctgattctatagtatgcgatggcctctggacttgaactaactgaacacgcaccgtgttcgtcgcttcgcaatctgcagggtttcagaaagatcgatccggacagatgggagttcgcgaacgaaggctttctgaggggccagaggcatcttctgcggctgatcaagcggcggaggccggcgccgccggcgccgtacctgcaggcgtcgcagtcgcagtcacaggggtcgtgcctggaggtgggtcagttcgggtgactggaccgagagatggaccggctgaggcgcgacacgagcatcctgctggccgaggtggttaagctgctgcaggaacagcggagcacgcggtcgggcatgcgcgccatggaggaacggcttcagcacgctgtagcatatgcaggtgccgatgattgggtttctttggctggcgatgcttaggccggctttttacaa

SEQ ID NO: 456389 - DNA, 386 bp, Sorghum bicolor
cgtccgtcctcaaccttttttctcctctcctcgagaaccccaatccaaacctcccaaccgccaaaaatcctacgaaaatatagcacagaaatatcatcttggctcagatcgtgctcgaggtgatccagatctctactggttcatttccctcttgtcgtgacctgatcccgttacccattacctgttcttggattgcatcagtgaggaagccgtgagttttgaggggacaacgcgggatcatggcgtcgtcactggccgaggaggaggaggccttcgagcacacgctgctggtggtgcgcgaggtgtcagtgtacaagatcccgccccgcaccaccagcggcggctacaagtgcggcgagtggctgcagtcggacaagatctggtcg

SEQ ID NO: 456390 - DNA, 321 bp, Sorghum bicolor
tactagaactagtcgactaggtctagagtacctagcgcccgccgcaacgacatctgttgaacgagatggggttgatttgccatgtcgagcacccccccaagtgcatatcaaactaccttgcaacactcgaagcccctactgagcttaatcaagaggtatggaaccttgccaatgacagcggggggacaactctgtgtgtgcgaattaagagcgaagtagtcgcatgtggagtggtctatgcggcagctaggagacaccgcgtaccccgtcccgtagagcctgcgacgcggactgacagggatgcttatcaagcacgaattc

SEQ ID NO: 456391 - DNA, 397 bp, Sorghum bicolor
cgtccggcgcgagccacaccgcccgcacaggcacaggagatcccatccccgcacacggcacaccccaccggccacacacgcaggcaccgacggcgactcgaggatgacggccggccagccgctgcgcaccgagccagcagcccagcccccgcgggtgtaccacagcaccccgcccccgcccccgccgtcgccggcgctccaagcggacatcgtgccgtcgtacccgccccccgagtctgacggcgacgagtcctgggtctggtcccagatcaaggccgaggcgcggcgcgacgcggacgcggagccggcgctggcgtcgttcctctacgccacggtgctgatgcacccgtccctggaccgctcccttgcctttcacctagccaacaagctctgcttc

SEQ ID NO: 456392 - DNA, 394 bp, Sorghum bicolor
  unsure (1)..(394): unsure at all n locations
cgtccggacatcaagcgctacctctgcctcgagctggttaagcaggttccgctgttccatggcatggacgacctgatcctggacaacatctgcgaccggctgcggcctctggtgttctccagcggggagaaggtgatccgggagggcgaccccgtgcagcgcatggtgttcatcctgcagggcaagctccggagcacgcagccgctgaccaagggcgtggtggcgacgtgcatgctgggcgcgggcaacttcctgggcgacgagctgctgtcgtggtgcctccgccgccccttcgtggaccggctcccggcgtcgtcggccacgttcgagtgcgtggaggcggcgcangcgttctgcctcgacgcgccggaccttcggttcatcaccgagcact

SEQ ID NO: 456393 - DNA, 451 bp, Sorghum bicolor
cgtccgataaacgtcggatccttgtacatgaagcagggcatcttcttactgcctatctaatgggctgcccgatacgaggagtcattgtggatccatttgtggcattgcgaatgggcatccagggccaggcagggactcagttctgggatgaaaagatggaaaaagaactagccgagggtcatctatcaagtactgcatttgacaggtactgtatgattctgtttgccggaactgctgctgaagcacttgtttatggggaggcagaaggtggagaaaatgacgagaacttattcaggagtttgtgcattctactgaacccaccgctttctgttgcacagatggcaaaccgagctcgttggtcagtcatgcaatcttataaccttctgaagtggcacaagaaagctcatagagcttgaatcaaagcacttggagacgggcatagtcttagcat

SEQ ID NO: 456394 - DNA, 445 bp, Sorghum bicolor
cgtccggcactctgcgagtctccatagcgctcgacacatcaccgcggcaactcgccccggttcggttccaccgccgtctcggcaatctctcctgcgctcgtcttctcaagccctcccgcccgccatggccgcgaactcccccttcgactgcgtgctcctagacctgtacgacaccctgtacccgggcaacaccggcatcggccccgccctgaagcgcaacatcgacgagttcctgcaggccaagctcggcgtctcggcggagaaggccgccgccatgcgcgtcgagctcttccgcacgcacggcagctccctcgccggactcatcgcgctcggctatgacgtgcacccggacgagtaccacagctacgtgcacggcaggctaccgtacgacatgatccccgccgacccgcagctggcgcgcctgctgcagagcattccgcaacgc

SEQ ID NO: 456395 - DNA, 349 bp, Sorghum bicolor
cgtccgctccaacttcaacacgcagcggctggaccacatctaccacgacccgcacgcggtcccgtcgtcgccgcggcccccgatgcggggccagtacgccgacctctacgactcctcgtccctccggcgcgcgctcgacgccatcgcccccgacgaggtctacaacctcgccgcgcagtcacacgtcgccgtctcttcaggtccccgactacaccgcgacgtcaccgcacggggcgctccgctctcgaggcgccgctgcgccagccatcgtctacagcggctctcgaatgtcggtcacccgcgcgaagcaggaccgcttcccccgtctctcgcgcgcaagcgcggcact

SEQ ID NO: 456396 - DNA, 450 bp, Sorghum bicolor
cgtccggtttgcaacgaaaatttggtcaatggcgggaggatggttcatctgaggagcatagtgacctattgttctatgagtatgttgaagctgtaaaattaacaggggacaaccttgtgccagctggtcaggttgtcttccgtgcaaaagttggtgaacgttatcagctccctcataagggaattatccctagagaacttggagtgattgctaggtacaaggggcaaaggaaaattgcagatcctggtttccaaaaccctcgatgggttgacggggagcttttgatactagatggaaagttcatcagagatggtcctgtgatagctttcttttactggacatctaattttcatcttttcgaattctttaaacgggtgaggctttctgactagttcccttctaaaagtagttaaagcaagccatgcttatttcagcatagttgcatttgga

SEQ ID NO: 456397 - DNA, 414 bp, Sorghum bicolor
ttccgggtcgaccacgcgtccgcttcagatcacttgctttataaggtcgtcagtggcctaataaagtatcagatgtttatttgttattttctttatattgctgggtttgtatggtgtattttgactctgaagaaaaaggcatacaagtatcaattcaaacagtatgcgtggacgcacatgatacttttaacggtttttgcacagtccgctttcactgtggcaaacatatttgaagggatattctggtttcttttgcctgcttcacttattgtgatcaacgatgtctttgcttttattcgggttctttcttgggagaacaccactaatcaagttgtccccaaagaaaacctgggaaggttttattggtgcattagtgacaactatcatctctgctgttctgttaacaaatgcgat

SEQ ID NO: 456398 - DNA, 402 bp, Sorghum bicolor
cgaccacgcgtccgtaacttcgaggaatatagcagtcctatgctagactaacacgcttccagtagtacgagtcatacagtacagcagtgcgtacgagctatctatcatgtacacggtgaatgacaatacctacatccgagactactcgttgggcgagggccgcatcaccatgcgcaagaccgcggccaagcccaaggtggcggcgtccggcagcccctggtacgggcccgaccgcgtcaagtacctcggccccttctccggcgagcccacgagctacctcaccggcgagttccccggcgactactgctgggacaccgcggggctgtcggccgaccccgagaccttcgccaaaaaccgggagcagcaggtgatccactccacctgggccatgctgggcacact

SEQ ID NO: 456399 - DNA, 493 bp, Sorghum bicolor
cgtccggcagcagcaaccagcaactcaatcacgctccccttccccttctctcccctccggcttccgcggaactagggctagaagccgccatgcagcgcgacgccaacgccccctcccaccggctcgcccgcgtggccgcgcacctgcgcccgcagatggaggaaggcgcggtcgcgttcgcgctgaggcccgcggtgtgccgcgccaagggcggcgcgccggggttcaaggtcgcgatcctgggcgccgcgggcgggatcggacagccgctgtcgctgctcatgaagatgaaccctctcgtgtgcgtgctccacctctacgatgtcgccaacactcccggtgtcaccggcgatatcaggcacatggacaccagcgctggggttcgtggcttccttggtgcgcagcagcttgatgcagcacttacaggaatggaccttgtaatcatacccgctggtgttcctaggaaaccaggaatgacaagggatggattatt

SEQ ID NO: 456400 - DNA, 355 bp, Sorghum bicolor
cgtccgtctgaacagcgtgtggtaccagccggaggagatcttcccgatctccggcacgccggaggagcggcagcacgcgttctgggtgcgccgtcagcaagcgctactacaggctcgccgcgaagctggaggggatggagctgccggcgtgcgtgaacgagacgacgtgcctgccccgtgcgccccgggtgacgcgtgtgcccaggggttgcagcgccaacatctacaccgacaacgccagctaccggcagttcatccgcgctcacttcgggtgcacccccgtggagatggagagcgccgccgtggcgctcgtggcgcaccagcacggcgtccccttcattaccatccgatccct

SEQ ID NO: 456401 - DNA, 500 bp, Sorghum bicolor
cgtccgatgaaagagaaggcaaggaaggactccaaaggcgtggaaaagaaagagaagggctccaaagacatggaaacaaaagagaaggcagggaaggactccaaagacgtggaaacgaaagagaaggcagggaaggattccaaagacgtggaaatgaaagagaaggtagggaaggagtccaaagatgtaaaaatgaaagagaaggcagggaaagaatccaaagatacagaagtgcaagagaagccagtaaaggactcgaaagatgtaaaaatgaaagagaaggcagggaaagagtccaaatacatggaagtgaaagagaaggcagggaaggactcaaaagatgtggaaacgaaagggaaggcaggaaaggagtccaaagatgtggaaatgaaagatgtggaaaagctggatgaccatactttgagcaacaaggtggaatcagacaatgaaactcttagcgtgtgggaaaaacgtacagcaaaagcaacataatcttgctt

SEQ ID NO: 456402 - DNA, 410 bp, Sorghum bicolor
  unsure (1)..(410): unsure at all n locations
cgtccgcctgtcaaaatactgcaagttcaagacagttggtcaggttttcacaaaaagtggatggagatttgccttcccaagagattcccctcttgctgaggacttgtcaacagcaatcctggcactatcagagaatggcaatctccaaaggatccatgatgaatggttaagtgcgacagagtgcagtgcagacaacaatggtgctgcgtcgaactccttgagcctatcaagcttctggggcctcttcctcatctgtggccttgcatgtctcgctgctcttgtaattntcttccttcgcatattctgtcagtacagcagatacagtaaccaggtcgaggctcagtttcctgagccccaacagattctgaacagaccagcaaggttaactaccatcaagtcattgatctctt

SEQ ID NO: 456403 - DNA, 399 bp, Sorghum bicolor
cgtccgcggacgcgtgggtacgccggcatcgggtggtgcatctggaggagcaaggaggacctgccggaggagctcatcttccacatcaactacctcggcgccgaccagcccaccttcaccctcaacttctccaaaggctccagccaggtcattgcacagtactaccagctgatccgccttggctttgagggttacaagaacatcatggagaattgccaggagaacgcgatggttctgaagcaaggtctggagaagacgggcaagttcaacatcgtgtccaaggacaatggcgtgccgctggtggccttctccctcaaggacagcagccggcacaacgaattcgagatctccgacttcctgcgccgcttcggctggatcggccggctacaccatgccccg

SEQ ID NO: 456404 - DNA, 338 bp, Sorghum bicolor
cgtccgagcacgcacagcacacacacacacacacacacgctctcatcctgtgctaggcacccacaacgacatacaatggccaccgtcctgagcagcgtacgcgcgccagcagccttctccgttctccgtgttgcgccagcaccagcgcctcccgccaccgttgcgctgcacggcgaccgtggcccgctgtgacaggctgagaacgcaagccacctacaccgtgaagctggtcacgccggagggggaggtggagctgaaggcgcccaactacatcatcatatctgtacgacagctggtgtggaaggcatggaattatcctactacgaccgcagcgggat

SEQ ID NO: 456405 - DNA, 410 bp, Sorghum bicolor
  unsure (1)..(410): unsure at all n locations
cgtccgcggacgcgtgggtccgcctcgccgcctaccggcgcttcctcaccatggtcgagcccacctggagcgacaacgagtacgcgcccgtggacctgcagtctatctgctactactccgcgcccaaaaccaagcccaagctcaatagcctcgacgaggtcgacccggagctgctcaagaccttcgaccgcctcggcatcccgctcaccgagcagaagcgcctcaccaatgtcgccgtcgatgccgtcatcgattccacctccatcgccaccacccaccgcgaggcgctcatggccaagggcgtcatcttctgctccatctccgaggccatccgcgagtacccggaccttgtcaggcgctacctcngcagcgtcgtacccgcgggcgacaactattatgccgncctcaat

SEQ ID NO: 456406 - DNA, 390 bp, Sorghum bicolor
cgtccgcttttgaagacctcgatgaggtcattgacagatatgtggacccattggtaggacacctgaagagcatgctctcttatcgtaaattcagaaagggtttaaaaaatgaggttgatgagatgttaaggtcagagaaagcagagaaccctatgagaatagcgtatagtattggcatctgtcatgaacatgctggcacctttatattgtcatatattaggagtacatatccacatcacgagtatataggcttatacccgacgggcttcagattcaggatgagagactttgaccacattggccgccttgtgtcctattttcagaagaatatagacagaccaccatccgctgctggaccatcaatgcgaagtgttgctgcactggtaccta

SEQ ID NO: 456407 - DNA, 457 bp, Sorghum bicolor
  unsure (1)..(457): unsure at all n locations
gattccnggtcgactcacgcgtccgattggaaagtatgcaaaataccttgagatgctttctatagcatttgctggagatagtgataagggtatgatggacgtgatgaacggatgtaagaatctgaggaagcttgagattagagacagtccatttggtgatgttgcactcttgggaaatgttgccaagtatgagacaatgcgatccctttggatgtcatcatgtgatgtcacattaaaggggtgccaagtccttgcatcgaagatgccgatgctcaatgtggagatcatgaatgaactagatggaagtagtgaaatggaggagaaccacacagacatctctaaagtggataagttacatgttagtgaaatggaggagaaccacacagacctctctaaaggggataagttatatgtttaccgcacaactgcttgagcgagggatgatgcaccaaatttt

SEQ ID NO: 456408 - DNA, 474 bp, Sorghum bicolor
cgtccggttgttttctgaggtgcgtccggacgcatcctaaccgccggacgtccgggcgctagatgtacccgtggtcttagcagcccaccacctcctccggccttgtttagttccaaaaaaattttgcaaaactttttatattcctcattgcatccaatcttttaatccatgcataaaacgttaaatatatatataaataaaaactaattatatagttcatctgtaatttacgaaacgaatcttttaagcctagttagttcatgattagacaatatttatcaaatataaacaaaaatgttacattgcctattttataaaaaaaggaactaaacaaggccgcttgctgaccaacggggtctcgagcgggatgcatatatagccatgcctctaatcgtgctaaggccagtctcaaatggagtttcacgatgatgtcatgcacatttattatagcgtcatgtagcaaaactgtacttt

SEQ ID NO: 456409 - DNA, 350 bp, Sorghum bicolor
  unsure (1)..(350): unsure at all n locations
cgtccgcgccgagccgctgctcctgctcctcggccaggacgccgacgtcgcgcgcgaggccgccaggttctccatctacatcatcccgtccatctacgccatggccatcaacttcggcgccagcaagttcctccaggcgcagagcaaggtcaccgtgcccgcctacatcggcttcggcgcgctcctcatcaacgtcctcctcaactacctcttcgtctacgtgctcggctggggtcttcccggcgccgccgncgncttacgacgtcgccactgggtcatcgcgctcggccagatggcctacatcataaggtggtgcaaggaccgcttgaaggggtggttcgccgccgtct

SEQ ID NO: 456410 - DNA, 327 bp, Sorghum bicolor
  unsure (1)..(327): unsure at all n locations
cgtccggaggaagctgctggtgctctggctctgctgatgaagcaggctaccatcgtgcatcttgttgggagctctgaaacggtgatcactagccttgttgggttaatgaggcgtggaactccaaagggcaaggagaatgcagtgtcagctttatatgagatatgccggagaggtggatcaacattggtacagcgtgtggcaaggatacctgngttgaacacagtaatacagaacatcacgctcacaggaacaaagcgtgccaagaaagaaggcaagcttgattgtcaagatgtgccagaaaaagccaaatgccatcggctttggcac

SEQ ID NO: 456411 - DNA, 382 bp, Sorghum bicolor
tcgacccacgcgtccgcgttgttggtcatgaagatccagtgcgacgcgtgcgagggcgcgcgcggacacggtggtgtgctggatacactaggacgggctgagcgcgtgctggtacctatagatcctggcgactatcgtgacttggagttgaaacatactggggtattagaagtgatactggtgggagttagggacttaaacaactaggaccttgtagcaaagttcatactcttgtgtagaggtatacatactttcattgcgtgagagaaaccagaacatccaaacacttaacactgatttgaaccacatctggaactagcactatgaatgtgtggttggggacatatcttcacagtacttgactgtaaaaaattatgattac

SEQ ID NO: 456412 - DNA, 245 bp, Sorghum bicolor
cgtccgcacggccatggccatggccatggacacgggggcatcgtggtcgctggcgacaagcccgaggacgaggaggagtccaccaaggtgcagctccgccggaaccgcgttgtcgttcaggtcctggagatgggcatcatcgtgcactcggtggtgatcggtctgggcatgggcgcgtcgcagaacgtgtgcacgatccggccgctggtggcggcgatgtgcttccaccagctcttcgagggcat

SEQ ID NO: 456413 - DNA, 365 bp, Sorghum bicolor
tcgaccacgcgtccgtcttctcagtgcagcagccgtcgttcctgcacgacttcgccgtcacggagcggtacgccatcctcccggagatacaaatcgtcatgcagcccatgggcatggtggcgggcggcgcgcctgttgggtctgacgccggcaaggtgccccggctcggcgtgctccccaagtatgccacggacgagtcggagatgcggtggttcgaggtgccggggttcaacataatgcactcgctgaacgcgtgggaggaggccgacggcgaggagctggtgctggtggcgcccaacgtcctgtccgtggagcacgcgctggagcgcatggagctcgtgcactcgtgcgtcgagaagtgcgca

SEQ ID NO: 456414 - DNA, 392 bp, Sorghum bicolor
cgtccggactagttctagagcgcagagatggttactgatgagggagcaatctatgttacctctaaccgtggctacaactggaaggctgccgtgcaagagactgtttcagctactctgaacagaacagtttcaagtggcattagcggtgcaagttactacactgggactttcaacacggtgaaccgatcgcctgatggacgctatgtagctgtatccagccgaggaaacttctatttgacctgggagcctgggcagccattttggcaaccccacaacaaggcggtggcacggaggattcagaacatggggtggagagcagatggtggactttggctgctggtggcgcggggtgggctcttcctcagcaaaggaaccgggataagttgagattt

SEQ ID NO: 456415 - DNA, 391 bp, Sorghum bicolor
cgtccgtatatattatccatcacaatctagtgatgtgccaagcaattcccgtgttacatttgcattggaccataactaccgatcacatatcgagtatcgttggggaggagaaggtttaaggaagtacttagttaagtgggcttcttcagtagtagaaagaagggggagaacagaaaagcaaatcatctttgaagattcagaacactcttcaacatattgtcttgcatttagagtggttaatccaaatcatttgcctcctttgaaagagctgcaaaagttgatgagaatccagtcactgcgttgtcatgctctgcataaccatggcgccaccaggctatctgtaattccaattcatgcatcgcgatctcaagctctaaggtatttgtctatt

SEQ ID NO: 456416 - DNA, 352 bp, Sorghum bicolor
cgtccgggataagcttgggtatgcagatgttgttgaggaaatctctgttggggagggcaaggttgtgaagatccaaacggttacgagcttgcaagtgagcgttggacgcctgtgcacacagttgaaagcatagttctgagcattatatccatgctctctagtccaaatgacgagtctccagcaaacattgaggcagctaaggaatggagggagaagagggaggacttcaagaaaaaggtgcggcgcattgtgcggaaatcacaggaaatgttctgaagaaaatgggggtactgggaagttaaccatgccatgtcaggctgcaaaaattttgctgccaatctcaaaatgctca

SEQ ID NO: 456417 - DNA, 289 bp, Sorghum bicolor
cgtccggttacctacaaatagaaacaaagtaaagttactactagtataaaatagaatgaaacgccacaaagattgtgtttctcatgatttcttttgaatgaaatggcaggccgagagctcataccatatgagaacccaagccccaccatgggcatccaccgtattgtcttggtgctctaccagcaactggggcggggcacggtgtttgcaccgcaagtgcgtcaaaacttcaacttgcgcaattttgcacgccgtttcaacctctgcaagcctgtggctgcgatgtact

SEQ ID NO: 456418 - DNA, 419 bp, Sorghum bicolor
gtgtcatctcacgcagttgtggcagggttgagcaaaatcaccagcgatcggctgcacagcaaggcggctaaacagcagactgaggactataacaactcttcagggctaaggccaggatcttgttgcgagagcactgccgcgagaggagacataccatacggcgctatggaggtcaaaaatgtccacaacgtggcttgaaagaacaccacgaggtggccatgaccacgacttttacatggaaaccccacacgaccatatgacttactggcccgagatatttcaacaaaaccaagccttatgaggacccctcgcctgccttttttttgttcagcttttcttcaaaatgatcaacagaaggtcagcaacattggcaggcagcttcttaattaccacattgtaggactttctgatgttaaaca

SEQ ID NO: 456419 - DNA, 392 bp, Sorghum bicolor
cgtccgcagacgcgctgcacaactaaggactgcctcaaaactggaccattcagtggtacatacataatgacgagcgtgaactagttcatgcttacgatcggtggcccagtggcatactccattactgccaggatattatactggcctattaaactggcctatcaccaactttttacacgggcttggggataagataagtctgtgctggcaccagacatcactatcacgtctgtaggcaccgcaattacatatagggaggcaattgttcctgatgatggctgtgaagaatatccgcacaataagtgggacagaaatattgtcgtagaagaaactgtgggctattctgagctgcagcttcagccagagacagaacagcgcccgcacaaggtcag

SEQ ID NO: 456420 - DNA, 422 bp, Sorghum bicolor
cgtccggatgaacatcggcagcaggccagccaagaggaagccgggcggcggcatcccctggatcttctcgtggacacagacgaggttccacctccccgtgtggctgggagtcggcgccgccttcaagtgggccatcgacaaggacatcaagaacttccagaagctcaaggagatgtacaacgagtggccattcttcagggtcaccctggacctgctggagatggttttcgccaagggagaccctggcattgccggcttgtacgacgagctgcttgtcgccgaggaactcaagccctttgggaagcagctcagggacaaatacgtggagacacagcagcttctcctacagatcgctgggcacaaggacattcttgaaggcgatccttacctgaagcaggggctgcgtctgcgcaatccctaca

SEQ ID NO: 456421 - DNA, 469 bp, Sorghum bicolor
cgtccgacctgagagaagaggcctattgagtgcgtgtgccgagctggggaggtggttttcgtgcctaatggatggtggcatttggtgatcaatcttgaagagtcaattgccattacccagaattatgtgagcaggaggaatttgttgaatgttcttgatttcctcaagaagcccaacgcaagtgagcttgtctccgggactacggacagagtgaatctgcacgacaagttccgtggtgccatcgaggctgcccaccctggcatgatcaagcagcttgagcttgaggctcagcagaaggccgctgctcgtaagaagaaagcgtcattctgggattcggctgccgatgccaagagtggaggattcaagttcttcttctgagtttcacaacggcaaggtctctgatcttcatgtttgagtggatctggtttttttggtaacagtttaacaattttgttttcccattttttct

SEQ ID NO: 456422 - DNA, 475 bp, Sorghum bicolor
gcgtccggccgctgttccatgtgtaaggcggtctcacgaggtgccataaccgggagggcggtatgcggttcgcgactcgggagtacatcgagcggcgtcgtctcccgtcgtcagtgagagtggcggtctctccagcgggatctcaatcccgataactaacagctgctcaataacaaggcggactccccgctcaaggccacggacttctgcctctccgtcttcttcaagcacggggagatgtttaaggatcttgtgggaagtgcgtattatgttgctcctgaggtactgaaaccgcactatggcgcataggctgacatatggagtgctggggttattctttacatccttctgtctggtgttgctccttattgggcagagaattaggatggcgtatttgatgccgctttgcgttgtcacattgacttcacttctgatccttggccttgaaatattaatgtgcaaaggaatttgttaa

SEQ ID NO: 456423 - DNA, 436 bp, Sorghum bicolor
cgtccgcttagaaccatatcggatccatcatgcgtcacgccttgttgctattcttgaggcctatgcaatctatgaccaacagattggatattgccagggaatgagtgacctgcttgcacctctccttgctgttctagaggaagatgacgaagccttctggtgctttgctggttttatgaggaaagcccgccacaattttaggcttgatgaagtgggtatacgccggcaactcaatatggtagctaggataatcaaatacaaggacttccatctctacagacatttggagatgctccaagccgaagactggctttttgtttacaagaatggtagttgtgatgttccggagggagctcaccttcgagcagaccctatgttctcttggaggggatgtgggctgatcaagcagcaaaccgtgctgggaatgcaaaatctt

SEQ ID NO: 456424 - DNA, 375 bp, Sorghum bicolor
cgtccggtgtggtgcttttgatctgtctaaagatgatgggacacaaactagcaaaatacttactactgatgatgcattaatggggttagattatgatcctgggaatggattaagagctactaatggagaaaatgactatgaatcgggtctgctggaatttgatcctgttaatcatcacaatagttactgcccatgggtgaacagaaatgttgtactggcttgctgtaacaacattggctccagctcaagtagttcagcgccctctggttggcagttaacaatagatgcagttgacacgtaccaatcacttggtcaagctcaaaatcaaataatgcaatctgattctgcagcttcattatataatgatgatcaaat

SEQ ID NO: 456425 - DNA, 361 bp, Sorghum bicolor
cgactcacgcgtccgatcaagatagtaacactcattttggtgatccagggtgtgtgtggctgtgagcgcttttcaagcagctcaataggtgatgtgttcagaacaatcataaagcgagatgggtattccgggctcatgaggggatggaagccaagaatgctgttccatgcacctgcagctgcgatatgttggtccacatacgaggcctcgaagtcatttttcgaaaggttcaatgaagaaaggcggaaatagtctgggcatttctctaagccccatgtacttttcctgaagtcaatgtacttctacacagaagaagaagcatacttgctcagctgacagaaagacgtaacttcaggatgca

SEQ ID NO: 456426 - DNA, 313 bp, Sorghum bicolor
cgtactgaccggtgctgctgggagttgcggcttcagcttcagctgctgctgcgagcctgctacctccacgaggcattcaccaaatgccatacgctgatgggcttatcaacaggcccgaggtcaaaagccactcactggaagcaaactgttctttacctcgaggatgtaataactatctgccagggggaaaccctgacgggtagcatgacagtcacacccaataagaacaaccctcgagatatcgacattaagctcaagtactccatagatgggcataggtgtcaagtatcaagaactcaattctacaagatgc

SEQ ID NO: 456427 - DNA, 326 bp, Sorghum bicolor
cgtccgctgttgctctcgatcttgctatagaaaacgacacgaaaggttctatgtgaacggctcttgcacatgggtaagccgatcctaagggacagcgtaaccccagcagacagggcgatctctcgtgttgacccaaagggaatatgactgagagttcacgtgccaccacgaggttgtggacttgaaaattaggaatgtactggacatctatctaccgtctctcaggagtctgttaactttctcaactgctaggcaacacaggcctcaagataggcctatggacctaaccttggtagcaagagcacctctctggtttcttggttctt

SEQ ID NO: 456428 - DNA, 530 bp, Sorghum bicolor
  unsure (1)..(530): unsure at all n locations
cgtccgcagccataatggagtacttaagattgtgggacatcctgtccacaataaccttaggagaaggcgaagacaaactcatttggcgttggacagctgatggggcttactcttccaagtcagcctaccgtgcgctttttatggctgctacaccggtctacggctgccacctggtctgggaaacctgggcaccgctgcgggtcaaaatattcctatggctcgccatcaggaaacgccactggacggcggatagaagacgctgacacgggcttgaggcagcagaccgctgctacctttgtgaccaggagccagaaaccattgaccatatcatcgcctcctgttcgctctcgagacaaatctggtggaacgtcttgactatacttggtgccaacgtgtcacagatcgnagatgatagcctcctggattagtgggagcgctggaggcacaggtggcacggagaaaagcgtaaaggagccgacacgctgttcgccctggtggcattggagttatggaagagcgcaatgcacgct

SEQ ID NO: 456429 - DNA, 457 bp, Sorghum bicolor
cgtccggagggagctaccggttatttgcgacgacggcatatcttcgtcgtcgtcttggcggcgggacaccatgggcgcctattatcgccgcccctcgccgctccagcggcaactactccccacggcggtgctggtgctgctcgccatcgccgccagcagcagtggcttctcgagtgcggcggcggcggcgggccggaacgtgatcacgcacatcaagggattcgaaggcccgctgcccttccacctcgagacagggtacgtggaggtggacgaggagcacggcgcccggctcttctactacttcatcgagtcggagaggaatccggcggaggatccgcacatcctctggatcaccggcggccccggatgctccgcactctctggactcctctaagagatcggccccctcaagttcgatgtggccgggtacacagaaggggtcccgcggctggtctac

SEQ ID NO: 456430 - DNA, 432 bp, Sorghum bicolor
cgtccgctttggacagcacttcctcgtcgtcggcgacgaagcggcgctcggactttgggatccggctaaggcgaccgccttagaatggtcagaaggccacgtctggacggcgacgacggatttgccggcgaacaggtcgatcgagttcaagtttctgctgcgagatgcctcggggcatgtccgttggcagcatggcactaacagaactctgcaaattactgaaaccccaaacaccatggttgtccacgaagactgggatcacggcaacaaacagaaagtatcagaggaggaagagctctccatcggggcagaagatgtggaattttcagaggttcttgaaggaacaaatggcgcaatgccggtagataacaatccccaaaagcatgagaatctggagaccgacaggtccgctgtggtggttgcagatgctcc

SEQ ID NO: 456431 - DNA, 464 bp, Sorghum bicolor
cgtccggctcgcgccacgggagtccccgcacgcggacgccgggcacattcgcgaaacccatcgcatcggccatccccgcggctgcctcctcctcgatcgatccgggagagatttctcttgcctgctcgtctctctcgcacccgccggccggccggtgctcttcccggcccacttcgtttcgatcgaccatggcggcttccgtccccaacggtagtcccactgtcagctctctcgcgacgactgttcccgtccaggcggttctgttcgacatcgacgggacgctgtgcgactcggatcccctccaccatctcgctttccaagagttgcttctcgagatcgggtacaacaacggtgtgccgatagacgatgagttcttcatcaagaatatcgctgggaggagggacgtcgaagctgcccagaacctgttcccggattggccccttgagaaggggctcacattcctg

SEQ ID NO: 456432 - DNA, 389 bp, Sorghum bicolor
tcccggtcgaccacgcgtccgtgcgtgtgcagacggcggacacaggaacacgaacatcgcgatccggtatctacatggctctggccgctgcttaacgagtgcatgagggatcctcaagtcgcggcagactgcttcacgtacgaaggctacgccatcagaggctggctggacggtgtgaaccacgcgtcctccgtgaccgggcagccgctcgcgcaccgggagctggcacccaatctcgcgcttgctgccgtgatccacgattacacggtgatgatgatgaagaagcggcggcagtaccgattcggcgattcgcatgacaacaccgttgctgcacttaagattctttctctactggggcagagagcgggagctgcgcttgcataaaatgg

SEQ ID NO: 456433 - DNA, 276 bp, Sorghum bicolor
taccgtccgggatcccggtcgacccacgcgtccgggttcgcgcacgacaggagggcacctccgtgctcttcaggtgctctccgccttcgccttccgggacatctcgctcaccaagatcgagagcaggccgcaccgacaccggctcatccgcctcgtggacgacgccaacgtcggcaccgacaagcacttcgagtacatgttgtacgtagagtcgcaggcgtccatcgcggagccccgcgcgcagaacgcgctggacgacgaccacgagtacacgtt

SEQ ID NO: 456434 - DNA, 519 bp, Sorghum bicolor
cgtccgatttggcccgtatgttaggatgctagtaattcggatgcagtatcacttttttttatgatgaattttggatgcctttacttttgctggtttcttatcatttggtttcccatacttattcattgtgttcttttggagttaaggtatatgtgaagcagttgcaggagatttcctggatgctcatagtttgcagctgctcaacccttacatgccaaacttaagtgcatcatggttgttccaacgagcgatgtcagtaaggccacatgtcaatgtttcaccaacctttatcaatgagcttctctttgctaattttcagtcaatgcagaaactaggggattcagtacttcagccatttctccaggatgtaatacagtttggacctcttgtaaaaactttggggctagtaatgctcactcgaccacaaattttgcctttcatatttaagcaggttggactgggagtcatccttgactggtcaggccattttatgatgcttggttactacacattcctttc

SEQ ID NO: 456435 - DNA, 460 bp, Sorghum bicolor
cgtccgcccacgcgtacgcgctttcttcgtgagctttcacatcagacacaagctgctgcagctgtagcttcatccatagctgaggaatcctttggtgccatccgtacagtaagatcctttgctcacgaatctcatgagatttcacgctatggtggaaaagttgaggagacacttaaacttggtctcaaacaagctaaagttgttggcttgttttctggagggcttaatgcagcgtcaaccttgtcagtggttattgttgttatttatggagccaacttaaccatcaatggctacatgacaactggttctcttacatcattcatcttatacagccttacaagtggttcgtcagtatctgccttgtcaggactatacacaactgtaatgaaagcctctggtgcaagccgtagagtttttcaacttctggaccgtgtttcctcaatgacaaaactctgggaca

SEQ ID NO: 456436 - DNA, 396 bp, Sorghum bicolor
cccggtcgacccacgcgtccgcacacgttcgataggactgtagtcggaccctcaaccgaggactggagaggtagctggaccgttatccataacatcattcccactggcactgttgctggcaaggctattcctaaggtccatgctgatttcactggcatgctctctcggatgtcctcccgggatgcgaccgctgatgagtcaactgtcgacattactgggagagtctactacggggcctcctacaacgatatcaaggatgctcttaatggcgcttctgaggggccactgctcgacctcatgggctacttggaggacgaggtcttttccactgacttattgatacaccgcttacagtagcatcttctgtctctgcccttgcaggaccttacgcaactt

SEQ ID NO: 456437 - DNA, 316 bp, Sorghum bicolor
  unsure (1)..(316): unsure at all n locations
cgtccgcggacgcgtgggcagcctccggccacggggctcacggcggcgagcggccccagctccgatggcgccaacggttgagatcagccacctggggttcacctacccgggcatcgacggccgcccgccacccggcgcgccgccgctcatcgaggacgtctgcttctccctcgacgccggccaacgatgcctcctactcggctccaacggcgcaggcaagacgacgatactgaagatactaggcgggaagcacatggtggatccgagcatggtgcgggtcctgggaaggtgcgccttncacgacacgggactcacc

SEQ ID NO: 456438 - DNA, 383 bp, Sorghum bicolor
gatcccggtcgaccacgcgtccggagaaatttgaagttgtagctgtatccttggacagtgaagagtcagcatttaatgagagttttgcaaagatgccttggcttgcaattcctcaaggtgaccagaagtgtgagaagctggttcgttactttgagcttaggtctcttcctacactagttctgattggccctgatgggaagacactgaacagcaatgttgcggacataattgatgagcatggttttgaggcatgggagggcttcccattcagtgctgagaagctggaaattcttgctggtgtcgatgaagcgaaacaagacttcatagaagtggttgagttcttgaagaaaccccataggttcactgctgttggtgctcgcatt

SEQ ID NO: 456439 - DNA, 509 bp, Sorghum bicolor
  unsure (1)..(509): unsure at all n locations
cgtccgctcagattgatgaatacctaaagagaccagaaggttccctctttttaaccgatctaaagcagaagttgttattaacacaaaatgaagcaaacattgctgggactcgttacaatgtccctctagttaattcacttgtcctttacgttggcatgcaggctgtgcaacagttgcagcaaaacaaggtgaatgcatcagcaccagcacaaattaaccaaagtcaaatggatatattccaaattgaaacagctactgagatgttcagaaaccttgtaatgactatggacacagaaggtcgctaccttattctcaatgcgattgctaaccagcttcgctatccaaatagccatacccactacttttccttcatcattctgtacttgtttgctgaggcaacacaggaaattgtccaagagcagataacaagggttcttctggaaaggttaattgtcaatcggccgcattcttggggattactcattacttttatngagcttataaagaac

SEQ ID NO: 456440 - DNA, 203 bp, Sorghum bicolor
cgtccgggccgcggtggcaccgtcggcaggggcggtggccagacgcaccttaacatcctgtcccatccttcgtacaccatcaacgcgtccatgcgcgttacactacatgaataggtcattatgttaatgtacgacgtggagaacattagctaacagtctatgtagcgaataacagtcaccacgctaagacacgctgtggactc

SEQ ID NO: 456441 - DNA, 544 bp, Sorghum bicolor
cgtccggcggactgtctctatatggactagcacactccagagaacaatattaacagcacatccgatcattggttttccaaagatacaatggcgtgctcttgacgagataaatgctggggtatgtgatgggatgacatacgatgaaataaagaaaagtaaacctgaagaatatgaatcacgaagaaaagacaagctgaggtatcgttatccaagaggagaatcctaccttgacgtcattcaaagattagaacctgtaataattgagcttgaacggcagcgtgctccagttgtagtcatagctcaccaggctgtgttaagagcactttatgcatattttgcggacaaaccactcgaggaagtcccaaatattgagatacctctgcatacaataattgagatacaaatgggtgttgctggtgttcaagaaaaacggtacaaactcatggacgcaattcatcccacagcggggttgtaagaaacaatgccttctaaaagcaatggcggcacaaataaaatttgtgatgatatacgcatcacaacattc

SEQ ID NO: 456442 - DNA, 346 bp, Sorghum bicolor
aatgccttgttcttccaggcctatgcgtattggtcctgcagcaagtaggaaaaatacaggaggtgttgttcaagagagagtaccaaattctcaaggagctcagtctgagaatgatcctaacaataccaccatatttgttggtggtcttgaccccaatgtcactgaagataccctaaaacaagttttttctccttatggcgaagtcgtccatgttaagatacctgttgggaagagatgtggttttgttcagttcgttaccagaccttctgctgagcaagcgctgctaatgctgcaaggggccttgattggtgcacagaatgttcggctttcatggggtagaaacctg

SEQ ID NO: 456443 - DNA, 474 bp, Sorghum bicolor
  unsure (1)..(474): unsure at all n locations
ncgtccggtcacagtatatactaaacatggatgaagaagttggatcatctgattcagcctatgagaacataaagaagagggtgatggatgctgcaagatctgtattccgtccagagttcatgaatcgtgtagatgagtatattgttttcaagcctctcgagagagaacagatcaacagcattgtcaaattacagcttgcaagagtacagaagaggatcgcagaccgcaaaatcaagctcgaagtctcacctggcgccattgaattcttgggaagcctggggtatgacccgaactatggtgcgaggccggtgaagagagtgattcaacagtacgtggagaacgaactcgcaaagggcatccttagaggtgatttcaaggacgaggacagcatctttgtggacacccaggttacggtgccctccaatggtcagcttccgcagcaaaagctagtttttccgaaagtgggtgagcaat

SEQ ID NO: 456444 - DNA, 382 bp, Sorghum bicolor
cgtccgatgagatttacaaggaaattcggagacgtggtctacatgtagctgttgctggtattcccaagactattgataatgatatagcggttatagacaagtcatttggttttgatactgctgtagaagaagcccagcgtgccatcaatgcagctcatgtggaagcttcaagtgctgaaaatgggatagggttagtgaagcttatgggtcgctatagtgggtttattgccatgtatgctactcttgcaagcagagatgtggactgctgcttgattcctgagtcacccttttatttggaaggggagggtggactatttgagtatatagataggaggttgaaggtgaacaaccacattggtttttgttgtggcggtaggagctt

SEQ ID NO: 456445 - DNA, 137 bp, Sorghum bicolor
cgtccgcaatatctcatgtgacagcctgaaagatctgtacaagtcctttgtgtctgagtaccctattgtgtctatcgaagatccattcgaggaggatgactggaccacttatgccatactcactgatgagattggac

SEQ ID NO: 456446 - DNA, 478 bp, Sorghum bicolor
cgtccgggaggcgattaggattagctgtgccggatatccgaccagaagaacattctacgagttcatagaccgttttggtattcttgcgcctgatgttttgagtggaagttctgatgaggtcagtgctgtaaggaggttgttagacaaggtagatcttcaaggttatcagattggcaagacaaaagtattccttcgtgctggtcagatggctgaacttgatgctcgtagaaatgaagtgttagggcgttcagctagcatgattcagaggaaagtacgttcattcttggcacagaagagtttcattgcattgtgacgagcagctttacaaattcatacagtttgtcgcggtgagcttgcaagaagagtttatcacatacctcgcagagaagctgcttcactcaatatccagactttgtaccgtatgtatactggcagaaaagcatacaactagctttctgcttcagcaagttccattcaa

SEQ ID NO: 456447 - DNA, 589 bp, Sorghum bicolor
  unsure (1)..(589): unsure at all n locations
cgtccgcactcccaggactttctgaatggtgtgtgcactaacatcatccatatgcagaataagaagctcaagttatatactgggaactatgacgagtacgttcagacccgttctgagcttgaagagaatcagatgaagcagttcaagtgggagcaggagcagattgcatcaatgaaggagtacattgcacggtttggccatggatctgcaaagcttgcacgtcaggcccagagcaaggagaaaactcttgcaaagatggagcgtggtgggctcactgagaaggttgttagggataaaatactggtcttccgcttcacaaatgttggcaaacttccaccaccagtgcttcagtttgttgaggtcacgtttgggtacacaccggataatctcttgtacaagaagctcgactntggtgttgacctggactctaggattgcactggttggtcccaatggggcagggaagagcactcttctgaagctgatgacaggtgagctggctccattggacggtatggtgaggcggcacaatcacctgcgcatcgcacagttccatcagcacctggcagagaagctggacctggacatct

SEQ ID NO: 456448 - DNA, 572 bp, Sorghum bicolor
cgtccggcgaggggtaccctggcgcaagatactacggtggaaatgaatttattgatatggctgaatccttgtgtcagaaacgtgctttggaggctttccgtttggacccagcgaagtggggagtgaatgtgcaacctctatccggttcgcctgccaatttccaagtatacactgcgctcttgaagccacatgaaaggataatggctttggatcttcctcacggtggacatctttctcatggttaccagactgacactaagaagatatctgcaacctcgatattctttgagacaatgccttacagattggatgaaagcactggattgattgattatgatcagttggagaaaagcgctattcttttcaggccaaagttgatagttgctggtgctagtgcatatgctcggctatacgattatgaccgtatgcggaagatatgcaacatgcagaaggcagtacttctagcagacatggcacatatcagtgggcttgttgcagctggtgttattccatctccttttgatatgcagatgtagtgactaccactactcacaaatcactccgtgggccac

SEQ ID NO: 456449 - DNA, 581 bp, Sorghum bicolor
  unsure (1)..(581): unsure at all n locations
cgtccgcccacgcgtccgcccgagtccgattttctcctcaggactatcccgttccttgtgcacaacccggagattgcccttgtccaaactcgctggaaattcgttaattccgatgagtgtctgctgacaagattccaagaaatgtcgttagactaccatttcaagtacgagcaagaggcagggtcctcggtgtattcattctttggcttcaatgggacagctggtgtctggaggatttcagcgatcgatgatgccgggggctggaaggaccggacgacagtggaagatatggacctggctgtccgtgcgatgctgcagggatggaaattcgtttacgtcggtgacataaaagtcaagagtgaattgccaagcacattcaaggcataccggtttcagcagcacaggtggtcatgtggaccggcaaacttgttcaagaaaatgatggtagagantttagaaaacaagaaagtgtcactgtggagtaaaatccacttatggtacgatttctttcttcgttgggaaggttgctgctcatacggtgacattcatcttctactgctttgcgatccctgtgttgtttt

SEQ ID NO: 456450 - DNA, 496 bp, Sorghum bicolor
cgtccgagcatctcccgtcctcgtcctcgctcctgactcgccatgggcaagattaagatcggaatcaacggtttcggaaggatcggcaggctcgtggccagggtcgccctccagagcgaggatgtcgagctcgtcgccgtcaacgaccccttcatcaccacggattacatgacctacatgttcaagtatgacaccgtgcacggccactggaagcacagtgaaatcaccctcaaggactccaagacccttctcttcggtgagaagccagtcaccgtctttggcatcaggaaccctgaggagatcccgtggggtgaggctggtgctgactatgtcgtggagtccactggtgtcttcactgacaaggacatggctgctgcacatctgaagggcggagccaagaaggttgttatctttgtcccaagcaatgatgcactcatgtctgttgaaggtgtcattggtgtcaagttcattctatacattatctttgttattaatg

SEQ ID NO: 456451 - DNA, 509 bp, Sorghum bicolor
tttttgacaattcacatcaagcacggtaaaacttattgaagccgacatacgcggcttattctgtctcggtcccaaatatttcgttgctcagtgaatgatgacgatcagaatttggcatcggtttatttgctagccacagaaaaattaagcaaacgggttgctaaatgctactgctatagattggcaggaagacatgcccgtgactcctgctgcttgatgctgtctgcaacgtgcgcgataacaccagcaccagcattgtgaagccactcgttctttacatgtatgttgttgtgagcagagtaaggccagaatgatgaatggaagttgacgtccaccttcttccaaccaaccttctgcaagccatggatcatctcctcctccatcatttggtggtatccttcggtattttccctggttggcgttcgctgtgcagcttctttagctctggcagccttggaaggaaaatgagggccctctgatgatacgggtgaacagtattcaacattcac

SEQ ID NO: 456452 - DNA, 151 bp, Sorghum bicolor
cgtccgaggtgtgttcgtcgccgagggcgacatcaacgacggtcgcctactctccaagctcttcgacgtcgagcccttcacccacgtgctccacgttgaggtgcaggccggcgtgcgctacaccatggagaacctggagtcgtacgtgcac

SEQ ID NO: 456453 - DNA, 212 bp, Sorghum bicolor
cgtccgggaccaccgggccagtatcagagcggctctcgacgtctgcacacatggttaaggcctgccccaccgtgagtgaggactacctctaggcggacgacaaggccaagcgcaagctcctcggactcaactcttagacgaactgccccactgtcatgcttcggctggcatggcactcagcagacaccttcaatgtggccactaagaccgga

SEQ ID NO: 456454 - DNA, 283 bp, Sorghum bicolor
cgtccgcggacgcgtgggcgccgatccgcatcgcccgttgttggaaggaacgatggcggagcagaccttcatcatgatcaagcccgacggcgtccagcggtgcctgatcggtgacatcatcagtcggttcgagaagaaagggttctatctcaaggggatgaagtttatgaatgtggagaggttcttcgcccagcagcactatgctgacctttttgacaagcccttctttcctgggttggtggagttcatcatttctggccctgttgttgcatatgtgtgggag

SEQ ID NO: 456455 - DNA, 417 bp, Sorghum bicolor
cgtccgaacgagacagcaagggggagcagggagccagggtacccagaaacatagaagatggcggcgaggcgcgacaccgagttggacggcgaagagctcggcggcgagggctccaaccccgtcggtggtggcgcgactccaccgcccctaggcgcagcccctgtcgtatgcgtcctccgctccgctggggacttcgctggcggcgccttcattggatccgtcttcggatatggacaaggcttgctcactaagaagggttttaagggctcattcagcaatgcaaggtcctctgccaagacttttgcagttctctctggagttcagagtttggtcgtgtgcttgttgcgatagctacgtgggaaagatgacattgtcaatgctggtttagctggttgtcgtactggtgttagcttgagc

SEQ ID NO: 456456 - DNA, 428 bp, Sorghum bicolor
cgtccgcccacgcgtccgcccacgcgtccgcccacgcgtccgcccacgcgtccgcccacgcgtccgcccacgcgttcgcccacgcgtccgcccacgcgtccgtccacgcgtccggtcggagatcgagccggacctggaggaggacgccatcgacgtgtatcgcaccaacggcatcgccccggaggacttcgtgtcttctgcagatctatgatatcttccagcttcttccatcgaagattcaagttggggtggtctcagctaccatgcccccagaggccctagagatcacccgcaagtttatgaacaagcctgtgaggattcttgttaagagagatgagcttaccactgagggtgtcaagcaattctttggcaatgtggttaaggaagactggaagctcgacacattatgtgacctgtttgataccctg

SEQ ID NO: 456457 - DNA, 447 bp, Sorghum bicolor
cgtccgctcgcgaggtctcgtacccatcgccacgccacgcgccgggcaccgaccgactcctggaatctttcgagcccgcgcgccatccgatcccctgaaatcgatcggtccgaccctagccccgcccgtcgccggtcaacgcccgcccaccttggctcgatcaggcggcccccgggggggagcgagcgaggcctccatcgcggcggaccccgatgccccgcctcccggtcactccggcggcggcggacgcatgagccagcggggactcgcccgagctgtcagccatggacgccaccgcgcgcccggtcatcgtcatcgacaacggcacaaggtttagcaaacttggattttctgggaactcggagcgcgctttcaccctccctactgtcgtagctgcgaatgaatcttttctagaccagacagagctgttgagtagtgcgaactgga

SEQ ID NO: 456458 - DNA, 474 bp, Sorghum bicolor
cgtccggtgcccctccgaattctaagatccaaaggtctcttggataagatcccattcacaactgttatcacggatctcagcacctgtcacccaacatggttccataagcttgtcactagatgttactgtccatcaactgaggtggaaaagagagcactaaaagctggtctgaagccctcacagattaaagtctatggcctcccggttcgaccctcttttgtcaaacctattcggccgaaggatgaactgcgaagagacttaggcatggatgaagatctgcctgctgttttattaatgggtgggggtgaagggatgggtcctattgaggccactgctaaagcgcttggtgattctctgtatgatgaaaacctacgggaacccactggtcaaatacttgtaatttgtgggcgtaataagaagctggtcaatcgattgcagtcgataagttggaaagttccagttcacgtgaaaggc

SEQ ID NO: 456459 - DNA, 347 bp, Sorghum bicolor
cgtccggtccgtccgtccatccgccatggcgaccgccacgctgctgagctcctccttcgccatgcccgccgccgccgccgcccggagggccaccttctcctcttcctccgccacctccttgggcttcgccacgtcgcagctcgccggcctctccctcttcgccggcgccgcaactccaaccgtcgtcgcccttcttcccaagaggctgcagctccagcccattgttgtgcggcgggtgtgcccgatctcggacaagaatactaaccgggccaacatggtgtccttactcaaccacaagaccaagaagcagctgttcttgaacctgtcttacaagaagctgtggtggg

SEQ ID NO: 456460 - DNA, 377 bp, Sorghum bicolor
cgtccgcggagtggagccccgcggcgatcaagtcggcgctcatgaccacggcgtacaacctggacaactcaggggagaccatcaaggacctcgcgacgggcgtggagtcgacgccgttcgtccgtggcgccggccacgtcgaccccaacgccgccctcgacccggggctggtgtacgacgccggcatcgacgactacgttgccttcctctgcacgctcgggtactctccgtcgttgatctccatcttcacacaagacggctcggtcgccaactgctcgaggaaattcgctcgctccggcgacctcaactaccctgccttcgccgccgtcttcttcttctaccaagactcggtcacctaccaccgggtggtgcgcaac

SEQ ID NO: 456461 - DNA, 335 bp, Sorghum bicolor
cgtccggcgccaccgcgtcgagaccctcaacgccgccttcggctacgccgtccgctccaccggctacggctccaggtaccagggcgtgtacccggtcaagtgcaaccaggacaggtacgtcgtcgaggacattgtcgagttcggcgcgccctttgggttcggcctcgaggctggctccaagcccgagttgctgctcgccatgagctgcctcgccgcgcgcggcaacccggacgctctgctcatctgcaacggctacaaggacgacggctacgtctcgctcgcgctcatggcacgctccatgggcctcaacaccgtcatcgtgctcgagcaggagg

SEQ ID NO: 456462 - DNA, 206 bp, Sorghum bicolor
cgtccggacggtgagccgtcgggcccgttcgccgtgttcaagggcatgaagaacctgcccccgggaatgccgcaggtgctcatcgtcaccggcctcacctggctctcgtggttccccttcatcctcttcgacaccgactggatgggccgcgagatgtaccacggcaagcctgacgggagccccacggaggtggccaactaccagga

SEQ ID NO: 456463 - DNA, 244 bp, Sorghum bicolor
cgtccgctgatcgccggtgaggacttccagcatatcctgcgtctgctgaacactaacgtggatgggaagcagaagatcatgttcgccatgacgctccatcaagggtgtggggcgccgcttctccaacatcgtttgcaagaaggccgtcatcgacatgaacaagagggccggcgagctgactcctgaaagctggagcggctgataccgtctggccaactcagcagtaggtccggctggtctaaca

SEQ ID NO: 456464 - DNA, 413 bp, Sorghum bicolor
cgtccgtggcatcctcactcctcttgaaactttccaaggtgtgatctcacttctcagctgcgcgtgacctgtatggaattatccttttttttgttcatctatttctgtaccttggacgacacacaggatttgttgctatcggatgtgaagttgctttctccaccgcggctgcatcgacaattcatactgctctcgctcctttgaccaaccctcctggtgcactgccaccttacataaatatctacgtggagtacatccacaaagcaattcatggaagcgacaccggtgcctacgattccaaaggaaggtttgttcaggcaaaatttgacgaaatatttaagaagcatgctcatatcagaaaagacgccttgtcgctcttggaggtagaagagatgctcacaggcaacccggac

SEQ ID NO: 456465 - DNA, 299 bp, Sorghum bicolor
gcgtccggcaggtggcggagctgagggccgtcacccaagcccaggatccttcctgcaaggaggaggacgactacactctgcgtcggttcctccgcgcgcgggaccacaacatcggcaaggcgtcggcgatgcttctcaagtacctcaagtggaagccgacggcgaagccccacggcggcgagatcccggcgtcggaggtggcgcgggaggtggctcatgcgaagctttgcctgcatgggttcgacagggaagggcggcccctgatctacgggttttgctcgcggtaccacttggtgcgg

SEQ ID NO: 456466 - DNA, 199 bp, Sorghum bicolor
cgtccggcgccacatgatcacccttgtcgggcactgcatcgccagctcctaccagcgcctgcttgtctacgagttcgagcccaacaataccctcgagtcccacctccaccggaagggcgtgccgctgatcgaatggtcaaggaggctcgccatcgccctctgctgcgcaagggcctggcttacctgcacgaagatatat

SEQ ID NO: 456467 - DNA, 374 bp, Sorghum bicolor
tcgtgcgagttgaggcggctgttgagcaattcaatggctatgtacttgatggaagaagtttgagggtgaattctgggccaccaccacccagggatccatcctcacaaagaggacccaggggtgatgccaacagggtctacgtgggcaacctttcctggggtgttgacaattcagctctcgcaaacctgttcagtgagcaaggtgaggtcctggaagcgaggattgtatatgacagggagagtggaaggtcaaggggttttggtttcgtcacgtatggttccgctgaagaggttgagaatgcgatatcgaaccttgatggctccgacttggatggcagacagatccgtgtcacggtagcagagtcgaagccacct

SEQ ID NO: 456468 - DNA, 320 bp, Sorghum bicolor
cgtccgatcaacacggcccgatgttcagattttccaagacctatgcctgacaattcaatctggaaagactgttgcacttgttggagagagtggtagtggcaaatcaacagcgatagcgttgctgcagagattctacgatcctaacgcaggccatatactcctcgatggagtggacatacagaagttccagctgaggtggctaaggcaacagatggggctggtgagtcaagaaccatccctgttcaacgacacgatacgcgcaaacattgcctacggaaaggacgggcaagcaacagaattagatatcgtggctgccgcac

SEQ ID NO: 456469 - DNA, 248 bp, Sorghum bicolor
cgtccgcaggaaggaaaagccttctgataacaagcttttctggaatgggtgcttcaatgctactcttagcattgtccttcacctggaaagctctggcaccttattctggtactcttgctgttgttggcactgttctgtatgtgctgtcttttgctctagactggtcctgttcctgcctacttttctgaaatattgcttagataagccaagtgtgatatttagctgcctgtaaactttatgcgctctgg

SEQ ID NO: 456470 - DNA, 269 bp, Sorghum bicolor
tgtcgggtttaagcaaccaaccagaccaagccatgggattgccggtgatgaggagggagagggacgcggacgcggagctgaacctgcctgcggcgttccggttccaccccacagacgacgagctggtggagcactacctgtgcctgaaagcggcggagcagcgcctaccggtgcccatcatcgcggaggtggacctatacaagttcgacccctgggacctgccggagcgcgcgctggtcggggtcagggagtggtacttcttcacgccc

SEQ ID NO: 456471 - DNA, 408 bp, Sorghum bicolor
cgtccgcaggaaacaaagcaagcaagcaagcatcgcacgaacgatccatccattcatcgcctctctctgtctctctttcagcaacaagaaagtctcgtaggtagagatcagagcaagcacaagcagaagcagggcaatcaatcatggcgtctgcggacgtgcacatggccggcggcggcgcggagacggagaccttcgcgttccaggccgagatcaaccagctgctctccctcatcatcaacactttctactccaacaaggagatcttcctcagggagctcatctccaacgcatcagatgcgcttgacaagatccggttcgagagcctgacggacaagtcgaagctggacgcgcagccggagctctttatccggctgggcccagacaaggcaaccaagacgctgtgca

SEQ ID NO: 456472 - DNA, 280 bp, Sorghum bicolor
cgtccgcccacgcgtgcgcatagttggtgggattactgcaacaactctcactcttagtcaagttggacggaatgcacaacacttgatctcctccattatctgtgcgggcttaacagtcggagtagtagccttggtgaaagccaatggaaaacagttttgctctaggccccgtctgtgtggtctaatctaattcttggtcttttttttttctccttccctttcatattgccctttgttagaaattaaaggtgaaaggattaaaatgttgttttactcattg

SEQ ID NO: 456473 - DNA, 398 bp, Sorghum bicolor
cgtccgggtccgttggtatccaggtgtcatcatctcccgccgagactcaacacgccatggtcgtcaagcacagctatttggtcagtgtcctagtactgctcgtcgcgggctactgtacggcggcgctagcctcggccacggcgacgacgttcatcgtcggtgacgatcagggctggacgatgaccggcgtggactacgtcgcttgggtccaaggaaagacattcgcgatcggagacaaactagtgtttaactacccgagcgaggagcacacggtgacggaggtgggcaagaccgactacttcgcctgcgccggaggcaacgcgctgagcaacgaccgcagcggatcgaccaacatcacgctcacggcgcccggcacgcgctacttcatctgcaacatc

SEQ ID NO: 456474 - DNA, 247 bp, Sorghum bicolor
cgtccgaggagatcgccgtacgcgcatgggaccagtcgctcaacacgcagcctgagaggctcatatggaacctcatgggggatgatgaacaactgctggttcaaggtgaaggcgaacgtgtgccgtccacacagaggcgagatcgggctggtgtccgagcacacgacgcagacgggcaaccagtccggcggcggatgggcggcaaagcactgagacgggagccgtgtccggtctaaccacacgtcac

SEQ ID NO: 456475 - DNA, 314 bp, Sorghum bicolor
tccggtcgaccacgcgtccgaatgaagatagacgacactgcaagagttatttcattcagtgagaagccaaaaggagacgaattaaaggcaatgcaagttgacactacagtgctaggctgatcaaaggaggaagcagaaaagaaaccttacatagcttcaatgggggtctatatttttaagaaagacatacttctaaaccttttaagatggcgtattcccactgcaaatgatcctgggtcttgaataattcttgtgaacaaaagaaataatgaaaagcttatttttcatgatactggaagaattggactattaat

SEQ ID NO: 456476 - DNA, 498 bp, Sorghum bicolor
cgtccggctcgtcgcgcttctcatgggactcaacatgtcctggtctgccatcactgctgctctcgtcctcctcgcacttgattgcactgacgcacaggcttgcctggagaaggtgtcaacactctttgttgatcttcttctgtgggatgttcataacggtcgacggcttcaacaggactggcatacccaatgcgctctgggagctggtcgaaccgcactcgagaatcgacagtgccaaaggcacggcgcttctcgcggttgtgattcttgttctttcaaatgtcgcctcaaatgttccaactgttctgctgctgggttcaagagtggcagcatcagcagctgcaatctcaccagaatcacagaagaaagcctggctcattctagcatgggtcagcacggtggccggcaacctgacactcttgggctcagccgcgaacctgatcgtctgcgagcaggcgcggcgggcacagttcttcgggtacaatctcaccttctgga

SEQ ID NO: 456477 - DNA, 185 bp, Sorghum bicolor
cgtccggtgggacgagtacggcatctcgtacgggatgccgagccagcacatcgtgatccgtcggctgacgtgcgtgtcgccgacgagcgcggtgatcgcgctggggagcgagatgtcgggcggcatccaggacgtgcgcgcggaggacatcacggcgatcaactccgatccgggtgcgcatagac

SEQ ID NO: 456478 - DNA, 421 bp, Sorghum bicolor
cgtccgcttcccgctggagacgcggtcggcggcgcagagcatcacggtggccgtgaacctgctcttcaccttcgccatcgcgcaggcgttcctgtcgctgctgtgcgccttcaagttcggcatcttcctcttcttcgccgggtggatcaccgtcatgaccgtcttcgtctgcgtcttcctgccggagaccaagggcgtgcccatcgaaggagatggtgctgctctggcggaagcactggttctggaagaaggtcatgccggcggacatgccgctcgaggatggctggggcgccgcacctgccaccaacaatcacaagtgaagacagcatgcgtgcttgctttcgtggacattattattacagtataaccaaagaaaacgaggcacacacactgacatgtactcctaggcggatgcttattc

SEQ ID NO: 456479 - DNA, 233 bp, Sorghum bicolor
cgtccgatggtctaatgctgatagacggccagctataggatctatcctagcatcaccatactggctatacacaatttgttcagctgaaatcaaggacacctctgatgcccctgcattggctgtctacaatcataatcacatgggtgcactgactcaaaatgaatggtctatgaaaggcacaatgattcttgcagtcacgctatggattttaggggaagctattggagtgtcta

SEQ ID NO: 456480 - DNA, 230 bp, Sorghum bicolor
cgtccgcttatcaacacagtgccaatatgttgttgtgttctatcagtgcttttatgtcaatggcgccatttcaattgttttggagtacatggatggtggttctcttgccgatttcctaaagactgttaaaaccattccagaggaccaccttgctgcaatttgtaagcaggtttaaaaggctgataccttgctatggagccatttcacagattgacctaattatgtaatat

SEQ ID NO: 456481 - DNA, 251 bp, Sorghum bicolor
cgtccggtgtcagtctgtgtgatccttctagagctcaccaatgatctccccatgctccctctactcatgcttgatcttctcatagccaaaaccatagcagataactttaacaagggagtttatgatcagatagaggtgatgaaaggcttgccattcatggaggctcatgctgaaccatacatgaagcacttggctgctggtgatgtgcagtctgcacaactaattgcatccactggagctgtgaatgtgtg

SEQ ID NO: 456482 - DNA, 432 bp, Sorghum bicolor
cgtccggaacgagcgaatcatctaacgagaaatgtgtctaagataatatcagcttcaagtaattgtagcttgtatgaaaggatgcaactcattaatgttttggaacgtctctgcttggatcatcttttcaaagaggagcttaatgtcatattgtctgagatttacaaaactaatgatattagtgggagtgatcttcaaacgacagctttgtggttctatctacttcgtaaacatggatatcaagtttctccagatgtctgtgcaaagtccaaagatgaacaagggaattttgcagcaaacattccattggatgtactgagcctttacaatgctgcatatttaaggactaatggtgagaataatcttgtgtgaggcgtgtttctattaccaaaaggagtgttgaatcaatttttatcaaccttgtagggccat

SEQ ID NO: 456483 - DNA, 373 bp, Sorghum bicolor
  unsure (1)..(373): unsure at all n locations
cgtccggccatcgtttctcagctcggcaagatcttctgtcacaaagccttccgtgttgtgttctccggcacggcggagagtatgcaggaggtggtcgccatgcagcaacttccgatgatgtttatggttttgggataatactgcttgaaatgatgactggaaggagaccaacagatcctatgttcaaggacggagtcagcattatcaactttgtggagggccacttcccacatgaaatatttcaggtccttgatgctcatctaacagaagaatacaagaactntgctgaagcaaagaaaatatcagaaaatgcggttcatcagtgcttggtatcggtcatacaagtagcattttccttgacgaaaccaatacc

SEQ ID NO: 456484 - DNA, 158 bp, Sorghum bicolor
gacatcacagtgacaagctcgaaaacttgcggaatgagctgtacgagatgagatgcaacatgagagcgggtgctgcttcacaaaagcaactgtctgcttctgctgaacatcttcctcgggttaatgagagctatactggcagaaagcaacggtttgtc

SEQ ID NO: 456485 - DNA, 381 bp, Sorghum bicolor
  unsure (1)..(381): unsure at all n locations
tccgcattcccggtcgaccacgcgtccgctcgcgtcttctcgtcgacagctccaactccgaaaccctactccgacggtgatgtcttcatccggcggccatggccgctgacgaagcggatgacgatcagctcgcctccatgtccaccgaggacatcatccgggcctgccgcctgctcgacaacgagatccgcgtactcaaggacgagttgcagcggacaaaccttgagttggagtcgttcaaggagaagattaaggaaaatcaggagaaaattaagctcaacaggcagctgccctacctngtcggcaacatcgttgagatcttggaaatgaaccctgaggatgaagctgaggaggatggtgctaacattgatttagactcac

SEQ ID NO: 456486 - DNA, 458 bp, Sorghum bicolor
cgtccgatcgggtctgtcaggagatgacacgattaaaaaccgtgtactggaagcattgtatcggcgcatacttcgagctgagagagagaaaaaacgctttaaggccatcatcatcatacctcttttacctggttttcagggaggcattgatgatggtggagcagcatcggtgagggcaatcatgcattggcaatatcggactatctgcagaggctctaattcgattcttcagaatctatttgatgttattggacctaaagcacatgattacatctccttttatgggcttagagcacatggtaaactctatgatgggggtcccttggttactagtcagatttatgtacatagcaagttaatgatagttgatgaccgcatcacattgattggctcagctaacattaatgataaaagcttgcttggatcaagagactctgagattgctgtggtcatcgaag

SEQ ID NO: 456487 - DNA, 269 bp, Sorghum bicolor
  unsure (1)..(269): unsure at all n locations
cgatccgtcgccaccgcgacctccaaaagagttattgtcgctgcggcccatggtctacctccgcgtcgggagcggaaccacccaggctttggaggcgatactccagactgtgcaagcaaccacgggtcggagcctgtacggcgaccggtctgtacctggtcgtctcgggagcccaagtcctgccgggagttcccggnactacggctggacactgccgggctgtctgcggaccccgagaccttcgccaagaaccgcgagcttgaagtgat

SEQ ID NO: 456488 - DNA, 396 bp, Sorghum bicolor
  unsure (1)..(396): unsure at all n locations
cgtccggaacaagttaaggaagtcaacattgacagtgtagaaactcttactggggtcatttcacagatatttgacaaagctttgatggaaccaactttctgtgaaatgtatgctaatttttgctcccatctggctggtgccttgcctgacttcagtgaagacaatgaaaagatcacattcaaaagattgcttttgaataaatgccaagaggagtttgagaggggtgaaagagaagaagctgaagctgataaaacagaagaggaaggtgagattaaacaaaccaaagaagaacgggaggaaaagaggatccgtgctcgaaggcgcatgctgggaaacattangttaaattggagagttgtacaaaaaagaaaatgttgacggaaaggattatgcatg

SEQ ID NO: 456489 - DNA, 445 bp, Sorghum bicolor
cgtccgcaggaaacttccggcagaacgcagaagaacgtggcggaccaaactgacgtgctcccgggcgggcgggcgggcggcgacggcggcggaggcggcatggagcaagagccgaaggcggtggcgaggaacaggaaggtggtgctgcgcgggtacatcgaccgcgcgccaagggaggacgacatggagctcgtcgacggcggcgccctggagctgcgcgtccccgagtgcgccggcggcggccccgctgtgctggtgaagaacctctacctctcctgtgacccctacatgcgcggcaggatgcgggacttccaaggctcctatattccggccttcaagcctggatcacctattgaagggtttggtgtggggaatgtggtcgacttcacttatacaggacttagtgctggtgacattggttccaggatgacttgcttggaggact

SEQ ID NO: 456490 - DNA, 297 bp, Sorghum bicolor
cagtaccgtccgaattcccggtcgcccacgcgtccgcgctgatccacaaggaagggattgcgtgcgctctcacgtgaccacatagactgtgttcttgaccttgcacggtgcaccattgtgtctgagctctcaaatgacgactttgactcttatgtcttatccgagtcatagcctgttcgtctacccatataaaatggtgatcaagacctgtggactcaaagctttgctcgctattcaggacctgacttgtaaacttcgtgcatttgagtaatctccgggcattattcctgtccactc

SEQ ID NO: 456491 - DNA, 360 bp, Sorghum bicolor
  unsure (1)..(360): unsure at all n locations
cgtccgcatgatcctagaatattggcaatggctgctgctcaacaccgtttacttgaagacgagtatgatgaatatactacaacaaacaacaatgctgctgcgttttgccgctctatatttctgattttgatggcccttctgctcctgaggcatacactgaccattactaacagtgatgatgaagatgatgcatcagctattttctcgctatttcttttgagggcagctggatttttgctgccatgctatattatggctngggctattagtatcatgcagcgtcaaagacaaagacaggaagaagcaatgctattgccaaccgaagtggctatcattctgcaccggaacggaagaacgatg

SEQ ID NO: 456492 - DNA, 415 bp, Sorghum bicolor
  unsure (1)..(415): unsure at all n locations
cgtccgagggcgcccggttcgccaagtggcgcaccgtcgtcagcatccctaatggcccctctgagctcgccgtcaaggaggccgcctggggcctggctcgctacgccgccatctcacaggacaatgggctggtgccgatcgtggagccggagatcctcctcgacggcgagcacgggatcgagcggacgttcgaggtggcgcagaaggtgtgggcggaggccaaggacagggcgacgccggagcaggtggcggagtacacgctgaagctcctgcaccgncggatcccgccgtccgtgccggggatcatgttcctctcgggaggccagtcggaggtggaggcgacgcataacctcaacgccatgaaccagggcaccaacccgtggcacgtgttcttctnctacgcccgcgcgctgga

SEQ ID NO: 456493 - DNA, 327 bp, Sorghum bicolor
  unsure (1)..(327): unsure at all n locations
cgagccacgcgtgcggatcaattggtgatgcttatctcaaaaagcaagagttcaacagggaacccctatatgcaaaattccgcctccgtgaaccttttaacaagccaatactaagggcagaaccatcaatatgtgtgcaaccactacaanacacgaccagtttctatatttgcattgaggacttggagcactaaccaaccagagtgtgatatgtacagacccgagggtgctgagtgtaagcgctgagaggcaaagagaaactgctaaacacgggtgcgatcaaacacgatggtctgtcgctgaggagcccggcatttcgagggcgtg

SEQ ID NO: 456494 - DNA, 264 bp, Sorghum bicolor
cgtccgcgatcgcacgcggacacacacttcactgtcagcagcgattagctctgtcgaggacatcattggtgtggtggagcactgatgagatggcggcggtgcggcacatcgtccacctgtctctgaactactccaactatcacaatcggacctttggctgatgatgctctgcgtccagtgactgatctttcgtttggatgtacattgtgatgatagtggaaccggatcagcgtgttcttgattctatcaatgcatgtgctgata

SEQ ID NO: 456495 - DNA, 444 bp, Sorghum bicolor
tcccggtcgaccacgcgtccgcagaatgaatatacgtccgaagatcaaccttatcctcgcggagaaatttgtgttagaggacctatagtattccatggttactataaagatgaagttcaaacaaaagaagtcattgatgaggatggttggttgcacactggagacataggtctgtggctacctggagggcgtttaaagattattgataggaaaaagaacattttcaagttagctcaaggagaatacatagctccagagaagattgaaaatgtttatgccaaatgcaagttcattgcccaatgttttatatatggtgacagtttaaactcttccttagttggtattggtgcagttgaacccgaggttttgaaggcttgggctgcatctgaaggaatccagtgcgaagacttgaggcagctttgtgcagaccctagagcaagagct

SEQ ID NO: 456496 - DNA, 381 bp, Sorghum bicolor
cgtccgcctccctctccctctgcctctccctctctctccgctcggcgctcgcaccaccacccaaccctccgcgtcaacctcttcgggtatgattattctggttatgggagatctacagggaagcccactgagtgtaatacatatgcagacattgaagcagcatataactgtctcaaggaaaaatatggtgtcgcagatgaggatataatcttatatggtcagtctgttggaagtggtccaaccattgatcttgcttcgcgattgccagacttgcgagccgtggttttgcatagtgctatattatctggactaagagtactatatccagtcaaactgacgttttggtttgacatttacaagaacatcgataaaattggcttg

SEQ ID NO: 456497 - DNA, 405 bp, Sorghum bicolor
cgtccgagggccggtacgtccagcactagaaccgccatgtcgggccgatggcctggcccgtcggcccgctctgcctcgccaggacggcgcccgaggcgccgtggcactgccatggcgacgtcgccgtcgccaagcctgcttgaatgcggtggctcgacgagaaggccgctgccggccgtgccgtcctctacgtagcgcttggcaccatggtggccgtgccgggctctaagctgagggaggtggtggacgggctggaccgagctgggttggacttcctatgggccgtgagacccgttgatgccgaccttgggagtgggcttcgaggagcgcgtccagggcaggggcatgctggtgcgcgagtggttggaccaacgcgcgatccttgcgcacgagtgcgtcaaggga

SEQ ID NO: 456498 - DNA, 400 bp, Sorghum bicolor
cgtccgcgaagaactcaggaagggactgcgattgatcgggcacaatgtccatgacacagatgtggatatgctcatggaagctgcagacatggacggcaatgggaccctggactgcaaagagtttgtgacagtctccattcacctgaagaaaatccgcagcgaggatcacctgcccaaggtgttcagctacttcgacaagaatgggagcggttacattgagatcgaagagttgaaggaggccctctttccaagaggtgacgagaaggcgatcgacgacataatcctagacgtcgacaaagacaaggacgggaagataagctatgaggagtttgagctgatgatgaaagctggagtggactggatgaatacgtcgaggcaatactcgagagcggtttacaac

SEQ ID NO: 456499 - DNA, 439 bp, Sorghum bicolor
cgtccgaacgtgttcgacaacaagacggcgttcgccaacgagctggactacggcaagagcaagcgcgaggcgcagtgggcgatcgcgcagcggtccctgcacgggctgcagcagcccgaggcgtcgggcctcttcaacaccgacaacagcaacgacttcattgagctctctgaaatcgccgagcaggccaagcgccgagcagagatcgccaggctaagggagctgcacacgctgaaagggcatgtggagtcggtggtgaagctcaaggggctggacatcgacaccatccaacataactacaccgtgtgatggatcagcgtagctacacgttattacatgcatggatcggagtgagacagcatcgatgcatggcatcagctggtcatgcggcagcggcatcgatcgatttggaggaggaacttctctttttcttttcaaa

SEQ ID NO: 456500 - DNA, 442 bp, Sorghum bicolor
cgtccggcatcgtttgctctgttctgtagagtaatttctccgctgtgagacctgaaatccaagtatttcttcctgcgatcggggcttatcatggcatcaaagcgtatcctcaaggaattgaaggacctgcaaaaggaccctccaacatcatgcagtgcaggtcctgctggtgaggatatgttccactggcaggcaaccatcatgggtcctcctgatagtccatatgctggaggtgttttcttagtgaacattcatttccccccggactaccccttcaagcctccaaaggtatcttttaagacgaaggtcttccatccaaacatcaatagtaatggaagcatatgtctcgacattcttaatgagcagtggagccctgctttgacaatctctaagggtttgctttctatctgctccctgcttactgatcccaacccaattgacc

SEQ ID NO: 456501 - DNA, 330 bp, Sorghum bicolor
cgtccggtcctccaacaagaacggcggcaacatccgggactcgccggaccacttcggctggcgcaccgtctccgacggcgacggcatcaccctcttcggctccaccaacgtgtggctcgaccacctctccctctccaactgccaggacggcctcatcgacgtcatcgtcaagtccacgggcgtcaccatctccaactgccacatgaccaaccacaacgacgtcatgctcttcagctccagcgacaagcaccccgaggaccagatcatgcagatcaccgtcgccttcaaccactttggcagaagccttgggcaaaggatgccaaagggccc

SEQ ID NO: 456502 - DNA, 438 bp, Sorghum bicolor
cgtccgctgctgctcaagagatctttggccacacattgcaatcccttcgtggaattaagtatctttacaagtacaatgttttccagtatggctttgttgctcttgccattctcacactcttctactatgctatatttggatggagaaagaggaaaccaacaggaaggttccagctctcaaattgatttgctctgtaagtgaagcttgacggattcatcatatttgccccctgagttagttagggtcttagggatgtatatgatcaaccaaacgaaaccaaatcttctcaaagttgaggaactgcaaatggtgtaaattatcagctatgagacttcaaaggcgagaacggggggactattggttaccacgaacattgattttaaagtagaacccaattgactttgcagtgtacacatttcttgtatcggctcttcatta

SEQ ID NO: 456503 - DNA, 367 bp, Sorghum bicolor
cgtccgcccaaagaacccgccggtgatcatgtgggacgacagggcggcgacgcggggcaaggacgggaagcccgtgggcacctacggcagcgcgacggtggcggtggagtcggactacttcatggcgtcgggggtccacttcaagaacgcggcgccgctggcggcgcctgggacggagggcgggcaggcggtggcggtgcgggtgtacgggaacaaggcggcgttctacgactgcaccttcgacggcggtcaggacacgctgtacgaccaccgtggcttacactactttaagtcgtgccacatccagggcacggtggactttatcttcggcttcgggaggtcgttgtacgaggactgcgccatcacg

SEQ ID NO: 456504 - DNA, 265 bp, Sorghum bicolor
gcacgcgtccgcggacgcgtgggataaaaaaaagaacctgataatagaaacagaaaaactataaaaaatacaagaaagactaaaatgaaaggaaaaataacgaacttcctctccatccacggtctagttgtctattgatccctctgaagtttggatcttgatgtaagtaccgctcatcactaagtcgctttgcatgtgcgtctttctcggacacttcttgtttttcatccagacattcatcatctgataaacactcaactaaatt

SEQ ID NO: 456505 - DNA, 324 bp, Sorghum bicolor
cgtccgggcaccgtggtcgtgacggccaccaaccaggccccgccgccggtcagcgggcagaagggcgagcacttcgacctcaccatgccggcgttcctcaagatcgacgaggagaaggccggcatcgtgcccatcacctatcgcaaggtggcgtgcgcgaggcaaggcggcatccggtacaccatcacggggaacccgaactacaacatggtgatggtgaccaacgtgggcggcgccggggacgtggtggcgctgtcggtgaagggcaacaagcgcgtcaaggtggacgccgatgaagcgcagctggggacagctctggatcac

SEQ ID NO: 456506 - DNA, 437 bp, Sorghum bicolor
cgtccgggattttgttaggaaggtctgatgttgcaggttggggtgcattcattaagaatcctgtaaataaaaatgattatcttggagaatatactggtgaattgatctctcacaaggaagcagacaaacgcggcaaaatttatgaccgggcaaactcatcatttctatttgatttaaatgaccagtatgtattggatgcttatcgcaagggggacaaattgaagttcgcaaatcactcatctaaccccaactgctatgcaaaggtgatgttggtggctggcgaccatcgggttggtatctatgcgaaggagcatattgaggctagcgacgaactcttttatgattatcgttatgggcctgaccaggctccagcttgggctaagagacccgaaggatcaaagaaggacgaagcatccgtctctcatcatcgagcacac

SEQ ID NO: 456507 - DNA, 431 bp, Sorghum bicolor
cgtccgtttaaagataaatgtgggatcgactgcaaatgataagcctatgcctgctccagatcctgaagttccccatataagcccccctctttcattcattaagggtgtgttgccgaaatatttccattctgagtggtcagtagctcaattcaggctccatgagggtgagcagtatattgttgcatttggacatgagaagaatactgtggcagttgttggtatggatggaagcttctacagatgccaatttgacccagttaacggaggagaaatgctgcagctggagtgctacaatttcctaaaaccatcggatcaaccgtagcaacatactgtaatcatcatcatgactgctccccctgtaccaaggattgtacagtatctttgtgggcccttggtgacccgagggcaaagcaagagataataatattttt

SEQ ID NO: 456508 - DNA, 444 bp, Sorghum bicolor
cgtccgggcgtcgccgatggggctacattctggctcttcttcaacacctggtcagagataaaccggcgtagcagcagtggaggtgaagggtacaagctgtccacaccgccgcctgtgttggacagatggttcctcgacacctgtccagtgccagtccctctacccttcggcaagctggaggacatcgtccagcgacctgagtactcgccggtgcaagaatgtttcttccacttctctgcggagagcataaagaggctcaagacgaaggcaaatgccgagatggcgggaactgcgacggccaccatctcctcgctgcagtccctgctcgctcacctttggcgagctgtgtgccgagcccgggggctcgcaccacacctggagaccacgtacaagcttggcattggatgccgcgctcgggtgaagagtataccacaagagtacatg

SEQ ID NO: 456509 - DNA, 408 bp, Sorghum bicolor
cgtccgatcgacacccacttgcgtcatatgatcctgcagttgtgggtagcatgtattgaatggagcaacttgtaatttatggttgtcccccaacacaagaggttggtgatttactcctaagtagaatatgcactcacggcagttggcaatacaaatccgttttgcagctgcaatgatatgcactctttcacaatgctccacttttactaccttaccaacagcaccaagaacaactgtagcatcagaacagccatacacagtagcatacttcagtggtgctaatatgtagataacagaatcatggcagttcaaaacctttattgtccctttgacatcagatgcatgcttgacaacagaagttttggaaaagccttccacaaacgttacatttctgtagtacgcatgatt

SEQ ID NO: 456510 - DNA, 455 bp, Sorghum bicolor
cgtccgcaagaatatagaagtcgacatggaggcttacaataaagccaaggaagctgaccctgaattctaccgtgacgcctcaagtctccagtatgggaaggtatccaatgtcccagaagaaaacattgacaaaatggtcaaggaactcaaggagagggaagagaagcggaaatcgttcagcaggaggcgcaagttcaatgaagacaaggatattgactcgatcaacgaccggaatgagcacttcaacaagaagattgagcgtgcctttggcaagtacacgctcgagatcaagaacaacctggaaagaggtactgccttgccagactaaaaccttacacagcagctcgggttcaagaacagcatggaaagaggtactggcttgtcagactaaaaccatacacagcagctatcttatggcattcaagctaactactcgactagaggcgagtgtccct

SEQ ID NO: 456511 - DNA, 397 bp, Sorghum bicolor
  unsure (1)..(397): unsure at all n locations
cgtccgagacaacatacccaaccgctggttcaggccagagactgatgctccgtcgtccatccgctctatccagatcgaggaacaggctattaaagacttcaagcgcttctacagcagcgtgaggatcgtcaagccgcaggtctagtgctggctgaggcggcctcttggaagagttactgatcccctttaggctcacctcccatttcactggttcattgtacattcaagtgtacagttggtttcgctcaccatagattcctttgttagctgaaataaactngaaagcacccttgtttccgcagtggtgatctcatctagttataacagaaggatgtataggtcatgtgagatcacccggcttggcttaacacttttacttgagccaatgttttttttt

SEQ ID NO: 456512 - DNA, 443 bp, Sorghum bicolor
cgtccgctgggcatcttcattctggcatggagattcatggcctctgcctccttcccggtcagagcatccaaaaggagtgccctgaagctccggcaaagaggtcaaggatctgccgcatgcagacaaagtcatcaacctcaggggacaggaatataaccgggtcatcggcgtagactgatgcacagtggatgatgacgttcctaggcaaggggcgtagcactgctcgtcggtcgtcctccgagatgagggcgttgtggacgtccatataacaatgacgaagagtaggggggatagcgggtctccctggcgcagtcccctggaatgaagaatgcgtctgcctaggcgtccattaacgagcaccctggtactagccatgccgaggagtgctgatatccaatcgcgccatctgagccgaaaccctatgtgcgccagggtcttcaaca

SEQ ID NO: 456513 - DNA, 469 bp, Sorghum bicolor
cgtccgcccacgcgtccggctgcaagacaaggttatgatggcttagctgcatatcttgctgagaaagggctgactgctcattttgaggctatgtcactgtccaaggataagcgatcaacatcaaggacacaatcactaaaacaaaataccatggaatttgaaaaccttagtgaacaagaactgtgcttacgagaatctttagcagcctaccgtaatgctgctgatgctgctaacaacatacaagccgcgctcagggagcgaactcttaagcttcaaacaaaagcaattcagttggccaatcccgagactgaagccgcttcaatagttgctgctatgaggattcagcacgcattccggaactacaacagaaagaaaatgatgagagctgctgcacgaatacagagtcatttccgaacatggcagattaggaagaacttcatgaacatgcgaagacaagctatcaaaatac

SEQ ID NO: 456514 - DNA, 450 bp, Sorghum bicolor
cgtccgagccgacagctgagtcgagatggtcggatgaggaatcctgatgagaagcccatatttatcgagtcacaggcgccagctccagagccagagcccatccctgtaaaattgcctgcaaaacaaaccaaagaagtgcctgctccccaggaagatgatgctcccaagattgaagctcgttcaaaaggacctgtcaagtcgcacaaggcaaaagctgctcttgatgccgatgatgattatgaggctgagcccccgaaggagaaggccaagcctacggaggctgatgtggcgaagttgaaagagatcaagagacaggaggagattgagaagaacaagcttgcgctggagaggaagaagaggcaggctgagaagcaggcagcaaaagccgcggcccgagcacagaaggaagctgagaagaagctgaagaaagaggagaagaaagccaaaaag

SEQ ID NO: 456515 - DNA, 464 bp, Sorghum bicolor
cgtccggcatgaaagaggaaaagagatggaatcgccaagtacatgaaaactgcagcagtggttgccctagcattgagctggtcagatatgaagccggccagaactccccgcagattgccatctacctggcacgctttgcatgtggactgactgcactacctgcttcgaaggctgtgctactacagccggcgagtgtggtggttgcttgggaggtgctggggaagccgggctaccgctgctcctcatcatgggggttattgtgctcgggcttttcactgtcatcggcatattctacagtgtcctggtcgcgacaatggtcggccagcggatctggcagcgacattatcacattcttgccaaacgaatgctaactaaggagtatgtcgtagaggacgttgatggcgagcgcacagactgggtcccccgccactacctgcggagcacatcagccagctgaagtccct

SEQ ID NO: 456516 - DNA, 459 bp, Sorghum bicolor
  unsure (1)..(459): unsure at all n locations
cgtccgtgatattcttgttttcacttcatcattcaacccaatgaagaacagcatatccaagcgccaggagaagactgtcatgaaactggtagttgatgctgaaactgatagagtacttggtgcatccatgtgtggaccagatgcacctgaaattatccagggcattgctattgcgcttaaatgtggagccaccaaagcgaacttcgacagcactgtcggaatccacccttctgctgctgaagagttcgtgaccatgcggactgtgacaaggcgcgtgagcccgacatccaagccaaagacaaacttgtaagcaagagttgatgttctggggaatgttacacaacacanatattctggtttcattttggtaattctacgtcattcanactggaacactgtatattgaaggaatagggtttttgcatgacagtccacacaaaataatgaaagctcaagctg

SEQ ID NO: 456517 - DNA, 472 bp, Sorghum bicolor
cgtccggtcccatgacggtaagatccggtttcttgtatatgttttggagaacgcgatcctgggccaacatgaaggtcaagagaaaatggtatggctgatagacttcgcagggtggacaatggcccatgccacacccataaagactgcaagagaatctacaagcatcctgcaaaatcattaccctgagaggctggccgttgcatttttgtttaatcccccaaaagtattcgaagccttttacaaggctgtcaaatatttccttgacccaagatctatcgagaaactgaactttgtgtacctgaaggatgaggagagcatgaaggtcctgtacaaatgcattgatcccgaggtccttcctgtcgagttcgggggaaggaacagtgttatgtacaaccatgaggagtactccaagttgatgctgcaagaagatatcgaaccatcaagcttctgggaagatgacgcgaaaacagtt

SEQ ID NO: 456518 - DNA, 368 bp, Sorghum bicolor
cgtccgatccgttcatcagcgtgagggctgagggggagttgccttttctctctcccgtcatcccgtctcctcttcttcgtgaactctcttttccagatcagaagaagctcggaccggcggcggcgggtgacgcaggatctgttctggtggcgacgtcgaacagcacgcggatggacggcggcggcggcggcgacctgcggagcgccatcaagaagtggaacgtcatctaccctgtctacctcaactccaagaagacggtcgccgagggccgccgcatcgccgccgccaaggcctgcccggaccccacctgcgtcgagatcgccgactgctgttcgcacctcaagatcccccacgccatcgagttggat

SEQ ID NO: 456519 - DNA, 459 bp, Sorghum bicolor
cgtccgcgctattcactgccttcccttggccaatacgagtgaaaatgtcgtattcttttataagatgaaaggtgactactaccgatacttggctgaatttagcagtggaactgaaaagaaagctgcctctgaccagtcacttatggcctatcagcatgccatggttgtcgcctccagtgagctctcacctgcccaccagatccggcttggtcttgctctcaatttgtcggtcttcttttatgagataatgaactctcatgagagagcttgccaagtggcaaaacaagcattcaatgaggctcttactgagataaattctggtgaaggggtttacaaggatagcacacttatgatgcagcttctgaaggacaacttagcattgtggacatcagaactaaccggaggtgaagcatccaaggataatgatgtcgacatggaaggttgattgatatgagctca

SEQ ID NO: 456520 - DNA, 459 bp, Sorghum bicolor
cgtccggctgatcagattgctgggctgaggaaggacagagaaaatggcctgttcaaaccagacccacgttttgaagaagccaagcaggttataaggagtggcgcttttggcagctatgactatgaacctctcttggattcccttgaagggaattctggatttgggcgtggtgattatttccttgttggctatgacttcccaagctacattgatgcacaggaccgggtggacgcagcctacaaggataagaagaaatggatcaagatgtccatcttgaacacggctgggagtggcaaattcagcagcgatcgcaccatcgcccagtatgccaaggagatatgggacatcaaggctagccctgttgcgtgaacgagggggacgtgattcaacatcaagcatagtttcttcggatgctacaataataaggatgaataatgacccacggtgcttgacgcccac

SEQ ID NO: 456521 - DNA, 473 bp, Sorghum bicolor
cgtccgacagcatgggcgcgtgcggcaacctccccatcttcaaggacggcctcggctgcggctcctgctttgagatcaagtgtgacaagccggccgagtgctccggcgaggccgtggtggtgcacatcacggacatgaactacgagcaaatcgccgcctaccacttcgacctggccggcacggcgttcggcacccctggcaagggtatccttgctgctgatgagtccactggcaccattggcaagcgtcttcccagcgcagtcttctccccccacccatcatccccgcatctctttaaaacggccacctccagaggccaccatagttggccacccacctctccctcttcctcctcctcctcctccgtctctctctctctctctctctcctctctacgcacgcgcaatataatggcgaagcctcgcaagaacagcgccgtcgtcaacaacaacaacagcagcagcaacggcgcc

SEQ ID NO: 456522 - DNA, 451 bp, Sorghum bicolor
cgtccgggacgtggaggaggggctgggcctgcacccctgcttcgcgctgccgcagggcgccaagtccatggcgctgccggagctgtcgctccacttcaagggcggcgcggtgatgcagctcccgctcgagaactacttcgtggtcgcgggccgcgcacccgtgcccggcgccggcgccggcgctggtgctgccgaggccatctgcctcgccgtggtcaccgacttcggaggctccggcgctggagacgagggcggtggcccggccatcatcctcggcagcttccagcagcagaactacctcgtggagtacgacctggagaaagagaggctggggttccgccggcagccatgcgcgtcgtcgtcgtgagcgacgtggatcggcatggcgggatcggagtggaggctattaattactccagtccacgtagcggcaatggtaaatgcaaaagct

SEQ ID NO: 456523 - DNA, 456 bp, Sorghum bicolor
cgtccgctcacctctggctagattaccaccaccccagaatgcagctgaggtctttctgattaatttcccaaaaggagtgatttatggatgtggtgacttgatattttcatcccacatgattttcaccctagtttttgtcataacataccagaaatatggaagcataaggttttgtaagatgcttgcttggtgcatagctgttgctcagagtcttcttattatatcttctcgcaagcactacagtgttgatgttgttgttgcatggtacactgtgaatttggtggttttctttgtggataagaagcttacagaacttcctgaccgatcggtgggttccacatcagtacttcctgtgagtacaaaggataaagataccaagttgaaagaagaaaatacgagattgctgaatggtaactctatggattcagctgatcggagaccacgaacacaaatgaa

SEQ ID NO: 456524 - DNA, 464 bp, Sorghum bicolor
cgtccgagatcaggctggcagcttgtattcgtcgaccgggaaaatgatattcttctcgtcggcgacgacccgtggcaggagtttgtgaatagcgtatggtgcataaagatcctctcgccacaagatgtgcagcagatggtccgcggcggaggcgaccttctgtctgcacctggagcgaggatgctgcagagcagtgtctgcgatgactattctgcaggccacgacatgcagaacctcaccggcagcattgcacctgtggtgcctctggactactgagactgagatgaagaccgaaatctgaagttctgaaccaaaaccagcaattcagcactggaggattgccatccacaagtcgtttcagttcctatgatcttctctcatgtcctgttggtcagaaataacctagtcattaatatagctagatgagatgatccattgtatcattatggtaatggacatgttgt

SEQ ID NO: 456525 - DNA, 470 bp, Sorghum bicolor
cgtccgcggacgcgtggggtcggagggagagagggggtcgatcgagaaggacgagggaggagatcagggagagatatggagtgcctgctagggctgctcaaggtgcgggtggtgcgaggagtgcacctggccatctgcgacccgctcacccacagcagcgacccctacgtcgtcctccgccacggacagcagaaagtgaagtcaagtataaaataccgcacgtgcaacccagaatggaacgaggaactcaccctgtccatcacaaacatgatgaacccggtcaagattgaactcttcgaccatgacacgttcaccaaggacgacagcatgggcaacgccgagttctgcatcctcaacttcgtggagatcgccaagcaggacctcagcgacgtccccgacggcacggtgatgaagtcgatcctcccggagaagggcggcaactgcctcgccaccgagagccacatcacgtg

SEQ ID NO: 456526 - DNA, 406 bp, Sorghum bicolor
cgtccggccggagggggaggtggagctgaaggtgcccgacgacgtgtacatcctggaccaggccgaggaggaaggcatcgagctgccctactcctgccgcgcgggatcctgctcctcctgcgccggcaaggtcgtcgccggcaccgtcgaccagtccgaccagagcttcctcgacgacgaccagatcgccagcggctgggtgctcacctgcgccgcctaccccacctccgacgtcgtcatcgccacgcacttggaggacgagctcaccgccggctcctaatcatgcatgcttatctctgttcgttattagcttcttattctttacgctcgttacctactgattgttgctttgcaattgcaattatcttattcatcatgtaagcgttgagttttcatccgtggaaaa

SEQ ID NO: 456527 - DNA, 335 bp, Sorghum bicolor
agtaactgcattgcgcccaacatttggaacagttgcactaactgatgttatgagcatttttgagagttggataagcttggtcctttctgcagaagtgcagtttattgtgctatagcattagacgcaacccgtggaaaggatgcatgtgatccgtcgtcttgcgaggttgctttgggggatccatttaatgttgacatcaccaaactcaccgttggctatcttgatgacgctgaaaaggaggttgtccatgatcttttctttaaaggggtcaaactgggggcctttaagctgaactacactgtcggatcagttcaaaccatcctgaacataacaat

SEQ ID NO: 456528 - DNA, 471 bp, Sorghum bicolor
cgtccgcggacgcgtgggaccacccagtttggactcatggccgtcagcctgggctactacgagacgctcatgtcctgctccgggagcagcaccagcagcgagatgccgcccgaggaccgcgccagggccggcatctccccgggcctcgtccgcatgtccgtcgggtacaacggcacgatggagcagcgctgggcgcagttcgagcgcgcgctcgcgctcatgcacccgcccacgcaccacctcagcctcaagggcgccgccgccgccgccgaccgcgacggcagcgacgccgcgggcaacaaccaccgcaagcactgactgacgcttgcgcttccgactttccgagtgtgcatgcatggtgatatgtgctgttgtggacttgtgtcgtgttcgtgtgtatatactagtagtactaccattcaagtaaggttaaacaccaccgtctgatccctctggttcagatggatatgc

SEQ ID NO: 456529 - DNA, 487 bp, Sorghum bicolor
gcaaaattaggggatcagaacaaattttactatgatgaaaagttgaagcggtgggtggaagaaggtgctgcggttcctgccgaggagcctcctcttcctccacctccaacaaaaccatctttccagaatggtatgccagaccataagttgaatggccccatgagtgtaaaccatgctcccaatggagtcacagaatggaaatcctcaaattcttcggagcaaggaggtctgggtatgcctccaattccacctagccaaaaccagttttctgctcgtggacggatgggtgtccggtccagatatgttgacacattcaataaatcgggtgcgtctggagcagtgccatcatataacaaaccagctgctccatctgtgacaccaccagctggtgccaagttcttcatgccgactgcagcacctgctgctgcagatcagatggtgccacaccaagcagcagagatacacagtgaaaccatccatcatgatg

SEQ ID NO: 456530 - DNA, 185 bp, Sorghum bicolor
cgtccgccccgagtggggtgtgctcccgatgcaaaccatctacggcagcaacggctgggactcgtacgcctgggctcttaaggcgaagctgagcaccgagacgctcgtcatgcacaacctccgcgtggaggaggaccccgactgcggcccgctcatcgactgcgtcgccatccgggcgctgtacc

SEQ ID NO: 456531 - DNA, 287 bp, Sorghum bicolor
cgtccgcaggatctgctattacatggaagtacccaagcgtcgagctagtcggagatgacagtgttggagagttctactcggttgcacttacaaaggattgccagcaagcagacacagggacgaaaatgatccacaaggggaagaattcacgcagccggattatatccaagggcatctctgcagggaagtcaaggaattgctaccgtggcttggtcctgatgaactctagtgcggagaatgcttataattcttcacagtgtgacctcattgctgattgggggataatg

SEQ ID NO: 456532 - DNA, 427 bp, Sorghum bicolor
ctgcaccaccgctccaccattcccgaatcgaccgacgcgtacgggactatcccaaccctggcgccagcgctgccagtggcccgatccaaggccaccttctacaaatgcaccgaccacggcgggcatggcgccctgtatgaccataagggactgcactactataaatcgtgcacaatcaacggcaccttcgactacatcttcggcaatgcaaggtccttctacgaggactgcaacattgtatgcaaatcacgccactgattacctgcgggacctgccggaggcaaagccgtccttgaccttttcggctgcggcggccgacagcagtttatctttcaagacatgcaccatcacagggcaaagttttatcttcctaggaagggcaggctggcctgtcgtctactcctacaccaacataggataccacctt

SEQ ID NO: 456533 - DNA, 331 bp, Sorghum bicolor
cgtccgcccaaacctagcccgcgcgcgggcgcggatctgagttttcgttgggctctctgcgcaaatgtctgcggcggatgcgaaggcagctgtggtcccggagtctgtgctgcggaagcgcaagcgggaggagcagtgggcagcggacaagaaggagaaggcgctcgcggacaggaagaatgcgctcgagagccgtaagatcatattatcccgcgccaagcagtactcccaggagtacgacgcccatgagaaggagcttgtgcagctcatgcgtgaggccctgctgaagggtgggttctatgtaagcccacaggccaagcttttgtttgtg

SEQ ID NO: 456534 - DNA, 388 bp, Sorghum bicolor
  unsure (1)..(388): unsure at all n locations
cgtccgacggcgtgcaaggaggcgctgacggccaagcagaaggccatggagctgcagcggtggaagatggaggaggagcagaagacgcaggactcgcggataacggaggactcagccatggcgatgatcgagcgggagaaggccaaggcgaaggcggccatggaggcggcggaggcgtcgcancggatcgcggagatggaggtgcagaagcggatcagcgcggagaagaagctgctcaaggaggccgaggagcgcaagaaccggggcggcagcggcatgtgccacgaagtccggtaccggcggtacgtcatcgaggagatcgagcagggcaccaacaacttggacgacacgcccaaggtctgcgagggccggtaccggcccgtgtaca

SEQ ID NO: 456535 - DNA, 405 bp, Sorghum bicolor
cgtccgcccacgcgtccgcccacgcgtccgtacaggtaaaggcagcagagaacttctgtgaccttgtaaggtcgatttaccatgcaataaaagtggtttcaagacgtcgcaatgggaccttgaattcacaatttcacgcaatttggaacttgaagatggctctgctccgttcatctacaaaggaaaacattgaccaagtttttaatattgaagaaatgaagctaaagtttgaccagctttggaggaaatggtacctatggctatcattagcgtgtgttctcgatcccagatataaaataagggttcttcgttgctttaacgaagcctttggtagtcatgccaaaaggtatatctctgaaatgcgaggaaagctgtatgagctctttcttcagtactcttgtcatg

SEQ ID NO: 456536 - DNA, 451 bp, Sorghum bicolor
cgtccgcccacgcgtccgaaaaggatggcagtgttgtcgcaatggtcggagatggcatcaacgactcgcctgccctggccgccgctgatgttggtatggctatcggtgcaggcactgacattgctattgaggcggctgactatgtgctcgtccggaacaacctggaggatgtgatcacagctattgacctctcaaggaagacattcagcaggatccggtggaactacttctttgccatggcgtacaacgtgatcgccatccccgtggctgctggcgcgctgtttcccttcaccggggtccagatgccgccttggctggctggcgcgtgcatggcattctcgtccgtcagcgtggtgtgttcgtcgctgctgctgaggaggtataagaaaccgaggctcaccaccgtgcttcagataacagtggaatagttttttcttttcttcagttcatc

SEQ ID NO: 456537 - DNA, 158 bp, Sorghum bicolor
cgtccgcgcctaacaccgatggaattgacccagactcttccacgcatgtgaagatcgaggactgctacatcgtctccggcgacgactgcgtcgccgtgaagagcgggtgggacgaatatggcatcaagttcaacatgccgagccagcacatcgtcatc

SEQ ID NO: 456538 - DNA, 452 bp, Sorghum bicolor
cgtccgaccccggcgtgaccgaggaccccgcctgcggcccgctcatcgactccgtcgcgatcaagacgctcaacccgcctcgccggaccaacatgaacctggtgaagaacggcgacttcgaggagggcccgtacatcatcccggggacgaaatggggcgtgctgatcccgtcgagggtggtggacgaccactcgccgctgcccgggtggatggtggagtcgctcaaggccatcaagtacattgacagcgacagcttcgcggtgccgcggggccggcgcgccgtggagctgctggccgggagggagagcgccatcgcgcacgtgatccgcaccgtgccggggcgggagtacgcgctgtccttcaccgatggcgacgccagcaacgcctgccgtgggtcgctcatggtggaggcatacgccggtcgggagtacaccaaggtggcgtacgagtcg

SEQ ID NO: 456539 - DNA, 449 bp, Sorghum bicolor
cgtccgcccacgcgtccgaatgagtgttcggaagcagagacttggctaatagagaaaaagcagcagcaggatgctctgccaaagcatgctaatccggtccttcttgccgcggaccttaagaagaaagctgaaacacttgacaggttctgcaagccgattatgacgaaaccgaagccagctcctaagccacagactccgcctccggtagaaacccaggctcctgagcctcagacaccagagcagcagcaatcaaatggcgaaagcgcagccagcgagggagctgcagaggagcctccagccgagcagatggacacagacaaacctgagggagccacagatccctcggcctagctttgccgttgatcaaacatttgtgtgattgaccctgttcacctgctgttatagtcggtagggttgtgaactaaacgagatggttgttcggtcacatt

SEQ ID NO: 456540 - DNA, 408 bp, Sorghum bicolor
cgtccgcccacgcgtccgcagaagctgcgtgaccaagttgaggagagactagacttctatgacaagggtgttgcacctctgaagaaccttgatgtgatgaaagccgccattgagggtattagtgcggtttcggaggatgttgattgtaatgagaataatgatgtgtctgctaagaaaggcaagaaaaagaagtttaaaactcagactgactgtgaagcaatggatgttgataagcttgcctatggagaagatgaacctcaaactgagaagaagaaaaagaagaagcacaagcgtgtggagccacaggattgaagagatggccactgagccacttcagtgatgttgtcaaacaagatgatactccaaagaagatgaagaaaatgaaccttgaggcatcttgagatgttt

SEQ ID NO: 456541 - DNA, 460 bp, Sorghum bicolor
cgtccgggggatttgaaacccaaatggagaagtggatgggagcttgtgattgcattataacaaaggctggaccgggaaccattgctgaagcgttgataaggggtcttcctataatccttaatgacttcatacctggacaggaagttggcaacgtcccttatgttgtggacaatggtgcaggtgtgttctcgaaaagccctaaggaaactgctaaccttgttgcccgctggtttggtccagattcagaggaactgaaaaaaatgtcagaaaatgcactgaaattggctcagccagaagctgtctttgacattgtcagagacattcatgggctctctcaggagcaaggcgtgatatcacagatctttagttccttgacttcatccttcttcataccatcacctgaaaccacacctcttcaacttatctgaaaccaataagctgtgtctagctaggattctat

SEQ ID NO: 456542 - DNA, 434 bp, Sorghum bicolor
cgtccggttggacccaagacaatccatgttccatctggggagaagcttgcagtttttgatgctgctatgaaatacaagaatgaagggcatgacactattatcctggctggtgccgagtacgggagtggaagctctcgggattgggctgcaaagggcccaatgctgcagggagtgaaggctgtgatagcgaagagctttgagaggattcaccgcagcaatcttgctggcatgggaatcatccctctatgcttcaaagcaggggaggatgcagacaccctgggcctaaccggccatgagcgctacacagtccaccttccaaccaacgtgagtgagataaagcctggccaagatgttactgtgacaactgataatgggaagtcattcacttgcacactcaaattcgacactgagggggagcttgcttactaccacca

SEQ ID NO: 456543 - DNA, 441 bp, Sorghum bicolor
cgtccgcttgcatggaaatggtcagagaaggaaggtgaggatggtaagaaggaaggtggtttcaaaagagtctacttgcaccaagagggagttcctggctcaagaatgggctcaattgtttcacttcctggtggtggcgatgttcatgagggtggcgagtttgtacatgctgctgctttagtaagccagtcagcacttttctcgaaggatcttaccgaaccacgcatgtctggtgctgccatgattaacgcatccgaggtagccgccaaaggttcaagctggaaagatttgtttgaacctggtgtgaggcgtgccctgttagtcggtgttggaattcagatccttcaacagtttgctggaatcaatggtgttctgtactataccccacaaattcttgagcaagctggcgtggcagttcttctttccaatcttggtctcagc

SEQ ID NO: 456544 - DNA, 329 bp, Sorghum bicolor
cgtccgggtacaaccgcctcgacgtcgcggagccgtcctactccgtctgccgccccggctcctcccaccacaaggacctcggcatgagggacgcattagccggtttcggagcgaggaacaagaggatccattactcggggccgctgatgccgcccggcgggaacatggaggacatgctcaaggagcacgagaagtagatccagcatgccgtgcgcatggcgcgagtcgagaaggagatgaccaacaggcacttattactgaacaatgaggaaaacaattggcatcaatttggcgaattctttccatggtcttacagaccagtgctttcg

SEQ ID NO: 456545 - DNA, 465 bp, Sorghum bicolor
cgtccgctatgtttttagcaaagatgtgatgcttcggcttctcagagaaaactttcctgcagcaaatgactttggaagtgaggttattcctggcgcaacagaaattggattaagggtgcaagcttacttatatgatggttactgggaagatattggtactattgaagcattttataatgcaaacttgggaataaccaagaaacctgtaccggattttagcttctatgaccgttctgctccaatttatacgcaacctagatacttgcctccttcaaaggttcttgatgccgatgtgacagacagtgttattggcgaaggttgtgttattaaacattgcacaatcaaccattctgtagttggactccgttcctgcatttctgaaggtgcagttatagaggattctttgctgatgggtgcagactattatgagactgaggatgataagaaagtcctttctgagaatgg

SEQ ID NO: 456546 - DNA, 401 bp, Sorghum bicolor
cgtccggcgtactacacggcagctagcgcgcgatggcgaaccacctccgtccgctcgcgctcctcctcgccgtcctcgcctgcgcgctgctgtgccgccgcgccgacgcgaccgggttcgagggccgcggcgacgacgggtgggtagggccccccgccagcgatggcggcaggtaccaccagggggccgtccaaaacccgtttcttggtggcgacatcggccacttcaaggaccaggaggacctcgtgatggtggggaccgaagccgactaccacagctggagcgcattgcaccccattttttttttcaacaaccgcgacacggaggtggcgctggaccacccgggcaccatctattttattagaggcgagaccgggcactgtgagcgcgggcagaggatg

SEQ ID NO: 456547 - DNA, 461 bp, Sorghum bicolor
cgtccggacgccttgtcggtttgacatttaatttggactggccatgaaaatgcagctcccctgctgcatgtccatcaaatagttaaacatagattggtaggcagaggccagactgataggaatggcagcaaaggagcactttgtgcttgttcatggtgaagggcatggagcctggtgttggttcaagctccgctggctccttgagggcgctggctaccgtgttacatgcattgaccttgccggaggtggcgtcgatcctactgatcccaacacaatccggtcgttcaagcagtatgacaagccgctcatagatctcatttcaaccttgccagagggggagaaggttattctagtcggacatggtgctggagggctgagtgtgatccatgcaatgcatgaattcgttgacaggatcagtcaatcattttttgtggcagctacaatgctaccatttggatttc

SEQ ID NO: 456548 - DNA, 403 bp, Sorghum bicolor
cgtccggcgagagctgttattgtccgttgagtatactgctgctgatgctactactaggaccttttttgttggttcatattctgccaaaaaaaaaaaaaaaaaaaaaaaaaaaaaaaaaaaaaaaaaaaaaaaaaaaaaaaaaaaaaaaaaaaaaaaaaaaaaaaaaaaaaaaaaaaaaaaaaaaaaaaaaaaaaaaaaaaaaaaaaaaagggggggccgtttaaaagaatcaaagttaactaacccgggcatgcaacgaaaaagtttttttataggggcaccaaaattaaatccacgggccgggttttaaaaacgtcgaaactggaaaaaccctggcttaaccaaactaaatcgccttgaaaaaaatcccccttttcccagttggggaaaaaacaaaaaggcc

SEQ ID NO: 456549 - DNA, 467 bp, Sorghum bicolor
cgtccgcttctctccgccgccgccgccgcagtgagcatgtggtcgtacccatgtccgggaggaagaggacgcaggagctcatggaggtgaccatgatcctcggcccggccgtccgcgagggcgagtaacgtcttcggcgtcgcgcacatcctcgcctcttcaacgacaccttcctcctgcagcatgttgcgggtctatccggtgggagacgctcggtcgcatcacaggtaaaagcagaccacgatgagccatgcttgcagctcaggaagatgcactgagatgcaaggagcttgaaatcaccgctgtgcacattgagcttaccggtggaatcaagacaaacactccaggccctggggcttagtctgtgcttagggctcttgcgtgtggcatgaagattggacgcattgtttattctatctagatttgatgtcctgttggtaatgtagatttgttacacaattgggtcg

SEQ ID NO: 456550 - DNA, 465 bp, Sorghum bicolor
cgtccgctttgttcctaatctgactattggggctccggtgatccagagcttgaggaaacataccaaagcatatttggactgccatcttatggtcacaaacccttcagattacgtagaaccatttggaaaggctggcgcttctggattcacattccatatagaagttgctagagacaactggcaagatctcatccaaagcattaaatcaaagggtatgcggcctggtgtatcattgaggccaggtacaccagtggaggaagtttttccactggtggaagcagaaaatccggtagaattggttcttgtgatgacagtcgagcctggttttggtggtcagaaatttatgccagaaatgatggataaggtgcgcacactgagaaagaagtacccttcccttgacataaaggttgatggtggtctaggcccttcaaccatagacgtggcctcatctgctggggccaattg

SEQ ID NO: 456551 - DNA, 465 bp, Sorghum bicolor
cgtccgctcctcacacagtagcagcaccaccacacagaaagaggaggaggaagacgaggacatggctagatgcctcatcctcctcgcccaggggccccccgccgccgccgccgttgagccagcaagagtaatgccggcaccggcaccccccagcaggccaaagagcacgagtgctcgtcatgcggcgcggtgttcgcgtccgggcaggcgctcggtgggcacatgaggcgccaccggccgctcaccaccagctcgtcggccgcggcggcgcccgagagcgtggtcaccgccacggggacgacgggggaccaagacagtagcaagctgctgcaggagggcaacatcaacctggagctggacctcaacctgctgccggcgccgtcgacggagcaggaggtgacatccccggcaaagccgccgtgccatgcaccagcagttcagctgatgcatgctttgactcgccac

SEQ ID NO: 456552 - DNA, 450 bp, Sorghum bicolor
cgtccgccccttccccgatccccttcctcctccgatccaattccgcaccccgcgcctcgccgccggcgccggccatgtccaagtacggcaccatccccacctcatcctccgcgggcggcggggcgccactcggcggcgcctccccgctcgacttcatctcacgcgccaaggcccggggcgcctcggcgctggcgacgcgccggccctggcgcgagctcgcggacgtccacgccgtcggcttgcccccgagcctcggcgacgcgtacctccgcgtgcgcgccaacctcgcgcacttcgccatgaactacgccatcgtcgtgctcgtcgtcgtcttcctctccctcctctggcaccccgtctccctcatcgtctttctcgtctgcatgctcgcctggctcgtcctctacttccttcgcgacgagcccctcggtctcttcggccgcgttgtcg

SEQ ID NO: 456553 - DNA, 181 bp, Sorghum bicolor
cgtccgcccacgcgtccgcggcgcgcaagtcgacgggcggcaaggcgccgcggaagcagctggcgacgaaggcggcgcggaagtcggccccagccaccggcggcgtgaagaagccgcaccggttccggccgggcacggtggcgctgcgtgagatccgcaagtaccagaagagcacggagct

SEQ ID NO: 456554 - DNA, 475 bp, Sorghum bicolor
cgtccgtgccagcagccgaagtcggcgagcgagagccagcagccgaagtcggcaagcgcgagcggcgatgggatcgagcgaggcggagaagccgctgcgtcggatcgcggcgtcgttcgaggagctcgccgccgtcgccaagcagcagcccccggcgtccatggacgcgggggccttttcgcgcgcctgctccaacgtctccgtcctcttcggctgcctcggcatcgccttcaagttcgcggagatggactacgtcgccaaggttgatgatttggtggaggcgtccaagtcaattttgacattgccttctatggttgagctagacattcagactgacactgtcaggaaaccagggagccatacaaggaatctgcttagagtaaagcgtgggattgatatggttaaagtcctctttgagcaaattcttgtcacagagggcaactcccttagggatgcggcatcagtagcttatgct

SEQ ID NO: 456555 - DNA, 350 bp, Sorghum bicolor
cgcgtacagtccacgcgtccgctagcccagttaccgatcatgaattactacaggagtcctgacatgggagatgcggtggacttcacagtccatgtcgcaacacccgtggagaaactgtccctcatgaaggagagactaatgcattaccttgacaacaagaaggagcattggtaccctggctccatggtggtcctgcgcgacgtggacgacacgaacaagctcaaggcctccatctggtgccgccacacgatcaacttccacgacatggggctgaggttcgagcggaaaaagctgctcctccaggagatgatcaagatcttgggagacctcgagaacgagtaccggatgct

SEQ ID NO: 456556 - DNA, 409 bp, Sorghum bicolor
  unsure (1)..(409): unsure at all n locations
cgtccgtgacgttaggcaaattcctccagctgaagttcctggagattacattgtctgcttcaaatttttctccagacttcgactttagctccctggtatcttttcttgatgcatctcctgccttggagacgttcatcttacgtatttcgatgccaaccattaggcacgattcaattctcgaagatcctgatggtgattcctcactactacaatgcctctcagattgctaccacgacaacctcaagaatgtgatgataacagggttttgctccgcanagagcatggtccagctcactatccacattatgcagaaagcaaggtcactagactgtcttacgttagacactacccgtggccatgacaggaggtttgccaacattgataggtgctggccactcactgaggacgc

SEQ ID NO: 456557 - DNA, 379 bp, Sorghum bicolor
  unsure (1)..(379): unsure at all n locations
cgtccgggccattcctcctggggcagtccatgagcgcagtcgacatggtttatgcgccctttgtcgaacgcttcaaggatttcttcgctgcagtgaagcactacgatatgacacaagaaaggcctaaactcaaggagtggatagaggagctcaacaagatagatgcctacacagcgacctgnggggatcgccgtctgcagcttgctgccttgatgaacaagtttgggatacaaagcccagtagcctgatctgatctgatctgatcttatcatccctaggggaggacatcttgtcaggcgtttcatgttgtatatgagttggaataagtctcaactgaataagatgtgtgtctgctataatgttacctatgttatggccc

SEQ ID NO: 456558 - DNA, 447 bp, Sorghum bicolor
cgtccggtgatcttctcagggaaaaccttgatatgagggttaggttggtggttaactacaatggccttagcgttggtgcagtacgagacgtgtttgagaagtcccttggcctgcgtctgcagaagataaatcctaacactgactttcactgcttgaagacctttggttctcacttcacagaagatatcgccataccttcgggtacaaagattgacttctgtcaaacatcagatgggaaactaataacagaaattgatgggaaacaaatcggtgctgttcagagcaaagatctttgcaaggctttcttcgacatgtatattggtgattcaccgatttcaatggaggccaaaaaagttgttggcccagaacgtggccggactcattggaagacgctgaggaaagcgaaagatgattatttcattcttctgtacagttagggaggattcg

SEQ ID NO: 456559 - DNA, 458 bp, Sorghum bicolor
cgtccgcccacgcgtccggcaagaccagcttcatggttaagtatgtgggagacgacggggaggagcagaacggtttgcagatgactggcctgaatctcatggacaagacgatggccgtcaggggagctaggattgcctacagcatctgggatgtggcaggagaccaccagtctgtcgaccacatcccgatcgcttgcaaggacgccgtggcgatcctctacatgtttgatctcacgagccgctgcacgcttaataacattgtagattggtacgagagggcaaggaaatggaataagacggctattccaatcctaatcgggacaaagtttgatgactttgctcaacttcctcttgaaatgcaatgggccatcggtaaccaggcccgagcatacgcaagagcgatgaaggcgaccctcttcttctcgagcgcgacgcacaacatcaacgtgaacaagatc

SEQ ID NO: 456560 - DNA, 343 bp, Sorghum bicolor
cgtccgcccacgcgtccgcccacgcgtccgggcccgtgcgatatgtattatgaagcatccaatccccgacaccaaggattcacactccgtgcagatcatcctcccaaagaagcaattaaagcgcaaatcagacatgtacgtgttttgctgctcttacgctcacaatgttgcaccaaaaggcaagttcattgctttcgtttcgactgaagctgagaccgacaagcccgagattgagttgaagcctgggatcgatctgcttggccctgtagacgagacgttctttgacatctatgacagatatgaactcattaacaatcctgagggggatagttgttcttgacaa

SEQ ID NO: 456561 - DNA, 460 bp, Sorghum bicolor
cgtccgggcaggcgcaatggtgagcgtaggaggaagtctgtccggggttgcattgtcagccaagacctgtctgtcattaacttggtcattgtcaagaagggtgagaatgaccttccaggtctgactgacactgagaagcccaggatgagggggcccaagagagcatccaagatcaggaagctcttcaacctttccaaggatgatgatgtacgcaagtatgtcaacacataccgcaggacattcacaaccaagagtggcaaaaaggtgagcaaggcccccaagatccagcgcctggtgaccccacaggtcctccagaggaagcgtgccaggatcgcagagaagaagaagaggattgcaaagaagcaggctgaggccgcagagtaccaaaagctgctggcacagaggctcaaggagcaaagggaacgcatgagcgagagccttgccaaagagaggtcgaagc

SEQ ID NO: 456562 - DNA, 499 bp, Sorghum bicolor
cgtccgaataaaaacgccaccccgccccccactcgccggagcccggccgccgggatgcctcgagattcgcgcccacccgggatgcgcctcttcggcgtcaccatcgcgccggcgccggcgccggaggcggatccgccggaacgggatccgagtcccaacccgcccgtggcggccagggaggacgtgatgcgcaagtgcaagagcatgggcaacctcgccgctcttggcgctggcgcggacggtggaggaggtggcgcggacggcggaggcgccggcgacgggtacctctccgatggcgggctgatgcagtcgtccgggaagcggcggagggcgcaggagaggaagaaagctgttccttggactgaagaggagcatagaacatttcttgctggtcttgaaaagctagggaagggtgactggaggggcatagcgaaaaaatttgttaccaccagaacaccaactcaagttgcaagtcatgctcagaaatattttcttagac

SEQ ID NO: 456563 - DNA, 385 bp, Sorghum bicolor
cgtccgcgggcgcgtgggatgtatgtttggggatgttgaagtaccagctgaggttttgactgatggcaccctacgctgctatgcaccagcacatcaatcaggaagagtcccattttatgtgacctgttcaaacagggtggcttgtaatgaagtgcgagaatctgagtatcgtgattctgatgctcagtacatggagacttctcgttcccaagccaatggtgtaaatgaaatgcatctacatattcgtcttgagaagctactcactgtggggccagatgaccatcatatgcttgctataagcagtggtaatgagaaatatgagatagtgaatgctataaatgccttaatgcttgatgggaaatggtcaaatcaagaatcttctgtc

SEQ ID NO: 456564 - DNA, 339 bp, Sorghum bicolor
cgtccgccagttcactgcccctactgaatcatccaatgtatataagggcgttcctgaaaccccaagcaccgaaggttcacgacacctgagccagcgagaggctgcactgaacaaattccggctaaagaggaaggacaggtgctttgagaagaaggttcggtaccagagccggaaattacttgcagagcagcggccacgggtcaagggccagtttgttcgtcaagatcatagcatccaaggaagctagggtgcgatcactgagcttgaactctttcccactatctaaaaaaggtcactgcaagtgactccactgcgggtatcctgatgtctggctttgtg

SEQ ID NO: 456565 - DNA, 416 bp, Sorghum bicolor
cgtccggatgtctcgagaccaccgcgcaaactatgtcgaggagtgcgagagggtcgcggcatccggagggtgcattgaggatggctacctcaacggggtcctctcggtgacgcgcgccctaggcgactgggacatgaagacgcccgacgcgtcggtgtccccgctcattgcggagcccgagttccggcaggcgacgctgggcgaggacgacgagttcctcatcatgggctgtgatggcatctgggacgtgatgacgagccagcacgcggtgagcctcgtacggcggggcctgcggcagcacgatgaccctgcccggtgcgcgagggagctcgtgatggaggccaagcggctggagacggcggacaacctcacggtcattgtggtgtgcttcgcatcggagatgggatcacaacagc

SEQ ID NO: 456566 - DNA, 403 bp, Sorghum bicolor
  unsure (1)..(403): unsure at all n locations
cgtccgaagatatatcgcccatggatgtgccctcttgccagagcattgtatgtcttgatgtcattaatcactgttcttataggattttatgacctctacaagaatgtgcccatgttgaaggcaactgcctcaagattatttggccctttctttgattggatagaaacgtgggaaatgatatcaagacttaagtatcttggaactatgcttttcctgcataactttcagcaggcttttacatggtctcttaagattgtgggtgctgctaagtctgttcttagtgttttgacaaagccaattgcgggaccaattgtggaggttttggaacttaccatgccaatgtggaacctttgtgctgagacagcangacatctgagttcagttgtcatggtagcactggaga

SEQ ID NO: 456567 - DNA, 468 bp, Sorghum bicolor
cgtccgcggatttccttcgtcggaggatcgataaccccgcttcttgtgagaccaaatcaatagagcaacccacaccaatctcgatctcaatcccaattcaatcaccaacctcgatcccaattcaatcgaagtcgcaggtcgcaggatgcctccgccgcgtgagcaccaccagccccaggaggaggaggacgacgacgacacggcaggcgtcgtcaagctcatcagcgcggagggcttcgaattcgtcgtcgacaagaaggccgccatggtctccaacaccctccgcaacatgctcacatcgccaggcggcttcttcgagacgcgccagggcgaggtccgcttcccggagatccccacccacatcctcgagaagatctgccagtatttctactggtcgctccattactccagtgggaaggagacagctgagtttcagattgaaccggagatcaccctggagttgatgat

SEQ ID NO: 456568 - DNA, 422 bp, Sorghum bicolor
cgtccgcggacgcgtgggtacagactgtctcattaatacatggtagcaaacatacactagacaggggcatagagtttcaattctctctgaatagcataataaacagcgcggcgatcgcagactggtagtgcacttaatccgcccgggattgaccagcacgggatgaaaggataattacaacgatgagaccatagagagcaagcgcttctgcgaaaatgaggatgaggatcatgcccacgaaaagcttcggctgttgcgcatgggccctgactccagcatcaccaacaatgccgatggccatgccagccgcacgcccagcaaggccacaagcaagcaccgacgacaggtgggcatatccatcaaagaggtagtatggcttggccttgggggtgatccccccgctgatgatgacagcgatgatg

SEQ ID NO: 456569 - DNA, 427 bp, Sorghum bicolor
cgtccggccggcggtgcgcggcatgcggcgggcgctgcttctgcagtacaccgccggcgccgcggggtactacggcatcagcgtggcggggtactgggcgtacgggtcggcggtgtcggagtaccttcccaacgagctcggcgggccaaggtgggccgccgtgctcatcaacgccaccgccttcctgcagagcatcgtcttccaacacctgttcaccgtgccgatccaatagatctgaggctacctgctgcagcggctggacgagggcatgttctcccggtacaaccttacgcgacgcctctgcgcgcgggggctcgtcttccgcttcaacgtcttcgtcaccgcgctgttcccgttcatgggggacttcgtcaacctcgtcggctccttcgcgctcgttccgctcaccttcacgttccctagcatg

SEQ ID NO: 456570 - DNA, 469 bp, Sorghum bicolor
cgtccggccctgtcttcctattcttctcggtcaacaccagcggacagcttgtacgtttggctgaaaggttagggcctgttgatttcaagatgaccatggacttctgggaagaagataaatggaatggctctttccctataaaatggcatatcataaaggatgctccaaatcagttgttcaaacatataattcttgtaaacaatgacaacaggcaggctacttttagcagggacacacaggagatcgggctgacgcaaggcgcgcaaatgttgaaaactttcaaggatcatcctcagggaacatcaattctggatgattatgatttttatggaagaaaaagctaatgcacgccgtgctgaaaagagaggaaattcagagtcgacatatgaagctcgattctatgatgacttgaaacctattgaaaatctgaggccagcatggagagttgggtttattcgacattgggagt

SEQ ID NO: 456571 - DNA, 445 bp, Sorghum bicolor
cgtccgcgaacttcacattgtggtgttctggagttcattgcggaagaaggcatgatctacatgccatattggatgatgcaaaatcttcttctgcaagagggagatatggtgttcataaaaaatgccaacctccccaagggcacatatgtgaagttgcagcctcatacaacagactttctagatatttcaaaccccaaagcaatcttggagaaaactttgcggaacttttcttgtctaactacaggtgacagcattatggtagcgtataataacaagaagtactacattgatatagtggagacaaagccctccaatgctataagtattattgagaccgactgtgaggttgactttgctccaccacttgactacaaagaacccgagccagtaaaacctgctgttcctgcaagcacagagcctactaccgaggctccagcttaagaag

SEQ ID NO: 456572 - DNA, 469 bp, Sorghum bicolor
cgtccgcgcgccctcgacaaccaccacccctagcagacagatcgaccgaccaccacgggcgccaccatctccaccgcccaggccttcttcaccgagttcatcatctccttcaacctcctcttcgtcgtcaccgccgtcgccaccgacacacgcgccgtacgtatatatatacatacatggtgggtgaactcgccgggatcgcggtgggagcggccgtgacgctgaacatcctcgtcgccgggccgacgacgggcgggtccatgaacccggtgaggacgctggggccggcggtggcggcggggaactacaggcagctgtggatctacctgctggccccgacgctgggcgcgttggcgggggcaggcgtgtacacggcggtgaagctcagggacgagaatggcgagacgccgcgcacgcagcgcagctttcgccgctgatcatgacgacgcgcacgggcgcgcgcgagaca

SEQ ID NO: 456573 - DNA, 456 bp, Sorghum bicolor
cgtccgggatgacaacagctggagagcaacagcacacgtgtacaatgagcgcacatcgtatcgccattcccgccagagcaacttaatcctggctgatgcgggctggcactgcagcttctgcttcagggagattaaggagtttgttttcaagatgaaggcatacagccatgcggaccgagtgaagcagaaaagcttcctaaacccagacagaatccagaagatcatatgcaatggggacgacctgtttgacatgctacctgaggagtatacattcactgacctcttcaagaagatggggccgatacccaagtcggcatctgccgtgcatctgccttcccatttgatcaagaacgcagacaagttcaagttcttgcttcctggtgggtgcttgagatcagagtagatcaaagattagctttgttttgtagtcaacagtatttcttttagctgcaatac

SEQ ID NO: 456574 - DNA, 471 bp, Sorghum bicolor
cgtccggtcggtcttcatggctactgatcccgatggaaacgttccattctactggggcgctgataccgatggccgtcttgtggtctctgacgacatcgatctcgtgaagaaggcctgtggaaaatcctctgccccgtttcccaaaggcttcttcttcacgacgtccggggggctgaagagctacgagcacccgatgaacgaggttaagccggtgccgtgggtggacagcaagggcgaggtgtgcggcacgacgtacacggtcgatgcaagcgccaagaaggagaccaagaccagcattccaagggtcggcagcgccgccgattggtcttcacaatactaacaatctgtttatgttggatcggagcaaaggtagcaggcgtggctatgttcatacggaagccagtcctagtgtttatctgaatagactgttctctataaatcaacacacggagtactggtttggcctttcta

SEQ ID NO: 456575 - DNA, 471 bp, Sorghum bicolor
cgtccggctacgcaaacgagaacaggatataatatacgagaggaagctttacaaagagagaagcaaggaggaccacctctttggggacaaggataaatttgtaacatctgcctacaggaagaaacttgaggagcagcaaaagtggcttgaagaagagagaatgaggcagcttccagaagaaaaggaagatgtaactaaaaagaaagacttgagtgatttttacttcggacttgagagaaatgttgcttttggtgcacggacacatggtaacacaaaatgtgctgaccctcaaaagtcggacaatcaaccggaggatacaaatcctagtagtcttgatgctgaagcttctgaaccttctccaaagcgtaaaagagaatccagtgtatgatcggaggggactaacagtatggaagaaccctcggcaagtcgaacgagggattcaacagctgttgcatctactgagaaaaatgc

SEQ ID NO: 456576 - DNA, 429 bp, Sorghum bicolor
cgtccgctttttttttttttttttgatgtatactctcatattcatagcatatcacataaccaagagattttgatccgatctatagaagacacatccgccaatacgaaattattaaaccatcgtcatataaaaagacttcaaactcgcccagaaagcatgagccaccttcttcaaactcgcccagaaagcatgacacatatcaaagcaactaaagtaccagctacaaactactatagaagcggacggaccgaccgcatccgtccgggccttgtcgggggagatccatcccatcagacgggggagaggagctggaagacggagggcttgggctcggagttcatgccgatgacgatgacgagcgggatgaagccgtagtgcgccaccaccttggccttcttcatcggccacgtggtccactcctttacgagc

SEQ ID NO: 456577 - DNA, 452 bp, Sorghum bicolor
  unsure (1)..(452): unsure at all n locations
cgtccgtttctccgcagccgcaccacgccgccggagcagcgcgagacccgaggcgagccacgcgcgcgcgagagagatgaggctcctgacgcacaacatgctggcgtcgaacgtccggggcgcaaccaccggctacccgctgacgctggaggcgaccaagtggtgcaccaaggaggtggagctcaacgccgacttcatccgcggcctcctccccaagatcgactggcgcgcgctcgtcgacgccacccgcgcgctcggcctccccgagctcctccccgaggagcagccccccgaggaggagatcttcgccgagggcgccgccgacgtcgagggcagcgccatccgccgcatccaccacgcgctcctcgaggtccacgtccaggagggttccctcggctgccccgacaccagccgatgcttccccatcaacaagggcatncccaacatgatgc

SEQ ID NO: 456578 - DNA, 414 bp, Sorghum bicolor
cgtccgctgcaatcgttgaacctgggctggtgtgatagcatcactgacaagggagtgaccagcttggcttcaggatgccctgagctcagggctgtggacttgtgcggttgtgttcttataacagatgagagtgtggttgcgctggcgaacggctgccctcacctgcgttccctgggtctgtactactgccagaacatcacggaccgcgccatgtactccctggccgccaacagccgtgtgcgcagccagggcaggggatgggacgctgcagtgaagagcggcggcagcagcaaggaccgggagcgggacgggctggcgagcctgaacatcagccagtgcacggcgctgaccccgccggcggtgcaggcggtgtgcgactcgttcccggcgctgcacacgtgcccggagcgggac

SEQ ID NO: 456579 - DNA, 450 bp, Sorghum bicolor
cgtccgcttttcttttatcatcaatctaggagaatactatatggcttcaatttttcttttatctgctatgagcttgttcgcctgagtttatttattgaatcttttagttattcaaattttcttttatctgctatgagtttagttattgaatctgttagacccgacactcctctgcactcgatgaagcacctcatataggtggagccgaagaaggaggcggcgggccgagcgccatcggtgaggtcgacgtgcgacacctgcgctaccatcaccaagcttgctgggccacagcgaggtgctactagccactacaatggaacggtgtcaacagaggaagatccagcggctctccatccatgttgacctgatgaggatgaccatggtagcactgtatcggatggctgggttccagatcgacagtaccatcgagggctactatgcaccgcacaa

SEQ ID NO: 456580 - DNA, 373 bp, Sorghum bicolor
cgtccggcattgcttatgtattgtagaaatcatacatgatcttccatgaaaaaaaaaaaaaaaaaggggcgggcgacaacatccagggcatcaccaagccggcgatccggcggctggcgaggaggggcggcgtgaagcgcatctcggggctcatctacgaggagacccgcggcgtgctcaagatcttcctcgagaacgtcatccgcgacgccgtcacatacaccgagcacgcccgccggaagaccgtcaccgccatggacgtcgtctacgcgctcaagcgccaaggccgtaccctctactgctttggcggttaggctgattggctttggcttccccttttgcagctgcgacattgtctggccgggcccacaag

SEQ ID NO: 456581 - DNA, 447 bp, Sorghum bicolor
cgtccgctcgctgcagctctcgaccggatagggagcacgccgcacaagcccttccggcctcctttccgccgccgccaaaatggtgaacgttcctaagaccaagaagacctactgcaagaacaaggagtgcaagaagcacactctccacaaggtgactcagtacaagaagggtaaggatagcctgtctgcccagggaaagcgccgttatgaccgcaagcagtcaggatatggtggtcagaccaagcctgtcttccacaagaaggctaagaccaccaagaagattgtgctgaagctgcagtgccagagctgcaagcactactcacagcacgcaatcaagaggtgcaagcattttgagattggtggagacaagaagggcaagggaacatctcttttctaagtttatcatcaccaatgtgtgtgggtctactactggtctaaagacttttt

SEQ ID NO: 456582 - DNA, 374 bp, Sorghum bicolor
cgtccgcaaagtcaaagagatcagacatggctgtcatgattctaagatacttcaatgtcattggttctgacccagaaggcagattgggtgaagctcctagacctgaattgcgtgagcatggccgtatatcgggggcatgctttgacgcagcactgggaatcattccaggtttaaaggttaaaggtaccgactatgaaacacctgacggcacttgtgtaagagattacattgatgtcaccgaccttgttgatgcccatgtgaaggcgctcaacaaggcacaaagaggcagagttggtatatacaatgttggcactggaaaaggtcggtcagtgaaggagttcggtgatgcctgcaagaaggcaactggagtcgac

SEQ ID NO: 456583 - DNA, 392 bp, Sorghum bicolor
cgtccgcatatctagagggtgttgatcctggagctctaggtggaagaaagccatctgatgttctgttcagtaaggaccgctctagatggtacgatggaaggcgagaagtccatatacatccatcatctggtaatcacaactacgaaagctggtcaatatccatttttggtgtttctcgaaaaggttgagacaaccaaggtgctcttacgtgatactagcgtaatttacacatactcactttttttgtttggtggttccatggtaatccaacatcagacaggaatggctgttatagatggatgggtgaggctgtctgctgctgcacagactggtgatttattcaagcaacttcggataacgcacgatgcttttctaaaagaactgactagaaa

SEQ ID NO: 456584 - DNA, 389 bp, Sorghum bicolor
cgtgcggccacgcgtccggcaggctcggtgatgcgctgtaccggatcatcacggacgtggggttcgacccggacgacttggtgtcgacggtggacctgacataggagcacaagattctggacctcaatgaccggatcgaggcgtctgtcatcatctgtaacaggaaggtgcacatcaaggacggaaagtcctcctggggctacgccgtcagccaggagaatagggagcagttcgaggagctggctcagacgctgatgatcattatcaagcacaggtttcccggcatcccgcaggccacgctagacatggcaaagatccaagaaaacagggacgttgggttcgcgctgctggagagctactccagggtgctggagagcctggcgttcaat

SEQ ID NO: 456585 - DNA, 374 bp, Sorghum bicolor
cgtccgcaatcttgcacctaaactaacactgtctccaaacagattgaagcgagattctatatgacacatgtcatctaggagttctattggggtgcgtctaaatggatttcttagcatatggtatattccatgcaaaccgtgcacctatcttgcatcaagattagcactatctgcaaaccgatcgaaccgaccttccacttgagcctgttcaactaggagtaccatcatgtgcgtccaaaatagtttcttagcctatggtgcattaggcacataccgtgtacctatcttgcaccgaaactagtactatcttcacatagaccgtagtgagattctatatgacacacattatttaggagttctatagggtgctttca

SEQ ID NO: 456586 - DNA, 430 bp, Sorghum bicolor
cgtccgcaaggccaatggccgggaaagggtctctgcgatccacaaagccaatattatgaggaagacagatggtcttttcctcaagtgttgccgtgaagtggctgagaagtaccctgaaattcaatatgaggaagtcatcattgataattgctgtatgacgcttgtgaagaatcctggtctttttgatgtactagtgatgccaaatctctatggtgacattattagcgatctatgtgctggtttgatcgggggcttgggcctaacacccagttgcaatattggtgaaggcggcatttgtctggcagaagctgttcatggttctgctcctgatattgctggcaagaacctcgcgaacccgactgctcttatgctgagtgctgtcatgatgttgcgccacttgcaattcaacgacaaagcagaccggatccac

SEQ ID NO: 456587 - DNA, 438 bp, Sorghum bicolor
  unsure (1)..(438): unsure at all n locations
cgtccgggccaaggtgctcggcacggtggtgaccgtggccggcgcgatgctgatgacgctctacaagggcccgctgatgcagctgccgtggaccaccaccaggcacgtgcacgcgtcgtcgccggccgccgaggcccccgccgccgcggagatcagcggcagggactggttcctcggctcggtgttcgtcatcgtggccaccctcgactgggcctccctcttcgttctgcagacgcacaccatcaagcagtactcggggcaggtgtcgctcaccacgctcgtctgcttcatcggcacccttgaggccatcgccgtcaccttcgtcatggagcgccgcacctccgtctggaccatcggntttgacatgaacctgctcgccgccgcctacgccggcatcgtgacgtcgagcatagagtactacgtgcaatgtactgtgat

SEQ ID NO: 456588 - DNA, 389 bp, Sorghum bicolor
  unsure (1)..(389): unsure at all n locations
agggtctagaggatacaagctaacctacccgtccatgccacgcgatagcttatctatagtgtaacgtaaattaaattcactggacggggcgttacaacacaacgactgggcagacaatgccgtgacccaacttaattgaattgcatcacatcccattttcgtcagctggcgtgatatcaaagaggacaggaccgatcggactgcccaacagaagagcagcctgaacggagagtggaacgcgccctgcaccggagcattaaattcagcgcgtggtggggtgacgctcagcgcgaccgntacacttgacagggcagtagcgtacggtcctttcgttttgtttccttcctttcttgccacgttaggcgggtcggctcttcaagctataaatt

SEQ ID NO: 456589 - DNA, 445 bp, Sorghum bicolor
cgtccgctcaaccctcgcctcactgactgcggccttgcatacttctatgaggatacgagtcagagcctgggaccagggtacgaccctccagagtgcacaagctcatcaggttacgttatgaagagcgatgtctactgctttggtgttgtcatgcttcagctattgaccggtcagaagccctatgacagctcgaagcctagagcggagcagtccttggtcaagtttgtcactcctcagcttcatgacatcaacgccttggaagctctggcagatccagctttgcgtggcctatatccaccgaaagcattgtcgcgtttcgccgatgtccttgctcgctgcgtccagtccgacccagaattccggccatccatgtcagaggtggggcagtcgctcctccaatgcgtccagcgcagcaccagcaacaggaggctgggcggcctccgca

SEQ ID NO: 456590 - DNA, 385 bp, Sorghum bicolor
tcgggctacgacccacgcgttcagccttgtttagatccaaaatgtcacctgctactgacactaacagtaggcctgtgagaacgcaaacactgaccgatcattgatttactagaaccaaaaatttaatatgcatgaccactaggtgacttgccgcaggacattatctatcacagtttccaaaacaactacttcatgcgcgtggagattgcgcggcaggagacggaccacggcgagtccccccggaggagctacctcaaggccacccggcacgtggcgcggaccgagaaggacgcccaggtgcgcctcaagctctacgatccggccgagttccatgtcgtcaacccgaccaagaagacgcgggtcggcaaccccgttggctacaagc

SEQ ID NO: 456591 - DNA, 141 bp, Sorghum bicolor
cgtccggcctgagcgggatcctgatggtgaagggcacggcctactcccacctacgggaggcccgcgagaacgaggacacgcacggcacgctgctctccgagaacgtcatcggcgtcatccacgaccactacgtgacgttcc

SEQ ID NO: 456592 - DNA, 451 bp, Sorghum bicolor
cgtccgggaaaaccattgtatgttgcatttgcacagcgcaaagaagatagaaaagcgatgttgcaggcacagttttctcagatgcgccctgcagtaccaatgacacccactttagccccacggcttccaatgtaccctcctatggctcctcagcaactcttctatggacaagcaccatcagatcccacgcgtccgcgggcaacgaggacctcaagtacggcatcggcctggagagccacttcgccaagcccaacatcccctacatgaggggctcactggacacgctggcggcggccaaggtgcccatctggctcaccgaggtggacgtcaccaaggggcccaagcaggtggagttcctggaggaggtgatgaggggagggttcggccacccgggcgtagagggcatcgtcatgtgggcggcctggcacgccaagggctgctacgtcatgtg

SEQ ID NO: 456593 - DNA, 451 bp, Sorghum bicolor
cgtccgctacatttgtgccactgctgagcgcttctttgctgtaggcagtgttttagcaaacatggttgtttcacttgctgatcaaccctccacaaggctgctgaagcacatcattcgctgttacctcaggctgtcagataaccctagggcctgtgctgcattgcagagctgccttccagacatgctcaaagatgggacattcaataactgtcttagggatgatccagcgacaaggcgctggctccaacagctcctgcacaatgtgacaggcggaggcatgggaggaggtcctcaaccaggcatggatcccatgaacatgggaatatgatatgcggtctagacgttgcaattcacgtcaataacacagcacctctcagtgaattgcaactagagaagatctggccactgtccagaagaaacttaatatggtctgactttctgccggggtaaa

SEQ ID NO: 456594 - DNA, 457 bp, Sorghum bicolor
cgtccgcaatcgccgccgagaagggggagggaaggaaaaaaaaaagggaaatcgacggcggcggccggcggcgagaacagcggcgcgggcgagggggagttctacctgcggtactacgtggggcacaagggcaagttcgggcacgagttcctcgagttcgagttccgccccgacggcaagctccgctacgccaacaactccaactacaagaacgacaccatgatccgcaaggaggtctttgtctccccctccgtcctccgcgaggccaggaggatcatccaggagtccgatatcatgaaggaggacgattgcaactggcccgagcccgatcgcatcggtcgccaggagctcgagatcgtcatgggcaacgagcacatttcattcaccacttccaagaacggctccctcgtcgatgtccagaccagcaaggacccggagggccttcggatcttctact

SEQ ID NO: 456595 - DNA, 447 bp, Sorghum bicolor
cgtccgctcgtccgggtcgtcccactcggatcccgagagcatcgccgagtccagcccgcacccggggccgcccatgaagaagaaaaagaaggttaagaagccggcgccccccgcgcctgctgcctctaccgacgacaatgaccgcgacgcagactacgaggaaggcggcgagcgcgcggagccgcagggcggcgccgtcaggaggtgcacgcattgccagatcgagaagacgccgcactggcgcgcgggcccgctgggacccaagacgctctgcaacgcctgcggcgtgcgctacaagtccggccgcctggtcccggagtaccgccccgcggcgagccccaccttcgtgccgaccatccactccaactcgcacaagaaggtggtggagatgcgccagaaggctgtccggagcggcgacccgtcgtgcgacctcctgcagttcatccg

SEQ ID NO: 456596 - DNA, 443 bp, Sorghum bicolor
  unsure (1)..(443): unsure at all n locations
cgtccggattgttattgcttaatccaaatgaaggctgagtacatggaagcacttggtcttctaaataaaaggaaataaactccataagtcccctaattcttgccctcttcaatcctcttaactctttgccttcatgctgatacctggatggtgctgctgctggcgccattcatggtgatccctgcaatattgttgccgctggcgccatctatggagtaataatggtggcctcacatgacatctttattcactgctttgttattaagatgtaagccaatattgctaacagtgcacacaaaattcttggcaggctctatgcattcgatgttcactgtaactcgttctttcctgcgtttgtcatcctatatgtgctgcagtattttctgtcgcctttgttggtcgcacatggcttctttccagctntgttatctaatctactcttc

SEQ ID NO: 456597 - DNA, 414 bp, Sorghum bicolor
cgtccgcccacgcgtccgcaacaaactgatcaagcacggtgataagatcttggatgaagcaaacaaggtcttcctgggatgcacggtacagctggcaatcaaagtctctggcatacactggtggtacacggttccaaaccatgcagctgagctcactgccggatactacaacttagatgacagagatggctacagaaccatagcacacatgctaacaaggcatcctgcaagcatgaacttcacttgtgctgagatgagggacaatgagcagagttcagaggcgaaaagtgcacctgaggaactggttcaacaggtgctgagtgccggatggagagagggcctaaatctggcatgtgaaaatgcactcagtcgatatgatgcaacagcttacaacaccattctcaggaatgcaag

SEQ ID NO: 456598 - DNA, 458 bp, Sorghum bicolor
cacgcacacgcaaccgtagtggtctacagctatcgtctctcccgtggtcaacttgcggtcagggaccgttcctcccacgcggggtgccctctcccacgccgcatcccctctcgctgtccatccacgcgaagctgcgctccatcgccgcggtccaggagacgtcgtcggcggcgacagcgagctcctcggcgagcatctcgtgcatccggtccacgccgcatcctctctcgctgtccatccgcgcgaagctgtgctccatcgccgcggtccaggagacgtcgtcggcggcgacagcgagctcctcggcgagcagctcgtgcatccggtcccggcacgcctcggcgacgtgcgagcagccgtggccgtcgaacaccccgtagaagtcgcgcctcccgccgtgggagccctccgcgagcgcgaacgcctcgcgcacggacacgacgtcctccatctccctc

SEQ ID NO: 456599 - DNA, 446 bp, Sorghum bicolor
cgtccgctaccctcgtctcaccctccctcaccaaataaggtcctgccctttcccgacattcacaggggggcagaggggaaaacacattcatccggcggccatggcctcgattctggtgacgacgaccaccgccaccgccatcctcttatgcgtcctcttctgtgccgcggcggctaacaccaccgtcgccaacgaccccacaaagcaagaaaaccccgcgcaaggactgcgaccagacgcagccgctcagggaccgcgccggcgtcctgctcaccaggaacgtcggcatcgcagacagcctgcgccccgccaacccgctcggctacttcaaggatgtcccgctgcccgtctgcgctgcgctgctcaagcagctggactccgacaatgacgacgatcagtaaagatcacatactggtgacgacgaccaccgtggtcgtcgctgacag

SEQ ID NO: 456600 - DNA, 415 bp, Sorghum bicolor
cgtccgctcaatcccccccacccagcccaaacaatggcgtcggacgggagcggcgtggtgacgttgtacgggaacaacggcgcagcccttctgagggaccactcaagggtatcatgggctatgtggaggaggatttggtttccaccgacttcgttggtgacagcaggtcgagcatcttcgatgccaaggctggtattgccctgaacgacaacttcatcaagcttgtctcgtggtacgacaacgagtggggctacagcaaccgtgttgtcgacctgatccgccacatgttcaagacccagtagagagctttccgtagcatcccaatggccttggtctttctgctttccatagcatcccaatggccttggtcgctgtccatcccgctgcttgtctatgctgagaataaatgtgaatg

SEQ ID NO: 456601 - DNA, 476 bp, Sorghum bicolor
cgtccgcccatatggctggtggtatggggttgttgggcacttggagtcatgtgatggaaatgaacacttttgtcggtgtcatcttagtgataccgtcgtgctggagttcaatcagtacacgccaggctcaagatggaggcaagcgttggtaaatcggaaggaacacagggaagagggcaatgagggcgacgggttctacggcggtgtcaggaagctccgcagcaaggatgacatctccaagtggaggcagctgtggccaacagacatcctggagtagcaagaacacatatattacttctcacattgggattgatcgattgctcaattgacatgccttccattgaccattgctttgtgctctgtccacggccaattcctctgctgcgctgttgtacacggattagaacacaaggtggcaacaaatcctgtagctggacaagggtgtaaacttattgtcaggcattaccgggcgcaga

SEQ ID NO: 456602 - DNA, 442 bp, Sorghum bicolor
cgtccggcatgacaacaaggacaagcagaaggcgctcaaggccgtctccgtgctcgtcggcatcgacgccatatcggtggacatggcggcgcacaagatgacggtgatcgggacggtggacccggtgcaggtggtgagcaagctgcgcagcaagtcgtgggcggcgcacctcgactccatcggcccggccaaggagcccgagaagaaggaggagaagaaggaggagaagaaagaggagaagaaggacggcgacgggaagaaggaggaaggggacggcaagaaggacggcggcgacgggaagaaggaggaaggcggcgagggaaagaaggaggaagcaggtgatggcaagaaggacggcggcgagggaaagaaggaggacggagatggcaagaaggaggaggacggcaagaaggaggaaggcaagaaggaggacgagaaagag

SEQ ID NO: 456603 - DNA, 428 bp, Sorghum bicolor
  unsure (1)..(428): unsure at all n locations
cgtccggtcagcttcgagctcctccccggcctcctccaccgcgtcgcgaggacggggatgtgggagtgcatcgacttctaccccgtcgccacccgcggcaaggcgtccgggaacggcgtcgacatgtccgacgccttcggcaagaacggcgccattgttggggacgtcgtgcacgttatgaaggccagcatggacgacgaccgccatgactactacgcgctcgggaggtacgatgcggccaccaacgagtggacgccgctcgacgccgagaaggacgtcggcatcgggctccggtatgactggggcaagttttacgcgtccaagaccttctatgaccccgccaagcgccgncgcgtgctctggggatgggtcggcgagacccgactcgagcgcgctgacgtcgccaagaagctcgtcgtccacgagat

SEQ ID NO: 456604 - DNA, 476 bp, Sorghum bicolor
cgtccgcccacgcgtccggcacaagtggaacaaggctggagtggatgacttagttcctcagaagattgtgtggcatcggcggcctcatgacccaccggtccttgtggacggcgggagggattattatggccatgcgcctgctgtcattgagctctgcatgcaagtgggtgcaatagtacccccaaaataccattgcatgatgaagacacacggcttagcaccacctgttcgatgagaccaatatgtaataaagttgactgcctggttagatacaggaactgtatagatcagacaccaaaataattttgtttgcgattgaaatttcttgggtgcaaaagactgttctggaagaagccatcaattaaccgtaatggctagctgaggagatacgccattttgaatatttttattggtatcagaatccaaaaggtgggacttgaaaagaaaagttttcaggtcagtagcagacacaacta

SEQ ID NO: 456605 - DNA, 365 bp, Sorghum bicolor
cgtccggttacttgatcagctctttgatctcaaaagcaaggaacaagaattgcaggatctcaataaagacctaaggaaaaagtgccagctgcaagaaacaagtccagagaatgtgctccatgtttccagctgggaggaaggtgggcacagtggcgcaagtggtaatgttcttgatccttatcagggactccttcagcacccagagagtgatccttccctgcagattgggtaccatcaacaagcctacatggaccagctgaaccaacgaggacatggcgggcccaaatgagcacggtcgatctggatggatatgaaatgctccgatgacgacccaaataaagttgatgcataacaagaatccaccc

SEQ ID NO: 456606 - DNA, 299 bp, Sorghum bicolor
cgtccggccacgccaacttcagcaactacttcacggacgccttctggtcgcacccggcgctcaacggcaccttccacggccgccggccctgctacttcaacacgggcgtcatggtcatggacgtcgacaagtggcgcgccggcgggtacacgcgcagggtggaggagtggatggccgtgcagaagcgccgccggatctaccacctcggctcgctgccgccgttcctgctcgtcttcgcggggcacatcagggcggtggaccaccggtggaaccagcacgggctcggcggcgacaacgtc

SEQ ID NO: 456607 - DNA, 311 bp, Sorghum bicolor
cgtccgctcgggaagtcgaagaatgcgatgctgtcaactttcctcttcctggaccaaattgtgtgggctgggaggacaggaatatacaagaacaaggagcgagcggagttccttggaaggatagcattttattgcttcctcggttcaaacacctgcacaaccattatcgagctagctgagctccaacggttatctgcttcaatgaagaagctagagaaggagctgaaacaccaagagttgtacaagaatgagcagtaccggatgaagctgcagaagtcgaacgagcggctgctggccctcatcaagtcgag

SEQ ID NO: 456608 - DNA, 460 bp, Sorghum bicolor
cgtccgctcctgttgtcccaactgagcggtaaggacattaccgagctcattgctgcgggcacgacgccaccccgctcggcgcgccgctgctccggccagccacctctccccgccacagcggtgccttctccaccttcctgcggtggcggatcccccaccttcccggcgatgcggcggcccctccaccttcctggcagccggtcctccacctccgcgcgcagattgcgtccccatgggcgcggcggcttcgcatccccaaccaggggcggatgccgctcccggcaacggtatggcttaccctgccccttcccgaaaccggcggcgcgccggcttcccctgtggtcctgtggccatgcgactcacccggccccttgcatatgccctcacggcggcgctcattcatcatgtggcagtggcccggcacctgtcgtatcttcggcggtgacagtatcttgagaaa

SEQ ID NO: 456609 - DNA, 340 bp, Sorghum bicolor
  unsure (1)..(340): unsure at all n locations
gcgtaccgaccgggtttcgaccaggcgtccggcacagtggatagcggagcatgcaggtgtggccggcgtacgggaacaagaagttcgagacgctgtcgtacctgccgccgctgacggaggagcagctgctgaagcaggtggactacctgctgcgcaacaactgggtgccctgcctcgagttcagcaaggaaggcttcgtgtaccgcgagaactccacctcgccgtgctactacgacggccgctactggaccatgtggaagctgcccatgttcggctgcaccgacgcgtcgcaagtctacaaggagctgcaagaagccatcggctnctacccggacgccta

SEQ ID NO: 456610 - DNA, 416 bp, Sorghum bicolor
cgtccggtcgaggaggcgctcggctacgccaagctcgcgctcaagtgcacggagatgcggcggagggaccggccggacctcgctactgtcatactgccggagctcaaccggttaaggaaccttggccacgcgtacgaggcacgcatgagcaccgccggggccaacggcggaagtgccgaaaacggtgacctggtcagcgcgacctcgacgacggtgggtggttcttggaaaacggcggagagctagcgggaggtccggtgtggccctgtgtcagttagagagcgagcttttgtacggagaggagaagtgtccattgaacttaacgttctttttatggatggagatcgagttttttaaaaaaaaaccaaaaatcttgtggtatgtacagtcttctgtctatgagaaatactaacacg

SEQ ID NO: 456611 - DNA, 451 bp, Sorghum bicolor
cgtccggcgacggcatggggacctggatttggccgccgtcaggaaggacgccgtcgattggatttggaaggtcactgagcattacaatttcgcaccgttgactgcagtattgtctgtgaactacctcgatagattcctctccacgtatgagtttcctgaagacagagcttggatgactcagctcttggcagtggcatgcttgtctttggcttcgaaaatggaagagacttttgtgccactccccttggatttgcaggtagccgagacaaggtttgtttttgagggaaggaccataagaaggatggagcttcatgtgctgagtaccttaaagtggaggatgcatgctgttactgcttgctcatttgttgaacaatttcttcataagttgagtgatcatggtgcacccttcttgctcgcacgctctcgctctttcgatcttgtcttgagcact

SEQ ID NO: 456612 - DNA, 399 bp, Sorghum bicolor
cgtccgagcgcgctcgccgaccacgcgcgcagcgatggattgctgcacacgctctgcgggacgccggggtacgtcgcgccggaggtgttccggaacaagggctacgacggcgccaaggccgacatctggtcgtgcggcgtcatcctctacgttctcctcgccgggtcgctgccgttcccggaggacaacatcgccgccatgttcaggaagatgagccgcggcgactaccggtgcccgccgtggctgtccaccgaggcgcgcatgctcatccccaagctgctcgaccccaaccccgacacccgcatcaccattgcccagatcgtcgagacgccatggttcaacaagccatccatcgccaagcccgtcaaagcctttcgccgccggccgcggcgagccggc

SEQ ID NO: 456613 - DNA, 473 bp, Sorghum bicolor
cgtccggatcacttgatcatgaagagcaggatgtgaaaacattttcatcttggggtattgattatctgaaatatgacaactgcaatgatgctggcaggagtgtaatggagagatatactaaaatgagcaatgctatgaaaacctatggaaagaacatcttcttctcgttgtgtgaatggggaagagaaaatcctgctacctgggcaggcagcatgggaaacagctggagaacaactgatgatatcgctgacaactggggcagcatgacatctcgtgcagaccagaatgacagatgggcttcctatgccggacctggtgggtggaacgatcctgatatgcttgaagtgggcaacggtgggatgtctgaggcggagtaccgttctcacttcagcatctgggcacttgccaaggctcctcttttgatcggttgcgacgtacggtcgatgagccagcagacaaaggacatactcagc

SEQ ID NO: 456614 - DNA, 352 bp, Sorghum bicolor
cgtccgggggccgtggggaccaccaccaccaccggcaccggcacctccatccgcgcgcctctcgctctcgctggtggtgctcctcctgctcgcggggccctcctcctgctggtgctgccagggccgggagggcggcgcggaggtggcgcgcatggggctcgccggggacgggtcggcggacaccgcccaacacctcagtaatagtgaaaatgggcggttcagttatggagttgcgagttctcctgggaaaagagcatcgatggaggacttttatgaggcaaggatagacgacgttgacggagagaaagttgagatggtcggtgtatatgatggtcatggaggagtcagagca

SEQ ID NO: 456615 - DNA, 384 bp, Sorghum bicolor
cgtcacgtgttctaagatacgcggacggagatgtacacagaggacctcataagacctccagaggaagagggagagtctcttgcaacagatgggcgatccttctgcgattaggcatgtgccatatgtcgagctgtcactggcagacgtagcagctcacattgagtctgtgacggagaagatcataatggaggaagagaagatgaagaagtggaagatggagaacttgaggagaaagcataactacgcaccgttcctgttcaatttcctcaagaattttgaggagaagcagcagttgaagcccctgatagagaaggcaaaggcgaggcagaagtctcacggccccagtcctaggtgaaagcctgcattacacctactgtctctttt

SEQ ID NO: 456616 - DNA, 418 bp, Sorghum bicolor
cgtccgggcacctttgttgcctcctctttggctgtccggagaggaggagaaggaggccgcaccaattctatctgggagcgcgggcgggcggacgaccaaaataaaaatgccacgcggcggcaagcccgcggcttcgtcgaagccgaaccccttcgactccgactcggactcggagtccaataataagccggcggcgaagaagtccggggcgtaccaggcccccgccgacgccaagaagcggtacaaggacgggttccgcgacgccggcgggctggagaaccagtcggtggaggagctgcagcactacgccgcgtacaaggccgaggagaccaccgacgcgctcgagggctggctgcgcatcggcgaggacatcaatgaagacgcgttcgacacgctcgtcaccctgcacaagcaaggg

SEQ ID NO: 456617 - DNA, 296 bp, Sorghum bicolor
aaggcaaggaagagctcgtcgatcatcaagaagatagccatcgacgtggcttacaccttcctccgcaagaactgcaggggacctgccgtggcgctcaacattccgcacatcagcctcatcgaggttggcatgatctactacgtctagcccagcagcttaattttattttatgtgtacgtgttcatcagatgattcagttgtttgaactgaggctaatttaattaggtttgagggtggattatattcttcagtgtgaataaacacaacattgtatgaagtgaagtcccttctctcac

SEQ ID NO: 456618 - DNA, 419 bp, Sorghum bicolor
cgtccgtgagaactgggtggccaaggtttccgactttggtttatccaagactggcccgacggcgatgaaccaaacgcacgttagcaccatggtgaagggcagctttggatatctcgacccagagtacttccggcggcaacaactcacagagaagtctgacgtctactcgtacggtgtggtgctctttgaggtgctctgcgcacgccctgcactgaacccgagcctaccaagggagcaggttagccttgccgaccatgccttgagctgccagaggaagggaacactacaagatataattgatccggtattgaagggcaagatagcaccagactgcctgaagaagtatgcggagacggcagagaaatgcctggctgaccatggagtagaccgaccttcgatgggcgacgtgctatggaatc

SEQ ID NO: 456619 - DNA, 418 bp, Sorghum bicolor
cgtccgatcctttctccaccaccgttccagccctctccaggcgccccgcgtcgcggagccgcctggatccgcctccggtctcctctcctcctggtcgccttcccccctttccccgcgcgtgtgcgttggccggctgggttcccgatgagggggttgctggcggtggaaggcccaggcgcggcggcctcggcctcggtgctcaacggcgcttgggaactggggccgtaacgtcaacgagtcgccgctgtggaagaaccgcatcttccacgccctcgccgtgctctacgggttcttgttcgtcgtcgccctgatccaatagatcaaaatacagtccagggtgccagagtatgggtggacaacgcaaaaggtgttccatttcctaaacttcctcgtgaatggagtgaggtccgtcgtgttc

SEQ ID NO: 456620 - DNA, 438 bp, Sorghum bicolor
cgtccggtcgaggacggcgctttctcaaatccgacaaacttcagtatcttttcgacttcatagacatcggcaggactttcaagccaggaacttatagactggtgaggtcttatcccaggcgtgctttcactgaaggggagagccagatgtcattgagtgatctcggtctgactagcaagcaggaagctctgttcctagaaaaactgtcagcgtagagtataaggttttagagttatggttgagtaatgtgcacttttaaattgaagtcataccaggcgttgtgtttacgaaatactccggcggttgaatggttactcatatctggaggagatcccgtcgccatcttttgtgctcttaaacgcaggtgtttctctgactcggtagcacactcaattctcatggccacatttaaagtgcagatgtacactcaattctcag

SEQ ID NO: 456621 - DNA, 452 bp, Sorghum bicolor
  unsure (1)..(452): unsure at all n locations
cgtccgggcgatcatgtccaacgaggagttcgaaacaaccttctgtctgaccttccgtgtgtgaaacgtcctgaagagccaaaatctgtgtacgtgggaggggactatcgctgccaagcagattctccaagcacacacattgcacttgcttttgaggtgccaggaggctggaatcaagagaaaactgcaatggttgtgacggtgctccagatgctcatgggaggaggagggtccttctctgctggtggacctggaaagggaatgcattctcgattgtatctccgtgtcttgaccaacttccaacagattgattcattctctgctttcaacagtgtctataacaattcaggcctttttggaatttatgcagtcactagcccagacttttcatcgaaagctgtggatttggcagcaggggaactcctggagatngcaactcctggaaaagttac

SEQ ID NO: 456622 - DNA, 260 bp, Sorghum bicolor
cgtccggcggcagtactacggcgggtccgcgaacgcggcgctgggtgccgcggtgggcgaggaggagcggctcgcgagcgcggtacggcttccactggacgtaacgtagcgcgggctgcgcgtggtggtgacgggcggtgactggttcgtgggcagccacctggtggaccgtctcctggagcgcggtgacagagtggtggtggtggacaacttcttcacggggcggaaggagaacctggcgcaccaggcctggaacccga

SEQ ID NO: 456623 - DNA, 427 bp, Sorghum bicolor
cgtccgaaaaaaaaaaaaaaaaaaaaaaaaaaaaaaaaaaaaaaaaaaaaaaaaaaaaaaaaaaaaagaaaaaaaaaaaaaaaaaaaaaaaaaaaaaaaaaaaaaaaaaaaaaaaaaaaaaaaaaaaaaaagggggcggccgttttaagggatccaagtttacttccccgtgcttgcaacgtaatactttttttatggggcccccaaaattaaattcacgggccggggtttaacaacgtcgggacgggaaaacccctggcgttcccaaactaaatcgctttgaaaaaaatccccttttccccagttggggtaataccaaaaaggcccgccccgatcgcctttccaaaaatttgcccaccctaaatggcaaaggggaccccccctgtaccggcccattaagcccggggggtgtggtggttccccccag

SEQ ID NO: 456624 - DNA, 367 bp, Sorghum bicolor
cgtccgggcggcggcggggaggcggaggcggaggcggaggcggaggtggagttctttgcggtgtacgacgggcacggcgggccacgggtggcggacacgtgccgggagaggctgcacgtggtgctcgcggaggaggtggcgcggctgcacctgcaactcgggaaaggcggcggcggcgacgacggcggcggcgtgctgcggcgctggagggaggccatggaggcctgcttcgcccgcgtggacggcgaggtcgtggtggtggagcgcgaggtgaacaagaacaagaacaacgccggcgacacggtgggctgcggctccaccgccgtcgtggccgtcgtggggccccgtcacatcgtggtggccaact

SEQ ID NO: 456625 - DNA, 443 bp, Sorghum bicolor
cgtccgcgccattattacacacgctatgactatgagaacggtgacactgtggctgctaaggagctgatggcaaacctagtcagcatgcagacatcactttctgatgtcaacaagctgatcaaggagatccggtctgatgtttctgaagtagctgcagatgacagagtttgagtacaaggatctctggcgacggctctgcgtgcaagcaccaaggcatcctgtacctcttcggagatggaacgcgactgatgttccgcctctatggaactgggtctgttggtgccaccatccgagtctatatcgagcagtcccagaaggattcctccactatccggcagggattcacaggatgctattgctacgctggatgatgttgcgctcaagctatccaagatgcaagagtacactggccgttctggctccaccgatatcacataaatttt

SEQ ID NO: 456626 - DNA, 389 bp, Sorghum bicolor
cgtccgccgacgagaagttcgtggacgtcgagctctcggaggagacgctcgtcgacaccgtggggctggccaacctggagcactactcctccaacttcagggacttcgaggtgtacggcagcatgagctacccgacggaggcgtgggagctgctgggacggttcaccgccgagaacgccaagcacgcgcagcgattcgtgctgccggagcccaggtggacgcgctacctccagctgcgcctcgtaagccactacggctccggattctactgcatcctcagttacctcgaggtctacggcgtccacgccgtcgagcggatgctgcaggacttcatcgctggcaatggcgccggcgcctgcaccgaagacagcccatgcaaggaccgtgcc

SEQ ID NO: 456627 - DNA, 413 bp, Sorghum bicolor
cgtccgatcgtgctcttcatatgcacaaggaagtgcgctccccggatgtcagctcggtcttctggaaggagagaagttacactcttccaagatattggtgtcccaatcacttatgagactgttgttcgagccactggaagtttcaatgcaagcaattgcattggaagtggaggctttggagccacttacaaggctgaaattgcaccaggagtgttggtagctattaagaggctctctgtcgggaggtttcagggagcccaacagtttgatgctgagataaaaaccctagggagattaagacatccaaatcttgttaccttggtaggttaccatcttggcgagtctgaaatgtttctcatatataactacttgtctggaggaaaccttgagaggttatacaggagagatcgaag

SEQ ID NO: 456628 - DNA, 382 bp, Sorghum bicolor
cgtccgagagagcaaggcgaaagaactgaacgtcatgttcatcgaaaccagcgcgaaagccggcttcaacatcaagccgctgttccgcaagatcgccgcggccctgccgggaatggagacgctgtcggcgaagtctgaggacatggtggacgtgaacctgaagcccacttccagccagtccaactcgcagcagcaggcggggagtggatgcgcgtgctagaagagtgctaactctgcacatacactggcttgacaaacgtgttgttaactgttaagcagttatatcagttctgttactgctgtccttaattccctgattacctgatgcttcttctgtagtgagtcttactttgttttctcgatcatgtgcatctcgattttt

SEQ ID NO: 456629 - DNA, 421 bp, Sorghum bicolor
cgtccgcacccatggggctcacgcatcatgtagaaaatgccatagagagaggagccttccaggagatacttgacccgacggtgacagactggccggtggaagaggctctggaattcgcaaagctggcattgcggtgcggcgagctacggaagaaagacaggccggatcttggaaaagaaatcttgccagagcttacgaggttgcgtaatcttgggcatgattatgagacttcccaggttagcagcgcaagtacaaactgttcaagctccgcaccatacagtttcaataatgatgacatctaaataccatgagaacgaatcttctgccggattaagcaaatcaggcataattataacagtatagagcatagacagacatggacatgatgatcagaaatcagtcctaacttagatgagatgat

SEQ ID NO: 456630 - DNA, 275 bp, Sorghum bicolor
cgtccgcaggcgcttcgcgagcttcgaccgcaggcagtggtgggaggcgtacaatgcgctgcgtgtgctcgagcacctactgacgcacggtccccgcagcgtcacggaggagttccagaaggacagggaggccatcgagcagatggccaccttccagcacatcgacgagaaaggcttcaactggggccagacggtgaaaggcaaataggagcgcgtgctcaaactgataggacgcgtgccggtactggaggaggagcgcaagcgggcgctcctga

SEQ ID NO: 456631 - DNA, 439 bp, Sorghum bicolor
cgtccgcccacgcgtccgggaaaaccagagctcctgcccgttcctctctccctcctcacggcgggctacgctgactgttccgtccatccaccgccccggtcgtttctctcccgtccagatccctctcctgcaaggtttctttgagagtgggcggacaagatgatgggcgggttcctctccagggtcctcctgttggcttttggctatgcctatcctgcctatgaatgctacaagactgttgaactgaacaaaccagagattgagcagctcatattttggtgtcagtattggattttagttgccctgttgacagttttggagagatttggagattttacaatatcatggctaccgttttactcggaagcaaagctgatgttctttgtatacttgtggtaccctaagacaaagggaactacatatgtttatgggactttct

SEQ ID NO: 456632 - DNA, 428 bp, Sorghum bicolor
  unsure (1)..(428): unsure at all n locations
cgtccgcaccaagcggtgctggcacggggacccggcgcagcggccggcgttcgcgtccatctgccgcgtcctccgctacgtgaagcggttcgtggtcatgaacccggcccccgcggagcagccggacgcgacgccgccgccgccgcccgtgccgcccgtggactacctcgacgtcgaggcgagcctgcagaggaggttcccggcgtggcagtccggaaacgcggcgccgcgcgtctccgacgtgccgttccagatgttcgcgtacagggtgatggagaaggagaggaacagggcggccatcctgcacatcggcggcggcggcagggacaagggcctncgactccagcagcgaaggcaactcgctgtgcggggacgagagcggcagcgcgacgctgtcggacgccgatgctctgtccgtgttgagccgc

SEQ ID NO: 456633 - DNA, 437 bp, Sorghum bicolor
cgtccgaggcagaccaaagtactgtctttgatgaagcaaagaggcatttctagcagatatataccacatatggcatcttctgggcggatcatccatccaggcacatgcaataagcctaactcaaatggaaattgtgaccatccatggtgcagtactccaattcttgtcacctcaccagttggtcagactgtttcaaatctgatacggaatggattgttcggtgttgaggaggcactgagatgttgccatgattgtttatcctctcttgctgcagcagcatctgcaggagtccgtcacagtgatatccggccagagaatgtgatccgtgtcagtaatggttcaggtgatccatattttgtgcttattggatggggtcatgctatcctagaagatagagaacgacctgtgatgaatctgttcttctcatctacgtttgc

SEQ ID NO: 456634 - DNA, 390 bp, Sorghum bicolor
cgtccgaatatttgtttcagccggtttctcatcaggaaatacaggaatgctcgctatggttgctgttcagattccgatgaccggactaggagtacttctaatggacaaagctggacggaggccacttttgatggtatctgcagctggaacatgcctgggttgcctactagtcggtttgtcattcttagctaaggaacatcactggggaaaggatctgaacttagtgctggctttggcaggcattctgatttttggcggatctttttcactgggtatgggtggaataccatgggttataatgtcagagatctttcctataaacatgaaaggagcagcaggaagccttgtgacactcgtcagctgggctgggtcgtggattgtctcatacgc

SEQ ID NO: 456635 - DNA, 415 bp, Sorghum bicolor
cgtccggctagggagaagctctgcgacgccgtcggggacctcaagatcgattccctcgtcatgggtagtcgcggcctcggcccgatccagaggattctcctgggaagtgtgacaaactacgttctgtcaaacgcatcatgtccggtgacagtggtcaaggggaagtaatgacctgggcagcctgccagtgatatggctaaagtttttttattgtcgtgtcttttcttccccttgaatcttgatgccagtggtcaaggggaagtgatgaccggtgacaacaaaaaaacttgttatttagcgttcagtttgtgtggtttacacatttatgttcggtattgtttctgcatttgaataaagtcttgttatttatgatgttgcagctttcgcaaatccagctgaggctctgaccttatct

SEQ ID NO: 456636 - DNA, 241 bp, Sorghum bicolor
cgtccgctggactcgccggcgcgcgcggcctccatcatgcccctgtacagctcctcgaccggccgggccacgcggtccgggtcgaccacctcgccgccctcggcgaccgtgagcacgcggtcgggggacccgtccatgcgctcgtacgggggagcgtccctgtcgcaagcgagcgcgccggcgtcgcgcgcgagcgcgtacacggggctcccgtcgatgccctgaatccacgtggcgccca

SEQ ID NO: 456637 - DNA, 436 bp, Sorghum bicolor
  unsure (1)..(436): unsure at all n locations
cgtccgggacgacgtgcgcaagctctggtccgtcnacctgggcgatcgccacgtggtggcggcgcccgagtactgccacgccaacttcaccaagtacttcaccgacgccttctggtcggacgaggagctcagcgccgcgttccggggccgccgcccctgctacttcaacacgggcgtcatggtcatggacgtggcgcggtggcgacgcggcgggtacacgcggcgggtggaggagtggatggcggtgcacaagcggaagcggatctaccacctggggtcgctgccgccgttcctgctggtgctcgccggggacatcaggcccgtcgaccaccgctggaaccagcacgggctcggcggcgacaacgtggaaggcaggtgccggagcctacacccgggccccatcaacctgctgcactggagcggcaagggcaagccg

SEQ ID NO: 456638 - DNA, 424 bp, Sorghum bicolor
cgtccgctctacatcagtgttccgcagtgcaggcattgcatctgatgttgctgctagtgctctgggtggagcagccaatgtttttggcaccatgattgcatcttctctaatggacaagcaaggaaggaaaagccttctgataacaagcttttctggaatgggtgcttcaatgctactcttagcattgtccttcacctggaaagctctggcaccttattctggtactcttgctgttgttggcactgttctgagctggtcctgttcctgccctacttcttcctgaaatatttgcctctagaataagggccaaggctgttgcattatctctaggcatgcactgggtaatcaacttctttattggcctgtacttcttgagtgtcgtcaacaagttcgggatcagcaatgtatatttgggaattgcatc

SEQ ID NO: 456639 - DNA, 317 bp, Sorghum bicolor
cgtccgcccacgcgttcgcggaagaatatggagataaaggggaaagtttcagctctaactaaggtggaacaagatgtaacaaaggttactaaccttaatgcttttgacattatttctctttcagaaggcttcaatctttcaggcttgtttgatgattctgagaaaagaaaagagacaaggttcacatctagtcaaccagcttcaactattatctcaaaactagaagatgtcgccacctgttcaaagcttacagtaaagaagaaagaaggtggtgtgttaaaaatggaaggtgaaaatgaaggaaggaaaggtgtact

SEQ ID NO: 456640 - DNA, 354 bp, Sorghum bicolor
cgtccgggaaacctcagctgctgctacctgtttcattccagcaaatttttatttggttcaaagggaagatgatggagtggccgccgccatcaacgtcgccgtcgccgtcgctggtggtgcgcagccccagacagacggtcagcctgatccgcaaccgccgaccccaccgcgactgggccccctcctcgaggtccccctccttcgccgcccgcgaccatggccccaagccgtcggaggtgtacggcttcgtcggatccatcaccacagtcatcgccaccgctgtctacctcgcctgggcatacacgcctgagcccgtgctccggtctctctgcattacctactaccctagcaagc

SEQ ID NO: 456641 - DNA, 406 bp, Sorghum bicolor
cgtccggcttgatctaacccctctacaggaacagagactgcaaaacttgaaggaaaggctaaatgtgaccttatgacgaaaatcggcatgaacatcaagtgacaaactctcgacttaattaattaccttattgactttcagccaatcttgacttgtttacactgtgtgctttggatttaggaatcgcttagggctctttggaaaatctcctttcctgatacagagctcactagctttgtttcagcgcagtggaaagaaatggggtggcagggcatgaacccagcgactgatttcaggggctgtggatatgtttcccttgagaaccttctattctttgcaagaacatatccggcttctttcaagaggttgatgctgaagcagcaaggaacgcgagctacatgggagt

SEQ ID NO: 456642 - DNA, 274 bp, Sorghum bicolor
cgtccgagctgattggatactgcgtagaggatgagcaccgactgctagtatacgagttcatgcggcgtgggagcttggaaaatcatctgtttaggagaggctcatacttccaacctctgtcatggaaccttagaatgaaggttgcacttggagcagcaaaaggactggcttaccttcatagtgcagaggcaaaagttatttaccgagattttaagacttccaacatcctccttgacacagattattctgcgaaactttctgattttggattggc

SEQ ID NO: 456643 - DNA, 395 bp, Sorghum bicolor
cgtccgcgcagggattcatgctacccggaagagcattacttccccacactgctggatatgcaggagcctgagggttgtactaagtataccctaacaagggtaaactggacggattcagttgcaggacacccacacatgtatgggcctggagaagtatccgcgagcttgatcagggagctaaggaagtcgaacatgacacactcttacatgttcgcccgcaagttttctccagagtgccttgagcctttgatggagattgcagacaaagtcatcctacgtgactagtctgaagcaaccaccatttgacggtcggaagttgtacactgaaatgaatgagaacttcctctccttgtttcaagcatcgaaggaatgttagactgtaatgctactttcac

SEQ ID NO: 456644 - DNA, 258 bp, Sorghum bicolor
cgtccgccgctacgcgctctccggcaaggcctggaacaacatcaacaacaagacggcctttaccgagcgcaccgacttcgggaagggccaaccggaaggcccatggggcaacgggccaaaggaccttgaagggcttaaacaaggcaccggcacctccgaccttctttgcgacaaccagggctaccgagagctgtgcgagctcgccgaccaggccgtcaagcgcgccgaggtggccaggctcacggagctgcacacgct

SEQ ID NO: 456645 - DNA, 341 bp, Sorghum bicolor
cgtccgaagtcttcggcgtccatggaaaaagaggcatgcgcagagaagaagtacggaggaattgcacccaagaagcctttgatatccaaggaccactagcgcgcctacttcgactctggggactgggtgctgggcatgcaagctgcaaacagcagcacaagggctgctgtcgagtctctgaagcccaagctgaagagaacgcctcaccaccagctgccccctcgttagcccacctgcgctttcagttgagacgacgcacggtcacgcgttgcatctgctggagtggagggagagctcggaggcaaggatgtaggatgcattgccgagctgggataaatgtt

SEQ ID NO: 456646 - DNA, 441 bp, Sorghum bicolor
  unsure (1)..(441): unsure at all n locations
cgtccgggtagtatgagatagctggttttgagactgatcccatccagtctgatagccaccagatgttgggggataagtaccataatgttgctgaggtgcaccgtactgtggtggtgccccatgataagccccaagctgcatataaccatagccaggctgctggggtggtgcataaagcgggccccagtttgactgaagacgaggaggacgatagccctgctgagaatagccaccagacattggattcctggcacgattctcactggtaacctcaatcaccagttgctttgcagattcaatttgttctggagtgccatcaatatgcacagttctttcagttgaagtatcaccagcaggcagatgcaaaggaataacctggatacgagctccagttttctgctgcatcgactntatagtctcaccacctttgccaataaccag

SEQ ID NO: 456647 - DNA, 284 bp, Sorghum bicolor
ttctgcatccccgggaccgacatcaataccttctttgaccgataccagcaagccatcgggaccagcctatggaacgagctgtatgagaatatgcagcgcacgctgagccatctcaaggacatcaatcgcaacctgcgcacagtgattatgcaaaggatgggcgaggatctggacactctggagttcgacgagctgcgcggtcttgagcaaaatggtgatgcggctctcaaggaggttcggcataagaagttccatttgatcgccacacagactgaaacttacaa

SEQ ID NO: 456648 - DNA, 280 bp, Sorghum bicolor
tcgcgtccgagcggtgcgccctctaaggcgagttcgtccacaagcgcctctgccgcaccgaccagcagggttcgttcgcggagcaccggtactacaaggtactgtacaggcgctacgccttccttttattgctcgacggcggagaccatgatgagaatgagctagctatacttgaatgcatacatctcctggcggaaactatggaccggcacttgagctatgggtgcgagcttgacatcatgggacatctagaagaagtgcacttgatgtgggtagagat

SEQ ID NO: 456649 - DNA, 428 bp, Sorghum bicolor
gtccgctcgatatgacatgtatgctagaagttgaagatgcaaaagcttggacagggctttcttgaaaactgtttgttcatggtagtacaacctatcacatgtaaaataacctatggattggttctgaactgatgagcatgcattaacgctaccctgcttcagcgggttgcataacatccccctttcctcatctagccttatttcattttaagccagtgccggtccgtcttcccttctgttgcgctgcctgatctgcttttgggtcgcgcccctctccggcacatttttcccttcgcgtgttgttttttcgctcatcgcaaccggtccacttgccttcgcccttgcacccgctcctttcgatttgttaccttcctttctcgcctcatccgactgctttccccttcaagctctactccaaatgctcccct

SEQ ID NO: 456650 - DNA, 395 bp, Sorghum bicolor
tcgcgtccgtgacgaagagaatgcttgatggagatacttctcggcgaccagatgaccaggaccaagatttcatatgacaagctgaactcgagcctttcagctacttctcagattgtatttatttcgtttgactagcacccagcagagagataatcacacaagtggaagaaacagaactttgtcagcttcgccagtaaataatcacaggtttttcttggtagaaaaggagttgagctctatggactatggttgatggttgtattgtgtcaccgaaatagtaccttcatcttacactaatgatattctgtatagtgtcaactgtcaagtttgccgaatgttaaaataatcaagtaggtcagtgctgctgatacaagttgcacgatgagtagcaaaaa

SEQ ID NO: 456651 - DNA, 384 bp, Sorghum bicolor
tcgcgtccgaggtaactctggttgcaaaacaatctatcatctgagttagttctcatgccctgtttgtaggctgacagaagacagggtgctgctatttgtactcaaaaaaagttgctactgattacttatatgtaattagacagtgaggactgaagtgacagatgatagattgttcgatcttctgatcttttgttgttcgttcaacactccatattatatagatttggtcaagtaccatctaagtttaagtaaaaattaacaagagacatggattaaagttattcatgactgcatgcttggttcaatgatttaaatttttttgatgtagagctaacaactaaagcaacaaattcttgtgcaaagcttaacaaaaaagcaaagagc

SEQ ID NO: 456652 - DNA, 418 bp, Sorghum bicolor
tcgcgtccggccggtggtgctcatgtgcaccgacccctgcaagtcatctctggacccgaacctgtaccagccgacgtttgcaggttttgtggacacagacatttctaacggcaagatctctctgagaagcctgatcgaccggtcggttgttgagagctttggagccgggggcaagacgtgcatcctctccagggtctacccgtcgctcgccatcggcaagaacgcccgcctctacgtgttcaacaacgggaaggcggacgtcaaggtgtccagtctcaccgcatgggagatgaagaagccactcatgaatggagcttgaaatgtttacatgtatacgagcttcaattggttgtgcgtgatggatttttagaaaagagaattatattgatatcctaattaattagcttctgtatggatt

SEQ ID NO: 456653 - DNA, 405 bp, Sorghum bicolor
tcgcgtccgcgcgagcgatggcgagagttcctctcctccgtccagcgcccgtttgctcgtcgatcgatcggttgtggcctgccggccgcgagcacgaggagcggctagccagacggacgtgtcgtcttggcaggtgcagcaagcgcggatctcgatcgccgccatgtctttcaccggcacgcatgacaagtgcattacctgcgacaagacggtccacttcatcgacctcctcaccgccgacggcgtctcgtaccacaagacatgcttcaagtgcagccactgcaagggcacactctcgattagcagctactcttccatggacggagtcctgtactgcaagacgcactttgaacagctcttcaaggagacagggaccttctccaagaaatttcaaggtggagcatc

SEQ ID NO: 456654 - DNA, 454 bp, Sorghum bicolor
tcgcgtccgatccagcgttgttgtttcaatgattggactctcaatacttcttctgcttggagtgctgaactgggaggattgtttgaatgagaagtctgcatgggacaccctagcttggtttgctattttagttggtttggctggtcagcttactaagctcggtattgtgtcctggatatcgagtagtgttgccaagattcttcgatctttctcattgagctggcctgcagcatttggtgttcttcaagcctcattcttctttattcactatatatttgcaagccaaactgcacatgttggagctttatactcggcatttcttgccatgcatttagcagctgatgtgccatctgtaatgtcaacacttgctttggcatataatgcaaacctctttggatcactgacacattatagtagcgggcaatctgcagtatactttggagcggggacgttg

SEQ ID NO: 456655 - DNA, 415 bp, Sorghum bicolor
cgtccgcaggttcagcgtgggaggcattgaagcatattagacaagctgtcgatttcctggtgatttctcttaagccaatgagaacattaagagagatacgcactgatgtgtgccctgccctcagcatacaacagctagagcgaatagttagtatgtactgggatgatgtgaatggtacaaacactatttcagcagagtttacatcaagcttgaaatctgcggtacgtgaggaatcaaatatggccacaagtttttctatactgctagatgatgattccagtatacctttttcacttgatgatattacaaagacattgccagtcattgaggtggctgatgatgactttctgccatttgtccatgaaaacccaagctttgcgtttttattgcaaagaaggggagagtcaattttttc

SEQ ID NO: 456656 - DNA, 361 bp, Sorghum bicolor
tcgcgtccgcccatcgcgtccgcccacgcgtccggccccggcgcgcaagtccgcaccttcgtcctcgacttggacgccgacgacgtcgccgcgaatgtggacgcgctcggggagttcctccggggactcgacgtgggcgtgctcgtgaacaacgtcggcaggtcgtacccgtacgcgcgctacttccacgatgtggacgaggcgctggcgcggagcctgatacggctcaacgtcgatgccgtcacgcgggtgacgcacgccgtgctccccggcatgctggagcgcggccgtggagccatcgtcaacatgggctccggcgcctctgccatcatgccgtccgacccgctctacaccgtctacg

SEQ ID NO: 456657 - DNA, 407 bp, Sorghum bicolor
tcgcgtccgagctaatcccgcacaacttatattttgatggtggatcagtatgtgtgtatgactcagtgctaccaggaaagatttggctaatgattgatagagagatggtgatgcaaatgttatgcaatctggggagcttgggctggactccggagcctgaattattggtggtgctggctggtgctgctacaggggcctagacagaagatgtgggcgtgcatgtggcaggggagcatatgttgtggtgtttactatcccaatattgacttggagggaaatgtgtgcctgaacattttgcgtgaagattggaagcctgtcctgaacatcaacaccattgtgtatggcttgaatcttcttttctcaagttactgagatagctactatatatagaaatagaaatataataa

SEQ ID NO: 456658 - DNA, 494 bp, Sorghum bicolor
  unsure (1)..(494): unsure at all n locations
cgtccggaagagaagaggccgaaagaaaacaaatcctgaaaccaagccatgggtctgcaggaggaatttgaggaggacgctgaaaaggcaaagaccttgcctgagagcacgagcaatgagaacaagctgatcctctacggactgtacaagcaagccactgttggaaatgtgaataccgaccgtcctggcatattctaccagaaggacagggccaaatgggatgcatggaaagctgttgaaggtaaaccgaaggaagaggcaatgaatgattacatcaccaaggtgaagcagctccaggaggaggctgcggctgccacttcttaaagtctcttaatagttgccaaacagctattgtcagctgagctntatgccatttgttcgtgagaaatagatcaattgatccacttggggatctgtgaaactatgtacctgcttatgtaactggttaccaatgttatccatctatctacatgtgaagacttaatatgtctggt

SEQ ID NO: 456659 - DNA, 429 bp, Sorghum bicolor
  unsure (1)..(429): unsure at all n locations
gtcgaggtaatagatgcttgcactgaggggaacttgggtcgattcatcaatcatagctgcagccctaactgccgcacagagaagtggatggtcaatggagaagtctgcattggaatattttctttgaggaacatcaagaagggtgaagaattgacatttgattacaattatgttcgtgtatctggtgctgctcctcaaaaatgcttctgtggtaccgccaaatgtcggggttaccttggtggagacgtatcaattgttgataccatcatcacccaagacaatacagaagcagatcattttgaacaaatggnnnnnaacaaagattctgagtagctgggtccaaatgggtctgattctgatgagagccacccatatatttcagaaactgaattttctattcaaggggaagatctacatgatccctcagct

SEQ ID NO: 456660 - DNA, 314 bp, Sorghum bicolor
tcgcgtccggactcttgcttcgatgatcaagtgcaccaagccggccgagtgctctggtagaggccgcggcggtgcacatcacagacatgaactacgatcaaatcgccaactaccacttcgacctgaccggcacggcgttcggcgccatggccatgaaggacgtggaggagaagctgcgcaaggcgggcatgatcgacatgcagctgcgccgggtcaagcgcaagtccggcgtaaaggtcaccttccacgtggaaaaggggtgcaaccccacttacctggcattgccggtcaagtatgtcgatggtgacagggac

SEQ ID NO: 456661 - DNA, 303 bp, Sorghum bicolor
tactgttttcaacatactaacaaagttggcatatcccagctgagaatttccctttctgtaccatcgaaccaaatgaggcgcgtgtgaatgttccagatgaacggtttgattggctttgcaaactttacaagccaaagagtgaggtgcctgcatatctggaagtaactgacatagctgggcttattaggggtgctcacgctggggatggtctgggcaatgcattcctctcacatatacgtgctagtgatggaatctttcatgtcctaagagcatttgaagacccagaaattacacatgttgatg

SEQ ID NO: 456662 - DNA, 360 bp, Sorghum bicolor
cgacccacgcgtacgctttcggcaagttttattgacgaagtcaatgataaagaacttgcggaattgtcatccaggcttgctggtcggtcgcttccagctactgaccaggttgcatcaattcaagtacttcgtgatcattggaaaagttctccagcaagctcactacaactgcaggaactaggacctttgctgagggactatcaacgtctcatcctgcagcgctattcgggaaatccattgccagcttttcatgaaatggaagctctccagtttttccatttgaaaagtgcttcacagttgcgcatggatgacattcccgtcttgttgagcgagtattgaaggctgctttccacatgagat

SEQ ID NO: 456663 - DNA, 385 bp, Sorghum bicolor
tcgcgtccgctcatatacaatgaagatttgcgcgaacttccttgtgcacatgtcttccacatggaatgcatagataaatggctccagataaacgcgttgtgccctctttgcaaggctgagatagggggctcaacaacaagtaatccggagagtggctctgtgggtcctgacaacgccaacagagttagcaatgacgtcgagtcacaacggtagctgctcttggccttttccatgaccatgaagaggttgatgcggactaattaaactgatgaacatataacaaactacaagtaggaaggttacacactgtatggtccaacaagcccttttttttcctgatggacttgtttcatattggcaatgtagtatttcctgctacaagtgc

SEQ ID NO: 456664 - DNA, 466 bp, Sorghum bicolor
cgtccgattgatttgagcaacaccaaagtttactggtgggcccagtcccaggcaattaaagagaagaagctcagtggcaaacttttattgtggccactacgtatacttatatttaatagttcaagccaccaccttcagcactggcaccaacatctgctttgccactatcccccaccttaccgccactagaaatagttgcatccgcatcagttttgccacctgcatctcctccagcatcgccacttgcggaaagattgggaaggcgtaaaaatcatggatgatgttcttccattcttccagtcgctcaagctatctaggactgcagttactgttgatgattgtgttaaggagctagctggaattgtccgtgagaagctaggacccaagaatgcaatcttcaccaaagcagccgatgctatggtggaatggaacaacctctggaaagcacatggagctcagaatgcgt

SEQ ID NO: 456665 - DNA, 401 bp, Sorghum bicolor
cgtccgcggacgcgtgggatcaccccccacctcccgttcccaaatcccaatcccccactccctccctccctgccaagaaccccgcgccgccgcctccccacctcgccatgggcagcgccgccgccacctcgccgccgccgtctgggaagctcacgcaggacgagctgaagcgcgtggcggcgcaccgcgcggtggagttcgtggagcccggcatgacgctgggcctgggcacggggtccacggcggcgcacgcgctggaccgcctcggggacctcctccgcgcgggcgcgctcccgggcgtggccggggtgcccacctccctcaagacggaggcccacgcgtccgccgtcgggatcccgctgctcccgctcgacgccgcctcgggcgccaggatcgcgctc

SEQ ID NO: 456666 - DNA, 404 bp, Sorghum bicolor
tttttaagaacaccatttcccccattaagcgttttttttttttttaaagattccaaacgaaccatggtaaatgtttctaccaatcatacaaaatccaaacgcgcaatgaacgttaataaacattgtggaccgaaccaaatctataatgagaccacagagcacaagagacaggcaaggctgatgatcgatcgagcgggatgttgttggaagtactgcccgaacaacatatgcgtcaggtccggagcgtacaatgtggccgtcaccgacgtcgaatttaagaacattcacggaacctacaacacgcccgaggccatcacgctcaactgagccgacaacctgccatgccagggcgtgcagctccacaacgtggacatggagtacaacaagtccaacaacaagaccat

SEQ ID NO: 456667 - DNA, 375 bp, Sorghum bicolor
cgtccgcccacgcgtccgcaatatttgaacgccatcaggatctgaatggtaccatgaagattcccaaagaagagatgtttcggttttcacatcaagtgcctttctacaggatgtcaggcgaagaagctccaaatgtccccaaagatagctatgagcttgacccagctgctatttctaaggaacttcttcaagggaccacagaaacagtggaggcaaatggaacttcctaatgttgatttaagacagttgatgatggtctgccttggtggacctgccattttgaagcaatcaagcaaaagttattgacattaagttttatagttttccttctacagcttttgacaattatctttgcatagaagggttagaatggga

SEQ ID NO: 456668 - DNA, 402 bp, Sorghum bicolor
cgtccggctggatcttttgtctcgctaccaaatcaaatgtccatgataggaactgttggccccccagtgccaaacatcgatgttcgtctggagtcggtcccagaaatggattacgatgcactggcgagcacgcctcgtggagagatatgcatcaggggagaaacattattctcaggatactacaagcgcgaagaccttacaaaggaggtcctgattgatggatggttccacactggtgacattggtgagtggcaacctgatggatgtatgaaaatcatcgatcgcaaaaagaatatattcaaactttcgcagggtgaatatgtggcggttgaaaatttggagaatgtttacggccttgtttctgcttcagactcgatatgggtatatgggaacagctttgag

SEQ ID NO: 456669 - DNA, 390 bp, Sorghum bicolor
cgtccgcgcgacggcggaggcggtgatgacgccgtcgagaagcgcgcccaaattcagacgttcccgggcatcgtacgggcgcgggtcgacgtgttccaggaaaagatcaacgccaagacgaagaagctagccaagaaggcctcgccaccgccgccgccggagagcgcgggccgagtcgtcgtgtacctcacgagcctccgcgggatccggcagacgtacgaggactgctggtccacgagcgcgatcctgcgcggctacggcgtgcgcgtcgacgagcgcgacctgtccatgcacgcggggttcaaagacgagctccgcgccgccgcgctcggcgacgaaggcaggctaccgatgctcccgcaggtgttcgcggacggccggcacctgggc

SEQ ID NO: 456670 - DNA, 433 bp, Sorghum bicolor
cgtccgggcaagatctcgctgtcggagctgacggacgcgctgcggcagctggggtccacctccgccgacgaggtgcagcgcatgatggccgagatcgacaccgacggcgacggctgcatcgacttcaacgagttcatcaccttctgcaacgccaacccggggctcatgaaggacgtcgccaaggtcttctgatgcatgcatcacatatcatcatcaattcgataccaaccatcgatgatcctgcttacatatatatctttataatatctacgtaccattctccagcttcatcaacatatcatttctgctggcctgcctagccggtctcttataagcactagctagtactaggattttttttattttaattcttcttgaattccaatccaatccaatatatggggacttcggtttatttcctttaattggtttt

SEQ ID NO: 456671 - DNA, 443 bp, Sorghum bicolor
cgtccggtgatggagctgctgcacagcaacctggaggccaagtcgcggctgtacaaggacccgtcgctgagcaacatcttcctgatgaacaacgggcggtacatgctgcagaagatccgggggtcgtcggagacgaacgccatgctcggcgaggcgtgggcgaggaagcagtcgacgaacctgcggcagtaccacaagaactaccagcgggaggcgtggagccgcgtgctggggctgctccgggacgacggcgtgctgacggtgaaggggcacgtgcagaagcctaccgctccttcctcggccggttcgcgcagcacttcagcgccgggaggcagacggagaagtacgtcaagctcagcgccgaggacgtggagaccatcatcgacgagctcttcgacggcaacgccacgtccatgacaaggaggaggacatgacaataataa

SEQ ID NO: 456672 - DNA, 412 bp, Sorghum bicolor
cgtccgcccacgcgtccgggccgccgcgcgcttcggtggcagcttctcctactgcctcgtcgaccacctcggcccgcgcaacgccaccgggtacctcgccttcggcccggggcaagttccccggaccccggcgacccagacgaagctgttcctggaccccgagatgcccttctacggcgtgaaggtcgacgccatccacgtggccggcaaggccctcgacatccccgccgaggtgtgggacgccaagagcggcggcgtgatcctcgactccggcaacaccctcacggtcctcgccgccccggcgtacaagggcctggtcgccgcgctgagcaaggcacctggacgggtccccaaagtgagcttccccccgttcgagcactgctacaactggacggcacggcgaccgggagcg

SEQ ID NO: 456673 - DNA, 349 bp, Sorghum bicolor
cgtccggttcccagatggcagacatggcaaaggaaattgtgaaatcaaatggatattctgatgtcataactgtaataaaagggaaagtggaagaaatagaacttccggtcccaaaagtagatgtcatcatctcggagtggatgggttattttctcctgttcgagaatatgttgaacactgtcctatatgcacgtgataaatggcttgctgatggtggtgtggtcctgccagacaaaacttctttgcgtcttactgcgattgaagatgctgaatataaggaagacaaaattgaattttggaataatgtatatggatttgatatgagctgcataaagaaacaggcgatgat

SEQ ID NO: 456674 - DNA, 443 bp, Sorghum bicolor
cgtccgtgccgaagcaaatccacgagatcaaggacttccttctcaccgcgaggaggaaggatgcccgttcagtgaagatcaagaggagcaaggatgttgtcaagttcaaggttcgctgctccaagtacttgtacaccctctgcgtctttgatgctgagaaggcaaacaagttgaagcaatcacttcccccaggtttgagcgtccaggaggtttgattggatacatgacaaagtcaagatgaactaccaaagcatctttatcagtagcagagcatgttattctatgtaattttggaacctaagctattagacctgtcagtgttggaatttgggatcttgaatttttggagaaatgccaatttaccttcgtcaacgatgcaaccggaaagtttgttcttatttgacctgacggtaattcaaatttaatgctgtgcccctttcatc

SEQ ID NO: 456675 - DNA, 393 bp, Sorghum bicolor
cgtccggccacgcgtacgggaagtctgcatagcacgctgcaaaggcaatcaagggcacacagtacggagaaccagatccggagtatgactacctcgcgcatacttaatactgaccgatcattcgacctgtggtggcaattctactgcgacaacgcggatgaaaccatcctatatggcgacagcgaccccacctacagcaagcccaagttcggctcgtactgcatcaaggacggcaaggccttgggcgccttactggaaggcggatcaccggatgagaacacggccattgccaaggtggcgaaaacccagccgtcggtcgctaacctcgaggagctcaagaaggagggcctgcagttcgccagcaagatctgagacgctccacgttccatgtac

SEQ ID NO: 456676 - DNA, 193 bp, Sorghum bicolor
cgtccggctgggcaaccgcgactcccccgtggtggcggcgttctcgtcgcgggggccaagcaagcaaaaccaggggatcctcaagcccgacatcacgggccctggagtgaacatcatcgccggcgtgcccaagccggcggggctcatgacaccacccaatccactggcggccaagttcgacgtcctgtccggc

SEQ ID NO: 456677 - DNA, 310 bp, Sorghum bicolor
ctcgacccacgcgtccggttctgagaatgagagaagatacagaattcgttccctcgtttccctatcacacagaagtaccaaaagttctgttgtttggactattgggattcacattggctgtgctggctcctctgatcttaccttttctgctggtgtacttttgccttggttatgttggctaccgcaatcagttgctcaatgtgtatcgaacaaggtacgatacaggtggtttgtattggccaattgcatgcaacacagtcatattctctcttgtgctcacacagatcatctgtcttggtgtattggactt

SEQ ID NO: 456678 - DNA, 366 bp, Sorghum bicolor
cgtccggagagatttagagtagaaattgacagggtgttgggggagaacttgaacttctggttgaggtttagcacatcatatcatcaaatacgaaatttccaaatatcctttgacatgttgaaaactgagatgcacagattgactgatgaacaggaagatggggacacttaccgctttgctggtagttatcaggtagcaaagttggaatcagcagtactggaaaagaaattgagggatctaaatacagatcttcaagtttggattgaaaagaacgtgctattgaaaggagaggtagagaacagattttcatcactatgcatcatacaagaagatatatcaaagatcacaactctggataaatgtgat

SEQ ID NO: 456679 - DNA, 460 bp, Sorghum bicolor
cgtccgcagaaacgaaagtaggtcattccaattaccaagtatctttaacactgaacaagagagattcatgcagcactttgatcttcttctgaaagctcgagtccctgagcacatttccttctatagttttaaggaatcatcttcccgggcaggcatatcggatttggtgaaatacaacttcttcaaggaaattcagaagatagccccctctctaaggggcagtttcgcaagtgaatcagaaaaacttgccgaggtccgtcgtatagagcaggtagctgagcacaacaggatagccctaaatattatcaaccaagttggagctggcgatccatctctgagggtctcgtttgagtttacacaccaccctcactttgcagtggcagttgtgaagagatcatgattcaagtatggcatcatgtgccaattctttacccctcatcttggtagttatagcagaaaa

SEQ ID NO: 456680 - DNA, 479 bp, Sorghum bicolor
  unsure (1)..(479): unsure at all n locations
cgtccgctccgtccctgtccccggctgggcgactcctcatggcgtcgcctcctcccgtggcggctgccgcggggcctcacagcgtcttcgtgtacggaactctgatagcggaggaggtggtgcgggtcctcctgggccgagcaccgccttcctcccccgcaatcctcgccgaccaccgcaggttcagcatcaggggccgcgtctacccggccatcctccccgcccgcggccacgcggtgagcggaaaggttctcaaggagctcaccgacagggaactccatgtgttcgacatgttcgaggacgaggagtatgtgaagacaaccgtcgaggtctcactggctgatgcacaggagaaatcaatcgcctgcgcctacatatggggcaacgagcgtgatcctgacctctacggggaatgggattttgaggagtggagggaggtgcatttgaaggactaccttgagatgactcangaattcatg

SEQ ID NO: 456681 - DNA, 473 bp, Sorghum bicolor
cgtccgcggacgcgtggggtagcttccgtccggaacggccgcggtgccgacacgcacccgctggcctgacccgctccggcacatgcggcgagacgctcatcatcttctccaacacgtgcaacctctactagttctgcatcgtacagagcatcacaaaaacactttagaggtacgaaaaaagcaattatggaggcccagatactgctgtacagaacaaggagaacgagttactccagagcattcgcaatgagtaccttaaactgaaagcaagtatcgataaattacaaacgactcatatgaattttattggtaaagatctcgctacacttgctatcaaactacttcagcagctcgagaagcaacttgattcatccttaaggcacataagatccacaaggacacaacatatgcttgatcagctcacttatctttaaaagaagtagcaaatgctgggtgaagcaaataagttcctt

SEQ ID NO: 456682 - DNA, 413 bp, Sorghum bicolor
cgtccgccggcatggtggaccgcttccacgccgaggtgcgcctcctccgctcgctcagccacgaccacatcatcggcttccacaaggtgtggctggaccgcgacgccggcgtgctcaacttcatcaccgaggtctgcacctccgggagcctccgcgagtaccgccaccgccaccgccacgtctccgtcaaggcgctcaagaagtgggcgcgccagatcctggagggtctcaaccaccttcacacccacgacccctgcatcatccaccgcgacctcaactgcagcaacgtcttcatcaatggcaacaacggccaggtgaagattggcgacctcgggctggcggcgatcgtggacaagacgcacgtggcgcacaccatcctgggcaccgccgagttcatggcgccggagctatac

SEQ ID NO: 456683 - DNA, 412 bp, Sorghum bicolor
cgtccgaacgtcattgtcaaagagcagtatgttgctggacttgatgtcgcggtggaccactcgagagtccgccttctcgtggaggaactcgagcccacgagctgcacttacggcaatcctcgctcgctgcatccatgacaggactggccctggctgagctcccttgacaccctttttaccatggaggatatcatgcaatgatccccttgttgcatactcataagcaagaacgcgggtgatcccttcagcgcagtatccaacgagttggacaacattctcatgcttcaatcttgagacagctgaaacctgcacaaggaattcttgatcaggctgtttgctggagtcaagcttcttcactgcagaattcgtcccatctttcagcacaccgaaatagactctggcatacgagccc

SEQ ID NO: 456684 - DNA, 445 bp, Sorghum bicolor
cgtccgaacaattattggatgatgatgacgacatggctgatctttacttgtctagaaagttggctggggcatcttcccctgtcagtggttctggtggaccaaattggttccctgcatccccaactattggttcaaaaatatcaagagcaagcagagctagtgcagctactgtgcatggaaatgagaatgacgttgaagagctagagatgttgctagaggcatatttcatgcaaattgatggcacattaaacaaattgacaacgctgagagagtacatcgatgacacagaagattacattaatatccagcttgataaccaccgtaatcagttgattcagctagagttattcttgagttctggtaccgtctgcctgtcgctgtactcattagttgctggagtctttggtatgaatattccgtatacctggaatgacggccatggata

SEQ ID NO: 456685 - DNA, 397 bp, Sorghum bicolor
cgtccggcagcaccaaaatccatcgcgtgtgtgttccttgtgtacatacattgaaggtgatcttcatcgactctggattcagccgtctcctgctccctgcaggcgtgttagaaatggagatgacgagcaaagcaatggcttcaggtctcctcgttttgatgcttctcatgaacatcggctttgtgctacctgtccgggcggactgttggagcgagaccagcgacgtctgcacgaagacgcacaattgccggagcaactgccaggggcgtggccaggcggacgggaagtgcaagtgggagttccccgacctggtgcccttttgctattgcctgcgccccaactgcaatccctaagtcgggtgcttcggatgggttcgtcagcaatggggaaaacgagt

SEQ ID NO: 456686 - DNA, 394 bp, Sorghum bicolor
cgtccggtaccattgcaatgattgtggcatatgcagggttggtggcaaggaaaaattcttccactgtgtaaagtgtgggtcttgctattctgttgaactgcgtgataaccatcggtgcgtggagaactcaatgaggcagaattgcccaatctgttatgagtatctatttgactcattacaaggaacacgagttcttaactgtggacacacaatgcacttgacatgttttgaagagatggtggagcataacaaatacacttgtccaatatgctctaaaacagctcttgatatgacacgtcattgggagatgttggatcaagagatcgaagccacaatcatgcctcctgtatatcggtacaagatttgggtgctttgcaacgactgcaacaaggtc

SEQ ID NO: 456687 - DNA, 272 bp, Sorghum bicolor
cgtccgtattttcaagcgaaccaagtgttttgcggcttaaagctcctggggcgatatttgtagatgaacacggacaacttgcgcgactaggcgaggttataccatgaatatggtgcaccttaaactgaatgtgacatcgcttacattgcatatctatgactgggagatcatgtacatcgccgaccttataggtcttaaactataactctctttcttgcactggaggtttaatatacaggacatgtccactcgattttacgaacatatgaaca

SEQ ID NO: 456688 - DNA, 349 bp, Sorghum bicolor
cgtccgtattttcaagcgaaccaagtgttttgcggcttaaagctcctgttaagatatttggagatttacacggacaatttggagacttgatgaggttattcgatgaatatggtgcaccttcgactgcaggtgacattgcttacattgattatctatttttgggggattatgtagatcgtggccagcatagtttagaaactatcactcttcttcttgcactgaaggttgaatatcctcaaaatgtacacttgattcgaggaaatcatgaagctgcagacatcaatgctttgtttggtttccgaatagagtgtatagaacgaatgggcgagagagatggtatttggacatg

SEQ ID NO: 456689 - DNA, 477 bp, Sorghum bicolor
cgtccggtttttttttttttttttttttttttttttttttttttttttttttttttttttttttttttttctaagcacagctcattccattacaggagtcgatttttaatacagggtacaatacatggggaaagaggctggtttattcatcatatcatatatacttccccagggggggatgtattccatgtccgacggctaaattttttaatttttgggctccagcccccagccaaaagcttgggagccttggggggaaaaacacatcatggcactggaagatgataccttaactacctaaggcgaccggggggtccccgaccggttggaagctttgcagctgtttgaagttttcccacaccttttcccacaccttggccttgtacagttttttgccgccgccggcctcttttacctggacggggaagtggtgcatggtcccggccaccacctggtgcctaaccttaaccagccttt

SEQ ID NO: 456690 - DNA, 478 bp, Sorghum bicolor
atgccatcgaagctgttgtgctaatgattgaaaatcctgctcgagccaatggtcacatcttcaatgttgggaatcctgacaatgaggttactgttagggagttggcccaaatgatgacagaggtctatgcaaacgtctcaggagaggcaccactggatgagcccatgattgatgtaagttcgagtcagttctatggtgaaggatatgatgacagtgataagagaattcccgacatgactataatcaacaagcagctaggttggaacccaaagactcctctcaaggatctgctggagacaacgttgacatatcagcacaagacatacaaagaagctgtgaagaggcaaatgtcgcaggcttcatcaacgagttagatggcatgtcaccggacctcaaagtggtggtggctgggacggctctcgtttcgagccctagtcgcagctgttatgatgtttccgaagtcagaatacatataccc

SEQ ID NO: 456691 - DNA, 396 bp, Sorghum bicolor
  unsure (1)..(396): unsure at all n locations
cgtccggcaggacgacctcaactacccgtccatcaccgccatcctcgaccagccgcccttcaccgcgacggccaaccgctccgtcacgaacgtcggcgccgccagctcgacgtacaccgtggaggtgaacgtgccggagtcggtgacagtggaggtgaacccgacgaagctgactttcaaggcgctggaagaggtcttgaactactcggtcacaatcaagtcagccaacggccgggcgcttaccggccctgtcgagggggagatcaagtgggtctccggcaagtacgtcgtgcgcagcccgatcctcgtcactaccggagccctcccgtccgcggcggcgacacgcanaccctaacactcgatcgatagcagctggagcgtttgagatcgatgtga

SEQ ID NO: 456692 - DNA, 533 bp, Sorghum bicolor
  unsure (1)..(533): unsure at all n locations
cgtccgtgttgaggaacctgttcaagtgacagagaccctgaattttgattacaccagacctagcccaatggcgcttgtgccagtgccgcggttggtgcccccgaatcagcggatgcagcttgaggtatcgctgacgctgccagagtctgattacaaccggaggcttggtgttttccaggtaaaggcagagtttctctccgctgatggcaaagtgatgtcaacttcaagtcaaccatgcatgctcaagttcaagagtgtacacatgcacttcatagagacttttctccaaagtgtttctcttttgtcgggctactcatcagaatctcaggttattagactaaaaatgaggggtatcacccaaggtttggaaccaacaactgcggtaaggataatcctagagcaaagagcagagtntggtcgtggtgcaggcatcccagagatatatgctgcatcactgaagcttgaggctgaacttcctcttttcaagagattactctggaactggagatggacccttttcgtttggagcagca

SEQ ID NO: 456693 - DNA, 442 bp, Sorghum bicolor
cgtccgggcgcacgaccccgataaccagttcaaggtcggcgacgtcgtcgagctccgcccctcccgtcccatctccaagaccaagcacttcctcgccatcccgctcccaccccgcgacacccgccgcaagtcccagctcctcccgccgctccagtcccagtcccaggccggcgacgacgacgaccaggcgccgccgccctcgccctcctccgagtgattgattactgccgcccgcctatgcattggattggattggctagctagcttattgtaatgccgtcgtatcgtatcagctcctctcctctcaatcaaacgtccaatgctttgtttatttgctgcttcccaattccagtgctcctcctattatatgatccatgcccagagatgtcaacttagtttgtctgcaaattttctgtaatacaaaggatttcctttcattttc

SEQ ID NO: 456694 - DNA, 519 bp, Sorghum bicolor
  unsure (1)..(519): unsure at all n locations
cgtccgggcgccgccggcgccggcaggcccttcacgcgccaggagaacaccgtcgtcaccacctgcgccgtcgcgtgctactcgctggcgctctgcgggttcgggtccttcattctgggcctcaacaagaggacgtacgaggcggccggagtggacacgccgggaaatgtgccggggagcgtcaaggagccaggattcggctggataaccggcttcctcgtcgccagtagctttggcggcctcctcaccttgattcccctcagaaaggctttggtcatcgactacaagctgacatacccaagcgggacggcaacagctgttcttataaacggcttccacacacctcaaggagacaagaatgcagagtgcgtatggagatcttctctcctgttcattaatggttatataacagctagaatgaagccgattattagacagtagtatgtgtctatagccccatttggtacagcttcaccaccagctngatgagnctttgtgagctattntttttaccaaaca

SEQ ID NO: 456695 - DNA, 454 bp, Sorghum bicolor
cgtccgcgagaacttcacgcccaagctctccgacttcgggctcgcggagctcggcaaggcgggaggcagcatgccggtggcgtcgcccatgatgggctccttcggctgctgcgcgccggagtacgaccggaccgggcagggcaccatgaagtccgacgtctacagcttcggggtggtgctggtgcagctcatctccgggaggagggccgtcgacaccagcaagccggtggacgagcagaatgtggtcacctgggccatgccaatgttcaaggaccagaagagataccatgagctggttgatccactcataaagaaggaatacgctgccaaagcgttgaaccaggtggtcgccatggctgcgatgtgcttgcaggaagaggactccgtgcgaccactgatggccgacgtcgtcatgacgctgggcttcctcacggcgatgccgccggatccaccg

SEQ ID NO: 456696 - DNA, 533 bp, Sorghum bicolor
cgtccgcgcgcgcgcaccaaggcgctcgggctggcacccgagcagcgcaccaagctgctgttcgccgtggacgggcggcgccggttctcgccgccgctcccgcggggctacttcgggaacggcatcgtgctgaccaacgccctggccaccgccggcgagctgctgtccgcgcccgtgtcgcgcgcggccgggctggtgcaggaggccgtgcggatggtgaccgacgactacatgcggtcggcggtggactacttcgaggcgacgcgggcccggccgtcgctggcgtccacgctgctcatcaccacgtggtctcggctcgagttccacggcgccgacttcgggtggggcgagccggtcatgtcgggcccagtcacgctgccggagaaggaggtcatcctcttcctcgcgcacggaaaggagaggaagagcatcaacgtgctgctcggcctgccggccaccgcgatggacgccttccaagagctcatggacgagatatgacggacatgggatggggtgctatacatacatatatg

SEQ ID NO: 456697 - DNA, 425 bp, Sorghum bicolor
cgtccgcgccaggttcctgctcaccagcaccagcgaggtgtacggcgacccgctgcagcacccgcaggtggagacctactggggaaacgtcaaccccatcggtgtccggagctgctacgacgagggcaagcgcacggcggagacgctgaccatggactaccaccgcgcagccaacctcgaggtgaggatcgcccggatcttcaacacgtacgggccgcgcatgtgcatcgacgacggccgggtcgtcagcaacttcgtcgcgcaggcgctgaggaaggatcccttgacggtgtacggcgacggcaagcagacgaggagcttccagtacgtgtccgacctggtggagggcctgatgatgctaatggagaaggagcacgtgggcccgttcaacctggggaacccgggcgagttcacgatgcttgagc

SEQ ID NO: 456698 - DNA, 481 bp, Sorghum bicolor
  unsure (1)..(481): unsure at all n locations
cgtccggcacttgcagcgtgatactggggttcgatgctcccaggaaggacgacggcggcgtccaggacaactccggcgccaagaagagatcccggccagagtccagcgcgccacctggcaccaaggcttgccgtgagaagctccggcgagacaggctcaacgaaaggttcaacgagctctgcgccatcttggagcccggcaagccaccaaaggctgacaaagttgccattctaagcgacgctgcccgtcttctgaaccagctgcgtaccgaggcccagaagcttaagcaatcaaatgaatcactccaggactccatcaagagtctcaaggctgagaagtctgagctgcgagatgagaagacgaggctcaaggccgagagggagaggctggagcagatgctcaagggcgtcagccacgnccgcagtggcggctccagcgcccttcgtcccgcaccctgctgctgcagccgccgctccatctt

SEQ ID NO: 456699 - DNA, 489 bp, Sorghum bicolor
  unsure (1)..(489): unsure at all n locations
cgtccggctaggtaccctgccggctggtcttgtaaccttctggaaccgcacgttccctcttgatcattcgtggcatcaattacgacttgggtacaacccaaatgtcaacgaaaaggatatcaggcgagcggctgtcatccactacaatggaaacttgaagccctggcttgagattggattgcccaaataccgcaagtactggtcagcacacgtcaattacgatcaagtgtttctacgggagtgcaatataaacccgtgaacagcaaatagtggtctatggtgtatccttttcttttcgattatttcttagaccgattctttgtgctctaggtaaattaaattgcctagagtgcttattctttgtaactgatgtctttcctgatgtaaaggtgccagcaggttggtggtaggcttagatcatacaaacagttagtagccaaggcgtatttcattntgtgcttataaatgctaatatagtagataattttt

SEQ ID NO: 456700 - DNA, 516 bp, Sorghum bicolor
cgtccggcgccatgagcgttgcctccatgtcggctgggactgggagctttgcaagcagccttcttgttactgtggtgatgaccttcacctgtagaggtggccggcttgggtggatacctcaggatctcaacaagggtacaagggtcatgtggactggttcttctacctcaatgcagcgcttaatgctgtggatttctttgtcgtttgtggtgtctgccgagaggtataggccggctccggtgatcatacatggacttggccttcgtgctgctgggggtgagttgaaaaaaaatgaataagattggattggtgggagggtttaagtggttaattgtcccacctccaccggaagctatcggattagaatcgtgtgcgcttaattagagtttgcatagctagttggttttcatagcatacgctcccttagttttataaaataaaaagttagttatcccttgatttttggtggccatatatagccaaccattgacactagttatctaatttgtaagatat

SEQ ID NO: 456701 - DNA, 421 bp, Sorghum bicolor
  unsure (1)..(421): unsure at all n locations
cgtccgcgttcccctttttccgccgtgcctccctcccactaaaccctagatctctcttcctctctctcgaggactaggaaggatgccgccgtcttcggctctgagcaagcgcggcggcggaggggacggcatcctggccgccatctcgcggtcgcaggtggcggcgcacgggcgcgaggcggcggccatggcgaagaagctgctgcggagcacggggaaggcggcgtggatcgcggggaccaccttcctggtgctcgtggtgccgctcatcatcgagatggaccgggagcagcagctcaacgacctcgagctccagcagcagacgctcctgggcggaccgccgccgccggcagcagccaagtagatggatcctncatggatcgacccttttggtcctctctctctctctctctctctccct

SEQ ID NO: 456702 - DNA, 452 bp, Sorghum bicolor
cgtccgcattgtttttgacaaactgcagcgaagaaggtgaacctagctgatattggcatcgttggtggccttggtgatgggtccgatgagaaggccatgccctcgtggaccatgggcaccggatctgggctaggaatatctgggattccaccatcaacacaaggcggtggcatcgagagcttagccaactacaacaagcatcaattcggcttcaaataagccttgagctttcccctttcatacaggaaaatatgtcacctgcggtttcctcctctgccggcctgctccttccatataccttattgatttaatcacttttttgtttttggttttggtgatttcactacattacattacattgcattgcattgtgtcaaccaatcttggcccgtcttgtcacgcgtgtatgttatttatcgggtattgtggtaaagcatgaactacccatacac

SEQ ID NO: 456703 - DNA, 430 bp, Sorghum bicolor
cgtccgctgactcgtgctcgatgacattgttaacactgccaggccgaaatctgcaacatgataatcatgatggctgtgatcaccttcaaagtgctgcatatctgtgcagggggccttgaatccttaaatgtgggaatttgtccaagattaagtagtctgcgcattgaagacccaaatatgcctatattgctgctgaacggttatggtgatctttctgagggttacatgacaagtcctcgcttgacatcaatagatgcctttgtctagcaggcaggttgcggatgattcactgactcagatggcataagcatgtgctctgatagaacatcttatactgtgatgatgcctattcataggcactgatggattgtcttgattgcgttgccttcctgagctggccttgcttgacctgtcttatacatttttgatc

SEQ ID NO: 456704 - DNA, 453 bp, Sorghum bicolor
cgtccggcacgatcgagagccctccggcgagacgacctccctctccgtcctttagcgcgcgaccgaccagtgcgcgtgagatcagcggcccgggcgatccaagatgtcttggcagacgtacgtggacgagcacctgatgtgcgagatcgagggccaccacctcacgtcggcggccatcgccggccacgacggcgccgtctgggctcagagcgccacattccccgagttcaagcccgaggacatgaccaacatcatgaaggatttcgatgagccggggcacctcgcgccgacaggcctgtttcttggagccacgaagtacatggtcatccaaggtgaacccggcgctgtcattcgtggcaagaagggatcaggaggcatcactgtgaagaagacagggcaggcactcatcattggcatctacgacgagccgatgactcccgggcagtgcaacat

SEQ ID NO: 456705 - DNA, 329 bp, Sorghum bicolor
cgtccgggatcaacgaccaccagaagagccgcttcgtgaaatgcgtcgtctcctccatgttcaacaccgtcgccggcaagaagatcgccgtgctcgggttcgcattcaagaaggacacgggggacacccgcgagacgccggccatcgacgtctgcaacggcctgctcggggacaaggccgtcatcagcatctacgacccgcaggtgacccggggagcaggtgtcgcgggacctcgccatgaacaagttcgactgggaccacccgcgccacctgcagccgctcagcgccaccgacctggccaagcaagtcgccgtcgcgccggacgccta

SEQ ID NO: 456706 - DNA, 475 bp, Sorghum bicolor
cgtccgcgccgccaagcccgctgaaggcgcggacgccaacgcagccgccgcagccgggggcggcgaggacctcaagaactgggacgcggagttcgtcaaggtcgaccaggctacgctcttcgacctcatcctggctgccaactatctgaacatcaagggattgctggacctgacctgccagacagttgctgacatgatcaagggcaaaactccggaggagatccgcaagacattcaacatcaagaacgacttcactcaagaggaggaggatgagatccgcagggagaaccagtgggcctttgagtgatggtcttccgtggtggtgttgcggtgctgcttaaaagaaagatggatgtctgcaccgtgctctacaatgctattagtgctagtctacttactaaatatatatggtcggtcggaatggtcgtttgccttttggaagcgggttatggtttggatcggattgaggttaaac

SEQ ID NO: 456707 - DNA, 468 bp, Sorghum bicolor
cgtccgctagaactagtccaaggagttttcaattacaagcatgaaaggtggttaccgtcgagtgttccagcggcctattggttttgagtgggaactcatgacttacacagatgacagttcatctttagcagaaactgatctggatgttctgtccagaaccaagcctaaagaagcaaatgagctttctaaccaggagtcgcaggataagctggaaaaggctcctgatacctctgtgccaactaatcggagtagctcccaagaaaataagcttattggctgcccagacacatcaccagagaaattggccttaaaattagcatttactttaccagcatcatgttacgctacaatggctatccgggagcttctgaagacttccacttcggttgcatatcagaaaacactcagctgctaaattttgttcggaaggacattctttcttataattacattgtgctgcttgtgttt

SEQ ID NO: 456708 - DNA, 235 bp, Sorghum bicolor
cgtccggaaaaggaatgactgctgtccaagcactgactcacccttggttacgagatgaacaaagacagattccattggacatactcattttcagattagttaagcaatatcttcgtgctactcctcttaaacgtttggcattaaaggcactatcaaaggctttaagggaggatgaacttttgttcttagatgcagtaagctgtgaaccaaagggtgatactcgcacttcgcagtt

SEQ ID NO: 456709 - DNA, 373 bp, Sorghum bicolor
cgtccggccatgttctactacgagggcgaccaggacaagtccgtcgggaagaggctcaggaccgccctcatctgggtcttcgcgtccgcggtggtttgcggcctcgtcctcggtatcctatacggacttgttggtaaagtggacttcactgtcaggcacctatcttcaacggtccagacatttccaaactcattttctggattctcaagtggccagccttgctttagtcaattgcctcgtgtgtgtgcagcttctactgcaccggctaactcgcaaacaacttggacaatgcgtgctaccttccctgaatatgtggttgttcttactacaatctgtggatctgtgcttatcacgatatttggaggagttggaa

SEQ ID NO: 456710 - DNA, 481 bp, Sorghum bicolor
  unsure (1)..(481): unsure at all n locations
cgtccgcccacgcgtccgacaccagcgagggcatggacgagatggagttcaccgaggccgagagcaacatgaacgacctcgtcgccgagtaccagcagtaccaggacgccaccgccgaggagtacgacgaggaagagcaagacggcgaggaggagcacgcctgatcggaggccaactgatcgatgcaaaggacttcagagacttcgctcctatggtacaccaatcgagactacacattcctacaatcctactactacgtaccttaagtatgtacattcagtactgccgtatttccgttactgctgctagcttgtgtgtgtatctacagtcgtgtcactctcgtgtgtgttagtgttttgtgaacttgtgatatactgtcaccgntgtccaggttttgtgcgtatgtttattcatatgatgggattgctctttgttcttgtacgtattagtaaggaatattcatttttttggaagattgttt

SEQ ID NO: 456711 - DNA, 313 bp, Sorghum bicolor
cgtccgcgatgttctcctgtacgtggatcgcttggatgcgtatagaatggatacactggatgaacaggtcataagagccatcaccaattcatttggaaaagatatttggcgaagatcattggttgtgttgacccatgctcaactctcaccacctgatggaatcgactataatgatttctttacaagaagatcagaggcacttttgcgatacatccgctcgggggcaggaatcaacaaacgagaatatggggatttccccctgccaatagcattagtggagaacagtggaaggtgcaaggctaatgaacatggg

SEQ ID NO: 456712 - DNA, 619 bp, Sorghum bicolor
  unsure (1)..(619): unsure at all n locations
cgtccgggatcaatcgccgcgcaagcccaagcagatccgccggcgagcgagcgcgcggcgcgcgggggcaagggcaatgggcgtcgtctcggcagcggcggacgcgcttgtcgcggttttctccctgaccatcgccgtcgcggcgccgctgatcgacgcgcagtccgtcctcccgcacaccctctacccggcgccgctcctggaactcaagcgctggtacgccgccgagttcggcgactacctcgtcgcccagccccccgccttcttccgcggcctcgtctgcctcgagctctccttccagtggccgctcgccgtcgccacgctctacggcatcctcacccgccgccgctgggccgncacaaacctcctcattggccggcgtcgctaccctcacatccatgtctgcagttcttggtgagattttgggttcaggcaaagcaacaccaaagttacttcagatgtatgctccttttgccgtttttgctgtcattgccattctacgtggactttgctcatgctctgggcgcactactgctggttcatcccttgggccttctgcccggaagaagagggtctagatcagggacactnggagaattttttggtttcagacagagtg

SEQ ID NO: 456713 - DNA, 447 bp, Sorghum bicolor
catagtgtggcggcatttattaccagaacaacaaaagggtacaaagagaaaaaagggctacaacaccgtaaacggacaaaaaaggggttccaaaccgacagccgcctgcatgcaaggtcaaagctcacgtacgcgggcacccaaattcaaaccactggcagggggtcaacaacattcaaactgggggaccccggtcgacacccaactgaatgggaaaacactgcattcacccaacgaaagctggcggaataacaaacaggttcggacagatcgcgctatacaaaaaaaggcccaaccggaacggctaacggaacacgccctcaaccggaacagtaaacgcgacgccccctgtggttacgcacaaagcgcccggtacgcttggcaaacccctagcgtgagctcttaacgtggtagtgccctacttcccggtcacgttcgtcggctccc

SEQ ID NO: 456714 - DNA, 534 bp, Sorghum bicolor
  unsure (1)..(534): unsure at all n locations
cgaccaacccgtccgcggacgcgtgggcttggaacactatgggaggacctgggaaaggttatggaaggtgaggatgaaattgagatagggcaagttgactgtggtgtcagcaaaccagtatgctcaaaggtggatatccattcctacccaacattcaaggtgttttatgaaggcgaagaagtagcaaaatataaaggacatagggatgtggaatcactgaagaacttcgtgttgagtgaagctgagaaagcaggtgaggcgaagctccaagctgattgaggcagggtactttcagcaagcatgtggcgcagacaaggaacaatgctttgcaacactgtcctgtatcctggcatttacaaagccattttacaagaaaagaaatgaccttgtatctgagtattcgtcttcaaaagtacaagtccgaatcagttcatgaaagctatactccataccataggtttcatcacatttttgataaacttaagtaatgattagaatgcaacgatacaaaggtctgtttgtgtcaaanaaaaa

SEQ ID NO: 456715 - DNA, 586 bp, Sorghum bicolor
  unsure (1)..(586): unsure at all n locations
cgtccgcccacgcgtccgcttcggcagaggcctcgtgcagaggatgccgaggtgccgctgggggttcttccacgtcgtcaacaacgactacacgcactggctcatgtacgccatcggcggcagcaaggcgccgaccatcatcagccaggggaaccgctacatcgcgccgcccaacctggcggcgaagctggtcacaaagcaccatgacgcgccggagtcggagtggaagaactgggtgtggcactcggagaacgacctcttcatggagggagccaacttcaccgtcagcggcggccagaagatcaacaggaatttccacaagaaggacctcatcaagcccaagaacgggtcctacgtcaccaggctcacgcgatacgccggcgcgctcgcctgcaggcccggcaagccctgctagtactacgtgctacccacaccacgtacacaacagctagctatatatggacggctgacagaagaccattataagcaccgatcgatcgatcgttaagaaacctgtggngtgaattattaacgaccctgtaggttgttgtaacatattagtaacatgcattcgccggccggtctc

SEQ ID NO: 456716 - DNA, 535 bp, Sorghum bicolor
cgtccgcgaaggcggttcgccgcccccgacgtcgcgagaagtccattgaaccttatcatttagaggagtgagagagttaattgtggggaaagacgatgaacttctccagactgacacaaagtcgattcctagagccgatgtggctgaggtttgtgtacaggctctgcagtatgaagaggccaagttcaaggcatttgatttggcctcgaagcctgaaggtgtgggcacgccaacaaaggactttcgggcactgttctcccagattactgctcggttttgagtgagctgctgagaagcctactccaagttctagattgcatggtgtctgaagatataatcaggtagcttgagcatggagctgcagtttggtgcaattgcaaagctgtattaaaactgaagaaagaaattggtgcattgtttgcagtgcactgctgaacgtctggttgccattgtgtaaactgttaagagctaatatgacaagtaattaggaacccctgtttgcataaattgttgggcacaatttatccagcacagt

SEQ ID NO: 456717 - DNA, 502 bp, Sorghum bicolor
cgtccgtggagatccgccgccgcgcgcgcctcccggagccggaggacgacgacgctgccgtcttgctgctggacgccatcgacagcgatgctgaacgggctgtgatcctggagcggctggaggtgcagatctcggaggccaaggacctcgagttcagccggaaggacgtgctggagaagatggacaggtggcaggccgcgctggaggaggagtcctggctcgaggagtacagcagaaacgagaacagatacaacgtcggcaaagggacgcatctcgtgctcaagcgcgccgagaaagcgcgctccttggtcagcaaaatgccggcaatggcggaagctctgatggcgaaagtggttgcgtgggagaaggagaggggcgccaagttcgagtacgacggtgaggtgctgctggacatgctggaggactacggcaacacgaggaaggagaaggagcaagagcggaagcggcagcgggaccagcgccggctgctgcagcaggtgca

SEQ ID NO: 456718 - DNA, 637 bp, Sorghum bicolor
  unsure (1)..(637): unsure at all n locations
cgtccgatccttgcgcctttgaattcaccaaacacagatggtgttagtccagactcctccacgaatgtgtgcatcaatcattgctatgtaagaaatggtgacgatgttattgtcattaaaagtggctgggatgagtacggcatttcatttgctcaaccaagctccaatatcagcataagcgacatcacaggggagacaaggggtggtgcagggattgcctttggaagtgagatgtcaggtggcatatcagaagtccgggctgtgggcctccgcattgtcaactcccttcatgggatcagaatcaagacagccccagggcgtggagggtacgtgaagaatgtgtacatagccgatgtgagcatggacaatgtttcaatggccatcangatcactggaaactatggtgaacatcctgatgacaaatatgacaggactgctctccctgtgataagcaatattacaatcaaggatgtggttggcgttaacattggcgttgctggtatattggaaggcattcagggggacaatttcagcaacatttgtctgtccaatgtttccctcagtgtacaatctgcacatccatggaattgttcacttattgaaggatattctaactcagtgatcccagaatcatgcg

SEQ ID NO: 456719 - DNA, 482 bp, Sorghum bicolor
tttttaagaaaactgtcatgggtgattcctttttcattgcagtatagtactaggttagctttttaataactgtcaaaaatttacagaagatatcgtagtcactctccataaaaacgatctcttcctgcaaaacattttttttacttcacaggctatgactaaaacctgacagcaggaaagaatgtacaggccaagcatgttgagagggccgccgggcgttcatcgggatgctgcggccttctccatgtagctgtccagcatcttgttctgcactctgccgatgaacctgacgcagatgggcggcgtgacgtcgtacctggcgagcaacgcgtaagggatggagaagagcccgtccccgcatatgagcccggacgcaaacacgggcgcgaacacctgcgcgtcctccctgtccgccctgttccacatgtagaggatcaggctccccacgcacatgtcgatggacacggccggcaccagcagga

SEQ ID NO: 456720 - DNA, 601 bp, Sorghum bicolor
  unsure (1)..(601): unsure at all n locations
gtccgtgcatgccccgcctcttcactgctggtattgctcatttctatgagggctactacaccaacaaaggaatcaagattttgaagggcacggttgctgtcggtttcgatgctgatgccaacggagatgtcaccaaagtgaaattgaagaatggaagtgttctcgacgctgatattgttattgttggcgtcggcggcaggccattgacgggtctcttcaaaggccaagttgatgaggagaaaggtggactcaagaccgatgcattcttcgaaacaagtgttgccggagtatacgccatcggcgacgtggccaccttccctctgaagctctacaacgagcagaggagggtggagcacgtggaccacgcccggnnaaatcgcggagcaggccgtgagggcgatcaaggcgaaggagtccggcgagtcggtggccgagtacgactacttgccctacttctactcccggtcgttcgacgtggcgtggcagttctacggcgacaacgtcggcgacgacgtgctgttcggcgacaacgacccggcctcggccaagcccaagttcggcagctactgggtgaaggacggcaaggtcgtcggcgtgttcc

SEQ ID NO: 456721 - DNA, 649 bp, Sorghum bicolor
  unsure (1)..(649): unsure at all n locations
cgtccgcatttttcggcaatgaacaagctcaagaagatggcgttaagggttattgcagaaagcctgtctgaggaagagattggaggcctcaaggagttgttcaagatgattgatactgacaatagtgggactataacatttgatgagctcaaagatggcttgaaaagggtaggctctgaattaacggagaacgaaatccaggctctaatggaagcagctgatattgataacagcggaaccatcgactacggtgaattcattgcagctacgttgcacatgaataagctggagagggaggaaaacttggtttcagcattctcattttttgacaaagatggaagtggctttataaccattgatgagctgtcacaagcatgtcgtgattttggtcttgatgacgtccacctcgaggatatgattaaagatattgaccagaacaatgatggtcaaattgactacagcgagttcacggcaatgatgaggaagggcaatgctggtgcaacaggaaggagaaccatgaggaacagcttgcacttgaatctcggcgaactcttaaaccccagcaaaacctagctcatattggaaggccttgtcggngtacattctcttggcatctgaagtttttggatgcgttgtcgatctgcgatct

SEQ ID NO: 456722 - DNA, 648 bp, Sorghum bicolor
  unsure (1)..(648): unsure at all n locations
cgtccgacaagaacagatagccaccacttacagttgcgtgatgtcaaggtgcaaaacaatgaggcgaggttcattctgtactccatatagtatatcctgattggcccgaccatggagtgccaactaataccgatgctgtacgacaaatctggaaacgactgcatcacattccaacggaacatcctatagttatccattgcagtgcaggtattggaagaactggtgcttacatcacaatccatactacgattgagagaattctccttggagataaaagctcatacgatcttgttgaaactgtaaagaattttagatcccaacgaactggaatggtccaaacagaggaacaatacaagttctgctaccaggcaattgctgacgagctgaaagacctgctaaattcagatcattgagctgtaggaagatctgcagtgctgttggttattcggaatggccgtatttctgtgtgcaccatttttttgtgtggatctcttgataattgatcggctgcgtcaagatcatgatggcaccattattccaacatgaactccactagatggttaccaccacctacttgagtgtaaagaaccatangaagcttcatttgtgagcttnttttggatatgaacaaaacaatgtttggaactg

SEQ ID NO: 456723 - DNA, 635 bp, Sorghum bicolor
cgtccggcatttttggatgcttttctcatactctggattttcacatctctttcccgcactctagagaaactacaggcaaggaggagttctgtgaaattggatatatacagaaagtttacaaatgcattggctgtttctgtgatagcttcagttgcctggattggttatgaggtctatttcaaagcgacagaccccttcagtgagaggtggcagagtgcctggatcataactgccttctgggatgttcttgcgtttgtgttgcttcttgtgatttgttatctgtgggcaccatcccaaagctcgcaaagatatgcatattcaggtgaagctgctgacgatgacgatgaggaatcccaatctctgacaaaaggagattgtgaagtagggatggtaaagattgacaaggacagaagtgctggtgttagcggtgctttcagcttagatgatgaggctgaggaggacaagcgggaatagcattttcttgttcctgatgcccaggtcccagaaacaattgatattttggagcaataatgttccaagaatacttcttttcctgtctaaattttggcggtccagtctccaatgcccatctgttccaaagttacatatggtggttgtagaagtgctttggtgtc

SEQ ID NO: 456724 - DNA, 391 bp, Sorghum bicolor
cgtccgctccccgacgagctcatcttccacatcaactacctcggcgccgaccagccaaccttcacgctcaacttctccaaaggttcgagccagattatcgcgcagtattaccagctcatccgcctcggattcgaggggtacaaggacgtgatgcagaactgccgcgacaacgcgacggtgctccgcgagggcatcgagaagatgggctacttcgacgtggtgtccaaggactcgggggtgccgctggtggccttctccctcaaggactcctccaagtacactgtgttcgaggtggccgagagcctccggggttcggctgatcgtgccggcctacaccatgcccgccgacgccgagcacgtggcgtgatgcgcgtcgcatccgcgaggactt

SEQ ID NO: 456725 - DNA, 471 bp, Sorghum bicolor
cgtccggcagtagagaaggaatttaatgtacctggttttgcaaagatggtcattactgctagcaacgacctgaatgaggaaacaattgatgccctcaacaaacagggtcatgaggttgatgcctttggaattggaacttaccttgtgacgtgttattcccaagctgctcttggctgtgtctttaagctagttgagataaataatagacctcgtattaagctttctgaggacgtggcaaaagtttccattccgtgcaaaaaacgatgctttagactgtatgggaaagaaggctacccactggtagatatcatgattcgtgaaagtgaaccatcacctaaggcaggagaaagaatcctctgccgccatccattcattgaatcaaagagagcatatgttgtcccccagcatgttgaggagcttctacagtgctattggcctgggacatcagataaacctagagcagagctcccc

SEQ ID NO: 456726 - DNA, 394 bp, Sorghum bicolor
  unsure (1)..(394): unsure at all n locations
gaccacgcgtncgcccgcgcgtggcgaactatctcaagagaacttggtccaccaggatatgggcctggagaaaaccagcgcagtatcacttcatggaatacaaggtgcgagtcgggagtatttacgagtcctgtgaccacctcaagagaagacggtccaccaggatatgggcctggagaaaaccaggagaatgacagtacgagctgtgagttgagaatgtttgatccacctacaaccatctccagagaagttgcgccaccaggatatgagcttattggtaaaaacaagggcaacgacacttcatggactacgaattaccagcagggagtgtttacgagtcccanaaccatctcaagagaagcctgtcctccaggatttgggtctgggggagaac

SEQ ID NO: 456727 - DNA, 450 bp, Sorghum bicolor
  unsure (1)..(450): unsure at all n locations
cgtccgatgacgcagagcttcagaggagcgccacaaggtgtaaatctttctctcataaatggaagcatggttactggcgttgaaactctgagacaagtcgaagccaagtatcctgctttactgtttaaacagcagcttacagcatatgtggagaagatatatggaatgatccgggataatttgaagaaagagatatctcccttgcttggcttgtgcattcaggccccgagaacatcaagggcaagcttaatgaaagggtcttcacgttcaaacactaataccgctgcccaacaagcnttgattgctcactggcaggggattgtgaagagcctaggaaattttgtgaacatactgaaagcgaacaatgttcctcctttcttggtgcgaaaagtattcactcaaatattctcatttatcaatgtacaactatntaacagtttactactgaga

SEQ ID NO: 456728 - DNA, 415 bp, Sorghum bicolor
  unsure (1)..(415): unsure at all n locations
cgtccgcccacgcgtccggagctcttcacagaatgatttccccttgaatcaatcactacatagtgcgggctgcttagatgagtcaggttatgctccatgtgcagagaattctgaacaagcaaatcaacagtttgcaacctttgtcaaggtttacaaatctggaaacgtgtgaaggttgctggatatcactagattcagcagctatgatgaacttcgtagtgaggtggggcgtctatttggccttgagggccagttggaagaccctntgagatcaggctggcagcttgtatttgttgacagagaggacatgtccttctagttggcgatgacccgtggcaggaatttgtgaacacgtgtcctgtataaagatactttcacncggaggggttcagcagatgggcaagccgggcattca

SEQ ID NO: 456729 - DNA, 499 bp, Sorghum bicolor
  unsure (1)..(499): unsure at all n locations
cgtccgcggacgcgtgggtgagaccacatcccgtttgcttacctggacaatgttcttgctcagtgtgtatccagaatggcaggaacggctaagagaggaggtcctgagagaacgtggaaaggaaaatcctactgcagacatgcttaacaaatttaaagagatgacgatggtgctccttgagacactgagactgtatactcctgttatggtcatgctaagaaagcctatctccgatataagattgggaagcctcagcatacctaaaggcaatggaattgccatacctattccatttctccaccgagacaaagaggtttggggtgacaatgccaatgattttgatccactgaggtttgagaaatggatcacaaatgcagcaaagaccccacaggctcttctgcattctcaataggaccaagatcatgcatcggtcagaacttcgcaatgttagaagcaaaagtagtaatggcccatatnctgaagaaattctccttcacac

SEQ ID NO: 456730 - DNA, 462 bp, Sorghum bicolor
cgtccgggctaatgctggaccgaacaccaacggcagccagtttttcatttgcactgtcaagacaccttggttggacggaaggcatgttgtgtttggccaggtcctggaagggatggacatcgtaaagttgatcgagtcacaggagactgacagaggtgaccgcccgaagaagaaagtagtcatcagcgagtgtggggagcttccagtggtttaagtgttgctcatctgttgtccgtcttacctcggatggatggtgatatctccccctgagtttactggttctgatgctatgaccttgtcttgctatctctatgctagttatagagatattcaagtaagatcccaaatctgaggcatactgttgctgctcggctggaataaatgtgctactttccccttgcccagtttagggaaaaggggttgttcacgaagtcaccctgtaaccttgttgttcatactcgg

SEQ ID NO: 456731 - DNA, 571 bp, Sorghum bicolor
  unsure (1)..(571): unsure at all n locations
cgtccgcggacgcgtgggttcgtcgcgtgggagaagtgcgtggaggaggcggaggccgcgggtgccagcgtcgacgtcgtggagcggtgccaagacgtgacggccgcgctgcggaagtgcatggacgcgcacgccgactactacgagcctatcctccgggccgagcgcgccatggctgcggacctcgaggcctttcaggccgaagaagccgcctccgcctccgcagcgtcggcgtccgaggaaggccagaagaaggaggcggcggccgaggcagcggcgccgccgtcagacggaggccagaataagcaggtggctgaggcggcagtttcggaggagagcaaaaaattctgcagcctgattgggcgaagaggcagcggcatcttcaaaattttttgtgagggatttgaggatatgaataccctntcttctttcgagcatcaattaacatgttgtgacacgagagattggtgtgactagtgagggagatagatttctgtcctcttctcttacataacatgcgatcttttgattgaatcaaatatacacatgttgcagatgacttgactctgct

SEQ ID NO: 456732 - DNA, 534 bp, Sorghum bicolor
  unsure (1)..(534): unsure at all n locations
cgtccgaatatacaaacgcattgcttggtccatcagaactgattgagatgtgcttgaggagagaccgagagctctcctttaaagcttttgaagtatttgctttgacaagctcatcattccgaagctccaacagaggtcttctagaggcatgctggatgaatgcaactgaccaggatgattgggtaaagctttcagaggcatccacgttagaaggttggagtgacgaactcatcgaagaatctcttcaagcaactgtcctcttcaaagcttccaggttgtgttacagcccggatgctgtggtgtatgatggcacctttgaggatgtgctgcctgtgaagaaagaggatgtccatctgagaggtttggagagcaaatgcttgcagttgaagaagtgctgatgcagcacaaagattttccagatgcctggtaaatgatgatgactgcagtgattntgggcaaggaactaacttttacagccacagaacctgtggagatggactcataaatnaatagttntagattctatgatagact

SEQ ID NO: 456733 - DNA, 462 bp, Sorghum bicolor
cgtccgcacgcagcggcgactcggggcctgccgcgcttccccgtgggccgtggccgtgcgcaacatcctcgattccaccggagggaaaggaaacgccgggagaaggggggaggaggcgtggcggccatgtctccgatctgggtgttcgggtacggctcgctgatctggaaccccggcttcgcctacgacgcccgcgtcgtcggcttcgtcagggactaccgccgcgtcttctaccaggggagcacggaccacaggggcacgccgcagttccccgggaggaccgtcaccctcgagcaccagcccggagcgacctgctggggagttgcttatagtataaaggaggaagataaggagatagctatggagtaccctgaagtcagggagaagcaatatgatgagaagggttacctggacttgtatactgattcatcgcccaaagtaccagctgtcgaaaatgtgatg

SEQ ID NO: 456734 - DNA, 469 bp, Sorghum bicolor
cgtccgcaccaacactgtctggaagactggagtaaaagtggagacccagaagatgatgctggggacgttcagcccccagttagagccctacgtctacgagggtgaagaagagaccacccctgctggcatttttgcaagaggttcttattctgctaaactaaagtttgttgatgatgatggcaagtgctacttggagatgagttactactttgagattagaaaggagtggccagcaggaacccaatgatgtggaccaagggtactcgtcggagtatgttagagctcatagctaagccaagcagaaaatgtgctattgcttcaagaatgatccattcactatttcttcacctttaatcgcattttaatttaatttgagttgtcattggaatgtgtttatcgcaaaaaaaaactttttatttgcatataataatacctgtatggagatattaagagataattattgtagtgt

SEQ ID NO: 456735 - DNA, 526 bp, Sorghum bicolor
cgtccggctgcgaaggatacctgcgaagcaatggaccaatgggcccagcatcctcaagcagagacagctctgagtaacatccttccatgtgtggatgaaagcacaacgaatcgaacattgtatcagagcaaagaggttgtggtgaggcttgttgggatagttaacagagctatatctgctctttcaaatcgaagaccacatcataagcatccaggacagttcatgccttacttatgttctccctacgattcaaacctcaatgatcggccgtgcaatcatagggaggtcacatttgaaaacgcaacaacagcatggctgaattatacatgcatggctcaagacaccgacttgtgttcaggcaacacgaccttaacctacgacatctacggccaactcgtcctggctgccaatgtaagctacgcgctgtaccattacgcccacttgctgctcaacctccaggacttgaagtttgtccgagccaccttcagcgccatagcctttcagtactgcccgcctctggagcatg

SEQ ID NO: 456736 - DNA, 363 bp, Sorghum bicolor
cgtccgctcactcgcaagatgctggcctacccttgggacaataccagttaggatcgctctatacagagctctctcatatgttattaatgagggacttctgactgaacgctccgtttggatcccttctttggctggtcctacaacaatcgccctcgacaaaaaggccagtgaatatcctgcgcttttccttgtactgatggatatccaacatgtcggctggtcagacaccttggcataccttgtgataccagatcttcttggcatctcacactacatatctactcaagtcacgcaggcaccacagagcactgatactagccaacatggtgctgacgctgtaacagagcccttaccattgctaat

SEQ ID NO: 456737 - DNA, 482 bp, Sorghum bicolor
  unsure (1)..(482): unsure at all n locations
cgtccgctcggcggtgaactggttcttcttgggtggagctgttgcccccctcctagtatggcttgcacacaaggcattcccaacccagagctggatcttactcatcaacatgcccgtgatgatcggtgccaccggcatgatgccacctgctactgcagtcaactacaccacatggatacttgttgggtttttgtcaggttatgtggtttacagatatcggcgtgactggtgggagcgacacaattatctgctttccggtgcactagatgctggtttggcattcatggctgtcctgatttacttatgcctaggctnggagaacatcagtttgaactggtggggcaatgatttggacggatgtcctctcgcttcttgtccaactgccaatggtattgcgtcgagggctgcccatgtatacatgagaacccatgggtgacctggggagaagagaacttgacatgtcaagtggtgaagagcaatgt

SEQ ID NO: 456738 - DNA, 455 bp, Sorghum bicolor
  unsure (1)..(455): unsure at all n locations
cgtacggctgacatggctgtcatgattttaagatatttcaatgttattggctctgaccctgagggaagattaggtgaggctcctaggccagaactccgagagcatggtcggatatctggggcatgcttcgatgcagcattaggagtcattccaggattgaaggttaaaggaacagattatcccacagctgatggaacctgcataagagattatattgatgtcacagatttagttgatgctcatgtgaaagcactcaacaaggcagagcctagaaaagtcggcatttacaatgttggaacaggaagaggtcgctcggttaatgagtttgttgatgcctgcaagaaagcaactggngttaacatcaaaattgaatacctcagcagaaggccaggagattatgcagaatatacagcgaccaacaaagataacaagggctcaactggcagctcaatata

SEQ ID NO: 456739 - DNA, 570 bp, Sorghum bicolor
  unsure (1)..(570): unsure at all n locations
cgtccggtgaattatgcaaaagtgtttgatcttgcacaaacacatttatctcaccgagagatatggaggtgtgctacttggctgactttaattgtccctactagcatgacagcctacctatatctgtactcacatggagaagtgtctcttgcagcatctcaaccagttctcttgtatgctattcttctgatgatcctcctttctccttttgatatgttttacttatcatcacgcttttactttctgaggacagtctggcgtataatactgcctttacaagcaattacatttcctgacttctttttggctgatatttttacatccatgtcaaaggtgttctcagatctggagcgttcggtttgtcgtatggtaaatcgccaggttgcaacaatcgcttggtttgaagcagattctgtttgtggcggtcattctgtagctattcctcttgttcttgtgttcccctacttgtggcgtttcttccaatgtctccngcagtacanggatacaaaggagaagacatgtctcttgaatgctctcaagactcgacagcaattcctgtgattttctttc

SEQ ID NO: 456740 - DNA, 542 bp, Sorghum bicolor
cgtccggctgactgtcaatgtagtggcacttctagttaacttttcctcagcctgctttacaggaaatgcaccgctgacagctgttcagcttctttgggttaacatgatcatggacacccttggcgcgcttgcgttagccacggagccacctaatgatgacttgatgaacagagagccagtaggaaggacagggaaattcattacgaatgtgatgtggaggaacattctgagtcagtctttctaccagttctttgtgatgtggtatctccaaacgcacgggaaaaacttctttgggcttgaagactctggtactgatattgtgctaaatacaatcattttcaactcattcgtcttctgtcaggtgttcaatgagataagctctcgggagatggagaagataacgttctcaagggcatgactaggaactactgttcatggctgccttaccagcacgtcatcttcagttatcatggtgcagtttagggagttgcaacacacccctgacatcacaatgctgcccaggctctcgctgctgatccatg

SEQ ID NO: 456741 - DNA, 503 bp, Sorghum bicolor
  unsure (1)..(503): unsure at all n locations
ccgtccggattccggtcgaccacgcgtccgagcattttacaaacttttgcttggacaagaacttgatttgtatgatatattatcttttgatactgagttcggaaagacattgcaagaactgcaaattcttgttgcacgtaaacaatttcttgagtcctgctctagtgagaaccaaaaaatagaagaattatgtttccgtggtgctcccattgaagatttatgtttggacttcactcttccgggctatcctgattatgttctcaaggaaggtggagagaatgcagtggtcaacatttataacttagaagagtatatttctttggttgtggatgctactgttaagactggaataatgcggcaagtagaggcattgaaggcaggattcaatcaggtgtntgacatatcgacactccaaatattttcttctcaagaacttgattatctgttctgtggtcgccgtgaactttgngagccggaaacactgcctgaacattataaattcg

SEQ ID NO: 456742 - DNA, 357 bp, Sorghum bicolor
  unsure (1)..(357): unsure at all n locations
ggtccgtccgaattcggtcgaccacgcgtcgtcgcgggcgggcccgcacgctgcgcangtgaacctcaccacggcaacgaccagacctcgtacggngtgagcgtggtggacggcttcaacgtgggcctgtccgtgaccccgcacgagggccggngcaactgccccgtcctggcctgccgcaggaacctcaccgagacctgccccggcgagctgcagctgcggtccccggcggngagcgtcctcgcgtgcaagagcggctgcgaggcgttccgcaccgacgagctgtgctgccgaacatgtacaacagcccgcgcacctgccgcgcgtncaagtactcggagttcttcaagcgcgagt

SEQ ID NO: 456743 - DNA, 424 bp, Sorghum bicolor
cgtccggccatcgactccgtggtggatcccctccgcgacttcgccaaggacagcgtccgcctcgtcaagcgctgccacaagcccgaccgcaaggagttcaccaaggtggcggcgcggacggcgatcgggttcgtcgtcatgggcttcgtcggcttcttcgtcaagctcatcttcatccctatcaacaacatcatcgtcggttccggctaggcttacaggagtgcaggacgattagcatgggagtagtgcgatacttctgagagcaggatcttggtctttcgaatagtattgttaatgaccagttttattcgttgtgtttctggagtaatcgttgtactgtaagacttcaggatgtctggataccggattctgagtagacctgaaaccttgataaagcagccagtcttggaaagaaagttttatc

SEQ ID NO: 456744 - DNA, 462 bp, Sorghum bicolor
cgtccgcccacgcgtccgcccacgcgtccgcgaaagttggaggggtgaaacggactttgtctgctctaatcccttcaaagtaaggcctttcctcctccgttgtgtagcgtatactgctgatctcgccgctccggttggtcttgaccccaacgaccctctcattgggtctaggtggaaggatcctcgtgccggttggcaccttgatggtggtcttcatcttggatgatgatccattgaggagtaggggtgcggtgagaactggttgagcatgataggattgggcggagctgcgttggcgtaatggcatggcttctagctgtcgctctgtgttggctgggacgagagcacgtgcgtcggggtcttccgtaagctccatggtgaggttgaaggggacaactttccaatcatcatggaactccttggccattggagcaatgaggaactaatcaagctcttattgat

SEQ ID NO: 456745 - DNA, 462 bp, Sorghum bicolor
cgtccgcccacgcgtccggaacaaagctctcacactcagtgttgtttgttcaactggaaatgatggaaatggtcatgtgtttgaggtgtgcgatgactcagtcaatgttgtcaacattgatacatgggagtgcacctgcagaagatggcatgtgtctgggataccatgctcgcatgcaattgcggtatttgaccgtactgagcagtgtccacttgactactgctccaagtattttaacaacggaatgttaaccgcttgacttatgccatgtccataaatccaatacctgatgtttttgtacctactgcagcaggtgacccatcacagggcacaacattactttcaagccccattctgacccgaagacaagtgggcagaccaaaggaaaagccagctgatccgcgtattgcaatcaaaagagcagtgcgctgcagcagatgcaagggctatgggcacaataaa

SEQ ID NO: 456746 - DNA, 401 bp, Sorghum bicolor
  unsure (1)..(401): unsure at all n locations
cgtccgcccacgcgtccgaagatattccggctttggctgatatagttggtgacgaggacaaggctaaagaaattgttgaagcagcaaaggcttcaatgggccaggatctgtcaccagttgatttgatcaatgtccagcaatttgcccaaagggttatgaacctgtctgagtatcgtaaaaacctttatgaatatctngtgactaagatgaatgatattgcacccaacctcacatcgttgattggtgaagtagttggagctcgcctaatctctcatgctggcagtctttcaaaccttgctaagtgcgctgcttncacccttcaaatacttggtgctgagaaggccctattcagagcacttgaaactaaangaaacacaccaaagtatggacttatattccac

SEQ ID NO: 456747 - DNA, 379 bp, Sorghum bicolor
cgtccggtcacacatccgctgaggtaaatcctcatatctgagtcgaagcacagattgcgaaacattctataagccgtatataactcatggtgaaggcaaggagttagctcaaggaaagaagcacagcagcatatgttgaaattgaagtacctgaactttaagatgccacaaacccaaatattagaacttgattgggttctgctgcatatgctcctgacagagatgcaatggtacagaaagtcaaatcattacgtggaggcaacgcatacatgtagcagagcattattcagctcttgctagcataacatcggaagaaggggcccctgaacagaatgcgccgatacgagtgaaatttgagataccatatttcaccgtatca

SEQ ID NO: 456748 - DNA, 407 bp, Sorghum bicolor
  unsure (1)..(407): unsure at all n locations
cgtccgaggacatcttcggcggcaagagcgagctgctcctcaagtccaaccctgtgcacaacaaggtacccgtgctcatccacaacgggaagcccgtctgtgaatcgctgatcatcctgcaatacatcgacgaggcctttgccggcaccggcccgaccctcctccctgctgacccctacgaacgcgccgttgctcgcttctgggccgcctacatcgatgacaaggtacgaaaagaaaaccccgtcttccaatcgatcgcatcaattggctgcgacatggccggtttcgttcatagatggggcaggcatgcgtgatgtggtcgtgcaggtgctggccgcttggatgcaggcgtncaggggcaagacggaggaggacaaggctgangggagaaagcagtggttcgtcgc

SEQ ID NO: 456749 - DNA, 381 bp, Sorghum bicolor
cgtccggacaacgtggtgcagacgccggaggagacgtgcgcggacgagaagggcaccgcggagtgcgcggcggcatgggacaatgtggaggagatcagcgccgcggcgagccacgcccgcgacaacctcaaggagaacagcgacccgctggagaagtactgcaaggagaacccggagaccgacgagtgccgcatctacgacaactaataataagcgcgtgtgtacaagtaattaatcgatcacacgtgttattagtttgttaatgaatcaaacgtgttaagttattagtttgttattatgtataggcgacataaaaggaattgaaggttgtgtgggacataagaataatactcggggaggaggaatgatgaacacttgtat

SEQ ID NO: 456750 - DNA, 445 bp, Sorghum bicolor
cgtccgtttaaccatgaaaatggtagaaatgggattattgatctgttcttccaggacaggtacttgaatgctatacagacaaatgcacaccatcttctgagatatctagctactgcagttgttgtcaacaaaaggagaaggaatatgcttaaagagttgattaaggtcattcaacaggagcagcatacctacaaggatcccataactgaatttctggaatgcttatatgtcaactatgattttgatggtgctcaacagaaacttatggagtgtgagcaggttatactgaatgatcctttcctgggcaagcgcatagaagagggcaattttgtcactgttcctttgagagatgagttccttgaaaatgctcgtctgtttattttcgagacatactgccgtattcatcggtgcattgatatcagcatgctttcccagaagctgaaca

SEQ ID NO: 456751 - DNA, 517 bp, Sorghum bicolor
cgtccgggcagcttctgaaggtacttgagtggctagctcagaatggaatgtcgacatgtgaacatatacatggaggtcctccatgtgctccagttgaatgcttcacagactcgatgcttagttgaacacgacatcaggacgttcaggttaatcagattgctcggagcttacgtgatagacggatcccccacaatacatccacattcgtacatgatgtacagtggactaatacagtctggagttctggtactaggaaacgcatgagccgatgagactatcaacctgacgagcattataagatggtcggactcataatacaaaaagtttgttctggctgtatgagaaataagtcggataggaatcagtgcgcatacaactattgtaatgatgttcttggcatgtgaagttcaacacagggtgcacatgatgaagcccctcctgggttgagtctcaactggagtgtcgggctgcacaactttccatatgcagtgaggttgctccaggactttgcatggag

SEQ ID NO: 456752 - DNA, 326 bp, Sorghum bicolor
gcatgggactgcgcagtcatcggctgatctatgtgtccgtattctcgacaacattactgagcctctatgtatatggcttttgctgggtgtacattgagaagattagagacgcataacgatcgtcgatttggaaagcaatgtggaagacaccagcatcaattgttctgatcatatactgcttcatctgtgtgcggatcgtgggtggtctgtctggctttcatttgtatctcatgagcactaaccagacaacctatgagaacttcatatatcgtgatgatcggcgggccaatccttacaacagagggatcgtgaacaactggatggag

SEQ ID NO: 456753 - DNA, 325 bp, Sorghum bicolor
cgtgcgttgtcctcgagtagagcggtgcatggatcagcgcagacgccagaggattcaggacacacgatccggttcgaggggatgcggccaccactcaagggcaagctcaagggctatcctccagacttcaaagcgctggtggaggaatgctggcacccgcaggccatggctcggccgacattctcggagatcatcatccggctggacaagatctacagccactgccaacagcaaagggaagctggaaggagtcgctcaagctttggaaatgatcgacatcgctggctcgccttcgtctatgtgtacatatcgctgcaaacgcgtc

SEQ ID NO: 456754 - DNA, 396 bp, Sorghum bicolor
cgtccgcggacgcgtgggcggacgcgtgggacggggccaagttcacgctccagttctccacgccggggcaggccgtggtccaggacgacgtgaaggtgaccctgtacgcgccgccgttcacgacgcacggctactccatgaaccagcggctgctggtgctgtccgtcaccaccttcactgccgacgggcagagacacacggtaacggtcgacgctccgggaaagcctgagctcgcgccgcccggctactacatgctgtacgtcatcgcgaaaggcgtgccgagcaaggcggcgtgggtgaaggtacacaagtgagaagagaaggcggctcgatcggaggtgtatgtccgtcgtcgcgtttggcacgagaatatacgtacgtgtccaccggagtagc

SEQ ID NO: 456755 - DNA, 435 bp, Sorghum bicolor
cgtccggccctattgactctgagaaaaagcagaaggagatcattgagttatggcatgaatgcaatgtctctatagtacacagaacatatttcttcctcctcttcaagggagacaaagcagacaatatctacttggaagtagagcataggagattatccttcattagaagttctttcaatgccgggtgcgagcctagtggtactgttatatcaagcttgagaaatcttcggcatgaaagagacatgctctataagcaaatgctgaggagagtcaatcttctggaaagagagagtctttatagcaaatgggggattgatctgaattccaaacagcgaaggctgcaactatcgcgtcgtatctggacacagactgacatggaacatgtgagagaaagtgccactcttgtcacaaaactggtggaacatctggagaagg

SEQ ID NO: 456756 - DNA, 427 bp, Sorghum bicolor
cgtccggtccggaagggcaagatggaggtctacctgttcggcctattcgacgaggacatgaagagcatcgcgccggggaacttcgagcggcactggggcatcttcacctacgacggcaagcccaagttccccatcgatctgacggggcagggccatgacaagctcctctcgccggtgactgacgtcaagtacctcccgagccagtggtgcgtgttcgacgacggggccaaggacaagtcgaagctgccaggaaacctgcagtacgcatgtgcgagcggcgactgcacggcgctcggctacggctgctcctgcaacgggctggatgagaagagcaacatctcctacgccttcaacatgtacttccagatgcaggaccaggatgtgcgcgcctgcgaattcgacgggctcgccaagataacagacaaga

SEQ ID NO: 456757 - DNA, 430 bp, Sorghum bicolor
  unsure (1)..(430): unsure at all n locations
cgtccgcacacccaccgcagcctcacctaccactaccaagaagatggccagcggcggcgtggtgaagcacatcctgctggcacgcttcaaggaggacgtgacgcangagcgcctggacgagctcatccgcggatacgccgcgctcgtcgccgccgtcccctccatgaaggccttccactgnggaactgatgtgagcatagaaaacatgcatcaagggttcacgcatgtctttgaatcgacatttgaaagcacggaaggaatcaaggagtacattgagcaccctaaacatgttgaattcgcaaatgtgttcttgcctgtgttggacacggtcatcgtaatcgactataagccaacttctgtcaactagtggtggaccctgaaccagcanngcgagctgttttgcagttctcattatctatatatctataat

SEQ ID NO: 456758 - DNA, 374 bp, Sorghum bicolor
cgtccgcccacgcgtccgggacaatgcagtttgctgcaaggataacaaatcctgctgccctcatgactatcctgtctgcgatacagatcgcgggctgtgtctcaaggccagcggcaactcttctgctatagaaggaatcaggaggaaacggactttctctaaagctccctcgtggactggcttagtggaattgatggaccattgagcatataatcagatatggatggaaggtccaagcaggtttttgtgcgaaccgtaagtcggctagtggccttgttcaagtgccctgccacattcctgtatgtttacccgccgcattgcacccagatgcctggatttgctctgtattaatgaacccctgctcttggtgtaaa

SEQ ID NO: 456759 - DNA, 487 bp, Sorghum bicolor
cgtccggtctggccattaaccgcactaggcattgagccaaagttttcaatgccccactcagctaaagtggatgaagtggtggtggcaaatagcctaatcggaagtgtactatcagactacttctgggctctttctgttgtttggactactcccttggtggccaccctaggcatgtctctcacaattccgctagcaatggttgctgatatgatcattcacggccgtcactattcagcagtatatattcttggttctgtccaggtattttcaggatttgttatcgcgaaccttgcagatcggttttcacgttctctagggctattatagtttcataaaccaaaacaggtccttattagagtgtacatctggaagctcaaagattgggttggtttgacaaatacttcagaaaacgtgggttcttttccctttgctcctttgaacataggggcggtgaattttgccgtggtgggtagtgaaagccagcgtt

SEQ ID NO: 456760 - DNA, 348 bp, Sorghum bicolor
  unsure (1)..(348): unsure at all n locations
cgtccgcgttgcgcacctcctctctcaccgccccgagacctccacgcttccctcaccgccctgaaccgtggcgcctccccccgctgcctccgccgccgcgatgctgctcgcggcagagcccgacgacgctcatgaggaaggggagaatcagcagctgctaatcacgacgaagggagggcccgggcttgagggactggtggtggggagctactgccacgatgtgctgatccggngcgggcgcgtagtgggggagacgctcggcggngctgcggccttcgtgttcaacgtgctcgacgccgnctcgccccaggacgctgcgctcaacgggacaagccccttcgtcgtcgt

SEQ ID NO: 456761 - DNA, 556 bp, Sorghum bicolor
cgtccgcagcggtaaagttttctttgccccttgagggcatatgcccttaagggcaaaaaaaaaaaaaaccgcgttccgaacccagcgcgcccgcgttccggagctcctacttcaactggttccacttctccatgtcctggggctacgccatcgccacggccgggctgagctacgtccaggacaacgccggctggaccgtcggtttcggcgcgtgctggaccgcgttggcgctatgccttgccgtcttcttacttggcacgcggatctaccgtgccaagcaacgccccgttgatggcggcacgttcgctgaggccgttcgggcgttgggcgcgagggtcttccgtcgaaaggacaccaccgctccaactgatgaaaggtgaacaccagcagacacttctccattgtattgctgcaggctgcttctatctccacaacacgaggaggacggactcatagctaagctgctcccgatatggttgacgagcttagtcttcacgtacggccatctacttcgcaggtgtccactctgttcaccaagccagccagcacattggat

SEQ ID NO: 456762 - DNA, 329 bp, Sorghum bicolor
cgtccggtgaagagcgtaatcaaggaaggccacaagagcttccccagtggacacagttcatggtcttttgctggtttaggcttccttgcatggtacttagctgggaaaatcgcagcttttgatcgcaaaggacatgttgcgaagctatgcattgtgtttctgcctctccttactgctgcacttgtggctgtttctcgagtggatgactactggcatcattggcaagatgtatttgcaggggctcttataggtcttacagttgcttcattttgctatctgcaatttttcccgtatccttttgatggcgatgcttggtggcctcatgcata

SEQ ID NO: 456763 - DNA, 466 bp, Sorghum bicolor
  unsure (1)..(466): unsure at all n locations
cgtccgaagctctggtgatgctcttgactctaaagatggcctgcagcttcgtaggcttgccctcgcctacaaggttccaattatcacaaccgtggatggtgcacgtgcctccatagatgccatcaagagcttgaagaacaagtccattgagaccctcgccttgcaagattacttccagactgctgatacttcggcagatttacaagcagcggcacaaactaccccttagtggtatcttttttttccatataatgtgagcctagctcgagccaaaaccacagccaatatgatatttttgtttacggttgcaccagcagcacgcatgcgcaaagacaagcatncagattgtatcggtcacaaacatggctagataaaaatgtgttgggccttatgtagttgtactttgtatgtaggggatgagcatncgtccacagaataaggttttcccacctgcggtttgatgact

SEQ ID NO: 456764 - DNA, 496 bp, Sorghum bicolor
cgtccggcgggtccgggtgcagccgcggcccgcggtgcgccgtcgacgtgaacgcgcggtgccccgccgagctgaggcaggacggggtgtgcaacaacgcgtgccccgtgttcaagcaggacgtctactgctgcgtcggatcggcggccaacaactgcgggccgaccaagtactcgaggtacttcaaggggcagtgtcccgacgcgtacagctacccaaaggacgacgccaccagcacattcacctgcccaaccggaaccaactacaaggtcgtcttctgcccgtgaccgtgaggctgaagatgaccggccgggagtgatcatgcgaatgcgacgaagaaataaaaggatcgatcgaggtttgtgtagtaagctagtagtgtgctcaactggagcaaaaataaataaagccaacaattaaacgcgtgtgatttctatgtcaccaactcagtatatatagtcaccatatataatgaagcatactgaagttgtttctt

SEQ ID NO: 456765 - DNA, 351 bp, Sorghum bicolor
cgtccgcttcctatgaccagagtgtcgagctatttagggacaaacttggtgcaggagaaatttctactgttgttggagccagtgctatttctggattcttcgcctcagcatgcagtttgccctttgactatgtgaagacacagattcagaagatgcaacctgatgcgaatggcaagtacccatacacagggtctttggactgtgccatgaagaccttcaagagcggtggtccattcaagttctacactggtttcccagtgtactgtgtcaggattgcaccccatgtcatgatgacctggatattcttgaatcagatccagaagcttgagaagaagattggcatataggatt

SEQ ID NO: 456766 - DNA, 338 bp, Sorghum bicolor
cgtccgtgggaattctcgaggtcaagtggtccggcatcgagcttgaggactggtggcgcaacgagcagttctggctcatctcggggacgagcgcgcacctgtacgcagtggtgcaggggctgctcaaggtgatggccggcatcgagatctccttcacgctcacggccaaggcggcggcggaagacaacgaggacatctacgccgacctctacgtggtgaagtggtcatctctgctcatcccgcccatcaccatcggcatgatcaacctcatcgccattgccttcgccttcgcgcgcaccgtctacagcgacaacccgcgctggggcaagttcatcggc

SEQ ID NO: 456767 - DNA, 439 bp, Sorghum bicolor
cgtccgccaaacacccaggctatcatatatgttgttgattcaagtgatacagataggcttgtaacagcaaaagaagaatttcatgccatccttgaggaggatgagcttaaaggtgcagttgtccttgtatatgcaaataagcaggatcttccaggcgcactcgatgatgctgccattacagagtcattagaactgcacaagatcaagagccgccaatgggcgattttcaaaacatctgcaataaaaggagaggggctctttgaaggtttggactggctcagtaatacactgaaatctggaagcagctaattaggagcctctatctccatgtcatgaatcatttgctggatggtaaaaaatagagccgatgctgcccatttccttgcaagtcagcgcacaagtcccattctctttgtttaactccagaagttctacacca

SEQ ID NO: 456768 - DNA, 192 bp, Sorghum bicolor
cgtccggcaatgcgcccggtgccgtgctggggcgcagagacgatctgaatatctgatggtggaaacaccggataataaaaagcgtgccggcgatgtgcgttctttgcaaaaatacaacactgccaggtttatttacactactattacggcccttatttatggcaccatgttctggaaccttggtagcaaaat

SEQ ID NO: 456769 - DNA, 398 bp, Sorghum bicolor
cgtccggcagcaggtcctgtaccattggttgtgctcaccaaatcctgatttcaacgagataatgaactggtataagggatggaagggtcttttcccaccagagttacttgccaatgagcgcatacggatgctgctaactgctggtcttgacatgatgaaccaagctgctgaaggacttgaggtggtgcagccttgggctagggagaatgtgggttacttgagggcaactgagaagcggcagtttgatgcagcacagcaagcttaccatgctgcgccaggagctgccatggcagatttgagcttcaaggagtctatacaggcatatgcaatggagcaaggtttgttatttatgcctagagttggcaagtctacaatggcatgccagtgtatgagtttgg

SEQ ID NO: 456770 - DNA, 306 bp, Sorghum bicolor
  unsure (1)..(306): unsure at all n locations
cgtccgcggacgcgtgggcagagacctatattttcccactaagtactctcagtcttctttcactcaatgtatggcttgtatttggaaacaaaacatgtcatactggaggaaccctccttacaacactgccaggtttattttcactactattacggcccttatttttggcaccatgttctggaaccttggtagcaaaatagacaagtcacaggacttgttcaacgccttgtgatccatgtatctntcggtgatattccttggttgcacaaattctatctctgttcagccaagtgtggccgttgagcg

SEQ ID NO: 456771 - DNA, 353 bp, Sorghum bicolor
  unsure (1)..(353): unsure at all n locations
cgtccgcaaagttcttagggtgtttccttgaattcagtcacatgacagtccctacatcccaaaataactgcccatctcacttttctaatggccagagcattgagaaagtagcaaagacaaaagctgctggccattagcgacatgaaattaatacacataatctctatgtccaggaaatatatgaccatgatattttctcagcggatgatatcatgggtgaagcagagatagatctccaaccaatgatcacagccgccatggcctttggagatacttcacgtctnggtgacatgcaaatngngaggggttcatgaccaaagacaatgccctgatgaaagatagcacagtgaatg

SEQ ID NO: 456772 - DNA, 243 bp, Sorghum bicolor
  unsure (1)..(243): unsure at all n locations
ataagcacgcanagcgcagccaaaattgaagagttaatccaggaggaccataatgtgaagcgcaagcgtgaaaaattcaagttacagtcatcccttctttccaaggtcactcgcctgctcagcatccatgacagtcggtcagccagtgctactttgtcgacagactcggctggatcagagagtagcccgaggaaaggtggatactccggtgacgaatggaaatctgcattcgaagctggatcg

SEQ ID NO: 456773 - DNA, 342 bp, Sorghum bicolor
cgtccggtcgaccctgatcacttcaagggaaaccacacctatgttcctgtttccaccaagggttactggcagttcaacatgggtgatcttctcattgatggccagtccactggtttctgcgccaagggctgtgctgctattgtcgactctgggacttctttgctgggcggtccaacgactataattgcccaagtgaacgaagcaattggggctgctggaattatcagccaagaatgcaaagaagttgtgagccagtatggagagatgatcctcgaactgctcatagcacagacagatccatagagagtgtgcagccagggttggtctgtggtctgtttgatg

SEQ ID NO: 456774 - DNA, 537 bp, Sorghum bicolor
  unsure (1)..(537): unsure at all n locations
cgacccacgcgtccgagcacattggtgatggagtagtcatttgatatagcaacctttcctagtcccttgactttcccttttgaattgtcaccaaatgtgatcttctcttggttgtcaacatcttcatcaagagaggtgaacatccggggatctccggtcatatgttgagtgcaaccactatcaattacccaatgtgatccaccggtcttgtagttcacctacacacaagagatcaagcttgagatttagggacccacacttgctcagggccgctgaccttctctactagttgctttggcacccaaaatctctttggcctttgcttgtttggtggccccatgaagctaaccttgaccttgccacacttgtgtttttttacaacgtaatgagcaattaaggcaaatggtcttgcatgctttggcatgggtggtggcagtggggcctacactcatgaacaaagggtcctttttgaccacacttaaacaatntttttggttttggcttggttgcttgatcatgagtgactagagacttgtt

SEQ ID NO: 456775 - DNA, 413 bp, Sorghum bicolor
cgtccgtggacataagtggtgcagagtatagagggaaggaggttccactttttgtgctccctacaaggtatctcctcaagctggacaccacaatgacctcttactgcgatatgcaacgagtcctctttgaagaggagcaatcagcatataatcaagctatgcaacaaaatatttgtgatgggaaaattcaccctcttacatccattcaccatacatctacatacaactcctctctctgcaaactaatggagtattgtttgagtccagctgttactacgcttcaggatcgcctgaaggaaaatgaacttcggctatctatgttacaagaggaggctaagcaacttgaggctgatacacaaagcatgagaaataattctcctcgtcgcctcatgaatcatggaactggtggcaac

SEQ ID NO: 456776 - DNA, 258 bp, Sorghum bicolor
cgtccgtggatttgtctacaattcattgttgttaaactccttgccttttctatcagaatatactgagataacgccgaaaaaatgggacgggggatcctgcgtagaagttcctcggattcttcatgctcctacaagagcttgagcgtgtagagaagggcatcggggatggcccattgagctatggaatttatgatgcagatgacatctacattcgatcatggactggcactattattggaccacataatactgttcatg

SEQ ID NO: 456777 - DNA, 423 bp, Sorghum bicolor
cgtccgggacgagctgttcgccaagacgggcgtgcggcccaaggacgtgggcgtgctggtggtgaactgcagcctcttcaacccgacgccgtcgctgtgcgccatggtcgtcaaccactacaagctccggggcaacatcgcgagctacaacctcggcgggatgggctgcagcgcggggctcatcgccgtcgacctcgccagggacctgctgcagtgccaccgggacacgtacgccgtggtgatcagcatggagaacatcaccctcaactggtacttcggcaacgaccgctccatgctggtgtccaactgcctggtccgcatgggcggcgccgcgctcctgctgtcgaacccgggctcggcgcggcgacagtccaagtaccaactggtgcacacggtgcgcacgcacagggccgtcgacgaccg

SEQ ID NO: 456778 - DNA, 408 bp, Sorghum bicolor
cgtccgcggagaagctggatctggacatgccagccctggcttacatgatgaaggaataccctgggactgaagaagagaagatgcgagctgctgttggcaggtttggcctgtcaggaaaggcgcaggtgatgccgatgaagaatctttctgatgggcaaaggagccgtgtcatctttgcatggctggcatataggcagccgcaactgctactgctcgatgagccgacaaaccatctggatattgagaccattgactccctggccgaagcactgaatgagtgggatggtggtttggttctagtgagccatgatttcaggctgatcaaccaggttgctcaagagatctgggtgtgtgagaatcatgcggtgacaaggtgggaaggtgatatcatggatttcaaggcacact

SEQ ID NO: 456779 - DNA, 563 bp, Sorghum bicolor
  unsure (1)..(563): unsure at all n locations
cgtccgcggacgcgtgggaacgaatttatgacattgctgaggaatcccctgtacctggctgttatatttgtcatcttccttgttgggaaggccatttgggtacagttagacattgccagtgaattccaaaatggctttctcccagccattctttcgctgtccacaaagtttgttcccactataatgaacattttgaagagattagcagacgaggggcaaagacctgcagcctcagacaggcaacgagagatggagctccaaccaacgaatcgttcatcgtacagcagtgtgacatctgcagggtcgtccagcataactgccacagagaatggatccgaatagtcaagcccagtggcaaaatgatttcttacatctgtgctttttgggtgaatgtcgatcgtagcagctgaggcagcagatggaatttgaacctgctagttcctagacccctgaatggcaggtagattcggttgtaacatgtctatatgatggttgaataaagttagaggccaggaccaggaggtaggagggcggggcatncggatactacaatatgtatactc

SEQ ID NO: 456780 - DNA, 434 bp, Sorghum bicolor
  unsure (1)..(434): unsure at all n locations
cgtccgcggatgcctccaacgacaagtcggtggaggtcatgcgtaagttctccgagcagtacgcccgccgctccaacaccttcttctgcgccgacaagacagtcactgccgtcgtcatcaagggacttgcggatcacagagacactctcggagctcctctatgcccttgaggcattatgatgccaaagctgcggaggtagcacagggatntggaactgtcatgcgtncgatgcgtggaggagggatgcactgatgctnttctactcngatatgacttgctggaggaccagtatctcttgagagacaagagcacatgagtctaccctgatttacaatgtactgcagtagattttattgttgctagagctataaatcgagacttatatgcaaaagctgagtggtgatacgttactatgctgctatggatgtttttt

SEQ ID NO: 456781 - DNA, 194 bp, Sorghum bicolor
cgtccgggaatactcatagagatgatgggtcaacagcatcaacagcagtgttggttggtgaccatctttacgtggcaaatgtaggagactcaagggctgctatatcaaaggctggcaaagcgattgcgctctctgaagatcacaagccgaacagaagtgatgagagaaaacgaatcgagagtgctggtgggata

SEQ ID NO: 456782 - DNA, 278 bp, Sorghum bicolor
cgtccggtttagttcttatagggaaagggactattgggcacttttggaacacccacctaaggatttggagattgcaatagtgcaagcagagcacagtgatcgatgggtccctgatgatgttcaaaggctaaaagcattagccaggagagagtccaagactgacataggaaaagtgtcacttcacgttctccccaactctggccactgggttcatgtggacaatcccaaaagactactcgagatcatggttcctaactttctatcaacttgttaaaaat

SEQ ID NO: 456783 - DNA, 156 bp, Sorghum bicolor
  unsure (1)..(156): unsure at all n locations
cgtccgggaagatgacatactatggtactgcaccacgtgtaatccatcaacctcattntgctgcaacatccacattcatagcaagagaggttgcataaggtctattaaagtaccaaccagatgtaattatcagtgtacactctgtaatgcaacatg

SEQ ID NO: 456784 - DNA, 276 bp, Sorghum bicolor
  unsure (1)..(276): unsure at all n locations
accgtccgcnatcccggtcgacccacgcgtccgccccgcgtccgaaaaaaaaaaaactattaaagcacaaacttgctgcatgaaaaaattcctactgttgttggagccattgctatttctggattctgggtctaagcatgcagtttgccctttgactatctgtataaacagattcacaacatgcaacctgatgcgaatggcaagtacctatactcagggaatttggactgtgtcatgaagacctttaatagcgagaagtcattcaagttctacact

SEQ ID NO: 456785 - DNA, 436 bp, Sorghum bicolor
cgtccgcccacgcgtccgaggacctgcttgaggagttcgaggaggaggccggcgacggcgacagcattcagagcctcgcgcttggggcgcttgacaacagcttcttggtcggtggcgcggggatacaggtggtcaagaacttccgccacggcttgcacgggaagggcgcgtcagtgaagatctcgggagggcgtggcggcagtgggagcgcctattcgacgccgaagaaggcgctgctgatgcgcggtgagactaacatgctgctgatgagcccaggagaggctgtgcgttccaatggtgtccaccatgtcgatatcgagactgggaaggttgtcgctgaatggcggtttgagaaggatggagctgatattacaatgcgagacattgccaacgacagtaagggaacgcagttggaacccttcgggtcgacattctt

SEQ ID NO: 456786 - DNA, 314 bp, Sorghum bicolor
cgtccgcttcacactgcattgctcccagatccatattgacttgcccacgctgtctcatgaggataaggatgttatcaaaaaatggggtgctccaagaaagggggacttcctctgtttgggttacacaagacatgcagaagatgtgcggcaggcacgcgagtacctctcgaaattgggtgatcttagccaaactcagatttttgccaaaattgagaatgttgagggcttgaaccattctgatgaaatactggctgaggcacgaggtattattctgtcttgaggatacctaataattgaccttctcacctgataag

SEQ ID NO: 456787 - DNA, 335 bp, Sorghum bicolor
cgtccgcgacgagcccgtgcgcgtactgctgacggacaccgtcctcgggagcgccggcccgctgcgcttcatcgtgctcgagggcgacacggaggccgcgctcatacgagcggcgctccggtgctacgcgcgcgagggccgcatgccgctgctcggcaccgaccccgctggctacgaactatccaccgacaacggcggatccggcgccctcaaagaagacgagacgatcaccgtcaacgggtgccggagctgtcctgctatggcagaagactgcggaccagggtgccgccaagggcgcctgacacgacgctgtgacggctactacaagcccaggc

SEQ ID NO: 456788 - DNA, 476 bp, Sorghum bicolor
cgtccgcagcgccagcagcagaaaaaccgcgcgtcgccccaaagccttcaactccagcaaccacaagctatactgatcgcccatatgtctgcccctacgaaggttgcgacaaagcatacatccacggttacaaattgaaccttcatctaaaaactcagcaccctgaacacggccaagaggaaaatggtaaggtcggtgcttctgctggtcatcatgctgcgaatgaacagacctaccagtataactatgctgaggttggtgagattgcaccaaaccccaaaaggagcaagcataaggtccactcatccaaagcctacaatgccaaggtctcgagagcgatgccttctgacatcggtggtgtcaggaaccagtggccaggtaaagctacgtaccaagatgataggtgagagaccgaagaagatgggggccacaacattgaagatggcttgagatatggcaaccaatgatgatgatga

SEQ ID NO: 456789 - DNA, 411 bp, Sorghum bicolor
cgtccgcagcaagtgctccggccccatgagccagtgcgacgtggacgaggcggaggagctcgggctcagcggcggcggcttccccgccggcgacacgatccggcggacgctggcggcgcggcagcccaccaaccggtacatcagctacgccgcgctgcgcgccgaccaggtgccgtgcaacaagcgtgggcggtcctactacagcaactgcgcgtcgcagcaggccgccaacccttaccgccgcggctgctccgccatcacgcgctgcgcccgcaacatgaactgagcgcgcgcgcggcggccggcgggcgcgccgtcgagccggtcggtctgatctgcctctgccggccggcctggctgggcacgcagatagcctggctcgatcgcgcaccatgcattggcgacgtcgtc

SEQ ID NO: 456790 - DNA, 477 bp, Sorghum bicolor
  unsure (1)..(477): unsure at all n locations
cgtccgcgacgccgagcggngggcggcgatggaatactcaggcggcggcgcgacgctgtcggagatgtaccagagcgcgcggcggctgctactctcggcgcgcgacggcgtggcccgcgtcgagcgcctcgcctcggcgcccacttcgtcctcctactcctcggcgccgctcgtcggtggcggcgctgcgggggaccccgcggtcgctgaggaggtgcggcgagaggtggcgcagatccaggggctgtgcgcgcagatggaccggctctggcgatccatccccgccaagggccagcgggacctctggaagagaaaagtggagcagctgtctgaagaggttgattcattgaaggaaacccttgacaagcattctntgcgtcagaaaaaacgaattctggaagcaaaagaaagggctgagctatttgagagagctaatggtgaatcttcacatggtctccgaatatttgacgacgaagc

SEQ ID NO: 456791 - DNA, 506 bp, Sorghum bicolor
  unsure (1)..(506): unsure at all n locations
cgtccgggtctagcaaggaaggcgccgcgttcgccaaggcgttcgacgatgccagcgagcaggtgttacaccgcttcttggacccgttttggaaggccaagaggttcctaaacttctcgttggagacggccatgaagcgctcggtccgcaccatcaacgacttcgtctacgccgtcgtcgacaagaagatcgagcagatgggaagagaccaacaagaatttgccaagaaagaggacatcctgtcgaggttcttggtggagcgggagagcgatcccggctgcttcgacaacaagtacctgcgggacatcatcctcaacttcgtgatcgccggccgcgacaccacggcggggacgctgncgtggttcctctacgtgctgtgccggaaccagcacatccaggacaaggtcgccgaaggggtgcgcgccgacgtcacctacggggacggtgacctcggcgccccggaactcgtcgcgtgcctgaccgacgacgccatcggcaagatgcac

SEQ ID NO: 456792 - DNA, 513 bp, Sorghum bicolor
  unsure (1)..(513): unsure at all n locations
cgtccgcccacgcgtccgcaacaccaacaccatcttatggcacaacaccaacaccatcttacggcacgacaccaagcaccccaagtacacctgcctatggagtccctgaaattccgaagcatggatttgttggatcctgcgactactggaagagccacccagacatgatcattgcagttgctggatcccttggcaacattggcaagacttttggtgctgcctgcagtttgatcgtcggcaagaagcttgagaatctgcatgatgcactctctaacaccagaactgatggtgttggttccctgctacgtgagggagcagctgcttacctcaactccattgtcaacaagaagtttccttttaccacacagcacgtgaaggattgcattgttgtggccgtgacctctgacggtgctgcttctgcccaggctgggatcttcaagaaggcaaatgaataccactactaggacatggatatctcctgcctagactatntctcttaattgatactaccct

SEQ ID NO: 456793 - DNA, 418 bp, Sorghum bicolor
  unsure (1)..(418): unsure at all n locations
cgtccgcacacttattgttcggatggagttgagtgatctcagtgcttgccttgctgctattgtgtgttcatcattgcaaccacctcttcgaccccttggatccccagcaggtgattgggcttctgtcatcataaagtctgtactggacagagcaacagttttactcactgatcagcacgtggcttctaactacagtatgcagaatcgagctctatggcaggcatcatttgacgcctttttcgggctgcttacacagtactgcatgagtaagtttgatagtgtggttcatactgcccaattgcaacctgccgctgcagcagttataaccagngaaatgccagtagagcttctgcgtgccagcctcccccataccaatgaggatcaacgcangcaatngctcangtttgctcaacgcact

SEQ ID NO: 456794 - DNA, 405 bp, Sorghum bicolor
gctttggagttgcagttgatgtgggtccggggaactcgccgttgatgaggatgaccttctggggcacgcccagcagggacttggtcccgtacgtcaccttccactcgaagaacaggtacgggtcctcggcccgcgccaccaaggccagcgccgacagcaccagcagcaggacgccggcggcggcggcagcgcgcgtcgtcgtcgccatgtctctcctcgcttgttgctccacccgatcgagcacgcacgcacgtgcctgtaccaatcgatcagcagcagctagctctcgcgcggcgcgcggcggcggcggccgggccggggcgctatgctctagtgggggggtggtgcggctctctcttgaagggatgtatgaggagtttgttgcgggtggaaataagctattct

SEQ ID NO: 456795 - DNA, 414 bp, Sorghum bicolor
cgtccgcgcgtatgggtggatcgcggcgcaaattgaagcgctcccgcgccaaggtccgcgtggggctcccccgccggaaacccaacgagttcaagccggccttcgagctccccgaggcgctcgccgccgccgccaggggcggcgcgggctgggacgccgagggcagcgtggtgaagaactacgccgcgttcggggtggtggccaacccgaacctgctcggcgcgcacgcccgcggcacgccgcggctcgtccagagcgcgtcgctgcaagcgcccgacgtcgccgccgcgcgagcgcccgtcccggagttcgagcccatcgacaccggcagcgacctcgagaacgacgacctgaaatctgctcttgggaagaggaggggggatggcaaatctgcaccgttgcaaccacttacta

SEQ ID NO: 456796 - DNA, 465 bp, Sorghum bicolor
cgtccggacaaatctgtcaccgagaacactcgggctgcttacccgatcgagtacatccccaacgccaagataccatgcgtcggtccgcaccccaagaacgtgatcctcctggcgtgcgacgccttcggcgtgctcccgccggtgagcaagctgaacctggcgcagaccatgtaccacttcatcagtggctacactgccctggtcgccggcacggaggacggcatcaaggagccacaggccaccttctccgcctgctttggcgcggccttcatcatgctccacccgaccaagtacgccgccatgctcgccgagaagatgcagaagtacggcgccaccgggtggcttgtcaacaccggctggtctggtggcaggtaccgcgtgggcaagaggatcaggcttccctacaccaggaagatcatcgacgccatccactccggcgagctcctcactgccaactaccagaag

SEQ ID NO: 456797 - DNA, 195 bp, Sorghum bicolor
cgtccgccggctgaaagaacaagaatccagagtgcctttctttattctgagttgatgtatctatcgtagcgtaggggatcatggcgtgagccggttaacaagacgtacggggtgcacacctggatatgggattactatatgctatttgctatatcgaactcctatgtatgcatatccatgttgcttgagccaaaa

SEQ ID NO: 456798 - DNA, 517 bp, Sorghum bicolor
cgtccgcccacgcgtccgatgacgaattcaggtcacaatatctccaagattacatcgaagccacgcttcaatccatcaggaacggatcaaacgtgcaaggttacttcgtgtggtcattcctggacgtgttcgagtacctgttcggctaccgcctccggttcggtgtctgtggcgttgaattcaactcgacggcaaggacaaggtatcagaggcactcggccaagtggtactccagcttcctccgtggtggcgagctgaggccagtggctctacctgagggagcatattcacagtgatcaacaacacgctccagctcaagggggatatctggtaaatttttttgaatggcaatgtatggtaaattggtgatcaacactcttggggtggaaagaatagagaatgtataagcacggttagttgggtggtatatatagcagtgcctaaatatgatttccttgggtaaatatggtacgagttaaataagctggttttagcgtgtgtgtggtgcttaattggg

SEQ ID NO: 456799 - DNA, 466 bp, Sorghum bicolor
cgtccggtcgaccaggcggcgctgaccggcgagtcgctgcccgtcaacaagcactcggggcagggtgtcttctcgggctccaccgtgaagcagggagagatcgaggccgtcgtcatcgccaccggcgtgcacacattcttcggcaaggcggcgcacctggtggacagcaccaacaacgtgggaggcaggtccaggaagtgtatttgaccacttcgctagaccaggagggcataaagaaagctgtgcaaagagtattagggcgtgttccttgatcctgacacgcagcatgtacaaaccgaggtgtgtttgtcctccccgattttctaactaaagcattacaaggaatcaacagtatgagcaaatagcccaaaacatttagcactgtcagtctgtcacaacatccggctaaatttttctctgttggatactacaccaaccaaaatgtgtaaatattttcagtcctaca

SEQ ID NO: 456800 - DNA, 400 bp, Sorghum bicolor
cgtccgctcagattattgaactatctgctgggcttgtgcatatgtggagaaacatgtacgagtgccatcaggtccagaaccatattgcccagcaagttagtctccttggcaacatacctgggagtgaaccaacaagtgacactcattgccaggcaacatctcagctggaaattgaggtgtctggatggcacaatgccttctgcaatctcatcacattgcagcgtgaatacattagcatccttaaccaatggattggtctcacagactgccttccagatgatggtggcttaatgagaagttcatctggaatacgtagcctctctgaggaactccagcgtgctcttgacaggctaccagagaagatagcagctgaagcaataatgacctttatgtcaatcat

SEQ ID NO: 456801 - DNA, 440 bp, Sorghum bicolor
  unsure (1)..(440): unsure at all n locations
cgtccgatgttatctaaatatcatgaagagggcatctctgttccagtcccagctgaggagcaaaatctggtcaacagacaccgtaaagctttcttggacaatatgtcggatgatcttaaaaccacagatgttctggatggtgaggatggcctcacggatctgctgaaggccattaacagcaatatgaatgatttgaagaagctgcaacaaaaaactagagcaacagcagaagaagcagcagcagaaaaagcaacaacagaagcaacagcaaacacagaaacaacctgaagattacattcaaggtcttatcgctcttggagacagaaattaaagataaactatcagtacttggtctgatgccaccttcatctntgtcagaggtactgaatcaattgaaggacaaagcattaaagcgagcnaaattgactgaagagcaattg

SEQ ID NO: 456802 - DNA, 333 bp, Sorghum bicolor
  unsure (1)..(333): unsure at all n locations
cgtccgaaaataggtggatgccgtcccagctgacgtgcgcgtcggggtcctcgcaggtggtggcgccggggagcccgcacgacgcgctcatgttgtagttgtacggcccgccgccgccgcagcacgcacgcagagcgccgcgcttgtacccgtagaggtgcggggtgcgcgcgaactggatgtaaggcgtgtagtagtcaccgtagacgatgcgtgactccggccgccgtcgctggagacgatccagcgcgatacggagcatggcgttatggtagagcgccacggcgttgtacttcttcagacacccggtccgcgggtcgtactcggaccana

SEQ ID NO: 456803 - DNA, 433 bp, Sorghum bicolor
cgtccgggcccagtacatcccgaccctcaagtactacagcggcgggctcccgatggcgtgcaccatgtacgcgtcgtcggagtgctacttcgggctgaacctccgccccatgtgcgacccgtcggaggtgtcctacaccctgatgcccaacatgtgctacttcgagttcctgcccatggacgccgcggcgtccggcggcggcgacgcgagccagctggtggacctcgcccgcgtggaggtcgggcgcgagtacgagctggtgatcaccacgtacgcggggctgaaccggtaccgcgtcggcgacgtgctccaggtcacgggctttcacaacaccgcgccgcagttccggttcgtgcgccgcaagaacgtgctgctgtccatcgagtccgacaagacggacgaggcggagctgcagcccgccgtggagcgcgcg

SEQ ID NO: 456804 - DNA, 464 bp, Sorghum bicolor
cgtccgcgccattagaaaaggtccctctgcttgaaagatttgtaaatggagatgatgctttcagaaattcaaggttcaagctcatcccttacatctcaaagggatcttggattgttaaacagagtgtgggcaagaaagcttgcttggttggacaagcattagaaatcaattatttccgtggaaacaactatttggagcttggagttgatataggttcatcaacagtggcccgaggtgtcgtgagcctagtgcttggctacttgaacaatctggtgatcgaaatggccttcttggtacagggcaacacatatgaagaactcccagaattcctcctaggtacctgccgactgaattacctggatgcctccaaggcagtatcgatagacgagtgctagaaggaccccaactgacctcattctttttgaagactgtacatcaaaagaccaaaaggctgaatccattcc

SEQ ID NO: 456805 - DNA, 532 bp, Sorghum bicolor
cgtccgccttgactccccaggtccgaaatcttcagtcccattagctgttcctcccgtaagtcaggctccggcagctcagcctgcaacacttgcaactacaactgcagcagcaataatgccttgagggcattccaccagctccaaggggcatgccccagattgaggttacctttgacattgatgccaatggcattgtgaaggtgtcagctagggacaaagccacaggcaaagaacaagaaatcaccatcaagtcttctgggggtttgtcagagggtgaaattgagaagatggtgaaggaggctgaactgcatgctcagaaggatcaggaaaggaagtctctcattgatcttaagaactctgcagataccacgatttacaccattgagaagagtgtcagcgagtacaaggacaaggtacctgctgaagtcaccaaggagattgagtctgctgtctctgatctgagggcagctatggctgaggacgatctggagaagatcaagcagaggctggaagcagcaaacaaggctgtgtc

SEQ ID NO: 456806 - DNA, 373 bp, Sorghum bicolor
acgcgtgcgcctagattgattcctatccatgatctcacatcaagggatgatgatgattcccttgtacccagtccccttatgctcaatagggaaaaggtacaacaggatgggggctatttattgcagaatggtgaggatggtctaatttatgtaggaaatatggtaaatccaggtaccctggaacaaatatttggtgtctctactttggctgcattaccaatccagttggcattggatcaatttgacaatgaactctcgaggaaggttaacgaagttgtaaatgaaataagacgccataggtgctcatacttgaggttaatactacgcagaaagggtgaaccatctgtcgatctttaccggtcattactaatag

SEQ ID NO: 456807 - DNA, 525 bp, Sorghum bicolor
cgtccggtttggagaagttaagaggggttgtccttcacagtggtatactctctggcatacgggttctgtatccagtgaaagtgacactttggttcgacatcttcaagaacatcgacaaaataaagcaggttgcctgtcctgtgttagtcatacatggaacagcggatgacatcgtggacttcactcacggcaagcgcctgtgggagctagccaaggagaagtacgagccgctgtggatcaaaggcggtgggcactgcaacctggagacgtacccggagtacatcaggcacctgcgcaagttcataaacgctatggagaagctggccaaggacagcaaggcggcccaggcgccgccatcgtcgagcttggcggcggaagcaagacactccaagtgcttgagattcgggaagaggtgaggccggcgggcgaggccgcgggtctcggccgtctttagctgtgtacaggcccagtcactaaccctgctgcattgcattgatgctgctcttgtcgtgtgcaagtcgaaga

SEQ ID NO: 456808 - DNA, 525 bp, Sorghum bicolor
cgtccggcgggaccattacgcttgaagagctcaaaaacgggttggcaaagcatggacccaagctatcagacggtgaacttcagcagctgatggaagcagctgatgctgatggcaacgggttaattgactacgacgagttcgtcaccgcgacagtgcacatgaacaaattggatagagaggagcacctttacacagcgtttcagtattttgacaaggacaacagcgggtacattacgagagaagagcttgagcaagccttgaaggagcaaggattgtatgacgccgagaaaatcaaagaggtcatctcagatgccgactctgacaacgatggaaggatagattattcagagtttgtggcgatgatgaggaaagggaccgctggtgctgaggcaatgaacaagaagaggcgagacatagtcctagagtgaagcagcaagtgtgtagtgtgtatagcgctcaaacaacatgcaagttttcacaactgtacactaatgcaatggaattacttttgtgatcagttgatgg

SEQ ID NO: 456809 - DNA, 385 bp, Sorghum bicolor
cgtccgggggcttcaccgccgactgggtggggccaggggtctgcagctacaccggtgtctactgcgcgccgctgccgcgcggggtgccgggcgccggggacctctccgtcgcggggctcgacctcaaccacgccgacatcgcgggctacctcccgtcggagctcggcctcctcgccgacctctcgctgctccacctcaactccaaccgcttctgcggccttgttcccgacacgctccgccgcctccgcctcctcgtcgagctcgacctcagcaacaaccgcctcgtcggtgccttcccggccgtcgttctcgacctcccgtcgctcaagttcctcgacctccgcttcaacgacttcgagggcgctatcccgcccgcgctctttga

SEQ ID NO: 456810 - DNA, 541 bp, Sorghum bicolor
  unsure (1)..(541): unsure at all n locations
cgtccgtggatcacaagagggtgccctggagatgactggacataaggatactgttggcgcagtggctttcagttcagatgggaatttgttggcttctggaagttttgacgggcaaataaatgtgtggaatacagctacacgaactctcaagggaacccttgagggttctgggtcaggttttgagtggcttaaatggcatcctcggggacatttgataatcgcaggatcagaggattgtaatgtatggatgtggaatgctgaccataatgccattctaaatacctttgctggacacagtaacacagtgacatgtggtgattttactccagatggtaaactcatatgtacgggatcggatgatgcatctttgaagatatgggacccaagaagtgcacaaagcagacatgttgttcgaggccatggctatcattctgatggattgacatgcttatcaatgacttcggattcacaaatggttgttagcggctccaaggacaggtctgtgcacattgtgaatgtaaactcangcctggtcgttggc

SEQ ID NO: 456811 - DNA, 531 bp, Sorghum bicolor
cgtccggaatcctaatcaacctgatgaaaggggggtacatgtcaagctatgcaagaaaaacaacagatatcttgaggccatgagaaaaagtgaagacatagaatgtggtgtgtgcttggaccgtgtgctttcaaaacctacggcagcagaaaggaggtttgggctgctatctgactgtgaccattccttctgcatctcatgcattaggaattggcgtagcacctctcctacgtctggcatggatgtcaactctacactcagggcttgtccaatatgccgcaaattgtcatactatgtagttcctagcattacttggtactcctcaaaggaagaaaagcaagaaattgttgaaggttacaaggctaagctcaggtctattgattgtaagcactttgacttcggaaagggcacttgtccctttggaagtagctgtttttacaagcatgcctacgatgatggccgtttggaagacgctttattgaatcaccatgacgctgaagatgcaagtgcggcgattgccagacttatgag

SEQ ID NO: 456812 - DNA, 461 bp, Sorghum bicolor
cgtccgaggagaaggacacgctgacgcaggaggtgccatgatccacgctcctgccaccgtgcgtgcgagctgataaggaccttctgcagctgcccgactacaaatccatcgacgagaaagactagcctcttgactgcaaggagctggagtggtcccaggacattgacctgttacacgatcattcttccgctaaaaccactactgccgaagtagcccgagacgcgtgcgctcgtcgcaaccagcgagcaacgccgaatgtctacaagacaaacggactaacgcgccacatcaagaacccacggatggatgtgcctgaggacgacgaggactacattagtcggcctgatatcggctgatatgagagatctctgcatgatcttcctggcatgtgatgtgtgcatgtatgcaaaagatgtatgtatgccattatgagatgcactgacacttactgcacatatgta

SEQ ID NO: 456813 - DNA, 446 bp, Sorghum bicolor
cgtccgcaatcacaagcaagttgatatggcgacaaaaggacaaaaggtcgctattaagattatcgcaaacaattctgacgagcagcagaggagcttcggcagacactttgatatggaagatgaactggtcagccggatatcaagacggtctattgatattttgaaacaaaactacagggaggatttgtctattgaagactggaaacttgttgtaaagttgaaagcaatattgaagatacaatgagaagccctcagcccctcaccccaccccaccccacccccacctgtccatgaatcggcaaccgcgtagaaacaagtctcctgataatttgggaaggctgactgtcttaatatcagcagtaaaatttgggagttgcgaggctgaggtcctgtggcaccacatccatctttacactggagttccccagggagggttacaaattttg

SEQ ID NO: 456814 - DNA, 197 bp, Sorghum bicolor
acacgttgtatgcgactattttgatgaaaggaaacaacagatggagggaatcactgttctgatcaagaatgtatgacataagctgtacgagagttagtctgctaacgaccagagtggcaaagactggactctcattctgaagcacattgacatgttctcctatactgcgttgaacaaagcacagagtgataacatga

SEQ ID NO: 456815 - DNA, 377 bp, Sorghum bicolor
cgtccgagcggatgccgcgctgccgccatggcttcttccacgtggtgaacaacgactacacgcactggctcatgtacgccatcggcggcagccagaaccctaccatcatcagccaggggaaccggttccgcgccgtcgacgacgggaggttcaaggaggtgaccaagagggagtacacgccgtacagcgagtacaaggactgggtgtggaagtcgcatgacgacctgttcctcaatggggccttcttcaaccagtccggcggcgagaacgagcgccggttcgacaggctcgacctcatccaggccaagggcggacagtacgccgagttgctcacgaggtacgccggcgcgctcaactgccgcgttgggaagaagtgc

SEQ ID NO: 456816 - DNA, 347 bp, Sorghum bicolor
cgtccgggacgtgatgccgatcgccacggggctcgagcgcgaggagatcgaggccgaactccaggggaagaagaggtttgacatggacgcgcccgtcggtccctttggcaccaaggaagctcctgctgtgattcagtcatactacaacaaaaggattgttggttgccctggcggtgaaggagaagatgaacatgatgtggtgtggttttggttggagaaaggcaagccacatgaatgccctgtctgtactcaatatttcacgcttgatgtgattgggcaaggaggatctccagatggacatgatgatgacgatgaccatcaccaccaccatcactaaagttttgcag

SEQ ID NO: 456817 - DNA, 243 bp, Sorghum bicolor
cgtccgaccacattgaccagtcggccgttccgccaggtcatcgacaccctctactcaggcagaaggtttgacccacctcagctggccggcgattccgatgtctcagccgagctgaaagtgaatgaacttaaaaactgccgactatccatggtatgcatgtatggataatttttgcaagccagatatactagcaaagtcgacgtttgtgttctagaacatatgatcttgaatttcttaaaggta

SEQ ID NO: 456818 - DNA, 472 bp, Sorghum bicolor
cgtccggaaacttccaagagccgatcagataggaagccaccaggtgttggccgtggaagaggaaggggagacgttggtactaaacctggaggcagaggcattggacgtggccaagatgatggaggtagaggcagtggtggccgtggaaggggtgttggtgccaaaggtggcaacaaaggtgggggccgtggccgtggctgatgctggtggacgcatgggacaatgccgctttttaaggcctgtaattgtgttgcatagattgcttaggacatgaagaatgaaccaagttggttggttggttgttttggggcgaaacccagaatggttcctgtggtctaaacattgaggcagcggaggcggccgggcctgtcactgtttctcaaaacagtttggttgatatcttgagtatgagctaatctgttcatttgtggagaggcattcctgttaaatgacttattggtgttgccgattt

SEQ ID NO: 456819 - DNA, 306 bp, Sorghum bicolor
agctcgccgtcctcatgttcgccgccgtcgcgctcgggttcggcgtccgggccggcgcggcggagctgtgcagcgagtactacgaccagacgtgccccgacgtgcaccgggtggtgcggcgggtgctgaaaaaggcgcacgaggccgacgtccgcatctacgccagcctcacccgccttcactttcacgactgcttcgtgcagggctgcgacgggtccatcctgctggacaacagctcgagcatcgtgtcggagaagtttgcgacgcccaacaacaactcggcgcgcgggtaccccgtggtcgacg

SEQ ID NO: 456820 - DNA, 430 bp, Sorghum bicolor
cgtccgcccacgcgtccgtgccacccattgcaacaagaggtgtggaaaactgcaaggagaatggtggaaggggcttcaaacccaaaccttgtgacaacgttgttcataatggctcttcaaagcctgaaagggaaccgggcaattcgtcaaacaaaagaacatctggtaaaatggaggaccttggccacaaggataattcctctgaagtgtcctatgagtactgtgtaaaggtggttaggtggctggagtgtgagggctatattgagacaaacttcagggtgaagttccttacatggtttagctcgcgtgccaccctgcaagagagaaagatagttagtgtctatgtggatactcttattgatgaccctgtcagtctttctggccagcttgttgacagcttctcggagaggatatatagcaaaaagcgggc

SEQ ID NO: 456821 - DNA, 383 bp, Sorghum bicolor
cgtccgaagccgtcgctggatgacatcaagaagttcgcggacacggtgaggatcaaccggaactcggttgcgcagatcaccggctacttcatgacgcacttcaccgacacggtcggcagcctacaggccgccaacctcaccgtgtttgttggcgtgctcaagaacgagttcatgaacctcggcttcgacttcttcgctgacccgacgatcgaggtcgctacctacgcttattcggtggtggccgatgggatcgtcacggactaccctgccactgcagcttcctacttcaggagtccatgcagtgacatgaagctgaacctgagctactcgatcctgcctgcacaacctggcgctctggtcaacctggcaagcccccgggatgt

SEQ ID NO: 456822 - DNA, 417 bp, Sorghum bicolor
cgtccgtgataacttgacggatcgcacggctacagtttatcagtggacatttggagtctgggctgtaccattattgaaatggcaacggcaagacctccttggcaccaatatgagggggtagcagcaatatttaagattgcaaacagtaaagatatacctgaaatcccagacagtttctcagaggaagggaaaagtttcttgcagctttgcttgaaacgcaaccctgcatctcgtccctctgcagcccagctgatggatcatccttttgttcaggatcatcctgcagtgagagctgcaaaatccagtgtattgagaaacgcaatgtcttcttcagcagatggcagacacacaatgtccaacagggagttgccatctcggaagattattactcctctgaaagatattgcactgagcatg

SEQ ID NO: 456823 - DNA, 389 bp, Sorghum bicolor
cgtccgctgcactcgaagaagatcatgcaccgcgacgtgaaggcggagaacatgctgctagaccggaagcggacactgaagatcgccgacttcggcgtggcgcgcgtggaggcgcagagctgcgaggtgacggggcagacaggcacgctgggctacatggcgccggaggtgctgcaggggaagccgtacgaccacaagtgcgacgtgtacagtttcggcatcgtgctgtgggagacctactgctgcgccatggcctaccccaactacagcctcgccgacatcttctaccacgtcgtcaagctgggcatccggccggacattccgaggtgctgtccacgggcgatggccgacatcatgacgcggtgttgggacgggaacccagacaaccg

SEQ ID NO: 456824 - DNA, 417 bp, Sorghum bicolor
cgtccggtgctcaaggacatcttgaagttggtccatgaagcccttcccgggagctattttaacagcttgctcctgaacagatacgagacaggttcagaggatgtttcatggcatgctgatgatgagcccctctacggaccgactccagagatagcatctgttacctttgggtgtgaacgccacttcttactgaggaagaagcctgctaaatcgcaagccatttctgcatctggagaagctggtcgaaagcggctcaaggtcgctgcatctcaaaagcagcattcttttcttctgaagcatggctcgctgcttgtgatgagaggctacacccagcgggactggcagcactcagtttcgaagcgagccaaagtgagcttaccgaggatcaatctgactttcaggcatggtgctgcctaa

SEQ ID NO: 456825 - DNA, 371 bp, Sorghum bicolor
cgtccgccgggaagcttgctgccagccggcacgtgctaagtgagtacggcaacatgatgggcgcgacggtcatctttgttcttgacgagatacgccgccgccgccgccgccgctgcgaagacgacgctaaggaaaagaactgccagtggggggtcatgtcggggctcggccctggactcacaatcgagacaattgtgttgcatgccacagacaggcaggacgaaaattagtgatttattggtaagaagaagactctgtgatgagactattatagcaagaataataatacacctcagcttgtcttatagccaagccatatatcagcaaatgtctagatggaagagagacagaaaggaggaacgagaagatgc

SEQ ID NO: 456826 - DNA, 314 bp, Sorghum bicolor
cgtccggacgtgcggcatcgggctccggtatgactggggcaagttttacgcgtccaagaccttctatgaccccgccaagcgccgccgcgtgctctggggatgggtcggcgagaccgactcggagcgcgctgacctctccaagggatgggcatcgttgcagggtatcccccggacggtgctgctggacaccaagacgggcagcaacctgctgcagtggcccgtggaggaagcggagacgctgcgcaccaactccacggacctcagcggcatcaccatcgactacggctcggcgttcccgctcaacctccggcgcg

SEQ ID NO: 456827 - DNA, 264 bp, Sorghum bicolor
cgtccggtcatgctgctgcagatcatcacggcgaagccgcccatggggctgtcgcaccacgtcggccgcgccatagagcgcggcgcgctgctggacatgctcgaccccgccgtgccggactggcccctcgaggaggcgcagtgcctcgccgagatggcgctccgctgctgcgagctgcgccgcaaggacaggccggacctcggcgccgtcgtgctcccggagcttaaccgcctgcgcgcgctcggcaggacaacatgcagtact

SEQ ID NO: 456828 - DNA, 419 bp, Sorghum bicolor
cgtccgggagatttccttatcttcaatgaccataatgtgaattttctacctttgacagtaatggagttccaagtctagaaaagctgagatgaataggctgaacttacattgttgaaactttgttgtcctgacaattaacatattcccagtagcaggggctcatttgattatccttccaatcactaaggacaccacggttatcgacaagttgcatcttcatttcaaccagtgcttcgactgcagacaaaacagtcttatttctggggcccaaggagcagatgcactgctgaatgtactctgattttgtttacttcagtaaaaagaagaagcccttgtgaagtgaaatggatcctagactgctgcatcaatgaaacaaagtgtgtaagaagagagcaaacagagaagaatggaaggcaaat

SEQ ID NO: 456829 - DNA, 444 bp, Sorghum bicolor
  unsure (1)..(444): unsure at all n locations
cgtccgcggacgcgtgggctcgacaccggcttccgcgcacgcctctccgacttcgggctcgccaaggtcggccccgtcggcgacaagacacacgtctccacgcgcgtcatgggcacctacggctactgcgcaccggagtacgcgctcacggtcaagctcaccaccatgtccgacgtctacagcttcggcgtcgtcttcctcgagatcatcaccggcagccgcgccatcgacaccaccaggccgccagacaagcacaacctcgtcctctgggccggcccgcgattcaaggacaagcgacggttcgccgagatggccgacccgctgctccagggcgcatacccaaccaagggactctaccaggcgctcgccatcgcagccatgtgcctncaggaggatgccaccatgcgccccgtcatcaagcgacgtcgtcactcgcgctcgagt

SEQ ID NO: 456830 - DNA, 359 bp, Sorghum bicolor
  unsure (1)..(359): unsure at all n locations
cgtccgctatgttgatgaggctattgcgtcagctgggaactggctgatcggtggcgacttggaggtgttggaacccatcaaatacaatgatggtcttgatcactacagactttcacctcggcaacttaggaatgagtttgacaaacggggggctgatgctgtgtttgccttccagttgagaaatccagtacacaatggtcatgcgctattgatgaatgacactagaaggcgtctcttggaaatgggttacaagaatcccattctactgctacatcctttaggtggttntaccaaagccgatgatgtctcactgcggtagaatggaacaacacagcaaggtcttggaagatggagttctt

SEQ ID NO: 456831 - DNA, 361 bp, Sorghum bicolor
cgtccgcacgggctccatcccgacctgcctcaccgcgctgtccaagctggagttcctcaccatctcccacaccagcgtgtcgggcgccatcccggagtccctgacgcggctgcgcagcctcgactccgtggacctctccagcaaccagctgacgggcaccatcccggcgtcgttcgccgacctgcccaacctccggtcgcttgacctccggcacaaccagctgacgggcaccatcccggcggggctggtgcaggggcagtttcggtcgctgatcctgttctacaaccagctgacggggcccaatccgcgcgacgacgcccacgacgtgatcaacaccgtggaccttttccacaacaagctc

SEQ ID NO: 456832 - DNA, 515 bp, Sorghum bicolor
cgtccgcaccaatgtgcaactggcgaagttgtccatcacagcacctggcacgagccctaacactgatggcattcacatcactcggagcaaagatgtgcgggtcacaaattgcaagatcaagactggggatgattgcatatcaatcgaggacgggactcataaacttcatgtctccaatgttgtttgtggtcctgggcacgggattagcatcggaagcttaggagatgacaactcacgagcccaggtctctggtattaccatagattcagtacaattacatggcacaaccaatggagcacggatcaagacataccagggaggaagtggatacgccaaggacatcacattccagaacatgatcatgtacaatgtcaagaacccgataatcatcgaccaaaactattgcgacaaggctaagccatgcagggaacaaaggtcagcagtgcagattagcaatggtgtcttcaagaacaatagagggacaactattacccaggatgctatcaagatgcact

SEQ ID NO: 456833 - DNA, 471 bp, Sorghum bicolor
  unsure (1)..(471): unsure at all n locations
cgtccgggccgccgcacgctccgtcgtcaggctggggctgcccgcgctgccgccgctgcccggcctcagactcgcggcgcagggccaggcatccttctgtgagtgcaagcggctggcgaggaacgtggtggccatggccacgggggagcccaccgcggcgcctgtggctgacaacgaggagctcaccgagttcgtcaacgcgttgaaaaaggagtgggacaggatcgaggacaagtacgcggtgaccacgctcgccgtcgccgccacgctcgccatgtggagcgccggtggcgtagtgtcggcaatcgataggcttcccttgattccaggtctgatggaggctgttggaatcggatacagtgggtggttcgcgtaccgaaacttgctattcaagtctgacagggatgctntctttgcaaaggtccgggaggtctacgaggatataatcagaagtaacagatggagcactat

SEQ ID NO: 456834 - DNA, 457 bp, Sorghum bicolor
cgtccgggctccatcgtcgctaacacagggtgcatgactgctgcatagcggccgatgccaatggcctgtgcccttatgtggaactaacaagacgcaaccatcctgggagaatgcacagtactccttgtcctaatctcaaggttcatgttggatgtaccagtgtaagtgacctccgagcactatagactaaatagcaatgaggtgaatcacaacatcctaatcaccaataagtcattgggctcactgctctatgggcagaatgcttacatggagtacgatggacatgaccaaaagatgacgggcatggataaccacactggcattgccaaaatcatgattgtgtgcatggtgatgaagtgctacttaaccaccttcttcttgcgggatggcatcacatttgtagggttagcatgaagcatagctctattcatactaacaaaaccagctatatgctgct

SEQ ID NO: 456835 - DNA, 445 bp, Sorghum bicolor
cgtccgtcaggatcagccttgcacaagctatactgtttctagaaagcgattgacaggtggagtgaatggcgggatcataagtgatgggacactcaagtcactacactataaaagagactacctcttcccattgtcattgttattgcaaaattccaggcctctaggctatgcggaaacattgcagttgctcatttgtattgtacttttgggtgatttttccatcaccctgctcatgcttgtacagtactattggatattcgtcggagcttttcttgccatactgctcatcccccctcttgctttgctttcacctattctagctggactcaatgcactatttagccgaggtctaaaacgatctttagtgacccgcatttttgcactttggaacattactcctgttgtaaacattattgtagcaatcatatacggctctttgtatttt

SEQ ID NO: 456836 - DNA, 475 bp, Sorghum bicolor
  unsure (1)..(475): unsure at all n locations
cgtccggtcttgtgtgtggactccgatcatgtattaaaccaactactgaacgaaaaccttttccatggtccgttgatgcaaatcttgaagcaacgtctctgttatttcgaatgactgcagtgacagaacctaaacaagcatcccgtagattcatagatcctccaaaaaggctaacaagtttctgtggaactccagcactgcatagtgataattgttctgcactactctcacaagagtgagatataatagcagcagccagctctgtgacattctcgttctcactgtccaaaagcgaaagaacaaaatccatgttttccccactattaacatcaaactttggagctaatcttgattgatatatcattctgagagcacgtgcacttgcgtccacaaccttctcgcgcagcgcgcggacgcgctcgtgctccacctnctctccgccggcgccggcgccggcgcagccctcggcgggccc

SEQ ID NO: 456837 - DNA, 514 bp, Sorghum bicolor
cgtccggctcaacggcggcctggggacgaccatgggatgcaccggacccaaatcggtcatcgaggtgcgcaacggatttactttcctcgacctgattgtgatccagatcgagtcactcaacaagaagtatggcagcaatgtgccgctgcttctgatgaactccttcaacacccatgaagacaccttgaaaattgttgagaaatacgcgaattcaagcattgaaatccacacattcaaccagagccagtaccctcgtgtggtagctgacgagttcttgccatggccatccaagggaaagactgacaaggatggctggtaccctcctggccatggtgatatcttcccatcgctgatgaacagtggaaagctcgatttactactctcacagggaaaagagtatgtgttcattgcaaactcagataatttgggcgctattgttgacatgaagatactgaaccatttgattcacaagcagaatgaatattggcatgaggtacccctgaaactttggctg

SEQ ID NO: 456838 - DNA, 549 bp, Sorghum bicolor
  unsure (1)..(549): unsure at all n locations
cgtccggatcccggtcgaccacgcgtccggcacgcgtccgggcagcccgagcgagcgagcgaggcgtgcgtgcgctgcaatggcggactcgtcggcgccgacgagagtgatgagtggcggtgaacgagtcgtcgctcaaggggtacccgcacccctccatcagctgccgcaccgncttcgactggacgctctccaagctcgtccgctccaaccccggnggcttccacttcgtcttcatccacgttcaggtccccgacgaggacggatttgatgacatggatagcatctatgcttcgccggaggacttccaccaaatgaagcggagagacaagataagagggcttcatttgcttgagtactttgtaaaccaatgccatcagttagggataaaatgcgaggcatggatcagacatggngatccaaaggaggttatctgcagcgaagtgaagagagtccagcctgaccttctagttgtgggaagtaggggccttgggccatttcagagggttttcgtgggcacggtgagcgagttctgcggtaagcatgccg

SEQ ID NO: 456839 - DNA, 460 bp, Sorghum bicolor
  unsure (1)..(460): unsure at all n locations
tctcgagacacacctccaccacagtccacacccggcggtcggatcgatggcggcggaagcggcggctgcngngaaggagaagatgctgacgctgatcagcagcgacctcgagaagttcgaggtggaggagtcggcggcgagggagtcgcggaccatcgggaacatgatcgaggacagctgcgccgacaacgacatcccgctgcccaacgtcaacgccaggatcctcgccaaggtcatcgtgtactgcaggaagcacgcctcggcgcgcggcggcaccgatgctggtgatgcggagccaaccgctgcgactaacaaggcatcagaggatgagctcaaaaccttcgatgctgagttcgtcaaggttgaccaggccaccctcnttgacctgattctggctgcaaactacctggacatcaaagggctgctggacctgacctggcagactgtcgccgacatgatc

SEQ ID NO: 456840 - DNA, 466 bp, Sorghum bicolor
  unsure (1)..(466): unsure at all n locations
ttctctcatcagaagggactntcttctggaacgacagcacttacagcaatngattttggaagatcccttctggtggccaatgccggtgactgcagagcggtgctctcacggcgtggcactgccatggaaatgtccaaggaccacaggccttgctgcatcaatgaaaggaagcgtgtcgagtcacttggtggctatgttgatgatggttatctaaatggtcagctggctgtcaccagagcacttggcgactggcatctcgagggcatgaaagaaatgggtgcgccaggagggcccttgagcgctgaaccagagctcaagatggtcacgctgacaaaagacgactagttcttgatcattcggagggactgcatctgggactttttatgaagccacaacgctgtggacttttcgcggtggaaggtccaaaaccccaacaaccctggggtgtgctggaaggagatttgtc

SEQ ID NO: 456841 - DNA, 477 bp, Sorghum bicolor
cgtccgctgaaaggtctataccaggcacttgcaatctcatcaatgtgcttacaagaagaagcaagcagtcggccactgatcagtgatgttgtgaccgcccttacatttcttgctgatccaaactatgatcctccagatgacatcaaagatcctctgcccataacagttccaaacatagacatagaaactaatcaaaacgaaactgaaggaggtaaagaacaattacagcaaaatgaagaagatagccatgagagaaaaaatgaagaagatagccatgagagaaaaagtgaagaagatagccctgagagaaaaaatgaagaagatagctgaaatggcttctggaattaagagatgataaatcaagccagagttgtgtagagaggaaccggatggagggagtatctacacaatacattttttgttgtaatgtcacatataggcaggatgtaacaacagattgtcttcttgaatgaaaca

SEQ ID NO: 456842 - DNA, 414 bp, Sorghum bicolor
  unsure (1)..(414): unsure at all n locations
cgtncgcacacgccgncgncgncgnctncncagcaccaggcgctccagcacccggagctcgccctcccaccgnccaccatgatcatccgcaagaagaaccgcaatgagatctgcaagtacctcttcaaggagggcgtgctctatgccaagaaggactacaacctggcgaagcacccacagatcgatgtgcccaacctccaggtgatcaagctcatgcagagcttcaagtccaaggagtacgtcagggagaccttcttctggcagtactactactggtacctcaccaacgatggcattgagcacctncgcaactacctgaacctcccgtctgagatcgtgcctgccacgctcaagaagtctgccaggccaccgggcccgccatttggctctggccctnctggtgacccgccacca

SEQ ID NO: 456843 - DNA, 429 bp, Sorghum bicolor
cattgctgggtgttctgcgcaattgtttcgcacccagctgacaacctagtttccttcctcaacaatgccaagggggcaacggtcggcgatgctgtgaagaagattggtctagtggggctatttacgcgcggtctcccgttgcgtatcgtgatgattggtaccctcaccggtgcccagtggggtatctatgatgcttttaaagtcatggttggactgccgactactggaggcgctgctccaacacctgctgccactaaggcctgattccacacagccagacttcagacaaaaactggccttgatgaccaaataactcctctttcttaggagcaattcttttattcttttaggaactctaaaatgataaaatctcagatgagtctcaagctcatccatgctaattagattgcaagatttaggaagatgttc

SEQ ID NO: 456844 - DNA, 457 bp, Sorghum bicolor
  unsure (1)..(457): unsure at all n locations
cgtccgatcgctcgattacttgnggtctcaggtcaatggagcgacatgcagtggacttctacatctctgatttccagtctggactgcgggcactggtaaggacaggatctggtgcacgcgtaacctcatatgtggatgaatctgttgttattgacataaacccagacaacaaggatatgtcgcctgaattcctgaggtggctccgtggaaggaatctctcgagtgatgatcggattatgcgccttaaagaaggatatatcaaggagggcagcactgtgagtgtgatgggtgttgttcaaaggaatgagaacgtgctgatgatcgttcctccagctgaacccatctncactggctgccaatgggccaagtgcatnctcccggccagcctcgagggcctggtcctgagatgcgaagacacatctgacctggatgtgataccggtctagctagaggggga

SEQ ID NO: 456845 - DNA, 163 bp, Sorghum bicolor
  unsure (1)..(163): unsure at all n locations
cgtccgggtctatntaacanatacaatgagataccatcaatcatggctattaagattgcttgctgcttcctgtctgtaattttgatatgggaaattcctggggtatttgaactattgtgggcctctcttacatttctgctaggctataaagatccatccncac

SEQ ID NO: 456846 - DNA, 399 bp, Sorghum bicolor
  unsure (1)..(399): unsure at all n locations
cgtgcgcccacgcgtccgccattgcgcaccgccctccccgtcgtcgtcctctcctcgcccgccgccaccgtcgagcccggcccggcgtgtggagacaaagcgaacccagcaaacatggcgaactcggcgtcggngatggccgtgagcgacgagtgcaagctcaagttccaggagctcaagtcgaagcggagcttccggttcatcacgttcaagatcaacgagcagacgcagcaggtggtggtggacaggctggggcagcccggcgacagctacgacgacttcaccggctccatgcccgacagcgagtgccgctacgccgtcttcgacttcgacttcaccaccgacgagaactgccagaagagcaagatcttcttcatcttctggtccccggacaccttg

SEQ ID NO: 456847 - DNA, 243 bp, Sorghum bicolor
  unsure (1)..(243): unsure at all n locations
cgtccgatcggtagatactgagtctcattccgaactctagctggaactccttctcaagcagtataccatattccgcgtcctttcgtgaaacccaaggacaacctgtgggttgtcttcgaggaggaaatgggcaagccggatggcatcctcgtgcagaccgtgacgagagacgacatatgcctgctgatatcggagcacatacccgggacatgataatatgatcgtgggacatcggtnatgggg

SEQ ID NO: 456848 - DNA, 426 bp, Sorghum bicolor
  unsure (1)..(426): unsure at all n locations
cgtctcggagcataggctggtgcaatgactaangctgttcttgctcccttagaaactatcangacaagaatggttgtaggtgtaggatcaaaacatatttgtggtagctttgtggagattgttgaacataatggctggcaaggactctgggcaggtaatacaataaatatgctccggattatcccaactcaagcaattgagctcgggacatttgaatgtgtcaaaaggactatggcatcagcacaagagaaatggaaagaggatggatgcccaaagatacaacttggcaatttgaaaattgagctgccatttcacttactatcgccaattgcaattggaggtgcggcagctggaatagctagcactttagtgtgccatcctcttgagggtcttaaagatcgcatgactgttaatcgtcaggcttat

SEQ ID NO: 456849 - DNA, 407 bp, Sorghum bicolor
cgtccgcggacgcgtggagcgaggcgctgctgatcgggattgtgtgcatggcactcatcctcatcttcagggacagcttctccatcatattcaccagcgacgccaccctgcagcgagccgtcgccaagatcgccggcctgctcggcctcaccatggtgctcaacagcgtgcagcctgtggtgtcaggggtcgcggttggaggtggatggcaaggcctggtcgcctacatcaacctcggctgctactacatcttcggcctgcccctgggctacttgctcggatacaagttcaactttggagttggggggatttggtcgggcatgctatgtggtgtcacacttcagacgatcatcttgctagttgtgatttggaggagagattggaaattagaggcagcacaaggctta

SEQ ID NO: 456850 - DNA, 427 bp, Sorghum bicolor
  unsure (1)..(427): unsure at all n locations
cgccggcggtcaccatcgacgggtacgaggacgtgctcggcaacgacgagtcggcgctaagaggcggtggncaccactcgggtcggtggcatcgagggagcggtcccacttccagttctactcggagggggtgttcgcggggaggtgcggcacggagctggaccatggcgtcacggcggtcgggtacggggtggccgcggacgggaccaagtactgggtggtgaagaactcatggggaccctagtggggggagaaggtgttcttttttttggctcgtctttttgtctttattgttgtttattgttctatttttttgtgggggtttgtttttttattattattttttttattctgtattttgtttttttttttttttcacttttttgtttatgtttatcttttcgttgtgtttttagtgtatttttgt

SEQ ID NO: 456851 - DNA, 368 bp, Sorghum bicolor
cgtccgggctgcgagtcaccgaataagcttgcacatgatgtcatgatccctgtgcaggtggagtagacctcgtgctccaaaaggtggattggagagttcaacataattctgctgtccattcatactcaaccgaaagcgattcagtttgttcatttggagctgtgaaccttacgtgcaaatgtcgcagcaacaagaagcgggaaagcgatgcttgcatcgcagtgcacctttacaggttttgctgaacccttgatcttgccccatgagactgcttcatcagggtgtgctccggaatcgctaccatcaaactcttgggccgggttaatatagacagcataatctgcaccattggggaacatattggcatt

SEQ ID NO: 456852 - DNA, 367 bp, Sorghum bicolor
  unsure (1)..(367): unsure at all n locations
gcgacgcgtccgcgttccggtcgttcccggtcatccaggcgccgtcctgccgcggcatgccgtcgctgaaccacctcctcgggctagacggcgccggcggagtccggagccacttccacggcgcgacgcacgccacggngacgctgtacggccaccggcgggcgcgcatcaccatcgcgctgcacgagagccccggcgccccgccgtgcgtgctgctggacatgggcgtgcccacggccaagttcatccaggacgtgagcgcggcggggatggtgcgcgtcacgctcgagtgcgagaagcagcagcagcagcagcaccacgcggcggcggagtcgtcggtgcggctgctggacgagccggactggac

SEQ ID NO: 456853 - DNA, 479 bp, Sorghum bicolor
  unsure (1)..(479): unsure at all n locations
tcgacccacgcgtncgattggtaacaagggatcagtatcagtcagcatgtctatacatcagactcctttctgcnttgtctgttgccacctggctgctggtgaaaaagatggatatgacctataaaggaattcaaatgtcgaagaaatacttcgaagaacagtgtttaacccagtcaatgctgtaggcatgcctatgagaatacacgaccatgaaaggatcatatggttaggagacctcaactatcggatcaacttatcctatgaaaggacacacgaactaatctccaaacaagactgggatagattgtttgagagggatcagctgaaaagagaattgaggaaaggatgcacatttgacgggtggtttgaaggagttatcagctttcccccaacatataaatacgagtttgactcagaatactatgtaagtgatgagagtaaatctgggagaagaactcctgcatggtgtgaccgcattc

SEQ ID NO: 456854 - DNA, 399 bp, Sorghum bicolor
  unsure (1)..(399): unsure at all n locations
cgtccgctgcactggtgaacgacaccgtggggacattagctctaggacattattatgatgaggatacagtggctgctgtgatcatcggtgctggcaccaatgcttgctatattgaacgcactgatgcaattattaaatgtcagggtcttcttacaaactctggtggcatggtagtaaacatggaatggggcaatttctggtcatcacatttgccaagaactccttatgacatctcccttgatgatgagacgcaaaatcgcaatgatcaggggtttgagaaaatgatctctgggatttatctcggggaaattgcaaggctggtgctgctcgcatggctctagaatcagatgttntggcgatgcttgtgatcatctatctacccccttcacattgagcaca

SEQ ID NO: 456855 - DNA, 349 bp, Sorghum bicolor
cgtccgagccgccctccatcctcgactcgttcccgatctccatttccaatagaacgaaggagaagaaaccgaggcggcagacatggcggtgtcgatcgagctcaccaaggagtacggctacgtcgtgctggtgctggtggcctatgccttcctcaacttctggatgagcttccaggtcggcaaggcccgcaagaagtacaaggtgttctaccccaccatgtacgccatcgagtcggagaacaaagacgccaagctcttcaactgcgtgcagagggggcaccagaactctctggagatgatgcccctgttcttcgtcatgctgctgctggcggcctgcagcacccgacca

SEQ ID NO: 456856 - DNA, 509 bp, Sorghum bicolor
  unsure (1)..(509): unsure at all n locations
gaattcccggtcgaccacgcgtccgctgggccaaattgccgctgctgcgacgcctcatgctctcccacccggaggtcgagtggatctggtggatggacagcgacgcgcgcttcaccgacatggcgttcgagctgccactgtcgcgctacgatggtcacaacctcatcatccacggctaccaggacctcctctttgagaagcactcttggattgctctcaacaccggcagtttcctcttcaggaattgccagtggtcgcttgacctactggacgcgtgggcgcccatgggccccaagggcttcatccgcgaccaggccggcaaggtactcacggcgaacctcaagggccggcagcattcgaggccgacgnaccagtccactgatttacctcttgctctcgcaaaaggacaagtggatggacaaggtgttcatagagaattcctactacttgcatggcttctgggctgggctggtggacaaggtttaggagatgattgagaatcaccaccc

SEQ ID NO: 456857 - DNA, 326 bp, Sorghum bicolor
cgtccgctcgacctgaggggtaatcagcttgcatcattgccgccaagtcttggtaggttggtgaagcttgaggagcttgatgtgagtgcagaccatcttacctcactccctgccgcaattggaagcctcaaaaatctgaagaagttaattgtcgagacaaacaaccttgatgagttgccgtccactatgggcaattgtgtgtcactggtggagttgcgggcaggctacaatcacttcaaggccctccaagaggccgtcgggaagctagagtctctggaggtcctctctgtgcaatacaacagtattagggggcttccaacaacaat

SEQ ID NO: 456858 - DNA, 454 bp, Sorghum bicolor
cggaccggcagttccgggtcgaccgtacgcgtcacgctagatctgatgatgcaccacatctgctattgccgagggacctgcgccgaaggagctaccatgcactagagtgctgtaggatggcgtatgatcacatagctcaccaacatacttactggaatcgcacttcgggaagagaccatatctggttcttttcatgggatgaaggtgcctgctatgctccaaaagagatctggaacagcatgatgcttgtccactggcgaaacactaatacaaaacataagaattcaacgactgcttatcgggcagacaactgggatgatattccttaggataagagaggcacccatccatgttttatccaagaaaggatctagtgcttccgcgtggaaggaaccaaaccctggagcaatatggttaaaacttttggtatggtccatgaagaaccacacaacac

SEQ ID NO: 456859 - DNA, 496 bp, Sorghum bicolor
  unsure (1)..(496): unsure at all n locations
cgtccgtgaagacaccagccaagagagcgtgatgctgtggctactgaaggacaagctaagtgagatggaccatgacggagatgggaggataaacttggaggagtttgtcgcccaatctgatcttgagcgtgccgaagctgaagagaagttcagagaattggacgccgacatggacaactacttgacggtggaagaagcacgctctgtactgcaaagcctcattacaggggagttctcatatgctacttcacatgccaaatttttgatgaaggctgatgttaaccaagacggcaaattgtcgctggaggagatgctagatgactacgtaccttctacagcaccgtttatacggatatcattacagcaatgaagttgatagtgattcccacgacgagctatgagcagttaagccagggcaggacagcgatacgganggggnagggtctttttactttctaataggagttcgcagccaaaaaaatgaaaaatgtacagc

SEQ ID NO: 456860 - DNA, 375 bp, Sorghum bicolor
cgtccgcgctggactggcattccagtgactaggcttggacagaatgataaggagaggctggttggactggccgataggcttcatcgagagggtcattggacagcatgaagccgtcaatgctattgcagaggctgttctgaggtccagggctggtcttgggcggacacagcagcctactggctcattcctcttccttggaccgactggtgtaggcaagactgaacttgccaaggctcttgctgagcagctatttgatgatgagaagttgcttgttcgccttgatatgtctgaatatatggagaaacattcagtttctcgactaattggtcaccacctggctatgttggccatgagaaggagggtaccgcgtgcgga

SEQ ID NO: 456861 - DNA, 371 bp, Sorghum bicolor
cgtccgcggacgcgtgggcgtgaagccgctgttcccggacgcgaggtcgcgcccggcggcggtgcggcggctgttcgacgggccggtgaagctggacacggcggggctgatgcaacagtccatctgctacgacggcgccaaccgttggacggtgtccgtggcgtgggggttcacggtgctggtggccaggggcataatgtcgcctcgggagatggagatgccggcgcgcacgttcctcaactggtaccgtcgcgccgactacacggcgtacgcgttcaacacgaggccgatggctgcgcagcccgagccagaagcctcgcctgtactaatgtcatctgggcggcgccaggacgacgcggcggggagaccac

SEQ ID NO: 456862 - DNA, 359 bp, Sorghum bicolor
cgtccgctgaaaaagagcttcaacatgagcaacctcatcatccaccagacgatgctgccgccggtggaggccgcagacgaggagggggacgcctacgactacgcggagctggactccgagctggagaagcgccagcagcagaaggcacaggagaaggagaaaggaattccataggcggttgcagagcacaagaaattcctcgaaagactaatggatctgctcaaggatgactggaagggcatctgcaagggcttcttcaacagcatgacggccacccaggtggccaaccatgcccagaagtacttccttcagtagatcaaccccgggaagaaaaacgccaggagaagctctttgacagc

SEQ ID NO: 456863 - DNA, 289 bp, Sorghum bicolor
cgtccgggccgcggcgcgtctctggacggcggaggagaacaagcggttcgagtctgcgctcgccgggctcgacctctgccacccggactgggagaaggtggcgcaggccatccccggccggacggtccgcgaggtcgtcagccacttcaagaacctccagctcgacgtccagcagatcgagagcggccaggtgcccttgccggtctacggcagcggggccagctcgttcactctgcagtgggacggcaatggcggctacgggcccggggacttcaagcacgggtaccgc

SEQ ID NO: 456864 - DNA, 500 bp, Sorghum bicolor
cgtccgcccacgcgtccgggaacttgcttggtgaagatcttgagtcattaggcataaaagagctggagcacctcgagaagcaactcgatggatccttgaagcatataagatccacaaggacacaacacatggttgatcaactgacagaacttcagaaaagggaacaaatgttttgtgaagcaaataagtgtcttcgaagaagactggaagagagcaaccaggttatatggcagcatgcatgggagcaacaaggcgagcggcatcctgaagtgcagccgcagcagctacacggcaataacttcttccatcccctcgatgctgctggtgaacccaccttcagatagggtacccttcagaggcctgactagctcatgcatgaccaccttcctgcccccatggttgccatgagatcgaactactgtatgattctgaattaaataacaagcattgccgcagcttcctgcaatagctatatgttgtgcttcgagtgataaattcta

SEQ ID NO: 456865 - DNA, 378 bp, Sorghum bicolor
cgtccgggctgatcacggtttagctgaacgaggcctacacgcattgccttaccaccacacccgtctaacctcaggttcaaatagggccctatattttcacctttgaccacacctatggcctctcaaaaccttcatcatcattaatataagagcaatgcatgcactcctcgattgatgcattgttcagcggatacaacgccactgtcctagcatattgccagactggttctcacacgacatacacaatgggtactgactacagtcgtgacagcaactgcggagggattagtgctcaagttctggatacaatattcacaaaagttgatacctaaaggatggctccgagtttttaatttagtgtcttttaatgagatattc

SEQ ID NO: 456866 - DNA, 214 bp, Sorghum bicolor
cgtccgatgaaatggaagcagcatttaagcctcaagtaaatgatgaactggatacacagaatttcatgaaatttgaggaattggaaaatcctccggccaaaacaggctctgggccttcagaaagatgatgctaaactccaagatctgggcttgtggggttcaatcaaaacttgtgcatgaagcttaaattagattgaagatatttacagctcat

SEQ ID NO: 456867 - DNA, 318 bp, Sorghum bicolor
cgtccggccttggcggcttcttctccaagccatggaagcccaagaaaaccaagcagatcaagggacccgcgcacgtgtcacgagatgactcgttcaagaagaaggccagccgcatggagcaaaaggacaagctcgggctgagcccgcgagggaagcgcgaccctcgacactacgccgaggccaccgatgccatggacaaagttcagatcgagaagaagaagcaggacgaccccctcgatgacctcaacggcgtgctgggccagctcaaaggcatggccgtcgacattggcagggagcttgacaggcaaaaccaaacgc

SEQ ID NO: 456868 - DNA, 159 bp, Sorghum bicolor
cgtccgggatttgttacattttccgatccatctgtgcttgacagggttctagaggatgcccatgtcatagatggaagaacagttgaagtcaaaaggactgtcccaaaagaggaaatgtcctcgaaagatggacctaaaacaaaaaaaatctttgtgggt

SEQ ID NO: 456869 - DNA, 398 bp, Sorghum bicolor
  unsure (1)..(398): unsure at all n locations
cgtccggtccctgaagtcaacaaatatctgaaggttgtctttatcccgaattacaatgtatcagtggctgaagtgcttattcctggtagcgaattgtcacagcatattagtactgctggtttggaagcaagtggaacaggccacatgaaattctctctgaatggtggcgtaatcatggcaaccctggatggagctaatgttgaaataagggaggaggtaggagaagataattctttcctttcggtgccaagctgatcagattgctggctgaggaagacagagaaaatggctgttaaaccagaccacctaagtnctaccggcatngcagacatgacactgggctgcaaaacgatggagaaagcttgagagaagaacacagctagctatattttccactc

SEQ ID NO: 456870 - DNA, 401 bp, Sorghum bicolor
cgtccgtgaatatcaagagaaccataaaagggtatatcaatgctggttttgctggaattatgcttgaggatcaggtggcacctaaagcatgtggacatactgaaggaaggaaagttatatcaagggaggaagctatcatgcacataaaagctgctgtagatgctaggaaggagagtggctctgacattgttattgtagcaaggtcagatgctcgccaagcaatttctcttgatgaagcattatggagggtgaaagcatttgctgatgctggagcagatgttctgtttattgatgcccttgcttcagtagaagagatgaaagcattttgtctgttgcaccagaagttccaaagatggaaacatgttagaagggtgtggtaaactcccatatgagccctgctg

SEQ ID NO: 456871 - DNA, 401 bp, Sorghum bicolor
cgtccgataacgcccaattccaaaacctgcttggtttggtgcaggctaaccctcagattttgcagccattgcttcaagaattggggaaacaaaatccccaggttatgcagctaatccaggaaaaccaagcagaattcatgcggttgatcaatgaaccactggagggagatgaagagaatgaaatgatgctggaccagatggcggatgcagctgagaccattgcagtcactccagaggagaacgaagctatacttcgtcttgaagggatgggctttgaccgggcacttgtccctgaagtgtttttcgcctgcaacaagaacgagcagctgccgccaactacctcttggatcacatcacgagttcgacaacgatgacgggctcggagggccaccactatgaga

SEQ ID NO: 456872 - DNA, 145 bp, Sorghum bicolor
cgttgggccgggtcattcacgtcaccctaaaggcagaaccgacctactcgacccttgtgccggctatgcgctcctggccttaattggccgggtcgtgcctccggcgccgttactttgaagaaatcagagtgctcaaagcaagcca

SEQ ID NO: 456873 - DNA, 290 bp, Sorghum bicolor
  unsure (1)..(290): unsure at all n locations
cgtccgatgatgttgctcgtcgtgctcacaggacacctcgacgacgccgagatcgccgtcgactccatagccatctgcatgaacatcaacgggtgggaggggatgctgttcatcgggctcagcgcggccatcagcgtgcgcgtgtccaacgagctcgggtccgggcgtccccgtgcgagcatgtacgcggtgatggtggtgctggcgcanncgctggccttggggctgctggccatggtgctcgtgctggcgacgcgggagcanttccctgccatcttcaccgtggacag

SEQ ID NO: 456874 - DNA, 389 bp, Sorghum bicolor
cgtccgggcggtgactgcgcggtgtgcctcggcgagttcagcgacggggagctggtgcgcctcctcccgcgctgcgcgcacccgttccacgcgccctgcatcgacacctggctccgcgcccacgtcaactgcccgatctgccgttcccccgtcgatgtcgttccctccgatccccccgtcgctgccgcggaggctgaggcaggtgatgcccaatcgggagaacaccatgttcatgaggaaatgtcgctatcccagtctgaatcggagactgaggtctcggaggactctgaggcctctgcagctactcaaagtgaaggcacaacggctacaacggatgaggatggaagggccacacctaatgtaattaggcgctcggcgtccatggattc

SEQ ID NO: 456875 - DNA, 287 bp, Sorghum bicolor
cgtccgtggcggtgcagcagagcatgtggccgctgcacgtcatggcgtccgccgagtggaccgtggccgacctggtggccgccgccgtggcgctctacgtcaaggaaggccgccggccgctgctgccgtccaccgacccggccgccttcggcctccactactcccagttctgcttggagagtctggacccaaaggagaagattatggaactgggctccaggagcttcttcctgtgcccaagatcttcagctgctggtcaggatgcttcatcgtcctccgctggcaca

SEQ ID NO: 456876 - DNA, 254 bp, Sorghum bicolor
cgtccgcaagttccaattacaaagagctaaatgtcttgtatgagaagtacagagagaaaggccttgagatacttgcattcccatgtaatcaatttgctggtcaagagcctggcaccaatgaagatatccaggagacagtttgtagcaggttcaaagcagatgtttctatttttgacaagattgatgtgaatgtgaaggacgctgcaccattgtacaagtacttgatatcacagaaaggtggcttcctttgcgat

SEQ ID NO: 456877 - DNA, 204 bp, Sorghum bicolor
acgcgcccggcagggcgccacgctccggtggcccggctccagggtcacctgggaggggttcagcgacgcctccgacgcggaccttattgccgagcacgagatctgggccgccgtcgatccattcgccaagaacgaggctgtcaactgcagcaacggggatatcttcaagtggaagcagctgtggccgatcctcgccgatcactt

SEQ ID NO: 456878 - DNA, 389 bp, Sorghum bicolor
cgtccgcgaagcggcggcggatcctgtggggctgggccaacgagtccgacaccgccgccgacgacgtcgccaaagggtgggctgggattcaggcgattccgaggacggtgtggctggatcccagcgggaagcagctgctgcagtggcctatcgaggaagtggaggcgctcagaggcaagtcggtcactctcaagaacagggtgatcaagccaggacagcacgtcgaggtgaccgggatacaaacggcacaggctgacgtggaggtgagcttcgaggtgccgagcctggcgggagcggaggcgctggacgacccggcgctcgccggcgacgcgcaacggctgtgcggcgccaggggcgccgccgtggagggcggcgtcggaccgtcgggc

SEQ ID NO: 456879 - DNA, 335 bp, Sorghum bicolor
cgtccgcgcccccactcccaactccggcgactgccgcgcgcccaccatggccgctcgccggagcaccagctccacccgacgcgggctcctccccgcgctccttctcatcctctgctcgtccctcccgcacttcgccgccgcataccgcccaggcgacatcgtcccgatgctccgctcgggacagtaccacgggtcgaggacggtgtggttcgacgtggtgggccgccactgcccagccttcgcggtcaaccgggaggtgctgatgccgatcccaaagccgacggggttcactggtgctgatccctacaagataacatttcaaattggacatgaaa

SEQ ID NO: 456880 - DNA, 448 bp, Sorghum bicolor
cgtccgagggcctgtcgcccaaggtgctcacgctggtggagcaggagtccaacaccaacacggcccccttcgcgcagcggttcgcggagacgctggactactatactgccatcttcgagtccatcgacctggcgctgccgagggacgacagggagcggatcaacatcgagcagcactgcttggctcgggagatcgtgaacctggtggcctgcgagggcgaggaacgggtggaacggcacgaggtgttcggcaagtggaaggcgcggctgatgatggccgggttcaggccgtccccgctcagcgcgctggtcaacgccaccatcaagacgctgctgcagagctactcgccggactacaagctcgccgagagggacggcgtgctctacctcgggtggaagaacaggcccctgattgtctcgtcggcatgggactagacattagtgttgac

SEQ ID NO: 456881 - DNA, 377 bp, Sorghum bicolor
cgtccgccgacgctcatcgcaaggatctgatcttccgcgcgtcggcggctccctctcggcggcgtccagcgacggaggggcagtcccaggctcggcggcgtcgtcggcggctccccccaccttctctcgccagtcgcctcgcgccctcgcctgcgtcctccgcgcaccggccgacgaccctgcatatagagcagagtgttttgtgtgagactaccaaaacttgaaaatgaacaagggaaagatttttaagctagctaagggattcagaggaagggcgaaaaattgcataaggatagcaagggagagggtggaaaaggcactgcaatattcatacagggatcgacgcaacaagaagagggacatgcgatctctttgga

SEQ ID NO: 456882 - DNA, 389 bp, Sorghum bicolor
cgtccgggtgttccaaatgttcgacaagaacggcgacggccagatcaccaagaaggagctaggcgagtcgctcaagaacctcggcatcttcatcgccgacgaggagctcgatgccacgatggacaagatcgacgttaatggcgatggttgcgtggacgtcgaggagttcggcaggctctaccgctccatcgtcgaggacggcccaggggccgacgccgacggcgacaagcacgatgaggatgaggacatgcgggaggcgttcaacgtcttcgaccataacggcgacgggtacatcaccgtcgacgagctgcggtccgtgctggccagccttggcctcaagcaggggcgcacggccgaagactgccgtaagatgatcagcaaggtcgacg

SEQ ID NO: 456883 - DNA, 423 bp, Sorghum bicolor
cgtccggaagaattgtacaatatgcatccttcagtgttcttcttaccaacattccttgaagcagttaggagcaatacagaagaaagctttagaagtattatgactgagccaattcctggtgtttattcgtttgctatgttgcaacctactttctgtgagatgttattggaggaggtagagaactttgaaaaatgggtccatgctatgaaatttaagataatgaggccaaatacaatgaacaagtatggtgctgtccttgatgattttggcctggaagctatgctgaaccagttcatgcaacagttcatagctccaatttctaaagttttttatcctgaggttggtggaggaacattggactctcatcatgcttttattgttgaatatgggaaagacagggatcttgaactaggttttcatgtg

SEQ ID NO: 456884 - DNA, 324 bp, Sorghum bicolor
  unsure (1)..(324): unsure at all n locations
gggaggaactgcaggagaaggggagagagagagagagagagagagagagatggagaacggcggcggcaaaggcgacgtccccgacgatgcgaacgagcgttgccctggaacgcagtcggaggaggcggngaaggctgatgcctgcgctgggtgccccaaccagcagatttgtgccaccgcccccaagggctccgaccccgatgtggttgctattgtcgagaggttggctactgtgaagcacaaattgttagttctgtctggaaagggaggtgtcggaaagagtacattttcaagccaactgtcgtggctgtagctgcaatggac

SEQ ID NO: 456885 - DNA, 374 bp, Sorghum bicolor
cgtccggccgcgcgctccacctgggcgtcaacgtgaagatgatcaccggtgaccagctcgccatcggcaaggagaccggccgccggctcggcatgggcaccaacatgtacccttccaccacgctcctgggcgacaagaacagcacggtgaacggcatgcacatcgacgagcccatcgcccacacccgactcgtggaagctcgacgagatcttcgccaccggcatcgtgctcggaacctacatggccatcgtcaccgccatcttcttctacctcgcccacgacaccgatttcttcacggccgtgttcggcgtgcagtcgatcaaggagaacgacagggagctgatggcggcgctgtacctgcaagtgagcatcat

SEQ ID NO: 456886 - DNA, 350 bp, Sorghum bicolor
cgtccgctgttggccaacttgagtggagtgcaaattatcctaagcatgctgtttctggtaatcatcagccaataattgaggagaccgctgagtccagaacctgaacctgaaaatgtagaggcaaaggagggtgcaatagaggatttcttttgtgaagaccctgatgaaattcctaccattaatcttaatatcgaggagtttacacaaaacttgaagaactatatgcaagcaaacaatgttgacattgaatatgctgacatgtcgaaggcattggttgccatcacccctgatgctgctttcattccaactccaaagctcaagaatattagtcgtctgaggacagaacacca

SEQ ID NO: 456887 - DNA, 455 bp, Sorghum bicolor
  unsure (1)..(455): unsure at all n locations
acgcgtccgactgctccagcccaagctgggtcactcctgctagtgggaccatttgtagattacttgttgacaggcaaaagggtggatcacttcagtttctcatcacttgctctgtttttcctggcactctcatgcttcattgccattggcgttaatctgacccaattcatctgcattggggcggtctctgctgtatccttccaagtcctaggccacatgaagaccgtacttgtctgtcccttgggtntcttttctttggcaaggagggccctgatcttcangtagtcccttgggatggttctggccgntctttggaatgatatggtatggcaacgcatctgctaaacccagcggcaaaaagcggcgcagcattcctgccggtgaggtctgcaagtcttaaagggaagttcaaaagaaaaagccggtgctgagaaatagtcttgctattatctaac

SEQ ID NO: 456888 - DNA, 376 bp, Sorghum bicolor
cgtctggactagttctagatccaaagcggacgctctagaggtatacatgctccaggacgatgatcatcacgctcaaggaggagctgatcatccagggcgacaagaccatcgacggccggggcgcgcaggtgcggatcgccaacggcgcgcagctgacggtgcagttcgccaacaacgtcatcatccacaacgtgcacatcaacgacatcatgtcctccaacaagaacggcggcacattcggactcgccgacacttcgctggcgcacgttcgacgcacggatacctcttcgtcacacgtggtcacaccttcttcactgcagacgctatgactatgagcacgcgacattcactgcatacacacacactatgcttagtc

SEQ ID NO: 456889 - DNA, 304 bp, Sorghum bicolor
cgtccgcttcaccaccgacgagaactgccagaagagcaagatcttcttcatctcctggtccccggacacctcgaaggtgaggagcagagatgctgtacgcgagctccaaggaccggttcaagagggagctggacggcatccaggtggagctgcaggccaccgaccccagcgagatgagcatggacatcgtcaaggcgcgagctctctgagtccatctcaagacgagacgcgcaggcgcagcgccgctcgcgcgatcgacatgcatgccccccggaccggaacagtgtgttgtcttgcatcgacc

SEQ ID NO: 456890 - DNA, 394 bp, Sorghum bicolor
cgtccgccacctgtaaaatcacctcctccaccggctcctgtgatttcaccaccacctccagtgaaaacccctccaccaccggcgccagttagctcaccaccaccacctgtaagatcacctcccccgccagttccagtgagctcaccacctccacctgtaacatctccacctccacctccaccagtaccggtcatatcacctccaccgccaactccggcaagatctccacctccaccagtgaagtctccaccaccaccacctccggtaagctctccaccaccaccagtgacctcaccacctccaccaacacctgtgagctcaccacctactccagtaaagttcccttctccacctgcaccggtcagctcttcaccaccacctgctatattgagct

SEQ ID NO: 456891 - DNA, 427 bp, Sorghum bicolor
  unsure (1)..(427): unsure at all n locations
cgtccgattaaatatagataaaaataaaaactaattccacagtttggtcgaaattgacgagacgaatcttttgaacgtagttaggccatgattggacaatatttgtcaaatacaaacgaaagagctacagtgtcgattttgcaaaatattttggaactaaacaaggcctgagaatactgagataggaaaatatggaggccttgaagaagaggttgagagttgggacacttaagagggacaaggcccttttaatgcaggactgtcagatggaatcacaacagaactggaaaagtcctcaatgtggaccgtactaattgactttctgcagatttgtgacgaacggaatcctgagactggccaggttagccaccattgngaacctgaagaccatcgggattgcttggaatccagtttattgattaatcct

SEQ ID NO: 456892 - DNA, 443 bp, Sorghum bicolor
cgcgtccgctcggcgttgccggcgacatcatctccaaggccttccactgcaagcacgggaaggcgtacctcttccataaggttgtcaatgtgacttctggagtaaaagaagatcgcatgatgatcacaggaatgcatactgtttctgatatcttctgtgttggctgtggatccatcgttggatggaaatatgaggctgcacatgagaagagccagagatacaaggaaggaaagtttattctggagaggtacaaggtgtcgggccctgatggaagccagtactggattgcaccagatgttaacttgggtggaagcgacgccgatgatgtatgaagcgtgattcaacaagctcaaacctgttgttcgtcccctgtaaataacccctggtgttgttgctctttagtcagccggggattgctcccattgaaataatccccggcgtaa

SEQ ID NO: 456893 - DNA, 403 bp, Sorghum bicolor
cgtccgcccacgcgtccgcgcccaaatccgctcgtcttcgacttcggttcatcccctggaccgaaatttctaggggcacgagatcctctagaggtttgcgctgtttggcgtgaaattttgggcgcgatttgctttgctcgcatgggggatcatgtcgcggtggatgttggggagctcgtagcgtcccgagtcggtgaggcagccgggttggtgtcccgcggtaaggaggaaacggaggcgctgattgggatggtggagtgccgcatttgccaggaggaggaccttgcgaagaacctcgagagcccctgcgcttgcagcggcagcctcaagtatgcttcacagggaatgtgtgcagcgttggtgcaatgagaaaggagatattacctggtgaatcttgcatgag

SEQ ID NO: 456894 - DNA, 450 bp, Sorghum bicolor
cgtccggccgccgtgtggggctggaccgcgcggcgctctcctcggcctcggcgccgccggtgaccaagccgtcgcggcccgaggacgctgcggtggcggtggaggatggcgaggacgacgacgacgacgtgtgcgaggccgagagggacgatgcggccgggaaggccatctacatagtgtccgacgggaccgggtggaccgcggagcactcggtgaacgccgcgctcggacagttcgagaactgcatcgccgaccgtggctgcgctgtcaacactcacctcatccccttgatcgacagcatggatcaacttcttgacgtaataaagcaagcagcaaaggaaggggcactggttctatatacccttgctgatccttcaatggcagaggcagctaagaaggcctgtgatttcttgggtgttccatccactgatgttcttcggcctacagttg

SEQ ID NO: 456895 - DNA, 313 bp, Sorghum bicolor
cgtccgacagcaacaacaacacggacgtgagcggcggcggcggaggcgggttcgccgcggacgagcggaagcggaagcggatgctgtcgaacagggagtcggcgcgtcggtcccgcgcgaagaagcagcagcggctggaggagctggtggcggaggtggcccgtctgcaggcggtgaacgcggctgcgcatttccgtattgcgttgttcgagcgctatgtttccaatgtggtctgtgactttttattgttttttgctgtctctgtttttatgcttttctttatctttttctttattatttttttttttttcac

SEQ ID NO: 456896 - DNA, 527 bp, Sorghum bicolor
cgtccgttcgaacaagagggcaaccgagttatatcggttgaagagttggcacaggaactaaatctcgcgccaactcattactccatcgtgcaagattggatcagaaagtcggacggcaagcttaactttcttgggtttaccaaatttttgcatggtgtcacaatacggggctcaaatacaagacgacactaaacggttgcaaattgtattcgcttctaatttaaagcctctcatcaattatatggccctgattgctgttacccctacctcctgcttgccctgccccttcgtctggtcaatgaccattcttgtttgtgatgtcgccggttgttgtcgtcatagcttttgtagagtacatgtaaagatccttgtaatggcgaaatcatatggtttgctcaagaaatatagtgtcatttgttctttttggcttcaccagtttgaaccattattatccgtggatagtcttttgtcgacttggtgcttaagttgttagcgttgctcagctaaataacatttcaggcacctgt

SEQ ID NO: 456897 - DNA, 490 bp, Sorghum bicolor
cgtccggaaagagctagttccagagatgttttaccttcctgaggtatttactaatgtaaactcaagtggaagactaggatctgtagcactgcctccttgggctgaaaatgctgttgattttgtacatatgcatcggaaagctctcgagagtgatcatgtctccacacgtttgcatgaatggatcgatctaatatttggatataaacaaagaggtaaagaagcagtagtagccaacaatatattcccacatgttacatatgatgggatggtggacattgataaaatcaccgatccagtccaacggcaaggtgtacaaaatcaaatatgttattttggacagacaccatttcaactgctgacagttccacatataagaagaaagccgttgacagaaatattacaattgcagacaatattccggaacccaagtgaaagtagatcttatgtgcttccaagtccagagcacttgaatgttcctgctagcacgatg

SEQ ID NO: 456898 - DNA, 523 bp, Sorghum bicolor
cgtccggtcatccccatcaccatgaccatcatctagctccatcacttggtgtgtaccaacctatctttgtatttcactcatgacaaaggttaatacacataggtttcatcaattatccaaaaccaaactagggctttcaaaggggctgatcacctcaggcgaaagggtaaatcatgactcacagtgaaagtgtacaacctctgtagagtgtaaaactgatatatcatccgtgctcacggtcacgagcggccttggaccaatacagaataaataatcactaatggcaaatcattaaatgttattattgttaatatgttgtttatgctattctttattcactttacctgatcatgagtttactatgggtcatgacaacttgatgctactcctatgctaaaattgtgacaactaaaaactacatgcagttgaaccagtgtctaacctttgagcctcatgaaccccatgttacacttgttaagtacgaggtgtacttacacttgtttattttctttatttggataaa

SEQ ID NO: 456899 - DNA, 431 bp, Sorghum bicolor
  unsure (1)..(431): unsure at all n locations
cgtccggcagttttggtgggtgaccatctgtatgttgcaaatgttggtgattctcgtgctgttatttcaaaagctggcaaagctatggcactttcagaggatcacaaacctaacaggattgatgagcgaaagagaattgaaaatgctggtggtattgttatttgggcgggtacttggagggtaggtggtgtattggcaatgtcccgtgcatttggcaatcgtttactgaagccatacgtggtggcagaacctgaaattcaggaagaacaggtcaatggtgagctggaatgcctggttcttgctagtgacgggctttgggatgttgtcgaaaattgaggagctgtttctcttgngaaatcagaggacgcgctagattttgtagcttgtatattgacatgatatgtctatttttgtggcaatgctgacattat

SEQ ID NO: 456900 - DNA, 524 bp, Sorghum bicolor
cgtccgggtcaccagcataactttgagaagaacctgctgaagtgtagctggtcgccggataaccgcaaggtcactgctgggagcgcagaccgcatggtctacatctgggacacaacatcaaggcgcatcctgtacaagcttcctgggcacaatggttctgtcaacgagactgctttccatcccaccgagccgatcattggatcttgcggcagtgacaagcagatctatcttggggaactttaagtgattatcagttgtttttcagctagaagatgttcttgtgacactttggtgagtaggagaaaaggaggcatcctgttcatttgccagagttggacgtacctcgttggctatcaagattattgtgtcatttgtagattgtcttagcctattcagcccagttgggttctgggtttgccgttcacaaactgctccatgctttgtaccttctggctttctgatggtaaacttgatgccatgcttgaaggtcactgaatgcatgtactgtgtctagaaccatactc

SEQ ID NO: 456901 - DNA, 440 bp, Sorghum bicolor
cgtccgcaggtagatactgagcaattgacatcgcctatggacagccaattttgtatgctccaagatcaccaactgactatgctgtgtggatgggtgaaatacaacgctggtggtacttcacggatacatacaaggtcaatatggtattctatgatgatgagattgcacaggttgtgcaagatcgatagggcgaccatggaaagcctcttatgcatttgctacatgggaagaatactgactctcgaaatgtatcaaagcctgctagtcgtgaggggatgagaagctcgatactgatctaagtacactgcatgcaatttagaccgaatgccgtgtgattaaatctgatctgtagcttgctctcatgcaggatgctaatgatggcagtaataaagctcgacatcgtggatatgagactagcaagctcaaccatgaatgaatat

SEQ ID NO: 456902 - DNA, 483 bp, Sorghum bicolor
  unsure (1)..(483): unsure at all n locations
cgtccgcaactctcacttttggaaacgtcgcgtattaaaaaatattttagatcatgtcctggtgctgccttttatgctcgtactgagcttccatccagcatgccaaatcttgagtctcttagcttatcttcagcaactgagacgattaatacgccgctaatgcctagcaaattcctccacctcaagttcttgactattgctcttcgtggacagacctatgattgtttttctctgttatccttttttgatgcttctcctttcctggagactttcatattgaatgtattatcatcggtacatgtgaagcctgcctcagtttttgaagatccctcggatctgaggaagatgccagagaaccataatgacaagctcaaggtgttcgaatcatcaatttctcatctgcaaagaagctgattgagttgacctgtcatattctcgagtctgcaatgtcacttgagtgcctcacnatggacaccacttatg

SEQ ID NO: 456903 - DNA, 418 bp, Sorghum bicolor
cgtccgatcatgctctcagattttgatctgtctctgaggtgctcagtgagcccaatgcttgtgagaacatcatcagtaggcagagatgagcccagtaggccttctggtccctgtgcacaaagctgcattgatcccctgtgtatccagccatcctggagcaattcgtcctgcttcacgccccgtttggtttcgtctacaccatcaaggacacggaggcctagagctgagcccctgaagaaaccatcacttccacagctcgttgttgagcccacggaagcaagatcaaattcatttgttgggacccatgaatatcttgccccagagatcattcgaggagatggccatggtagctcggtggattggtggactctcggaatcttcctttacgaattactctacggtaagacaccattcaagg

SEQ ID NO: 456904 - DNA, 267 bp, Sorghum bicolor
  unsure (1)..(267): unsure at all n locations
gcagacgctcgtgaaccattattgtagctgtcgtcgctgctgctgtcgtcgtcgtcaacaaatccacaaggatggagaagaagccgaccatcctcatgaacaggtacgagctcgggcgcatgctcgggcagggcaccttcgccaaggtgtaccatggccggaacctcgcgtccagccagagcgtggccatcaaggtcattgacanggagaaggtgctgcgcgtcggcatgatcgaccagatcaagccggagatctccgtgatgcgcc

SEQ ID NO: 456905 - DNA, 229 bp, Sorghum bicolor
cgtccggttctgattcacctgctccaatggctgttctttctgctgctgatgctcccccggtctcagctatcgggtttgagggctatgagaagcgccttgagatcacaattgtgtccgagctctccaacaaggattttgactcctatgtcctctctgagtcaagcttggttatctatcctttgaagattggcatcaagacctgggggactaccaaacttctggttaccat

SEQ ID NO: 456906 - DNA, 353 bp, Sorghum bicolor
cgaggttgaactctctgctctggggatggccattggtaccgtcgtgactgtcgccgagatcctcaagaataatggcctcgccactgaaaagaagatcctgacatgcaaccatcggcaccaaagacgagtccaagggccggcttgtccgtaaagccaagattgagattctgctgtgcaaatcagagaatttcaacagcatcatgtctagcaagaaatccgaccgcccgaaatccgccgaggaagagatcaaggtgtgatctgaccaacttgtccagccgttctccagcagagccctccctcatgttccatttccagaggttggcagctcaccacagcattacggattgatgggg

SEQ ID NO: 456907 - DNA, 279 bp, Sorghum bicolor
  unsure (1)..(279): unsure at all n locations
cgtccgggaaagtgccgtcgtctctgaccctctgaatctctccctctccctctgcaacgcatcaagaaaaggaactgcagccagcgatcgaggaacacaagcaccggcggcaaacatggttcacgggaagctggaggtcctcctcgtctccgccaagggcctcgaggacaccgatttnctcaataacatgggacccttcgtgatccttacatgccgcacacangagcagaaaagcagcgtcgcanatggagcaggaagtgagcctngatggaacgagac

SEQ ID NO: 456908 - DNA, 303 bp, Sorghum bicolor
cgtccggagcattgaagactccgtgagggctggttgctatgccgcgaatgttatcatccagcgcccgggctgtacttacccggagaagcctgacttcaactagtgcgaaaactgaggcacgttatgagaggtggactgttataggcacacttattcttaaccactgcgtggtcggtgtgtacacaccctgtattctcccgaggcttttcttccgatccggccaatatttttgccgtgatatttgtcctgcaactatgaacgtcgtctttgacgctgtataaggcatgttttgccaccataaaa

SEQ ID NO: 456909 - DNA, 464 bp, Sorghum bicolor
  unsure (1)..(464): unsure at all n locations
cgtccgtgctgttggtgacttgaaagaatttctggaggatgttgtattggaggaaaaccgtggtttgccgtgcttcttatttgggcactccactggtggagctattgttttgaaggctgtgctggatccttttgtagaacttcatgtagaaggggtggtcttaacgtcgccagctattcatgttcaaccatctcatccaatcatcaaagttgttgcaccaatattctccatgctagctccaaaataccgagtcagtgctttgcataagagaggacctcctgtttcacgcgacccagaggctctgaagatgaaatattcagatccccttgtgtatactggaccaattagagtcagaactggcaatgaaatactcncgatatcgtcattnntgcaaagaaactngagcagagttactgtcccttttcttggtctcatggacagctgacacataactgatcgagagc

SEQ ID NO: 456910 - DNA, 412 bp, Sorghum bicolor
ttttcacagaattaatgttcttagcccacacagaattaatgtgttgggcacaacaggctgacagcgaaggattacattacatatttagatggggcaacacaaccgaaagcagctgcagcaacagcaacagcagctgagacccattgacacatagtatatggcaaccagtcactgatgaagacgacagtacttggtggactgcactactataaatcgtgcacaatcaacggcaccttcgacttcatcttcggcaatgcaaggtccttttacgaggactgcaacattgtctccaaatccgccactgattacctcggggacctgccggtggcaaagccgcccttgaccttgtcgcctgcggcggccgacggcggtttctctttcaagacatgcaccatcacagggcaaagtttta

SEQ ID NO: 456911 - DNA, 468 bp, Sorghum bicolor
cgtccgggcttgtgaaagctagtcgggatgtgacaatgaacagcaaaaaggtcatctttcaggtccacagaatcacgaaagttaacagggacgagagttctctccaaggcagaaaatgatcttgctgcagtggttaatcaatacattgcaaaactagtaaaagaattacaaggaactgacttctggaagctcagaagagcctacacctttggtgtacaagaatatgtcgaagctgcaacactgtgtagattttgcaagactggcactctattaagtcttgctgaaattaatgattctttactagcactaagtgataaatctgttgagcccttacagttaaatgtgcttgactatcttttaggggttgctgatttgtcaagagagcttatgaggctcgcaataagccgtatatctgatggggggagtgaaatgcaaaaacctattgtgcttttggacgtgatatttaca

SEQ ID NO: 456912 - DNA, 502 bp, Sorghum bicolor
  unsure (1)..(502): unsure at all n locations
cgtccggccgtccgcgtgccggcgttcctcgtcgtcggcgtcgagtcggccatctacttcgccaactccatgtacctggtggagcgggtcttgcggttcctccgcgacgaggaggagcgcgcgctcaagtccaacctcccctccatccgatccgtcgtcctcgacatgagcgccgtgacggcgatcgacacgagcggtctggacgcgctgtcggagctgaagaaagtcctggacaaaagaagcatcgagctggtgcttgccaacccgttggggtcggtggcggagaggatattcaactcggcggtgggggagacgttcgggtcggaccgcctcttcttcagcgtaagggaggccgtcgcggcgggggcatgcaaagcggcgcagccctgaccggccggctgaccctgaggtggatggnggcatggagcacagggggtcctctgaccagcagaagcagctgcagtagaagaagatgcgagcgcttntcggaggaggatgacat

SEQ ID NO: 456913 - DNA, 384 bp, Sorghum bicolor
cgtccgaccgggtttcggcgtctctccttagcgcgcgacaatggcggagcagacggagaaggctttcttgaagcagcccaaggtgttcctctgttgcaagaaggccgccaaggggaacaagcctggcaagggaggaaacaggttctggaagaacattggccttggtttcaagacgcccagggaagccattgaaggaacctacattgataagaaatgcccattcactggcactgtgtctatcaggggtcgcatcatcgccggaacatgccacagtgctaagatgaataggaccatcattgttcgtaggaattatcttcacttcgtcaagaagtaccagaggtatgagaagaggcactccaacatccctgcgcacatttcaccatg

SEQ ID NO: 456914 - DNA, 445 bp, Sorghum bicolor
  unsure (1)..(445): unsure at all n locations
cgtccgcccacgcgtccgcggcctcggaggtgccacctcctgcgccgcatcattcttggaggaagtcaatagtgatccttagcagctcagtgtccggcgtggtgctactcctggcgggcctcataatcgttgtcgcggtggcggtggttttgcggaagcggcgggggaagggcaaggtgacggcggtgcanggctcgttgctgctgttcgactaccaggccgtgaaatcggcgacgcgggatttcacggagaagctcggcagcggcagcttcggctcggtgtacaaggtgacgctccccgacacgacgcccgtggcccgcaagaagctcgacgggttgcggcaagggcgagaagcaattccgtgccgaggtcgttacccttcgcatgatccagcacatcaaccttgtccggtttcgcgggcttctgctgcgaggggaacaagagg

SEQ ID NO: 456915 - DNA, 465 bp, Sorghum bicolor
cgtccgctctgcatcgctgacgaagttcaggcaggagttgcgcgaactggaagccacttctggggattcgaagggcatggtgtcatcccagacatagtcaccatggccaagggtattgggaatggcatacccataggagctgttgtgacaacaccagagattgctcaggtcttgacccgcagaagttacttcaataccttcggtggtaaccctgtcagcactgcgggcgggcatgcagtgctcaaagtgctggagaaggagaagctccaggagaatgcgtttgttgtaggcttcctatctaaaggaacagcttaacaagcttaaagagaagcatgaaatcattggtgatgttaggggcaaagggcttcttcttggagttgagctggtgacagaccgtgaaaagaaaaccccagcgaaagctgagatctcacatgtcatgaaccatatgaaagatatgggagtgct

SEQ ID NO: 456916 - DNA, 375 bp, Sorghum bicolor
  unsure (1)..(375): unsure at all n locations
cgtccgcggacgcgtgggtacgcctgccaatatccttgatgttcgtggaagtgcatcaaagcggcatgttgtgtaagcttttaagatacttacttgagatgagatagtcaatgcaattctagtgaacatctttgaaaacattatcaantctgatgtgatagcaagtggaattgttaatgctgctaaacaggttgacctgaacgatcctgttgttgttcagttgcaatgcaccaatgtacaccaacgaaagaggattcttaacgaaagtggaatgactttaatcactgcagaagatcttgatgatactgcatataaaccagtaaaagcatccagcatgtaactgtagtgtattaatctgaagttcttttttttact

SEQ ID NO: 456917 - DNA, 308 bp, Sorghum bicolor
cgtccggccgccaccagtctctccctctcctcccggctccggcgaagagcgcccaccagatcacttgttaatctttctcaaggggagatggcgttttctttcgcaaacgtcaactctgaggcagggctgaaaaagcttgatgagtaccttttgactcgcagctacatcactggctaccaagcttccaggatgtctggctgctacttcatttcggtgctcctatcaattataacgacaggggtactacatgtcacttgagctgtgagtctgcaaggctaggaggtggcatacatctagctactctgtgt

SEQ ID NO: 456918 - DNA, 228 bp, Sorghum bicolor
  unsure (1)..(228): unsure at all n locations
gtaccgtccgtnatcccggtcgaccacgcgtccgctcacacaaactctagaggctgaggacatagcgtcccgaagctggacaccatcctgacatccataccgatggagctgatccgtggggaagcggaggctcctcgcgaatccatccatgaagcatgccatgctgttcccgcagcccgcccagcctggggacgccttccaccagatcctgaacgggttggcacggaa

SEQ ID NO: 456919 - DNA, 441 bp, Sorghum bicolor
cgtccgatctgccagcacggcacctgctgcgcccacagcaccgcgtaaccgcacactatgcctgaggagatgaccaacatcatgaatgactctcggcgagccgcgggtttctggccatgaccggactcttgctcttccccaccaagtacatgctcatccaaggcgagcccggcgccgtcatccgcgggaagaagggatctggaggcataaccgtgaagaagaccgggcaggcgctggtgatcggtatatactacgagcccatgacccccgggcagtgcaacatggtggtcgagaggctcggcgactactctagtagagcaaggcctgtaaatggatgattgctctaaccaaactgcctgcctgtccatgtttagagcattcagcagcaacgatactaccggcagcatttagtagtctctatacgcacgcattttttttagt

SEQ ID NO: 456920 - DNA, 381 bp, Sorghum bicolor
  unsure (1)..(381): unsure at all n locations
cgtccgccgagaccttcgtcaacgacgagctcctacgctacatctctcagagggccccctcattgaagagcctccatctctgcttgtgccatcatgtcactagagaaggttttgcagaggcaattaatggtttccctcagctcgaggagctagatgttacattctgctcattgaatggtagcatgtgtgagactgctgggagagcctgcccacaacttanatgcttcaggttgaatgagcgctggtgtattcttcaaagtgaagttgcatcctacgagggcatggatgatgacacgggaagcattagggatcgctagcaccatgcctgggcctcaagaactttagttgattggtaaccagctgaccaattgttggactcat

SEQ ID NO: 456921 - DNA, 459 bp, Sorghum bicolor
  unsure (1)..(459): unsure at all n locations
cgtccggtttgcccggtgttctgtgggtgcttcctgattcctacattgatgtgaaaaacaaggactatgggggtgacaagtacatcaacggtgagataattccctgcacgtacccaacctaccaaccaaaggagcggagaacatccaagtatgagagtagacggtatgagaggcgaagagatggccccccagcagccagcaggaaaccaaggcaacaggctcctcagactgagtcagcatcttcataatgagttttgcaggcatttatccacatacttactaaaacaaaagagcacgcctaattctgtcactttggcactntagcaccacacatacaggcaggacaggcagatccatcatcatcatcaggccaaaatgtcacgcggtactgtccaagcagcctgggcagcttgtattgtatctggatcacgtggttgtgtgtgctgatattttgagcta

SEQ ID NO: 456922 - DNA, 442 bp, Sorghum bicolor
  unsure (1)..(442): unsure at all n locations
cgtccgcggtgggcgagcatggaacgtangaggagccggcacgccttgttgctcttctcggcagtcatggcgtccctcgtctccggctcgaccggcgggatagaccacatcgtcggcgccggcaaagggtggcngatgccccccaacaggacgtactacgcggactgggcgagcgccaggcagatcagcgtcggcgacaagctgatgttcctgtaccggagcggngcgcacaacatcgtggaggtgccgacgcgggagctgttcgacgtgtgcagcatgcacaacatcaccaaccggtaccagaacgggccgaccatcatcgagctcacggagcccggccagcgcttttacttctgcggcgtcngcgagcactgcgagggtcggcagaagctcgccataacgtgcttctcgtcccggcgccggtcgccgacacggacgacga

SEQ ID NO: 456923 - DNA, 416 bp, Sorghum bicolor
  unsure (1)..(416): unsure at all n locations
cttgcttgctccgctcggctagggttcgaggcggaggcgcggcgtttgtcgagttgggcaactgcggaaacgtttgagagtacctgagcaaagaattgaacctcgagggatcaaaataaaagcagacttagagtataaggagcaaccagtggggattgtggataacaaggaacgggtaacccgaaacagaattgtcagaacatataaggtggtgtggagtcatcatgacgatagggatgccacctgggaaacagaggattactngaaaacagtttatccaaaatttcataagaaatggttagtaacccaaaatctcgggacgagatttccctaaggggggaagggcttgaaccccctaggtgttangcatgcatttagccctaccacaacatgcataagcattctcatcaagcata

SEQ ID NO: 456924 - DNA, 342 bp, Sorghum bicolor
cgtccgccgggatcaatccggcgaggagcctcggcgccgccgtcgtgtacaacaacagcaaggcctggagcgaccagtggatcttttgggtgggtccgttcatcggcgcggcgatcgcagcgctctaccaccagatcgtcctccgcgccagcggcaggggttacggctcccgctccttccggagctacgcctagggggacctcgtcttggtcagcttccacggctattccaggccgtgactgagcacttttcagtcaggtcaagtgttgtagctgctggcaacggctcggcagctagtgcaagtgtttgtgcgtttgtgtgctgtgaaaagcaagtgtgact

SEQ ID NO: 456925 - DNA, 319 bp, Sorghum bicolor
gtcgacccacgcgtccggaggatttttgtgaaaaggcacagctggtgaactatgttcagtacagagcacttttggaaggatggacttccttcatgtggacaaagtttacaggtgttctaatttggaagacgcagaatccttggactggattaaggggccagttctatgatcacctccaagatcaaaccgctgggttttatggttgccgttgtgcttctgaacctattcatgtgcaactgaatttggcactgtctttggagaggtggttaacactacagctgatgaactctaagactggtcgttgtaatttcagtgtggg

SEQ ID NO: 456926 - DNA, 361 bp, Sorghum bicolor
cgtccgcagcagccaccgtcaagatgcccgccaccttcgttgtcaagactagcatcctgaccaaggaccagatcctggtcccggagacccttctcaagaagcgcaagtcctctgagaaggaggctgccgacaaggctgcccatcgtgagacccgcaagaaggagtccaagaccaagcgtgagcagatcttcaagcgcgctgagtcctacgtcaaggagtaccgcgactaccagcgtgagcagatccgtgtcgctcgcgtcgccaaggccgacggcagctactatgttcccgcccagcccaagctcgtcttggttacccgcatcaagggtatcaacaagatcgaccccaagaagcgcaagac

SEQ ID NO: 456927 - DNA, 396 bp, Sorghum bicolor
  unsure (1)..(396): unsure at all n locations
cgtccgcggacgcgtgggggcggcagcggcccaattcttggccctggcgtgcatgtccgcgacgatgacgtagtcaccggcgttggcggcgccgaggcttctcagctcctcaagggcgctctcggcgagatccaggtcgccgtggatccggcacgcgttcagcaggcttcgccaggccgtgtccgtcggccccgtgggcatgctcccgatgagcgcgcgcgcgtcgtccagccttccggcgcgggccatcaggtccaccatgcagccgtagtgctgcgcgttgggcgcgaacttgtgctccagccgcatgcggtcgaagcaccgcagcccgtcctcgagcagcccggcgcggctgcaggcgttcagcacgccgacgtacgccggcgcgttnggcgc

SEQ ID NO: 456928 - DNA, 466 bp, Sorghum bicolor
cgtccgccctcgtctcgtgcacttctcctctgccctcaagccgccgccgccgccgccgcctgctcgccgcgctctcctagcgtccgggaaggtcgtctcgccagccatggcctcggagacggagacgttcgccttccaggcggagatcaaccagctgctggtggggctagcgtgctccagcccggaaccggcgctgcgccccgggatgcgcggcgtggtccaggtgctgggcggcgagtccgacccgccgttcgtgccggcggccaggccgtccatgagcctcggcggcagcgccaacaaccagcagctgctgctgagcctgcaggacagcgtgtcggactacaacgccctgctggggctcgccggcctgtcggacgactcgttgtcgtccgccgactcgctcaactcgtcgtccctcaccagcacgctccgcaggggcggccatgatatcgggttcagcagcacc

SEQ ID NO: 456929 - DNA, 195 bp, Sorghum bicolor
cgtccgcaacgtgcagggagaagagcagaagaagctggatgtcctgtccaacgaggtgttcgtcaaggccctcgtcagcagcggtcgcacctgcgtccttgtgtccgagaggacgaggaacacgtcgggaccctaagctacgtaagtttggttgttgtcctgacgtctcacatgctggggttctgacattgatat

SEQ ID NO: 456930 - DNA, 482 bp, Sorghum bicolor
cgtccgatccgccattgatcactgcacaagtgcgcgctcacaaacccacacacaaagctacaagaagagatggccggggagaagaagcagggcctgcagctgctggacttctgggtgagcccgttcgggcagcgctgccggatcgcgctggacgagaagggcctctcctacgagtacctcgagcaggacctcgcgaacaagagcgagctcctgctccgcgccaacccggtccacaagaagatccccgtgctcctccacgacggccgccccgtctgcgagtccctcatcatcgtgcagtacctggacgaggcgttcccggcgacgccgtcgctgctccccgccgccgccggcgacgcgtacgcgcgcgcgcaggccaggttctgggcggactacgtggacaagaagctctacgactgcggcacccggctgtggaagctcaagggggacggccacttgcaggcgcggacggagatggtcgagat

SEQ ID NO: 456931 - DNA, 541 bp, Sorghum bicolor
cgtccgtgactgctcttttggctgactttggcattgcaagtttctaccaacatccttcatcaacacccgctagttctaccgcttcatctgtcggcatgaagggaactataggatatattgctccagagtatgcaggaggtggtcgccatgcagcaacttccgatgatgtttatggttttgggataatactgcttgaaatgatgactggaaggagaccaacagatcctatgttcaaggacggagtcagcattatcaactttgtggagggccacttcccacatgaaatatttcaggtccttgatgctcatctaacagaagaatacaagaactttgctgaagcaaagaaaatatcagaaaatgcggttcatcagtgcttggtatcggtcatacaagtagcattttcctgtacgaaaccaataccaagcgaccgcatgaacatgaaagaaatagccaccagaatgcatacaatccaatcgtcatatgtgtcaatgggaaagcaaagcaatatcgtacgggccctaggagtggagttacccgaatg

SEQ ID NO: 456932 - DNA, 379 bp, Sorghum bicolor
cgtccggactgcggctagactacaggcggcacgtttacatgcagccagcctgccacgcgctagcatgcgtctagagagatctaatatcaagtcactgaccgtcaattcacagcgcgtcgactgacaacaccctgactgggcccaccttgacggccccgaactacatccccttgtcgcccgttggcgtaacagcagctagggccgtaccgatcaggctcgcaaacagcggcgcagcctgcatgggcactggcacactcgctgatgcgacgcaccctgcgccggcgcagtgatcgcgacgcgcgtcgggaccactcccattgcgagcgctatactggccagtgctctagctcccgttcctttctttctcgtcacgttcgtc

SEQ ID NO: 456933 - DNA, 453 bp, Sorghum bicolor
tcgaccacgcgtccaggccgcgtcaccatgtccgccgagtggatgcccggccagccccgccctgctccacctcgacggatcctagcccggagactacggcttcgacactctcttgtgtctggcagaccgtgccggagaacttctagcggttcaaggagtcagatgtataccaatggcaggagtctatgcttaatgaaccacataccataaggctttatacggaacagacatgcaaaggttatcaacggcaagcttgactgaccttgacttgaacaaaaacttccgtggagatgtatctttggcaatgaattggacaggtgatatctacctagacagatgacgttcatggacactccagctaaataaatgagtagagatagcatatctttttcaagagataggggactaggggagtcactagtatcgtatatgccaaactcgaattccttttct

SEQ ID NO: 456934 - DNA, 395 bp, Sorghum bicolor
ggtcgacccacgcgtccgaatcgatatctggtctgttggctgtgtagtggctgagcttctgattggtcagcctttgtttcctggtgaaagtggtgttgatcaactggtggaaataataaagattttgggtactccaacaagagaggaaatcaggtgcatgaatccaaattattctgaattcaagttccctcagataaaagcccatccattctttgatgagctgcgggaccccaaggtctgcttgccaagtggacggccactgccaccgttgttcgacttcacagcagccgaactcgaagggctcccaattgagctggtccatctgattgttcctgaacacatgaggaagtgaatagggggacgcactgaaaatcccagtttttctgtagtttttt

SEQ ID NO: 456935 - DNA, 571 bp, Sorghum bicolor
cgtccggcttggtgatgcccagcacgttgaggaggctgagaagatgggacttgactacatggatgttgagtccctcaagaaaatgaacaagaacaagaagcttgttaagaagcttgctaagaagtaccatgctttcttggcatcagaggctatcatcaagcagattccccgtctccttggccctggtctcaacaaggcaggcaagttccctacgctggtaactcaccaggaatccctggaatccaaggtgaacgagactaaggctacagtcaagtttcagctgaagaaggtcctttgcatgggtgtcgccgtcggtaacttgtccatggaggagaagcagatccagcagaacatccaaatgagcgtcaacttccttgtgtccctcctgaagaagaattggcagaatgtgagatgcctgtacgtcaagagcaccatggggaaaccatacagggtgttctaagtctgctctttgtgaagtcgtctgctctttgcgatattaggcttttgaaccgaggttggcttgaactgaactcttgttagaatataatattctgtggccggatattggagt

SEQ ID NO: 456936 - DNA, 371 bp, Sorghum bicolor
cgtccgtcatgagatgcctgaaactggggagttatctcagcagaacattaaagatcgctactatggagttaatgacccagttgcactgaaacttttgagcaaggcaggtgagatgccatccctgacaccgccagatgatgagactataaggaccctctacattggtggactcgatagcagaataactgaacaggatttgagggatcaattttatgcccatggtgagattgagtccataaggatggtacttcaacgtgcaatcgcgtttgtgacatatactacaagagaaggcgcagagaaggctgcagaagagcttgctaacaagctagtcatcaagggtgtgcgcctgaagctgatgtggggcaagcctc

SEQ ID NO: 456937 - DNA, 398 bp, Sorghum bicolor
cgtccgcttaaaagaactttctggagagatcccatgggagttggcatcattagattttctttcaatgttgaatctatcctacaaccagctgcagggaagaatacctgagtcttcacacttcttgacattctccgatctctcgtttttaggaaacattggcctatgtgggtttcaagtgtccaaagcctgtaacaacatgacaccagatatggttcaacatcagtccaagaaggtatcaatagacattatactattcctttttgttggattgggatttggtgttggattcgcaattgcaattatcttgacatggggaatctcagcgagctcatccttacctttacaatccacattgttgaggataatgttccatctccaataatatgtccaactacttc

SEQ ID NO: 456938 - DNA, 458 bp, Sorghum bicolor
cgtccgaacttgttcagaatttgatagagcgttgtctacagctatacatgaacaaaggagaagttgttagaactctttctactcgtgctagaatagaacctggcttcactactttagtatggcagaaacttgaagaagagaactctgagttctttagggcttactatatacggctgaaattgaaaaggcagatcatcttgttcaatcatttattgcaacaccagtacaatttgatgaaatatccagtacttcagcagcctatcatgcctgctcctggccagcctcacatggatcccaatggcctgtggtctgtccagtggtcatgtggttaatggaatacctgcaggtggttatcatccaatgcgcatgaactccggaaatgacatggttgtggacaatggagcacctgaagcaccacatgcttgtgctaccggtagtgctatgtcatctgagatggc

SEQ ID NO: 456939 - DNA, 501 bp, Sorghum bicolor
cgtccgccagaacagtaccagccttagtggagcctgcaagggctacatcttcgccatggaggtcaccgaggagctggagacgtggccggagcaggacacgcacaaccgccgatgggtgtctcccgccgaagcctaccagctctgccggtacgaatggatgcgggaggcgctcacggcgctgctggagaggctgtccgtgctcgagccggtggccgcggcgacagcggcagacacaccgccggagctgaccgaccaacaacctggcatgtacatgatgctgcaagcgtcctagggacggcgcggtggcgctgtgctagctgatcctccatggacgctgctgctgttgctgttgtggataactgatctaactgtccctctacgcacgttcagtacaaagcaagtgcaaaaagcatggcaaccagatagataaacccaggagattcaggtgctctctgtctagtcgctcgacttaggccttcgattctcagctagacatgacga

SEQ ID NO: 456940 - DNA, 453 bp, Sorghum bicolor
cgtccggacgacgacatcatctttgaacatagtggatctcaatctgacaggaaaacatcaggttccatggcttcgtcagatgttctaactgtcaatcaactaatggaatctgttcatgagactgcaaggcaagttgctaatgttccagtttccaccaaccctgtaccatacgaccaaatgaagagtcagtgtgaagccctggtcatggaaaagcaacagaagatgtctgttctcttgagcttcaagcattcgaggactgactcgcatggttcagccggtgtggatgggctcgaaacgaatgagtcttctttgcgatctgagccagagttgaggaaggggcgcatgcgccgttgcgattcagcatccagcgaatctgactgttcgttcaggctgccacctgctagcccatacgacaagttcctgaaagcggctggacggtagcttggtgcaact

SEQ ID NO: 456941 - DNA, 448 bp, Sorghum bicolor
cgtccgttaaaagcgaggagtggcgtgaagaggtaagaaataatcattattgctacaaaggaaagcctagggtaaagactggttatgaaattttcatggcaagcttggatattgaaagcaatcttgataaggttactctaccattcatcatagtccatggcggtgacgatgctgtaactgaccccacagtaagtgaggctctatatacattagcgaagagcaaggacaagacattgaagttgtaccctgtgatgtgccattcctttgacttcaagagaacccaaaggggacattgatattgtgtttgcagacatcatcaaatggttgaatgagagggtaccgtcaatttcctaacctgggatcctatagtggtttacagttacaagaacaatgttgttagccaacaaacattgagtatttgatactacacatatttaattttagagag

SEQ ID NO: 456942 - DNA, 470 bp, Sorghum bicolor
cgtccgcaaggacaacgcctactgtgactcgagctacacacagtggccgtgcgccgcggggcagaagtactacggaagaggccccctgcagatctcgtggaactacaactacgggccggcaggacagagcatcggcttcgacgggctcgggaacccggacgccgtggcgcaggacgccgtgatcgcgttcaaggcggcgctctggttctggatgaacaacgtgcacggggtgatgccacaggggtttggcgccaccatcagagccataaacggcgccctcgagtgcaacggaaacaaccccgcgcagatgaacgcgcgggtgggctactacaagcagtactgccagcagttcggcgtcgacccggggagcaacctcacctgctagaagtgatgggttcatgcctgccttcttatattaatataagggtgtatatatacttagaattgagagtgcgtagtagtattagaga

SEQ ID NO: 456943 - DNA, 467 bp, Sorghum bicolor
cgtccggttcgtcgccgccgcggacggcgccagggagacgacgacgatgaggacgcacttcatccggacggcgaccaacgtgggcgggggcgggaaggcggtgtaccgcgcgtcggtccaggcccccgaggggtgcaacgtgacggtgcagccgcggcagctggcgttccggcgcgacgggcagcggctgagcttcacggtgcgggtggaggccgcggtggcggcggcgcccgggaagaggatggagcccgggagctcgcaggtgcggagcggcgcgctgacgtggagcgacggcaggcacgtcgtccgtagcccgatcgtggtgacggtgcaggcgccattgcagtgactagtactgatgaccgcggatggagccggagctgtggtgaggccatcgacgggaggtgggggagacacagtctcagtgttctttgtgagtccgcaaggtttttagcttttctgtatta

SEQ ID NO: 456944 - DNA, 371 bp, Sorghum bicolor
cgtccggtcgaagtgctatgagtgtggtgagactgggcactttgcacgtgaatgtcgtctgcgcattggttctggaggtctaggcagtggaagacgtcgcagcaggagcaggagccgcagccgcagccctagataccgcaggagtccaagctatagtagaaggagctatagccctcgttatcgctctccaaggcgccgtagtccttctccagctcgtggccgcagctgtagcaggtcgccatagtacaactgcaacaaatatgtgtctcccttgccaatggaggtaatgatggcaggtactggtgtagcaagagctagcctgaagaccgtacctgattcttctgtgtgagaacttggtccttggtttggct

SEQ ID NO: 456945 - DNA, 206 bp, Sorghum bicolor
cgtccgcatagatatgatcacaggaccatacaaactcgttcgacggtgtgaagtgactgcaattcttatactgtacgggctgccaaggctgttaactggctcgattttggctcatgagatgatgcatgcttacctccgacttaaaggataccgaaccctgagtccaaaggttgaagaaggcatctgtcaagttctagctcatcttt

SEQ ID NO: 456946 - DNA, 340 bp, Sorghum bicolor
cgtccgacggcgagaaggagtggtacttcttctcgccgcgggaccgcaagtacccgaacgggtcgcggccgaaccgcgccgccggcgccgggtactggagaggccaccggtgcagacaagccggtgggcacgccgaagccgttggccatcaagaaggcgctcgtcttctacgccggcaaggcgcccaagggcgacaagaccaactggatcatgcatgagtaccagctgcgccgacgtcgaccgcaccgccgcaacaagaacaacagcctcaggttggatgattgggtactgtgccgaatctacaacaaagaaaggcgtgccggagaggccggccggagcc

SEQ ID NO: 456947 - DNA, 152 bp, Sorghum bicolor
cgttcgcaagctcttagggactcgagcattgcgggctacatgtcgagccaaaagactattgagatcaacccagagaaccctatcatgggtgagctccgcaagcgcgcttaggcccacaagaattacaagtcggtcaaagatctcgtgatgct

SEQ ID NO: 456948 - DNA, 574 bp, Sorghum bicolor
cgtccgctctccctgtccctgccatcctcgctgccgcggccttcctcctcgctccccctccaccgatcgcatccaccccgaaaccctagcgggctagtcgccggccatggcgcggcggtcgacccctctcctacgccgcctcctcgccccgtcaccttccccctccccctccactcccctcgccggcgccgcgccccgccgcaccgtcacctacatgccccgcccgggggacggcgccccgcgcggcgtcactctcatcccgggcgacggcatcgggcccctcgtcacgggcgccgtgcggcaggtgatggaggcgatgcacgcgccggtctactttgagacgtacgaggtccacggcgacatgccaacggtcccagccgaggtcatcgagtccatccgccgcaacaaggtctgcctcaagggcggcctcgccacccccgtcggcggcggtgtctcctccctcaacgtgcagctccggaaggagctcgacctctacgccgcgctggtcaactgcttcaacctccctggcctgcctaccaggcacgacaacgtggacatcgtggtcattcgggag

SEQ ID NO: 456949 - DNA, 370 bp, Sorghum bicolor
  unsure (1)..(370): unsure at all n locations
cgaccacgcgtccgctgatctgtacacatctatngttacntcattctcggcgaatgcatcttatatagtctccacagtgctatggatttactggggtgttggtattagtgacatgatcccattctatctagggaaactcttcaggcaaactagagcatcagaagacataagcagcaagattggaattggtaaggagaaagcactaagcatatcacaagcagttcagaagtatggaaacctaattggctttgttgaacgnatttcaattggtgttcggaatcctacagcatttcttgctggagcatntggtatatcagcagacnttttcttcgaaggagtttgtttcggttgtctatttactcttccctat

SEQ ID NO: 456950 - DNA, 376 bp, Sorghum bicolor
  unsure (1)..(376): unsure at all n locations
cgtccgctgatctggacacggcggatcagagtcagagcgaagctgcttgtagttgggtgcagctagcagccacttgctagccagccagccagccagcagtcgatcgaggccaggcgcgcgcgcgcgacgatggtgagaagaatggtgctggtggcggcgctggtggtggccaccgtcgccgtcctcgccggcggcgcgcgggcgcagctcaaggaagggttctacggctccacctgcccgcaggcggagaagatcgtcaaggagttcgtcaaggcgcacattccgcacgcgcctgacgtcgccgncaccctgatccgcacccacttncacgactgcttcgtcaggggctgcgaacccgtggtgctgctcaacgcga

SEQ ID NO: 456951 - DNA, 292 bp, Sorghum bicolor
cgtccgctgagattgctcacatgtacaagacggaccggcctaagtatgaggcgacagcccgcagctggacccagaagtatgctatgggatgaaatgaagccaaaaccccatattactgcttaaatgcagacgattgtggtgttgcccccatgaaactgtttctggggacgaatgttcttccattccttgtggcccgtgtgcattctccgatccatctaggatcgagtcctagtccaacatcaacctaccattgccgtcgataatgagatgacttatgcttgctgtgataact

SEQ ID NO: 456952 - DNA, 454 bp, Sorghum bicolor
cgtccgcaacaacagctagctagctagcaacaccaccaaataaacatccacctcgctaagcgatcgagaaaatgaagaccaccatggacctcattgtctgcaaggagtcctgtgagcactcacagcagaggcaaagaagaagaaaccggcagagagcgtggccgccgccggcgaggcggcggaggcgaagaaggtccaagacagcttctgcgccacgctctgccaaggcaggaaggggatggacctcattgtctgcaagggcaagtgcaccgagcagaagggcatcactgcgccggcgatgaaggtctgcgaggagcagtgcgacaaggactacgtggtgaaagcggcggaggtcaccgctgcatgcaacaagacttgcgacaaagagaagaacaagatgctcagcgacaattgccagaagtcctgcaccccttctgcagcttgaagcatgcac

SEQ ID NO: 456953 - DNA, 356 bp, Sorghum bicolor
  unsure (1)..(356): unsure at all n locations
cgtccggagcatacgaagaactatttagctcttgaagataatgaaatttgtcatattaaggatggtagtgtctcgatcctcaagtttgacccgcacaaagagaagccagcatctgtgcaacgagcattgtctgttcttgagatggaagttgagcaaataaagaaaggaagttatgaccacttcatgcaaaaagaaatccatgaacagccacattcattgaaaacaacaatgaggggtagactgaaagatggtggggttcttctaggtggactgaaggaatatctcaaaacaattaggcgctgtagaagggtggtttttattggctgtggaacaagntacaatgctggcttaactgc

SEQ ID NO: 456954 - DNA, 461 bp, Sorghum bicolor
cgtccgcccacgaaggccatggacccgggcctcgtatatgacctcaccgccggtgacttcatcccgtatctatgcggcatgggcctcggcgaggaccggatacgcaagatcgtcgagccggcgcaccacgcctcgtcgtgcgcggagaccggggagatcgcggcgaaggacctgaactacccttccatcatgatcgtcacgggcgacgacgtgcggcaggtggagtcggaggcgaagcggacggtgacgaacgtgggggagcgcgaggagacgtacagcgcggaggtgttcgctccgggcgtcgtcgtagcggtgaacccgtcgactctggcgttcggcgacattggccagaagagggacttcgttgtcacggtcaagaaggcggcgaacacgccggccaaaggcgtggtcgagggggagctgaagtgggtgtccgagaagcatgtcgtgcggagccccat

SEQ ID NO: 456955 - DNA, 310 bp, Sorghum bicolor
cgtccgagcgtctcctcgcaaacccatcgatgaagcaggccatgctgttcccccagcctgctcaggcgggtgatgcattccaccagatcctgaatgggctcgcacgcaagctccctcatggtgacaacgtcttcttgaagcccggggagagggtcctgaactggaccgccgggccgccaggcgacctgaagccttggtagcatctgcctgccatattactagaactttttggggaaaaaaaaggaagattgaggacatggtgatatatatacgtgcgcctttaagttaccatggctgcatagttctgacc

SEQ ID NO: 456956 - DNA, 263 bp, Sorghum bicolor
  unsure (1)..(263): unsure at all n locations
cgtccgcggaatcttcgagaaatgttccacattgatgctgcagattacatgatgtccatatgtggtgatgacagtctgaaagagctttcttcacccgggaaaagtggcagtattttctatctttcacaggatgaacgttntgncataaaaaccttgataaacgctgagctgatgatactgttgaagatgctttcaaaatattacagtcatgtcccaacttaccataataagctcattacaaaatnntttggcgtgcacaggat

SEQ ID NO: 456957 - DNA, 434 bp, Sorghum bicolor
cgtccggctgaaccgtgcttgtcatcatttgccccattgtcggaaatctgccccagcattagcaatggtaatagtatggaagataaccaccaggttaatcctggcattggcatgcccatgcaaggtctacccaaaaggactggctttgatgttgtgccttgccctgatcgtgactcggtcatttcgcgctataaagcgaagaggaagacaagaagattcgacaggcaggtccggtatgagtcacgcaaagttcgtgctgatggcaggctcaggatcaaggggcgttttgcaaaggcaaaccagacatgaacctgaatttgcaatatgctaagcatcttccggcacgaaaaagaaaattgattaggggcgaatgcgtgattataatgcataaatgtgccaaaattttggttgcgttcagttcaatagctgataac

SEQ ID NO: 456958 - DNA, 253 bp, Sorghum bicolor
  unsure (1)..(253): unsure at all n locations
gacccacgcgtccgcccacgcgtccgcgccgcaaggcctcctggaaggaccccgacggccgcatcatctccgccaccacgcgcgccgacgccgccgcgcgcctcctcgacctccgcaaccagatcctctccggccaggccaacttcgccnacctcgccgggcgccactccgactgcttctgcgggcgacgcggcggggacctaggtacctttgggaggaagcanatgcagaaaccatttgaggacgctgcata

SEQ ID NO: 456959 - DNA, 213 bp, Sorghum bicolor
  unsure (1)..(213): unsure at all n locations
cgtccgcgcgcaacgagttcagcctcgagtccaagtacaccatcggcgtcgagttcgccacccgctccctccaggtcgacggcaaggtcgtcaaggcccagatttgggacaccttcggccaggaacgatatcgtgctattactanngcatattacagaggtgctgttggagcgtggcttgtatatgatgtcactcgtgactcaacttttgaga

SEQ ID NO: 456960 - DNA, 336 bp, Sorghum bicolor
cgtccgcgacatccggttcaacgacttcgacggccccatcccgccggagctcttcctcaagccctacgacgccatcttcctcaacaacaaccggttcacttctggcatcccggagaccatcggcaagacgaaggcgacggtgatcgtgctcgccaacaaccagctcggcggctgcatcccccggagcatcggcgaggccgccgccacgctggaccagttcatcttcatcaacaacagcatcactggttgcctgcctgtcgaaacggggctcctcaccaatgccacggtgttcgacgtgagcgacaacgccctcacaggctcgatcccgccgacgct

SEQ ID NO: 456961 - DNA, 234 bp, Sorghum bicolor
  unsure (1)..(234): unsure at all n locations
cgtccggtcactgggggtgattgaatcggtgtggctgaaaggtgatgcaaagttcttgctaggtaacccccagccatcgattgcagatctgagccttgtttgtgagataatgcaattggagatccttggcgatgaggtccgtgaccgatntanngnagctcatgatgagatcctcatctggatgtgattcgtgaagaaagccacgagccctcattttgaggaagnccacgagct

SEQ ID NO: 456962 - DNA, 432 bp, Sorghum bicolor
  unsure (1)..(432): unsure at all n locations
cgtccgcccacgcgtccggtccagataacaagattggagcacataaatgccctttctagcaatgtggaatatctggcgtcaagggatgcaacgatcatgggaagcaggaatggccatgcgcctatcttcctctggtacaccctcaacaggaagggctacagaggctttcagaaagaagtccagaagtgcttgagaaatgcacactacctaaaagatcgcctcaaggaagcaggagttggagcaatgcttaacgagctcagcagcacagttgtatttgaaaggccgaaggatgaagaatttgtccgaaggtggcagctcgcttgtgaaggcaatatagctcacgttgtggtgatgcccagtgtcaacattgacaagctagattatttcctgaatgaattannggagaaaccagcgacttggtaccaggatgga

SEQ ID NO: 456963 - DNA, 238 bp, Sorghum bicolor
cgtccgcgacgccaggcaccgtggcttgtattggcagtggactgggccgacgttattctgatgaactgccgaaaagcgtggattggcgagagaaaggagctgtggcgccggtgaagaaccagggggagtgtggctcttgctgggcgttctccgccgtggcggccatcgagggcatcaaccagatcaagaacgggaagctggtgtccctgtcggagcaagagctggtggactgcgacac

SEQ ID NO: 456964 - DNA, 302 bp, Sorghum bicolor
cgtccggtctccggctgctgatcgaggactacccgtacgccaccgacgggctgctcctctgggacgccatcacgcggtggtgcgacgcgtacgtggccatgtactacccgtccgaccaagccgtgcagggcgacacggagctgcagtcgtggtacagggaggcggtgcagacggggcacgcggacaagcgcggcgcgccgtggtggccgcgcctgtcgacgccgggcgacctggcgtcgctgctcaccacgctgctgtggctcacctcggcgcagcacgcggcgctcaacttcgggcagtac

SEQ ID NO: 456965 - DNA, 317 bp, Sorghum bicolor
cgtccgtgcgcattctcgccaccgcgctcggcagcgaggagaaagccaagcaggcgctgatctacagctacaaggccgtcgccagcgggttcgccgccaagctcacgccggagcaggtcgccgcgttgaagaagcatcctgccgttctgcaggcgctgcctgaagtgaagtacagccttcaggacaaccgcctcacctgaaccgagcgagtactttcagaccgtcaccagcaagatacatacctacatactgtagcacctggcatcttcaccgtgtattactatctcgtaattatgtgcatatgttagcaagtgtgt

SEQ ID NO: 456966 - DNA, 282 bp, Sorghum bicolor
cgcgacggcaacctggactgcgtccggcaactcctctcctggggcgccgaccgcctccagcgagactccgtcgggagaattccgtatgaggtcgcagtgaagcgaggccacgtcgcgtgcgcggcgctgctgaacccgtcatcggcggagcccctggtctggccgtccgctctcaagttcatcagcgagctggaacccaacgccaagtccctgctcgaagcaacgctgatggaggccaatagagagagggagaggaggatcctcaaaggactaagatgcact

SEQ ID NO: 456967 - DNA, 278 bp, Sorghum bicolor
cgtgcgctagcttccttcttgtctcccctccgtcaagcagtgtcactctctatccccatggcgaagatcaagatcgggatcaatgggtttgggaggattggtaggcttgtggcgagagttgctcttcaaagcagcgatgtttagcttgtcgccgtcaacgaccccttcatcagcaccgagtacatgacatacatgttcaagtatgacactgtccatggacagtggaagcaccatgatgtcaaggtgaaggactcgaatacccttacttttggtgaaaa

SEQ ID NO: 456968 - DNA, 378 bp, Sorghum bicolor
  unsure (1)..(378): unsure at all n locations
cgtggcggcagcttcatcttggaggtgatgcctcgacaagtagtacagaagcagcagaagaagaagctggacatgaagcccatcgagacaggggagctcgacacaaagtgcgccaggtgatgatggtacattgggtaaccaccaccatcacacatccgaggagcaaatccaggagtgaggaaattgaagctggatgtaagattagattttgctgtttactgatgcaacctttgtttttactgagtgttctttgtgttgtttttctttagctctgcccaagttgtgatatctataggtttaggttgaatgatatggggctgggaatatgatgcgtgcccatgtttgtcaggcttggngcaaagataacttttttcttaa

SEQ ID NO: 456969 - DNA, 463 bp, Sorghum bicolor
  unsure (1)..(463): unsure at all n locations
cgtgcgctcatctggtaccgccgcgccgactacacggcgtacgcgttcaacacgaggccgatggcgcgcagcccgtgccagaagcccgccgtgtactacatgtcgtcggcgcggcgccagggcgggcgcggcggggagaccacggtgacgcggtacgagcggtggcgccacccgaacgagacgcggcccgcgtgccggtgggacatagccgaccccgacgcgcatctcgatcacatcgtcgtcctcaagaagcctgaccccgggctctgggacaggtcccccaggcgaaattgctgcagagtggtgtcttcgcccaaggatggtggggagaacggggagaagacgatgaccatcgatgtaggcgtatgcaaggaaggcgagttcagccaagtagcaggagcgtgagctttgattagagacagatgaagataggaaggttcanattcttttcttcttcttcttt

SEQ ID NO: 456970 - DNA, 460 bp, Sorghum bicolor
cgtccgcggactgtgacctttgatgacctgagcgaccgctaccacacccactgtgacccaagactgaacgcctcccagtccctggagcttgccttcatcattgcagagaggctcaggaagaggaggatgcggtcagggctcaacaacagcctgccgctgccaccactggctttctgaatggccaaagccaaacagagagggtagaaatagttgcggtgagtcgaaagaggtgatcggcgcctatttatttgttgatgtttggtgtggtggcctggggggtgctcttggcacaagttacatgctggggagctataggaggtacttgttgtattctggaagacagtagctagcattatgtgttgtaattgtatgccatcgtttcctgttttgggtgcgtgacttgccgacttagctgcttctggtgtttgaccttggtaaggagagaataaagagataatgg

SEQ ID NO: 456971 - DNA, 438 bp, Sorghum bicolor
cgtgcgagcccatggctagcagtggaggagatcagtcctgggcgctcgccaagggcgaagaagttcagcagcaggagcatcgggtttctgagcggcacccaggctagccagatgtcagcgtggcggacacggagcgcgtaccaccgtggcaggagcaccccgctgatgtgcaagaccacgagcaccctcgcggcggtcatggcacagatgctgtcccaccgggccacgcacgtctgggtgacggacgcagaatctgaggacggcgtcctcgtcggcgtggtgggctacaccgagatcttcaatgctgccaccaggagcacctgcgcgagttcgacaacatcttgatgcaccacgccgtgctgtacagtagactgtacttggttgatctgttggtgattgccgccagtgcacaacgttgcactgaactggacaatgtac

SEQ ID NO: 456972 - DNA, 384 bp, Sorghum bicolor
cgtgcgcccacgcgtccggctgctgctatgtccaagcatcctgtttgggtcatgaatgtggttcctgcaaatagaacagagaatactcttggtgtcatgtatgagcgaggtttgattggaacatacactgactggtgtgaagccttctctacttatccacgaacatatgatctgatacatggtaatggaatcttcagctcccatattcacaagtgtgggattatcgacatcctggttgagatggatcgcgttctccggccagggggtgccgttatagttcgggacagagctgatgttgttctcaaagtcaagaaggacgccgaccgtctaaaatggagtagtcgagttgttgacactgaaaatgggcctctggatcctgagaag

SEQ ID NO: 456973 - DNA, 229 bp, Sorghum bicolor
ttctagggcgaccctggcttactcctccttcctgcgacatcattcttctattatatcaccaccattctataatctacccgccgttttacaacaacgtgactactaaaacaaccccgttgccaaacaaaataatcttgtagcacaatatccttttttcagcatccgtcataacaaagaagaggccaccaatcatctttcttaacaacagttgagcctcaataacgaataa

SEQ ID NO: 456974 - DNA, 327 bp, Sorghum bicolor
cgtgcgatggtctatggctacagatgcttctgtgtcacagggtgcaagcgatagttgctgatacttgcaggaactgttgccttacgaataatggttgtgcttgcaagcaagcatatgtgagctcgcatacacactacaggcaggagcatgaccggagcagtgcttctggcagcataggtaatgtctaccttgcggatggccagggcgatgggaatggtgtacttgggcctgtccgtgttaacgtaagaggagcagtcgatggacttgctggtattgggagagggaactcaaatgtgcctggtgcagcttgggctcctacacgttatg

SEQ ID NO: 456975 - DNA, 399 bp, Sorghum bicolor
  unsure (1)..(399): unsure at all n locations
cgtgcggcaagagtcatttggagaaaaacaatcttttttttttgtaaattcctgaagcgtgcatatatttctgttgagacaaggtaatggagtcgtcaggtaagatccagccggtcgtcatcctgcttctcctgctcattgtggccaccggtatggcgccggcggcggtgcangcgagggaatgcgagaaggacagtgagagatantgtgggatgtgcacgtccagagtgaactgcgccaacgtgtgccgtggtgaaggcttcatgtctggcaagtgcagcaccttccgcgaccgctgcatctgcaccaagccgtgctaattaaaccagagagcgatttgcatgatgcgcgtgcctgcgactgctgctactcgatcgtgtcggcatttcatttttcgat

SEQ ID NO: 456976 - DNA, 429 bp, Sorghum bicolor
tgagaagattacatgaaacaaatttacatatattctgtgccggctgtcggataatgaggaagatggaggagggtgaacgatgtacgctgccagtgggcaaacgtactccttactatatatatcaatacgggtgaagtgatcttggatctcagaaccagaccagatcagatgattatgcagatgagaagaacaagtgactttctgcgtgccgtgttaacgtaagaggagcagtcgatggacttgctggtcttgggagagggaactcaaatgtgcctggtgcagcttgggctcctacacgttatgtcttctaccgtgttccttatgggctcggtttaagaaatgggcaacaatttgccaattatgaatcagaacctagggtgggccgcaatggagatatttcagcaaatggtgtgactgcattggttaacc

SEQ ID NO: 456977 - DNA, 410 bp, Sorghum bicolor
cgtccggagagagcggagaggaggaagaagacgacgcggcaccatggcgacggcacaggcagcgtcggcggcccctacccaccaccgcgcgtctccagggacttcgccgccgcagccgccgtaccccagcgccgccaggattgccgactccgcctgcttcccccagtacaccgcctcgctcaagtgtttggaggccaaccaggacaagagcaagtgccagcagcagttcgacgattacaaggagtgcaagaagaaagagagggaggctcggctcgaacggaataaaacaagatcactctttgggtgaacaatggtgtcccatctgagcgatttgctggcgatgtgtaataagtcgtttccagtttcctgatgtgagcgaaatcacggcttgtttggtgtcatgatgatcc

SEQ ID NO: 456978 - DNA, 203 bp, Sorghum bicolor
  unsure (1)..(203): unsure at all n locations
cgtccgcgccaacaaggtccgcatcgtgcgcgcgggtgcggtgccggcgctcgtcgaggtgctccggtcgggcgcgtcggcgcccgaggcgcgggagcacgcggcgggggcgctcttcgggctggcgctcaacgaggacaaccgcgccgncatcggcgtgctggggcggtgcccccgctctggactgtacgtcccggccagta

SEQ ID NO: 456979 - DNA, 374 bp, Sorghum bicolor
  unsure (1)..(374): unsure at all n locations
cgtccgaccgccacctcgtcacccttgtcgggtactgcatcgccggctcctcccagcgcctgcttgtctacgagttcgtgcccaacaataccctcgagtaccacctccacgggaagggcgtgccggtgatggagtggccgaggaggctcgccatcgccctcggctccgccaagggcctggcttacctgcacgaagattgccaccccaggatcatccaccgtgatatcaaggcggccaacatccttttggacgaaaatttcgaggctaaggtcgcggatntcggacttgccaagctgaccacagacaccaacacgcacgttttcacgcgcgttatgggaactttcgggtatttggccccggagtacgcgtcgagc

SEQ ID NO: 456980 - DNA, 317 bp, Sorghum bicolor
  unsure (1)..(317): unsure at all n locations
cgtccgctttcaggagaccacttcttagtgctgatccagcaattactgtacaccaaatacagccaactgataagttcatcatttttgcatctgatggactctgggagcatcttagcaatcaggaagcggttgacatggtccaaagtagcccacgtaatggaattgctcgaaagttagtaaagtctgcaatgcangaagcagcanagaagagggagatgcggtattcagacctcaagaaaattgatcgnggggtgaggcggcacttncacgatgatataactgtcatttgtggtggttttcgattcaaaatgccatga

SEQ ID NO: 456981 - DNA, 379 bp, Sorghum bicolor
cgtccggtgaagccccgggagcggaacgagaggtacgtgaacgccgtgatgaccatccccaagggcaccctcttccccatgtgcggcatgaacctcgccttcgaccgcgacctcatcggccccgccatgtacttcggcctcatgggcgacggacagcccatcggacgctacgacgacatgtgggccggatggtgtgttaaggtaatctgcgatcacctgggtttgggcgtcaagaccgggctgccctacatctggcacagcaaggccagcaacccgttcgtaaacctcaagaaggagtacaagggcatcttctggcaggaggacatcatccccttctttcaagccgtcgtgctggccaaagacttcgacaccgtgcaaa

SEQ ID NO: 456982 - DNA, 425 bp, Sorghum bicolor
cgtccgaagagatgtattttttgacacaaactacgccgtcgcaggagatgatattaagcgtaagaaaggttggcagcgatgccgccgctgtgcagaagacgcaaaagcaggcttctacttccgcgagacacaactgcgtgtgggcagcaccatgaccttctccttccgtccggcaatggttgctcccatcctcccacacgccgtcgctgagaaagtcccgttcggtgacctgccggacttgctcgcgacgttcgacattgcgcccagctctgccgaggcggcgacggtggcggacaccctgagccaatgccaggcgttaccaatcgacggcgagcacaaggcctgcgccacgtccctggagagtaccgtgcagagcgccatgcgcatgcttggcaccggcggcacagacgacgacgacagcgcga

SEQ ID NO: 456983 - DNA, 447 bp, Sorghum bicolor
cgtccgcccacgcgtccgttccactgagagttcaataaggccattctttgtggaatttgataataacattttctcatctagtcgtcgccgttgctcgaatactcgagctgaaaggcaattgctggtgctggagactaatctattttttggtgcttttgcctcctatgatcggcatagagacatgcggatggatattgataatatgtcctatgaggaattattggccctggaagagagaataggctctgtaagcacagctctttttcgaagagcagttcacgaaatgcctcagaagaagcatatatagtcaagtcgcttcagaagtgagcaaatcaaccgttgatgacatgaaatgcagcatatgtcaggaagaggacatggagggcgataaagtttggaggctgccgtgcgagcactgggacccattgtgctgcattggccagtggc

SEQ ID NO: 456984 - DNA, 355 bp, Sorghum bicolor
gaaggtgatgtctctccagaggttcaaggtgtcagtcgccaatgctgtcatcaacgctgagaactccagcttgaagaccatgaacactgaccagctgcttgatctgttcacatctacccctgcttcaagaaaagcatcggtccttccacgtggttcaagcgacgagcagagtaaagattccaagaggaaatctggtggcaaaggcttgaagtcaattctgaatgggcttggatgagctttgggatcagtcgcagtatgctgttgagtacgatctgaaccagttcctggcgaaactgaacggttgagcataggggatcaccggctcgtgtacagggtaaagtacttggggacgtgt

SEQ ID NO: 456985 - DNA, 438 bp, Sorghum bicolor
cgtccgcgagcgtatcccctctcccatcctctcgattcgattcgagcttgcttctagggttcttgaccccgctccaccgtctcctatggcagacgaagccaaccgagcggccttcatggagctgcagtcccggatgatcgataccaccgcgaagatcaagcagttacaaacccaaatgcgttctaaggaaggagaaaagaagcgtgcctaccttactttggaggaacttcgccaggtgccagatgaatccaacacctacaagactgtcggaaatgtgtttattctggagccaaaatcagttctgtttaatgagcatgagcaaaagcttcatgacagtgagaagtgctatagcttcaaaggctgacaatccaagaatacccttgagaaaccataggggcggaaggggaaaacaacaattaggggaggctgcttttaaca

SEQ ID NO: 456986 - DNA, 385 bp, Sorghum bicolor
ccggaacgacccacgcgtccggccggcgtggagcggcaagtacacgctcggctacaagactgtcctcaggaccctcaggaactccaagtcaaaactagtgatcattgctaacaactgccctccgctccggaagtctgaaattgagtactatgctatgctggctaaggtcacagtccaccacttccatggaaataatgttgacctgggaacagcctgtggaaaatacttccgagtctgctgcctcagtaatattgatcctggtgattctgatattattaagacctccccaggtgagcagttacgaagccacaccagtttcttttcttgggacccggcttatgaactggtttagtgttgtaatggatcttggtggacttcgtcttta

SEQ ID NO: 456987 - DNA, 142 bp, Sorghum bicolor
ccggaaggacgtgaccgacgtgacgttgctgaactgcttgctcaagaagaccactaacggcgtgcgcattaagtcgtacaaggacgccaagtctgtgctgacggcgtagcatatgaccttggagaacatcacgatggaggag

SEQ ID NO: 456988 - DNA, 304 bp, Sorghum bicolor
cgtccggagaacagcctccgttgtcctcgcaagcctactggcggcgctcaaggtggtcggcgggacgcttgcagaccacacgtacctgtttctaggcgccggcgaggccgggactggcattgccgagctcattgctctcgagatgtcaaaacacgctggttctccgatcgaagagtgccgcttcaagatctggttgatggactacaagggcctgatcgaggcgtcacggatagactcgctacaggcgttcaagaagccgggggcgcacgagcacgagccattggagacgctgcttgaggcggtg

SEQ ID NO: 456989 - DNA, 277 bp, Sorghum bicolor
cgtccgcgatcctcatccccaagggcgactacctcgtcgggccactcaacttcaccggcccgtgcaagggcgacgtgaccatccaggtggacggcaatctgctggcgaccacggaccttgaccagtacaagggtaactggatcgagatcctacgcgtggacaacctggtgatcaccggcaaggggaagcttgacgggcagggccctgccgtgtggagcaagaactcgtgcgctcagaaatacgactgcaagatcctgccaactcgctggtgctggac

SEQ ID NO: 456990 - DNA, 338 bp, Sorghum bicolor
cgtccgcgagctcccgctccttctgcgcagtttcaccggccgccgccccagcccccgccgcggcgtgcgccaaggtcgacgaccgcatcgtgcgcgtcctcgccatcgatcccgacggggcgcgccgtgaggtggtcggcctcacggggcagacactccttcgcgcgctggccaacgcggggctcatcgagccggcctaccaccggctagaggagatcgacacgtgctcctgcgagtgcgaggtccacattgcgcaggagtggctcgacaagctgtcgtcaccgttctacgaggagcggtacgtgctcacgcgcgcgatcaggaaccgagagctcaac

SEQ ID NO: 456991 - DNA, 387 bp, Sorghum bicolor
  unsure (1)..(387): unsure at all n locations
cgtccggcagctctaagtaccttagttaaaaggttggattcaaaggactgggttatgacatgtgaagctctcaacaatgttcggcagttggcaatgtatcacaaggaaagattgcaggagctgctggagcctctagttccgcttatcgtgaaatctgtgaagaatccaagaagcgctgtatgcaaaacagcactaatgacttgtgctgacatctttaaggcctatggagacctaatggttgactccatcgatccactgttaatgcagttgtttctaaaggcttcacatgataagcgatttgtctgtgaagctgctgaggcagctcttatatcaatgacaagttggatctcccctttactactgntaccaagaatgcagccctacctc

SEQ ID NO: 456992 - DNA, 403 bp, Sorghum bicolor
cgtccgaacgcgggcatgtggagtatccggtccaacatctgggagaggaattacctcggcgagcagctgtacatcagcgtcacctcgccggagcggtcgctcagggacgagtacaacatgccagagaccagcctccgctgcggcaaggtcgtcggtctgccactgccgccgtcctacctcttcgtctagagcatcggccggccgccggttccccttcaccacgatggccgcgcacggtgctgtacacaaattaaaaaggagttatttgtcctccaccccaagctcgtttattctctagtcccgtcgtcgtcgtccgctttgttttcgctttctaccgcgaggaataataacaccaaccaaaaaggggctcaagactggatcagtgtgggcaccattcacttac

SEQ ID NO: 456993 - DNA, 496 bp, Sorghum bicolor
cgtccgcgctcctcttctccctcctcgcctactacctccactaagcgctcgcggatgatggatggacggatcgacccaccgttgccttgcctcggtgttgctgcggtggtcggtcggtcgagttggcgagatccaaatttggcttgcaatggcatatgaagccaataggaggcacaaggattgcattgcattgtacaaagagttggagagtacccaccctatgatcaacatcagacggcaggcagctgaacttagatacattttagaggcacccaagttgaagatatcaaacgacgaggtggtcacaataccacaaattgggagcagctgggattggtatgctggaacatggagcgacaaaatcaaggaacaagaggacaagaaaagaaagatgattgctgctagcaaccaagttcaaccttctccaaacatctttggagacttctctttcttgcgactgccaagtgaatggaaaaagagtgcatgggtgattgta

SEQ ID NO: 456994 - DNA, 414 bp, Sorghum bicolor
cgtccgcgccgccttgccctgcccactcgcgcgacaagcccgcaggcgaccccgccgagcggcgtacggcggcgaccatggcggacgacgactacaacgagatggacatggggtatgaggatgagcccccagaggcagagattgaggagggggctgaggaggagcttgagaataacaacgaggacaccccggatgatgtggtaggggcagaagctgaagacaaggaacaggaaaagatagcacgtgcacgcaaaacaacaaagtatatgacaaagtatgagcgtgcacgcattcttggtacgcgtgctttgcagattagcatgaacgctccagttatggttgagcttgaaggggagactgatccgttgagattgcatgaaagaatgagagcacgcaagacccattacaataggc

SEQ ID NO: 456995 - DNA, 216 bp, Sorghum bicolor
gcgtccgcggacgcgtggggccgttcatgtccgtggctgcctgccctccgtcggagcaggcggcagcacgcgttccccgccgcagcagcagccatgggccagtgctgctccaagggcaccggagaggccgccgccgccgccgtcgagtcggcaccaaaggcgcaggcggcaagccgcagcgcgtcgtccgcgaacaacgaacgtccgttctcgtcg

SEQ ID NO: 456996 - DNA, 494 bp, Sorghum bicolor
cgtccgctaagtttcaagcagtagccattgccatccaaagatctggcttcaagatcgtgttgctactaaggcttgtacctttacttccattcaacatgttgaactacctgttatctgtcactcctgttggtgttggagaatacatgttggcttcttggttgggaatgatgccaatcactcttgctttggtgtacgttggaacaacactgaaagatctatcagatgtgacacatgggtggagcgagatctcgactactcgatggattttgataatatctggctttgtattatctgtggtcttgattatctgcatcacaaaaattgcaaaatcatctctggagaaggcattggccgagaatggagagctggatgtaggaacatcgcagctttctgtggtagcctctccctcggatctgcaacaacctcttgtaatcaagattgacacatttaatgaagatcacgagaagtaagagtggtgtgtttacaatccctga

SEQ ID NO: 456997 - DNA, 298 bp, Sorghum bicolor
cgtccgaacaaaaaaagaggtactgatcgttaagacgacaatacatgatatcatgaaccaaatgattcgggaacttccaataaccaatccagtatacctcatgctaggcacatcatttggttcctcagctaaaggaacagggcttaaagctcttgaatttgccctctccatctgggacaggggtgatattgttgggttcacaggagatccaggttacaaggaatggacaaggtacttttcagaggtcagaaagggacacacttcactacatgctggtaaaaattcattcaccgatgcg

SEQ ID NO: 456998 - DNA, 450 bp, Sorghum bicolor
cgtccggtcctgcgccgacgtcctggcgctggcggcgcgggacctcgtggggatccttggcgggccacggttccccgtcgcgctgggccgccgcgactccgcccgctccgacgcgcgcgacgtggagggcaacctgccacgcaccaacatgtcggcgcgcgccatggtgcggctcttcgcgggcaaggggctctcggcccgggagatggtggcgctggccggcgcccacaccgtggggttctcccactgcgccgagttcgcgcaccgcatctacggataccggggcgccggcgccgccggccacgacccgcggctcaacccggagttcgcccgcgcgctgcagcgctcctgcgcggggtaccggaccgaccccaccgtcttcatcttcaacgacatcgtcacgcccagtgagttcgacgaggcatactacaagaacctgccccacgggct

SEQ ID NO: 456999 - DNA, 302 bp, Sorghum bicolor
cgtccgcgtggacgccgcgcacttcgccgtgccccagggcgcgcgcgccgtcgagctggtgggcgggcggtagagcgcgctggtccaggaggtgcgcaccgtgcccgggtggagctaccgactcgccttcgccgtgggggactccggcgacggctgcacggggttcatggtcgccgaggcctactcggcgtgcgccaccagttaggtgctgtacgagttcaagggcaccggagggtacatgcactccttactttacttatggacgtctttattcggttttgcttcgatatttattttatatt

SEQ ID NO: 457000 - DNA, 349 bp, Sorghum bicolor
cgtccgcggctcttcactgccgacattgctgctttctacgaggcttactatactaacaaaggtgtaaaggtcttgaagggcacactagctgttggttttgatgctgatgccaatggtgatgtcactgcagttaaactaaaggatggcacagtacttgaagctgatattgttgttgtcggtgttggaggcagaccattgactactctcttcaaaggtcaagttgctgaggagaagggtggaatcaagactgatgccttctttgaaacaagtgttcctggagtatatgccattggtgatgtggctaccttccctttgaagatgtacaatgagttgaggagagtggaacatg

SEQ ID NO: 457001 - DNA, 384 bp, Sorghum bicolor
cgtccggcgctggcctacgacccggaggccgacgcgtgggcgcagctcccggacatggcggaggagcgcgacgagccccgcgggctctgcgtcgccggaaggttcttcctcgtcgtcggcgggtacccgacgcaggcgcagggccggttcgttggctccgcggagagcttcgacccggcgacgtccacctgggcgcccgtcgacgacctgatcgaggacggcgtgtgcccgaggacctgctgcgccgcgccgccagggtctggctctgagcgcctgtacatgctgagtcgcgatgggcacctcgtagcgcgcgacggcggcgcggcgtggcgaccggtggcgcatgtgcccgaggacgcgcgcaccgcggcgaccgtctccgtc

SEQ ID NO: 457002 - DNA, 269 bp, Sorghum bicolor
  unsure (1)..(269): unsure at all n locations
cgtccgttntggcgctccatggtttctggaccccataattcttggtgattacccctctccgatgcgcaagatgttgggtccaaacctacctgaattcacatcaaaacaaaagaagatactacaagcatccaagttggatttcattggtttaaatcattattcaacatncnnntagaaggactgtatcttcttatcaccatgtgaattggatccatttgatggggatgcccaaattagtacttcaatagacaggagagggattacttatt

SEQ ID NO: 457003 - DNA, 496 bp, Sorghum bicolor
cgtccgggaactgccattgcgttcgcgtgcttctcttgcgcggccgtggttgccaagcgcagggagtacctctacctgggcggactgctctcttcggggctctccatcctgctctggctgcagttcgccgcctccatctttggccactccactagcaccttcatgtttgaggtttactttgggctgcttatcttcctgggatacatggtgtacgacacgcaggagatcatcgagagggcgcaccacggcgacatggactacatcaagcacgccctcaccctcttcaccgacttcgtggctgtccttgtccgcatcctcgtcatcatgctcaagaacgcggctgacaagtcggaggacaagaagaggaagaagaagtcgtgagcggtctcacctgtgcgtaagtgcaacactgaaagaagggaaggcacggggggctgcctgctgctactagtagttcaatatatatgaatatgaatcggagctcccgcatattata

SEQ ID NO: 457004 - DNA, 392 bp, Sorghum bicolor
cgtccgccaaaggggacgatgctggtgattgtgaaaaatttgccaagtattacaggtccctttgccctggagaatgggttgagaaatggaacgagcagagggagagtgggacgtttccaggacctctctgaatctactgcccgaggcctccccttggaccagtcaacaagttggccagtcctactgttccattctgcattcctactttcagaatcgtcaattgcctttgtcccttgctcttcaccagtcaccgcaaaactgttagtgatgctctctttttgcagttctaataattggctacagttgcctcacatgcagcctttgtttgtgtgtggacctcattttattcacgtataaacgtctgtgaaatgaacttgcatttctttcgtgcc

SEQ ID NO: 457005 - DNA, 362 bp, Sorghum bicolor
gcatcccactgagcggcgttactcaatggacttaagatactcacgcctgcgtgcgacttcatagatctggttcttgtgaaccaaataaatctcgcgctagggataccgactgagattcatgtcctttgcttctcagctctagctgaagctctagctcagttcaaggtcttgccattctcggttttgttgtcaagtctctgcccaccaggctgcgaaggttctttgttcgccttcttcacatctggactggtgttctcagcaatactaagtggagtatttggagttggattgtgcaccctgatcgggtgtcttctgtggactactcaagcttgcctgtcggtattttgctgcaaagtttggct

SEQ ID NO: 457006 - DNA, 471 bp, Sorghum bicolor
  unsure (1)..(471): unsure at all n locations
cgtccgggaatcttgaaaactttttggttttcggggtgaactaaacaaggccacaattatagaattcctctaatattgctgaagcttctgccttgatgtaggcatgcttctgggtgcactgtgtgtgatccttctttgactatacaagaaatctactcagttagtgcataagaattcgtgaggaacatttgatctgagttcttggattgccttctttgtcgtgtcaaggataaagttagaatgtttctcaatggtacaaatgggataggtggacttactggtttggtctcttgtatcaggttctgatcacctcangcaggttttctccacacagatgggtttgagcgaccaggacattgttgcactttctggtggtcacaccctgggaagatgccacaaggatagatctgggtttgagggagcctggacattcaaccctttaatctttgacaactcttacttcacggagct

SEQ ID NO: 457007 - DNA, 345 bp, Sorghum bicolor
gcgtccgagatgatttcactgaagaagaggctgctgttgccaagttggttattagtgtggcatccgattccctggttgtagtgaaagaggcaattcgtttcattactggtttgctcaagagctcaggtaacaaagatggggctaatgaggacaaagttgagccaatggaaaaattgctgagccattgcaaggagattgccgaccaggtcaatgatctaggggcttctgtatacccaccacaagactcatctgagatgaagctcgcttaaaaagactgtacaatggcatcaatgggatgcgcaaggaagtagggaaccttggcggctcacctgagagcacctttgc

SEQ ID NO: 457008 - DNA, 427 bp, Sorghum bicolor
  unsure (1)..(427): unsure at all n locations
cgtccggtccttccggttcagccccatcaaggagtcggtcgtctcccgcgagatgacccggcggtacatgacggacatgatcacctacgccgacacggacgtggtcatcgtgggcgccggctccgcggggctctcctgcgcgtacgagctctccaaggacccgtccgtgagcatcgccatcgtggagcagtcggtgtcaccgggcggcggcgcgtggctgggcgggcagctgttctcgggccatgtggggcgcaagccggcgcacctgttccttgacgagctgggcgtcgcctacgacgaggccgaggactacgtggtcatcaagcacgccgcgctcttcacgtncaccggcatgagcgcgcctctggcgcgccccaacgtggagctgttcaacgccgtcgccgtggacgacctgatcgtcaaggga

SEQ ID NO: 457009 - DNA, 370 bp, Sorghum bicolor
cgtccgatctacgcaaggatcgatttccccaacaacgtaagagtaagttatcacctagaggtgatggtccattcaaggttctaaaaaagataaatgataatgcatacaaaattgagctgccacctgaatattccaatgttagtccaacattcaatgtcaaagacttgcttccatttgttggtgagcctgagtctaggacgactccttctcaagagggggaggctgatgaggacatccctagcattcattcatcttcaaatgaaactccacttgatataagtggtccaattacaagaagtagagctaaacaattggagaaggaaattcattctcaggtgaacgctaaccttatgtttaataatcagtttat

SEQ ID NO: 457010 - DNA, 326 bp, Sorghum bicolor
cgtccgcgcgcgcggcgctcgccagggcggatgcccgtggcgagggacgtgtacggccgcgtggagcccgtggcgagggacctgtacgtgcggtacgagcccgcggcggagcacctggccgtctccgcctggcgctctctcaacggcctgccggtgttcccgcacgtcgcgcagatcgtcgtgcccaccgccgcgcactgggccgagaagtacaacagggcggtcgtcgccgcggccgatcggtgctacgccggagccaagtacctccccgccattcccactgagcgcatcgccaaggtgttctcggcggcggatgccgagccggt

SEQ ID NO: 457011 - DNA, 346 bp, Sorghum bicolor
cgtccggcaagttcgtcgacgccgtctccggcaagacgttcgagacccgggaccctcgcaccggcgaggtgatcgccaccgtcgccgagggagacaaggccgacgtcgacctcgccgtcaaggccgcccgggaggccttcgacaacgggccctggcccaggatgacgggctacgagcgtgggcggatcctgcacaagttcgcggacttgatcgacgagcacgtggaggagctggcgatgctggacacggtggacgccggcaagctcttcctcgtcggcaaggtccgtgacatccccggcgcggcgcacctgctgcggtactacgcgggcgccgccgacaagatcca

SEQ ID NO: 457012 - DNA, 408 bp, Sorghum bicolor
cgtccgggcagggaggacttcgaggagcacatgcggcggctgggccggctcaaccaccccaaccttctgccgctcgtcgcctactactaccgcagggaggagaagctgctcattcacgactacgtccccaaccggagcttggcgaacctcctccatggcggcggagagggctgccggatgaataatgcggcggtgcactgggcagctcggctgaagatcgtcaagggcgtggcgcgggcgctcagctacctgtactacgagctgggcatgctcacggtgccgcacggccaccttaagtcgttcaacatcctgctcgacggccactacgagccgctgctgacggactacccgcttgttcccgtgatgaaccaatcgcacgccgtgcagctcatggtggccttcaaggcc

SEQ ID NO: 457013 - DNA, 420 bp, Sorghum bicolor
  unsure (1)..(420): unsure at all n locations
tcacccacctccgcaatggtgggggcagtgagagcagcaagtgtgcacagatttgcaaggttttngaggatgcatacaagtctgagttcagcatcataatggtggaggaggtcgaaaggttactggagtatgtagccattggaccacgtttttcaaacttgatctctcaaactcttctggtcctcctcaagagggttccttctaagggaaaaaacttgcttgtgattggaacaacaagcgaggttggcttcctagaatctgttggaatgtgtgatgtgttctctgtgacataccatgttcccaaactgaaaaaggaggatgccaaaaaggtattgcatcgtcttgatgtggtccatgatggagatcttgatgcagcatcaaaagcactggatgatattcctatctaaaagctgtacacac

SEQ ID NO: 457014 - DNA, 286 bp, Sorghum bicolor
cgtcgcgatgcttgatatagtgattcacaatgcacgaattgaagggcaacttgactctggtattgctgatatgaaagctaaaagtgtggaaatgagagaatcaccaaagactgttcatgttgatactgcgtctggtgctaggacaggattatatactcttacaggtgagcgtggagtttcttggggaggtgccaataccattcttggagaaaggttgaaagattaaggaggttcttctagtgaggggttctatgagtccagaaaagaatgggtggggggaatacac

SEQ ID NO: 457015 - DNA, 340 bp, Sorghum bicolor
atcgaggcgctggtgcagatgatacagatggacctggaggacatccgcagcggcaccgtcgtgcgggccgtgcgccccggcggcaaggacagctgcctcgccgacgagagccacatcatctgggacaacggacaggtcgtccaggacatcctcctcaagctcaggaacgtccacaccggcgtcgtccacctgcagctcaaatgggtcaccatcccagactgaagaaagtgatcatcagctgctccgatccccgggcatgacgaactctcgtgataattaaacagtgtagtactatgcataattacaatgttgaagaatgcattggatttgagtagagcca

SEQ ID NO: 457016 - DNA, 218 bp, Sorghum bicolor
  unsure (1)..(218): unsure at all n locations
cccgctggcggtgggcgcggacgtgcccgcggcggtgcatgagttcagccgcactctcttcaacatgcggccggacatctccctccacgtctgccgcaccgtcttcaacaccgacctccgcggcgtgctgggcatggtgcgctccccctgcgtggtggtgcagaccacccgcgacgtcttcgtncccggctccgtcgccgtctacctcagggaccacc

SEQ ID NO: 457017 - DNA, 339 bp, Sorghum bicolor
cgcgtccgcttcgccgtcatgctcgagagcaagaaatggccgtcggagctgaccagccggctgtttttccggttcgtcgtgctggctctgggaggggtgactacattcacatccctgactctcacatggatgagctagaccgccacgcccatttgctcaactataccacaccggtctccacctttcatagccttcatcagctgccgtaccgtcaccgacacggttccttcaatgcgctcatacatggggctcaccatatcctgcagggttttaaccacctacacacccacgacccctgcatcatccaccgagacctcaactgcaggaacgtcttcatca

SEQ ID NO: 457018 - DNA, 227 bp, Sorghum bicolor
cgtgcggggagagccaagacgaggatggtgttcgtgatgaacacgctcatgcggctggcgtgcctcttcatctcggtggccttcatcgggctgacgtacttaatggactggcttgaccactgctggctggcctgtggcactatggcgattggcaccatgatcatgctcaccaccctcgggttcatgtgctactgcatcatcatacacaggctgccagagaagaacac

SEQ ID NO: 457019 - DNA, 409 bp, Sorghum bicolor
cgtccgctaccttcaagcattcaggaatgtgaaccaatataccaaggtgaagagcacatacttggcgccacaaatatggtgtatgaaaatcaagagccagtgtatgagggggagagtggttcttgctgagcaggctgacattactggggaaagcagtccttctgtggatgacaaggccacagaacatcaatgggaactgattgataattttctgcagaccactgctaaccagctgactgtctatggtctcttctgtttacaagagggacttaacgaaagtgagctttgtgtcttcttccgtaataaccacttcaacaccatgttcaagtacaacggaagtctatatctcctagcaactgatcaaggttttataagccaaactgatttggtattgcaaaagttggatgag

SEQ ID NO: 457020 - DNA, 310 bp, Sorghum bicolor
cgtccggcgcgggtacctgctctacgggccgcccggcaccggcaagtccagcctcgtcgccgccatggccaactacctccggttcaacctctacgacctcgacctgtccgaggtgcgcctcaactcggcgctgcagaagctgctcatccacatgcccaacaagtcgatgctcgtcatcgagggcatcgactgctgcttcgacgacgctgccgcgtcgaggaaagccgtcaaggcgccggagctggtcgacgacctgggcatggaccccgactacacatcggattcctcggaggacaactgggcccagcag

SEQ ID NO: 457021 - DNA, 486 bp, Sorghum bicolor
tccgtccgaatcccggtcgaccacgcgtccgaccgtgtaggtcatcgccatgtgtacttgttgcagcgaagtttggttggtcagccaatatggaaaggctgatgagagcacagtctatgggtgatacatcctctttggatttcatgcgctcaaggaaggtttttgaaataaacccagagcatgagataatcaaggccttgaatgtggcatgcaggaataaccctgatgatcctgaagctctaaaggctctggatgttctctttgaaactgctatgatttcaagtggctattcgcctgacaacccggcagagctcagtgggaagatctacgagatgatgacctctgccatcgctggcaaatggtcctcacagtcggaggcgcaacctgccaacccaatcccgcagcactctgcacccgtgatgtcagatgagccggttgaagctgaagtggttgagtcagagcccgctgctgatgctggtcagcaga

SEQ ID NO: 457022 - DNA, 514 bp, Sorghum bicolor
cgtccggtgagcttcgccaagacgaaccccaagattggtgccatcctgtgggctggataccccggcgaggccggcggcattgccatcgcacaggtcctcttcggagagcacaaccccggtggaaggcttcccgtgacgtggtatccccaagatttcacgaaggtgcccatgacggacatgcggatgcgcgccgacccagccacggggtaccccggccggacgtaccggttctaccgcgggccgaccgtgttcaacttcggctacggcctcagctactccaagtactcccaccgcttcgtcacgaagcccccgccctccatgagcaacgtcgccggcttgaaggcgctggcgacgacggcgggcggcgtggcgacctacgacgtggaggcgatcgggtcggagacgtgcgaccggctcaagttcccggcggtggtgcgggtgcagaaccacgggcccatggacgggaagcacccggtgctgggttcctgcgctggcccaacgcgacggacggcag

SEQ ID NO: 457023 - DNA, 327 bp, Sorghum bicolor
cgtccgcaagaaggaggaatcatccgacgagaccatgtcgtcgtcacgccggagctcgagccccgacagcaacaacaacacggacgtgagcggcggcggcggaggcgggttcgccgcggacgagcggaagcggaagcggatgctgtcgaacagggagtcggcgcgtcggtcccgcgcgaagaagcagcagcggctggaggagctggtggcggaggtggcccgtctgcaagcggagaacgcgggggcgcaatcccgcatcgcggcgttcgagcgcgagttcgccaagggggacggggacaacgccgtgctgcgcgcccgccacgggga

SEQ ID NO: 457024 - DNA, 515 bp, Sorghum bicolor
cgtccgcccacgcgtccgcggacgcgtgggaaaaaaaaaaaaaacaaaaacaacaaataaatgctacaactagagacacaatcagctgatgagagtccttgatttgcttgctacaaacagcatgcctactttggaaagatgccgcttgcttgtaacaatctggcgtgaacaaggcgtttgtcactttctatgtaggtggcgacgcttcaagaactatggttgtagctcagcggtatgctaacctatactttactgtgtacggaactgaacacacgtgccgctgagcactggtctgttcaacgacggtgactagagcgggcagtgctaccgcatctactgcgactaccatacggacccggagttctgcatccatgtcacgtctgtgaccatcacggtcaccaacctttgctcttccaactacacgctggctatcgaccatggcggttgttgcaaccatactcgctggcacttttagattgtcgatcccgctactctcaagatttatatcgaccgta

SEQ ID NO: 457025 - DNA, 521 bp, Sorghum bicolor
cgtccggctaactggagttcaggtgggtcttgatcctgctgatccagttccacctattgctgaaaagcatgttaatgccgctggtggatcagtaaatcaaccagtgaaacatctgccaaggagaagcccgacagttcaattttcagttgaaggcagtgcttctgttccaagcaaaaatgtaacaaatggagattattcaaggcagaattctgttccaacagccagggcagaagtggttgattggactatgaacaatagtacaattcgttcagtagaatccccgcctaagtacatgtcagaggaaagtccaacacttctgcaatctagccagaccacaacagccttcaaccaaattaacggcaatagtgatgggccctaccacttgtcattctcaggtggtaatgtgacagacagtctaccagattggcctgtggaagagttcttcagtaactcaaaatatggtccaaactttggcttcttcgagcatggttcttcttagggtgataatgctaagctgggga

SEQ ID NO: 457026 - DNA, 468 bp, Sorghum bicolor
cgtccggttcgccggcgacgaggaggaaggaatcagaggcgcccaggagacccggccgcgatggctccgcgcagctcgtcggcgacgtgcctgtggctcgctctcgccgcggccatcctggcgcttgctcaggcacagggagggtcatcagcggcggacctggagaaggttacggccaagaccttcttcgatatcgagatcgacggcaagcctgcaggccggatcgtgctaggactttttggggacactgttcctaaaacaacagagaatttccgagcactttgcacaggggagaaaggaacggccaagtctggcaagcctctgtcgtacaaggggtcgacattccacaggatcatcccgggattcatgatccaaggaggcgatttcacaaacggcaacgggacgggggctgaatccatctatgacagcacgatcttccctgacgagaacttcaagctcaaccacact

SEQ ID NO: 457027 - DNA, 479 bp, Sorghum bicolor
cgtccgagcatatggaaaacaaggagaagtaagagaggacgagattgttgctgcagccaaggcagccaatgctcatgagttcatatctagcttgcctcagggatatagcactattgtcggcgaaagaggaacacagctctctggagggcaaaaacaacgggttgctattgcaagggccatcttgaaggacccaaaaatacttctactcgacgaggcaacaagtgccctggatgctgaagctgagcgtactgttcaagatgcgttagaccaagtgatggtcagcaggaccaccattgttgtggcgcaccgactgtccacaatcaaaggggcagatatgattgtagtcatcaaagatggtaaagttgccgagaagggaaagcatgaatacctcgtgggcaaggggtgggtttatgcatcgctggtagaactgcactcgaagtcagcataaggatatatggggacttacaagggggtcattt

SEQ ID NO: 457028 - DNA, 493 bp, Sorghum bicolor
cgtccgtccacgcgtccgattttctgtcgcctctgttggtcgcacatggcttctttccagctttgttatctaatctactcttcgtggtggcgatttcttattatcactacctgaactttctaggatatgatgttcttccatttctggacagaacaacattcttcctgtacccgattggtctcgtcatcatcctgtctccacttatgatactgatagggttcaatccgacaagatactttctaagcttggacttcggttaaagtctacggctagaatgccaagtaccagaaaaatatggtgattggtgacagagcttatggcagatctggatacatactctgtagtaaagcattttagatctcttgtgttaacgggggcgagtgagttcaaaaaagctcggagcattcattctttggatgtattaagtgcctgtggcaggctaccaatagaggacacaaagcctttgattggatcaaatatccccttttggggc

SEQ ID NO: 457029 - DNA, 283 bp, Sorghum bicolor
cgtccggtacggcgacagcagtacctgcaccgctagtggagccaccacatcgtgcacttgcacatcaagccccacaacatcctgctggacggcggacttcaacccaagatctccgacttcacaccggccaagctgtgcccgcacaaggagagcaccaacttcaggtccatgggcggcacccggggcaccgccggttacataataccggagaggcttctaacgcatgccgtagccaacagtaccagcaagtgcgacgtgtacaggtaccgcactatagcgctgc

SEQ ID NO: 457030 - DNA, 412 bp, Sorghum bicolor
cgtccgccggaggaccccgaggtgttcgacacgctcagcgccgtggcccggcagaaagagctgtgcgtggtgatcaagatgtactggggtgacccgagggagaaggtgtgcgacgccgtggaggagctccatctcgagtcgctcgtcatgggcagccgtggccttggatctgtccaaaggattctgctgggaagtgtgacgaattatgtgctgtcgaatgcatcatgccctgtgaccgtcgtcaagtcaaagtagtggctggccttcccagcaatatgaatctgcaattaagcttgacaaacccaaacaatttgcccgatactattgcaccttactttcagctgttagcactccacaatttggttgatctctagttgttgaactggacatgttttgttttttttttgtggcg

SEQ ID NO: 457031 - DNA, 248 bp, Sorghum bicolor
cgtccgcccacgcgtccgcccacgcgtccggtctcggcgagggcgagtacgagccccgcgtcgtgcaccagttcctcgacctggcataccggtacgtcggagacgtgctcggggacgcccaggtctacgccgaccacgccgggaaggctcagatcgacgccgacgacgtcagcctcgccatccaggccaaggtcaatttctcctttctccagccgccggcgcgcgagggttctctttgagctggcccc

SEQ ID NO: 457032 - DNA, 401 bp, Sorghum bicolor
cgtccgccgagaagcaactgaaggaactaggggacaaggtcccaggtgaagtcaagggaaaggtggagtcaaagctgcaagagctcaaggatgctgttgctggtggctccacacagacgatgaaggatgccatcagtgcattgaaccaggaagtcatgcagattgggcagtccctctacagccagcagggtgccccaggcgcaggacctgcccctggtgctgatgcttctgctggctcagctgagaagccaggcgacgaaggcgatgtaattgatgcagattttactgacagcaagtgaggtgctgggtttcgatggaggcggatcgctgggggccgttttgctgcgagggaggcatttgtttccacaaggttgggtaggatggtgggggactttttggta

SEQ ID NO: 457033 - DNA, 419 bp, Sorghum bicolor
  unsure (1)..(419): unsure at all n locations
cgtccgggcaatctgacatttcgtctgttcgaagttacaatgaacttccccaagctgcccgcctctatgtggagaggatagaagagcttgttggtgttcccgtgcactacattggtgttggacctggcagagatgctctcatatacaagtaaaagcaacttcatttggtccttcattgggcagaaaaatctagccctaaccaggccttgagcatttgcacttcgttgccatcgtagctgtgatacggtgaagtcactgactggttgagtgatgtaatgtgcgcaataatcagaaccttgtcctaaaacagncactgcgacatcagctaaggcgaataagggaaggatgagncattngcactatgtctgacaccaattggtcggggggttatcatatatnttgccccgtggtttgattca

SEQ ID NO: 457034 - DNA, 414 bp, Sorghum bicolor
cgtccggcgccgccgtggcagaggacgccttcgtcgtggaggagttcgacgaggccttcgcgtcggggcccaagaccagggatttcgtggccgctttgcagcggtgggggctcgaccccaagcagaaagccatgttctttgccacggagttcgacgacaatgtgcggctcagcggcaggaacatcggttccctcaagatgctcacacccaggacgctcaacctgtacgacatactcgacgcccgcaagctcttctttactcctgctgctgtagactacctcaactccaggtatggagccagcgcttctgatgactactatactgatgatgaggatgatggcgaagaggaactggtccaacaagaagcccaagaaggcaccacaacaaaagctgcttaagaagccactgaagaag

SEQ ID NO: 457035 - DNA, 326 bp, Sorghum bicolor
  unsure (1)..(326): unsure at all n locations
gtccgnattcccggtcgcccagcgtccgcccagcgtccgatcgccgcatcagcctgtgctcgggatactcccgcatgtcgacaacttcgcgcacatcggcgggttcgcgacgggcttcctgctcggcttcgtgctgctgatccagccccagttcgggtggcttgagcagccctatggatccaagaccaagtccaagtacaggggggggganatcatcctcctgcttgctgccctggtcttgctggctgcagggcttgctgttgtatatggtatggtgttttttggacggatctctaatcctatttctgttgggtgttgttttcttt

SEQ ID NO: 457036 - DNA, 485 bp, Sorghum bicolor
  unsure (1)..(485): unsure at all n locations
cgtccgctccacgcctccacctcggccgccattctccctcctcgcgtgctctctctcacgtcggctaccgccgccgccctccgccagcttcccagcatcccaggtcttcgtcaggcccttctccggcgagagcactcagatcgtgaacctctacagcctaaagatggcgggattcagaagccttgcacccaagaccaggaacctggtggtggctgggggactgtctgccttcgtgctcggggtctactactacaccatgagagcagtgggaggcacggacgagctgcaggtggcgattgacaagtttgaggagatgaagaagaaggacgctgccagaaactccaacccaggaggatcataaacacgcccttcccttctttgtactaaacttggatctggaggctgacatgaatgatgcgatagtcaaggngctcaatagaccaaaaccatgcatgcttntggtactgggtaataaggaatggggg

SEQ ID NO: 457037 - DNA, 407 bp, Sorghum bicolor
cgtccgatgcagcagccagtgtacgagtgagcaatgagcttggtgccggcaacccaaaggcggcgtcgttctctgtggtcgtagtgacactgctctccttcgtcctgtcggtgctaatctccatcgtcatcctgctgtgccgggactacatcagctacatcttcaccgagggcgaggacgtgtcgcgggcggtctccaagctcactccgctgctggcggtcaccctcatcctcaacggcatccagcccgtcctctctggggttgctgtggggtgtggatggcaagcgttcgtcgcatacgtcaatgttggttgctactacatcgtcggcatcccccttgggtggctcctaggattctattttgacctcggagcagcgggtatttggagtggtatgatccggggcacc

SEQ ID NO: 457038 - DNA, 362 bp, Sorghum bicolor
cgcgtccggctggacctcgagggaacgcgccggttcttcgacgccttcttcgacctggagccgcactactggcacggtttcctgtcatccagactgttcctgccggagctcttgatgttcggcctcgcactgttcgggaacgcctccaacacgtcgaggctggagatcatggccaagggcaccgtgcctcttggcaagatgattggcaacttgatacaggacagagatgggtgaggagggtatgtatgcctgcatttctcacctgaagatctgatctctgattttggcatcgatgatgctcagtgtatttacgaattgcaaacatggattcacaaacacaccacaagtaagaaccaggagtt

SEQ ID NO: 457039 - DNA, 414 bp, Sorghum bicolor
  unsure (1)..(414): unsure at all n locations
cgtccgcccacgcgtccggcgtgtttcgttttgattttagtggaaatggagaaagtgaaggtgaattccagtatggcaactacaagaaggaggctgctgacttgcactctgttgtcttgtatcttcgccaggaaaagtacaatgtagcagcaattgttggtcacagtaaaggtggagatgtgatggttctatatgcctctatctacaacgatgtccccacggtggttaacctttccggtcgatttaatttggagaaaggcattgaagagcgcctagggaaagagtttatggatagaataaacaaagaaggctacattgatgtcacaaacaaatcangaaagggtttgtacagagtgaccaaagagaccttgatggaaccactgggtattggtatgcacccatnaagcctttnca

SEQ ID NO: 457040 - DNA, 400 bp, Sorghum bicolor
gcgtccggtgcttctggctcctcccgcttctgcgagcgagcgtgtgtcctctgctccgtccttgtccaggcaccacaaggcaaaagaagctcaggtgagaatgttgtgatggttgatccactggaagctaagcgcctagctgctaaacaaatgcaagaaattagggccaaagaaaagctgaggaggggcggtcaagcagaagcgatcaacggggcattggcaatgataggactgactgctggattggtagtggaagctcagacaggaaagggcatcttagggcagctagctggatatctcacggctatttctagtttatttgggcaataatactggaccatgattggagaattctttttcacgttccttggtcaggataactcttatctgaaacttattt

SEQ ID NO: 457041 - DNA, 282 bp, Sorghum bicolor
  unsure (1)..(282): unsure at all n locations
cgtccggtttgttgttggcctggtcccatggctaaaatccctaatcatcggcgacggagctccttttaaagttatacaggattccctccagctgatgggtaatggcgcgattccttgcatcaccctcatcctaggtggaaacctgactcaagggcttcggaagtcggggctgaagcgtagggtgatcgtcacaatcctgtgcatccgcttcgtgctcctcccgctgatcggcatcgccgtcgnccacgccgcctacgggctcgggttgctgtcccgtgaccc

SEQ ID NO: 457042 - DNA, 355 bp, Sorghum bicolor
cgtccgcccactgctgtgcgcccacgcgtccgcccacgcgtgcggcatctgccaagaacgcgcctgcccgagttccagaagaccaagctcatgacccgcctcacctacacgctggacgagatcgagggcccgctcgaggtcggctccgacggcaccctcaagtgcgaggagaaggacggcatctactacgccgtctgcaccttgcagctctcgggaggcgagcgcgagccgctcctctttaccttcttgcaagctggtgcacacctgttagtgggtgatgtgacgcgctctgtagcgcctcattagctgcggtgggtgtggtggctacgcgcagggtgaccgctattgttgccag

SEQ ID NO: 457043 - DNA, 392 bp, Sorghum bicolor
  unsure (1)..(392): unsure at all n locations
cgtccgtcccaatcccagtgccctgaaaacaatgattncgcgtggtcaccggcgggaacaaagggattgggctagaggtttgccggcagctggccggcgacggcgccaccgtggtcttaacagccagggacgagacgaggggcgcagccgctgcagagaagctcagagaagcagggctctccggggggggttccatcanctggagattactgatgctccgagcatcgctcggttggctgagttcctcaagactcgttttgggaagctagacatactgataaataatgccgcacttggtgctgacgaatacatacaaaatacatatacatgtncaaaaagnaatgaaaaattcatgcgtatatgttacaccaatatcctttaatatttcatta

SEQ ID NO: 457044 - DNA, 517 bp, Sorghum bicolor
cgtccggttgttggcaaggaattgatttgctaccaagattcccggtttgaggtttggggaacaaaaggttatggtgtccaaccaacaggcacatcaagaaagcttccagagtaccagatgcatgaaagttctagttctcccaatgtaacaatacaaactactgacagtagacaagataaagttgaaaggcttcaaagaaatctttcgacaccaaacgttgctaaatttgatgataaaagagattattttggatttattggtcatgaggaggttgacataggaatgtcaatggcaagccaatggatggtaccttgcttcgctgccactgcttgccttatgttgtatcttagttgtagaatgcaacaaaaacgccgccggcgaaggaaaggttcggtggctagtgctagtcggctaacaagtatggtataatgcggcattggtggggtgctgaataggggttttagcagatctaagtttcaggccttcagccatgatggataaccaggaagcgctccat

SEQ ID NO: 457045 - DNA, 473 bp, Sorghum bicolor
  unsure (1)..(473): unsure at all n locations
cgtccggggccaagaagcttctgaacaatntatcgtcacttctcaaacctggaggctacttttttggcttgactccagattcatctacaatatggacaaagtatcaaaagaatgttgaggcttcacataataagggtctgaaggctgttccaaatagcattcgctcagagaactatacaattacgtgggaagtcgaggaagaaaagtttcccgtttttggaaagaagtaccaactcaaatttgcgagtgatgcagtgtttgaaaatcactgcctagttcactttcccagccttttgaggttgtgttgaaacagattagcaagggaagctggacttgaatatgtggagattcagaatttaaccgagttttatgatgataacagaacacaatttgctccaatgcttgggggttacagtgcaagttttttggatgctcgtgggaagcttgttgctcgttcctacgaacttttaggc

SEQ ID NO: 457046 - DNA, 268 bp, Sorghum bicolor
cgtccgcccacgcgtccgcccacgcgtccgcgcacgcgtccggccatggcgtcgtcgtccatgctctccgccaccaccgtgccactccagggggccgccggcctgtccgagttctccgggctcaggagctccgcgtcgctgccgatgcgccggaatgccacctccgacgacttcatgtccgcgggggggttcaggacccacgcggtacgtgcctagctagctagctagctgctccgatcgtccgatcgatcaacatccatgcaatcgt

SEQ ID NO: 457047 - DNA, 286 bp, Sorghum bicolor
cccgggggcgacccacacgctccgcaggagtcttgggatttatagcaggggggcggggagtgacatggatagcaccaacctgaacgcttacatatgaataattgctctcattgtttgcattccatctgcaatagttttagaagggccccagctaatgtcgcatggatatactgaagccatagcaagagtttttttttcaaagtgtggtagtgacctagactaggctggactgctctacgaggtggataaccagattgctacagacacattagcagcgagaggctcc

SEQ ID NO: 457048 - DNA, 430 bp, Sorghum bicolor
cccggtcgacccacgcgtccgcagacccggagttagtcaaagaggtgttgtctaataagtttggccactttggcaaaccacggagcagccgcattgggaagttgctagccaatggggtagtaaatcatgatggtgaaaaatgggcaaagcacaggagaattcttaatcctgcctttcaccatgagaaaataaagcggatgctgccagtattttcgacctgttgtattgaaacgattattagatgggagaattcaatgccttctgagggatcttctgagatagatgtctggcctgagttccagaatcttactggagatgttatctcaagaaccgcttttggcagcaactatcaagaagggaggagaattttccagctgcaaggagaactagctgaacgccttattcagtctattcagaccatatttatccc

SEQ ID NO: 457049 - DNA, 189 bp, Sorghum bicolor
  unsure (1)..(189): unsure at all n locations
cgtccggtcatggttagcaatgcccaagaggaactggttcagtggtacacagaaaatgcgaaggataacccgaagataattcatgcaaatgagagatgcgcagctggtattatacaagctattggacacttnaagctaggacctaacatttntnctanagacatggattttttttatgggggggggggg

SEQ ID NO: 457050 - DNA, 311 bp, Sorghum bicolor
  unsure (1)..(311): unsure at all n locations
cgtccgggcggcgtgtcggcgctgatggcggagacgacggccagcatcggctgctacgtggcgtcggggtaccggaggctcgccggggtgcagctctccatcaaccacgtcggccccgcgcgcctcggcgacgtcgtccaggcgcgggccacgccgatccagctcggccgcaaaatccaggtttgggaggtccagatatggcagattgatccttccacatcagagcgcaaagatctggtgtcaacagcaagggttaccctgttagccaatctatcaacaccagataagatgaagagcttngaagagggcct

SEQ ID NO: 457051 - DNA, 475 bp, Sorghum bicolor
  unsure (1)..(475): unsure at all n locations
cgtccgtatttttgtacacaacatatacaatcttttggcacatgttccttcaatggattttcaaaaggaatcaacatttgatatgtggagtactgttgggctgtcttctaaaggagaaaaggactcttccaaggacacttctactcacatcaagaaaaaattacaattgaagttcactaaagcatggctgtcttttctcaagttaccactgccgcttgatgtgtataaggaggtccttgcttcaattcatcaaaatgtcattccttcaatgtcaaacccttccatcttatgtgatttcttgactagatcatatgatattggtggtgttatcagtgtgatggccttaagtggccttttcattcttatgacgcancacggnctggagtttccaaaattctatgaaaagctttatgcccttcttactcctgctggnttnatgggaaaacacccggcagnggtcttgcaacttttttga

SEQ ID NO: 457052 - DNA, 346 bp, Sorghum bicolor
  unsure (1)..(346): unsure at all n locations
cgtccgggcctgtggtgctggaagctctgctgctgaccctgcggcgaactacctgctggcacacacgacggacagggacgtctactcagtcgtccagggatcagcattcgtcataccaaagggctccatagtgaactatggcgtggccgagattggccgtgacgccaagttgtgggctgacggggaggtgttcangccggaaaggttccttgaaggtggagaagggttctccatccgngggatccccggggtcgggggggggggggggccngtgccggagatgatgaaaatgataccgttcggtgctgtggggagggcgtgccccggggaagtgtttttaataaag

SEQ ID NO: 457053 - DNA, 345 bp, Sorghum bicolor
  unsure (1)..(345): unsure at all n locations
cgtccgcacgacgacatcgcgtccctcgccgcgaccccgctcccgggggaggaggagacgggcgtggcggcgtcgtggtcctgaccggcgagcgcggcctctgcgggagcttcaacaacaacgtgctcaagaaggcggaggcccgcatcgaggagctcaagcagctgggcctccagtacagcgtcatcagcgtggggaagaaaggcaacgcctacttccagcgccgcccctacatcccgctggagcgggacctggaggtgaacggcgtgcccaccgtcaaggactcccagtccatctgcgacctcgtntactggctcttcgactctgaggagggggacaaggtgg

SEQ ID NO: 457054 - DNA, 325 bp, Sorghum bicolor
  unsure (1)..(325): unsure at all n locations
gcctgcggttaccgtccgnattcctggtcgaccacgcgtccggagatcgacccactagctaggtcgataccatggctacagcttacgctcccatggcgagccaggtgatgaagagcagcctgcagctgcactccaagccgaggggcttgtccggcgctgccctcaccaccaccaggcgtccccggttcaccgtcaaggccatccagcccgagaaggcggcgtgccaggtggtgcanccgatcaacggcgacccgttcatcggnagcctggagacgccggtgacctcnagcccgntggtggcgggggacctctccaaacggggggg

SEQ ID NO: 457055 - DNA, 498 bp, Sorghum bicolor
cgtccggtccaatactgcagctgcacctcctgtgaaggagattaggaggacaatgagaattcaagcactgcgctgccatgttttgtacagccatgatggtagcaagctgaacgtaattcctgttttggcttctcgctcacaggctttaaggtatttgtatatcagatggggggtagagctgtcaaacatcactgtggttgtcggtgaatgtggtgacacagattatgaaggactacttggaggcgtgcacaaaactatcatactcaaaggctcgttcaatactgctccaaaccaagtccatgctaacagaagctattcattccaagatgttgtatcccttgagaaacaaggaattgcttcaattgagggatatggtccagacaatcttaaatcagctctaaggcaatttgggttatcgaaagactaaatctttgatcttgctggcagcagaggaatcaaactaggtatcttgagacaggtttactaccatcttttttt

SEQ ID NO: 457056 - DNA, 288 bp, Sorghum bicolor
cgtccgcccaagctcaccggggaggaggaggggagagggcgaccggcggcggcggcggcggcggcgatgggtttcatcatggagttcgcggagaacctgatcctccgtctgatggaggacccggacaagcgcgaccaggttcggcgggagcatgtctacaagatgaaggagcggtgcgagcgcaccaaggcggcgtggaacctcccgctgcgcccctacggcttctggaccttcgagcgcttcaactcgcagctctcctgggacccgcagatcagccaggccgccggc

SEQ ID NO: 457057 - DNA, 318 bp, Sorghum bicolor
  unsure (1)..(318): unsure at all n locations
cgtccggacggactgctgcaaagacatttaatgaatacgcatgtgccttggtagtggctcgctgactcaactccgaacagctgaacttgaggcaattgctgtaccaccacacctgtcctggatgaatcaattgcaatttctaaggctatgcaattactcgaagcacaagaatacatcatgtttagccgcattgtatttgacactgcccctacgggccatacactccggttactgtccttgccagatttattggatgcatccattgggaaaatcttgaaactaaggagccagattgcttttgcaacataatntattaaa

SEQ ID NO: 457058 - DNA, 500 bp, Sorghum bicolor
cgtccgcaagtagccattttggatgaaaaagccacagggtgtccttcatcgtggccgccctagaagcttcagaattgctgtccgaggaaaactcgcagagatggtacacagaagatccactgcttgatgtatctgtgttggctgaagtaggaaattcatactgcctgacagatgatgcagtgcttttgtttgactgtgtggaagaagttcttctcaagataagggacaagttctttggtaccgacccttgggttaattttctgaaacacaatgtacgaccagctccagtaggaagacagctcgttgaagaggtgactaagggaatcgattctcttgtcggtaaagaatttccaaacactttagaacaggtgatgatgaaagacttggacagtgggtcgtggctggatcttcgaggcgatactgaaagtgttggagttgagttgtgggctggtttgtttggtgacttactggaggaaggtgtttttgatttgtgggtttga

SEQ ID NO: 457059 - DNA, 314 bp, Sorghum bicolor
  unsure (1)..(314): unsure at all n locations
gtcgaccagcgtccgtgcccgaggtggcccatactggaagcaggtgatcaagatcaacgactaccagaagagccggttcgtcaaccgcgtcgtgtcctccatgttcaacaccgttgccggcaagaagatcgccgtcctcggcttcgccttcaagaaggacaccggtgacaccagggagaccccggccattgacgtctgcaagggcctgttgggtgacaaggctcagatcagcatctacgaccccnaggtgacggaggaccagatccagcgggacctggccatgaacaaggtcgactgggaccacccnatgcacc

SEQ ID NO: 457060 - DNA, 259 bp, Sorghum bicolor
gtcgaccagcgtccgggcagcacatcaggaaaggcgttgctcattctttgcaatcgatgagagccgctttacacaaactgatgaggtgagctgcaccccgtacttccattcaagccattcatggggattcttcagaaatagaacacggttgctctgccggaagtgcagtggtcatattggtaatgcttatgaggacgaggatcccaccttgtgcgaggggtcagatgacctggacatgagctccaagagcagcagcaca

SEQ ID NO: 457061 - DNA, 163 bp, Sorghum bicolor
gtcgccccgcgtccgaatttctatgtggcatgaagaagatataggttcgttaacactgttaaagagggtgatgaggagacacatgcacaggtgagccagatgtacatggttgcaccactggacttgcatttttctatcctatatgatgtattgaagaagcacg

SEQ ID NO: 457062 - DNA, 222 bp, Sorghum bicolor
gtccgcgccacgcgtacggcgagactgctgctggggcttatcacagagctggcggtagcagactatggccaagatctgcctacatgcagagtcttgtgtagaccatgcttctgttttcaaatcaatcatggcttcagctccaattccaatgagcccattggagagccttgcatcatcagctgtgcggacagcaaactctgccaaggcggcacttatcttagt

SEQ ID NO: 457063 - DNA, 321 bp, Sorghum bicolor
  unsure (1)..(321): unsure at all n locations
cgtccgaaaacagttcgggatgtagccttgcgctgccgatggatgaataaaaaggagagtgccaaaagaaagaaagaggatcacagctcgtctaagaaaagcaaggacaaaaaggagaaggtttcagattcttcatcaaaaccacctgtccatatggctggtaggcctagtgttcctccataccctgtggcagttcttccaatggacgatgatgaaatctcatccaaagccattggaggtccaacaggcgaaatccttgaaactaatgcccaggttttgagtcaaatttcgtnaaaccttancaacatgcanatacaggac

SEQ ID NO: 457064 - DNA, 512 bp, Sorghum bicolor
cgtccggggcgattcccttcctctccgcgtgggcgaaaggatccagtgaactacttccacatactcgctgcttctcccctgcccatggctacgccgcttatagcaggacttgcagttgcagcagctgctcttgccggtagatatagcatccaagcttggaatgcttataaggcacggcctgtagttccaaggatgcgcaaattctatgaaggtggctttcaacctacgatgacacgaagggaagctgctttaatccttggtgtcagggaaactgccaatgcagagaaggtcaaagaagcacacaagagggtgatggtggccaatcatccagatgcgggtggaagtcattaccttgcttcaaagattaacgaggcgaaggatatattgacagggaaaacaaaaggaggtggatcggccttttgattggaaaatggacatgtccttccactgaaaggacaattttggacctccagactcgccgtttagaagatagacagaaatctttctgctac

SEQ ID NO: 457065 - DNA, 373 bp, Sorghum bicolor
cctccgcgtccgcggacgcgtgggccaaagccttcctgatcgtttcaacgatcctctatgtcttagaatcaccctcccgaagtctgggacggtggtgatccggttcgtctcaaaggaaatgatccaaactcattgcccagcgcccgctgccgacattcaggtattgcgatgtgacccttctgccatgaacaaagccctggctgcacacctggacgatctctggtacacaaaagagatgcagttccagtagtaagcattctctctaccaataccaacatgaacaagctatcgcacaggattctttgcctctctgcgactattagtagactaagcctgatactggcaccatatagctccaaacagacaagtgtgc

SEQ ID NO: 457066 - DNA, 383 bp, Sorghum bicolor
  unsure (1)..(383): unsure at all n locations
cgtccgggagaaagtcatgcacattttattgccaagtcccttttcgaggagtatcttatggtggaagaacttttcagtgatggaattcagtctgacgttattgaaaccttgcgtcatcagcacagtaaagacctgcagaaggttgtagacattgtgttgtctcaccagggtgtgagaaacaaagctaagcttgtaacagcactcatggaaaagctggtttatccaaatccggttgcttacagggatctgttggttcgcttttcttccctcaatcataaaagatattataagttggcccttaaagcaagggaacttcttgaacaaaccaaactaantgaactncgtgcaagccttgcaagaagcctttcanatctggggatgca

SEQ ID NO: 457067 - DNA, 213 bp, Sorghum bicolor
  unsure (1)..(213): unsure at all n locations
agcgtccgggcggccgtagactactaccatggggagctccagcagcgccgacgcaacgttaacaggttcaaggtgatggcggccaatgaggtggacgagacgaagcagtcggaccaggacaggtggaagggcctggcctacgacgtctcggacgaccagcaggatatcaccannggcaggggggggggggactccatcttccgggcgctctcc

SEQ ID NO: 457068 - DNA, 493 bp, Sorghum bicolor
  unsure (1)..(493): unsure at all n locations
cgtccggattgttcggaaaactggaggcctgtatgacactgtctttgacgtcgacaatgataaggatcgggctcaagcacaaggcctcgagccaaatggattcagtttcgaaggagctgatagcagtggtgtggattatgctctcgatagagctataaccacattttatgatgcccgcgactggttcaattccctctgcaagcgggtaatggagcaagattggtcatggaacagacctgctctagattacatggaattgtaccattctgctcgcaaaaactgatataccttttatcaaaagggaaaacaccctcggtttgcccaggttaggagcatctaaatgttgtcctgagtttctgatgaagactcgacttcggagttcggaccanttctgggaaagcaaagcgaaaagccttgcgttaaaaaagtgccaagtttgagcctctgcttacgcttttctttatagctctggatgggcaaatttgacatgggg

SEQ ID NO: 457069 - DNA, 473 bp, Sorghum bicolor
  unsure (1)..(473): unsure at all n locations
cgtccgttgctctctctctcgctcggcgacgactgggataccaccgccaccggcgccctacagcaggtgtccaggtcttcgtcggtcccttctccggcatcgagcacccaccaggatataccatggaggtcagaccgatggtagctctgcgtgctgccctagttggtggggtagcagcatttgcaaagattggtggggcgatgaaagctgctggaggtgtcaaaattggtgcagctgctgcagctgtgacagctgcagcgtctgctgctgtatctggaaaagacgcaaaagaagacgcttnaaaggcagaaacaaaatgatatgacccatggattggtcgagaagtatgaaattgcctctccagaggttcaaaagagaaaggacgccatagtcattaagttacaggagcaatttttcactcnatgtggttttatcttaggaataagaatgacaatcgagttttccctaagatg

SEQ ID NO: 457070 - DNA, 360 bp, Sorghum bicolor
  unsure (1)..(360): unsure at all n locations
gccgccgccgccgccgtgccgctacttctcagctggtanttcgttcccgatccaggatgaagtttgttgctgcctatctgctggctgtcctcgctggcaacaatgacccctctgtggaggatctaaaaacaattctggagtcagttggtgctgagattgacactgagaagatggaacacctgctgtcccaggggaggggcaaggacatcactgagctcattgctgccggtagggagaagtttgcttctgtcccttgcggtggtggtggtgttgctgttgcagcagctgcccctgctgctgctggtggtgctgctcctgcagctgagaagaaggaaganaangnggaagagaaggaagaga

SEQ ID NO: 457071 - DNA, 261 bp, Sorghum bicolor
cgtccgtcgtgtcgtggctagacgcccggccgccgtcgtccgtgctctacatcagcttcggcagcctcgcgcacctgccggcgaagcaggtcgtcgagctcggccgtggcctcgaggcgtcggagcggccgttcgtctgggccatcaaggaggccagttcgaacgccgacgtgcaggcgtggctcgccgaggggttcgaggaccgcgtcaaggacagggggctcctggtccgcggctgggcgccacaggtgaccatccttt

SEQ ID NO: 457072 - DNA, 477 bp, Sorghum bicolor
cgtccgaggaagcttacttaagacgcatgtgagacatgtgtggcagcagatggaattgtgattaacatggtcgttggtggcgaggtggctacactcaaggctttagaagagaacagtggtctgctcattgccgagatgccaatacatgtttcagagatattatgagagtcccaatcgtacaaaatttgagaagttactgttctatttccacactaactactgatggttttacttctgctactttgattttggattgcttttcatgatacagattgttcctcaaattagatctctaaagaattagaataatgctcattgtttttttctctctctgaaatgatagaaataggagtggttcaacatccagtgacatgattcattactctgtgcatcgtatctatacttactgttagttcttacgagattggtgacagagtcacaaagaaatattcaattgccacagaaatattgctaaaa

SEQ ID NO: 457073 - DNA, 455 bp, Sorghum bicolor
acgcgtccgccgactccgtcggggttgacctcgcggagccggccgagtcggagcaggaggaggaggaggcgttcgccacggaggaggatgagggggcggaggacgatgccgtagaggcctctgccgccgtcgaggacgaggaggtcggggagtatgtcgagccgcccgaggaggccaaggtctacgtcggcaacctaccctatgacgtcgacagcgagcgcctcgcgcagctcttcgagcaggccggcgtcgtcgaggtcgcagaggtcatttacaacagagaaacagacagaagtcgcggatttgggtttgtcactatgagcactgtcgaggaggctgacaaggctgtggagatgttgcatcgctatgatgtcaatggaaggcttctgactgtaaataaagcagctcctagaggctctcgtgtggacagacctcccagacatctgggccttctc

SEQ ID NO: 457074 - DNA, 493 bp, Sorghum bicolor
cgtccggcaaggggtatgttttggagtatgagacaccagaaggggttgttttggtgcaggctaaaagtgttatcatgaccattccatcatatgttgctagcgacattttgcgtccactttcaggtgatgctgcagatgctctatcaagattctattatccaccagttgctgctgtaacggtttcgtatccaaaggaagcaattagaaaagaatgcttaattgatggggaactccagggttttggccagttgcatccacgtagtcaaggagttgagacattaggaacaatatacagctcatcactctttccaaatcgtgctcctgctggtagggtgttacttctaaactacataggaggtgctacaaacacaggaattgtttccaagactgaaagtgagctggtagaagcagttgaccgtgacctccgaaaaatgcttataaattctacagcagtggaccctttagtccttggtgtccgagtttgggcacaagc

SEQ ID NO: 457075 - DNA, 421 bp, Sorghum bicolor
cgtccggttattttttgatattttaccattggccatgtaaatacatggcatggaatatcacacgatggtgtgcagtaagtggttataaaaataagctcttgatctgggggacagttctagtgctgacacccgttcagggaaaaataaaatgctgatataacactgaagctccagttatttactccgcctatttttactatcttcttgtcatcttccttgcccttacattgtttcaaaatgttcatattatttaatccatgtttagggaaagaagtggactctgtcattctcattggtctggaataccctggtgtggctcatggttgtaaacttcattatccagatagttacttctacagcacagggttatctcaggacacaacaggagccagagatcagtaaaaagttggagaccgaactt

SEQ ID NO: 457076 - DNA, 488 bp, Sorghum bicolor
  unsure (1)..(488): unsure at all n locations
ccgtccgccctgctggtagctttggcggtggttccactggcgccgatgagttctctggtggcacatttggtggcgacttgagtggtaacaagaatgatgaaatcatggaggatatgttcaaggatgatgagcctgacagcttcgctgacaaggtgggcggccccggggaagggtacgaggagctcgtcgccgcgctgcccggcgacgactgccgctacgccgtcttcgacttcgacttcgtcaccgtcgacaactgccagaagagcaagatcttcttcatcgcctggtcaccggcggcgtcgaggatcagggccaagatcctgtacgcgacgtcgaagcaaggcctgcggcggctactggacggngtccactacgaggtgcaggccaccgacccctccgagatgggcttcgacgtcatcagaggccgcgcgcaatgaggcccgcgctgcgctctgctctactactacctgtgcgtgtgcgtgtgtgat

SEQ ID NO: 457077 - DNA, 372 bp, Sorghum bicolor
  unsure (1)..(372): unsure at all n locations
gcgtccgcgcagacagtaaggaagatataccagttgctgtgacaggtgacatagtagcgcttgctggtctgaaagacacaattactggtgaaacactctgtgacccagacaagcctgtagtgcttgaacgtatggaatttcctgatcctgtcattaaggttgctattgaacccaagaccaaagcgtggtgcggcaaaatggctaatgggttaattaagcttgctcaagaagacccgtcattccacttctctagagacgaggaaactaaccagactgttattgaaggaatgggagaactgcatcttgatatcattgtagacagactaaagagggagttcaaggttgaagcaaacnnttgagctccacaagtca

SEQ ID NO: 457078 - DNA, 474 bp, Sorghum bicolor
  unsure (1)..(474): unsure at all n locations
tgcgtccgcttttccggccggttcttgctccatccatggcgatggcggcggagtggtgggatgcggcgacggcggccgtcgcggcgtacactgggatgactcctgcggcgttcttcacggccgtggcggtggccgcggcgctgtacgtcgcgatttcaggactgctcgcgcggccggcgcagacgtcgtcgacgaggcaggaggtggcggcggcggaggaggaggagagggcgttcgaaccactgccgccgccggtgcagctcggcgaggtgacggaggaggagctgcgagcttacgatgggtccgaccccaacaaaccgctgctcatggccatcaagggccaaatctacnacgtcacgcagagcaggatattttatggacctggtggcccgtacgcattgttcgctggcagagacgcgagtagggctttggcaaagatgtcgtttgaagcaagtgacttaactggtgacattt

SEQ ID NO: 457079 - DNA, 406 bp, Sorghum bicolor
  unsure (1)..(406): unsure at all n locations
cgtccgacacccaccacacacaccactctncaacgacanaccgacgacgacgacggcacaggcgccatacgaaatggcctcccagctctccgccgccgtgccgcagttccacggcctccggggctacgcctcgcccaggtccgtggtggcgatgccgtccgtgcgggtcggcaggaagaggggccgttggtccgctgcgactacatcggctccgccaccaacctggtatgtatatatatatatatatgtgtcaaatatatataacagttagaaccgtagtcggacacgacgactcgacgagtagtgaagctcgatgacgaccggccgatcactggtgggtggtatatgcagatcatggggacgacnacnacccttgtgctgtttggggggggggtcgggctggcgc

SEQ ID NO: 457080 - DNA, 315 bp, Sorghum bicolor
  unsure (1)..(315): unsure at all n locations
cgtccgctgacgccgtcccttgcggtgccaacggggctggagggccagggggctcgtggtgagggccgccacggtcgtgtcacccaagtatacttccataaaaccattgggagacagagtacttgtgaagatcaagacatctgaggctaaatctgagggagggattttacttccagtatcagttcagacaagaccacaaggaggggaagttgttgcggttggagaagggagaagtttnggaagtaacagnattgagatnagtgttnnggnnggtgataagtggggtaatttaaatanntgggtanagatttgaaa

SEQ ID NO: 457081 - DNA, 366 bp, Sorghum bicolor
  unsure (1)..(366): unsure at all n locations
cgtccgaacgagaacgcgaacgcgccgccctgtgagtactacgaccccagcatgtgctcaggacctcgcaagccgtccactcctcctctgccaacggcgacggccaaggactcctcggcgatgacggcggcggcggcggtccttctggagctggcggcggcggacgacgtggttgccttcaggcgcgccgcggaggacgacaaagccccggccttggacgccgtggcccactggtacggcccgtccgcgggcgccggccgcctccgcctcgaggcgcgcacgccggccatggtcgccgcgctctacggcagcgcttcggggctggcgtncgtgctgncnnccgccccggngggggccgcgcgcgcg

SEQ ID NO: 457082 - DNA, 387 bp, Sorghum bicolor
  unsure (1)..(387): unsure at all n locations
cgtccggcgggaggcttgctaagttcgccatccatggctgtgatcttgtcacatcagttgggatcaggaggctagcaacggcgcttcggcccacaatcaaagaagtcagtatcttgcactgccggcttctggacacagcaacatgcctcactgctttaagtccgatccgtgatcgcattgagagtcttgaggtcagctgtgtctggaaggaagttgaacagcctgagagcgtggccaatggcacaaccggatgtgatcatgaagatgatgatctcggtgaagtgacatatgagtctgcatcgaagaaatgtaggtacatggaattggatgatctagtcagctgggagatgctacgttcactcttcctctgggtcccctgntgggagg

SEQ ID NO: 457083 - DNA, 434 bp, Sorghum bicolor
cgtccggtgaagatgactacatatttgagacttctccttcagagcagaatttaagatggaactatgcaccagaattgctgggtgaacctagtctttctgactcaaatgagacacctaagcgactgcctatagtcatcagtgcaaaacgaaccggcaacatagctcgctttataaaccacagttgctgacctaatgtgttttggcaaccagttttgtatgatcatggtgatgagggatatccacatattgcattctttgcaattaagcatattcctccaatgacagagcttacctatgattatggtcagaaccatcatcctaatattcaaatgggaacacattctagttttgggaaggctaaaagttgcttattgtgggcccccaagtgtagagggtcctttggcttataaccaggcctattagggaggtattgg

SEQ ID NO: 457084 - DNA, 370 bp, Sorghum bicolor
  unsure (1)..(370): unsure at all n locations
cgtccggttggagtaggtcggggaggagaaggtggaggggtggatgcgggagtcgatcgccgagatcgtgcggcacatcggggaggccccgttcctggtgcacctgttcagcaacgacgacggcgagggcgaacgcgtgaccgtgcggcgggagcccgcggcgcccgagagctgggctgacggggggggccggtgggggcctggcgggcagcggaagcccgacgggatcatcctcgtcgagcaggtggccgcggacggcggcgcctccgcctcggaggcggcgcggcaggtgtggggcctggtggtgcangcgcgcggcatggagtgcgcgtnntgctacntgctcnacacctgccgtgtcccgtcnccg

SEQ ID NO: 457085 - DNA, 302 bp, Sorghum bicolor
cgtccgctgtatactataaaggtgttcatggtgatttgaatgagacatattttgttggaaatgtcgatgaagcttccaaacagcttgtactttgtacctacgagtgcttggagaaagctattgcaatagttaaacctggagttcggttccgtgaggttggagaagtcataaacaggcatgctggggggtgaggtttatctgtggtgaaatcttattgtggccatggcattggagaactgtttcactgcgccccaaatattccttattattcaagaaacaaggctgttggtatcatgaaagct

SEQ ID NO: 457086 - DNA, 318 bp, Sorghum bicolor
  unsure (1)..(318): unsure at all n locations
cgtccgcaacgaccaatggcacaccctcaaggacggcgtgccgcacctggtggtgtacacggccttcttctacttctccatctcgtgcttcgtcatcggcgtcggcctcaacatcctcttcctctaccgccccatggccggcgtgccccggtcctccttcggcgcctacctcagggactggaacgggcggcagtgggcgctcctcgccggcctgctctgcggcttcggcaacggtttccagttcatgggcggccaagccgcaggctacgccgccgncgacgctgnncaggcgctgccgntngnnanaccttntggggc

SEQ ID NO: 457087 - DNA, 189 bp, Sorghum bicolor
  unsure (1)..(189): unsure at all n locations
cgtccggctgcgttggcccgtgcagctgctgttaagggtgcagagcaagattaaaactcttagacttggcaaggaaatacaaccaattactacaactcttcttgattcaaggcttgctgatggtggtgaagttgaaatggaagttattcctatggagcatgacatatcaaacacttacnaagggggggg

SEQ ID NO: 457088 - DNA, 348 bp, Sorghum bicolor
  unsure (1)..(348): unsure at all n locations
cgtccgctggactccatcaacgacgagttcaagctctaccgctgccacaccatcaagaactgcacgcatgcttgtcccaagggcctgaacccggcaaagcagatcgacacgatcaagaagctccagttggaagcctgagagcggatcgtgtcttccattcaaaatgatcatggaacaaacctgtgaaaatttgtgataaacttgcctctcttttttttcgtctttgcgtcgtggtttctacttgacaaataattcctcgattggggcctcttctctgatgctcgtatttgtgtcagggggaggtaagtgagggagtgaaaaactggtaccttatttnatttttaagct

SEQ ID NO: 457089 - DNA, 395 bp, Sorghum bicolor
cgcctgctgaccgtccggatccggtcgaccagctcgatagctctttctagctcatgggaggtgctcatagaacggtcgctcgcgatgtactccatatgagcgtttctgccaggccattatcaccgcagggcccgatcgagaacattgatgacacctggctgacccagtcaacaacagcgcctgtgcctacgccaccaacttcgtccccggcaactataatctgctcagtaggctatgcaactccattgtcgtttcggagagggcgtacgtggattgattgatgctgcacagttaattagctgcatgtgtgtctcttgtttcacgttgcatttcagggggcaagtctgtatgattagttggcgttgtacactatgatgaatgatgcttgtgcaata

SEQ ID NO: 457090 - DNA, 475 bp, Sorghum bicolor
cgtccgggctcctcccgttctggggcaaagccaggccggccctcgggcagagcttcctggtggcgcagtcgcagctcacggccaccgccgtgcagtaccgccgccgcgacgacgggacgaccgccgaggcggccatgctccgcccgctctacccggccgccaccatggtctacttccagtgcatgttcgccagcatcaccgtcatcatcctcgccggctcgctgctggcgcgcatgaacatcaaggcgtggatggccttcgtcccgctctggatcaccttctcctacaccgtctccgccttctcgctctggggcggcggcttcctcttccagtggggcgtcatcgactactccggcggatacgtcatccacctctcctccgggatcgccggcctcaccgccgcgtactgggtggggccgaggtcggcgtcggacagggagcggttccctcccaacaacatcctgctggtgctggc

SEQ ID NO: 457091 - DNA, 499 bp, Sorghum bicolor
cgtccgggcctcgacgccgacgcagccgccgagcgcgacgccatcgtcttccgctcctacatcgccctcggctcctaccagctggtgatcagcgagatcgactcgtcggccgcgacctcgctgcaggccgtgaagctgctcgcgctgtacctcaccggagacaaggaaggtgctatctccagtctcaaggaatggttgagcgattcagcaattggaagcaatcctgttttgcgattgattgctggaattatatttatgcatgagcaggactacaatgaggctctcaagcacacacactctggaggaactctggatttgcatgcattgaatgtacagatcttcatcaagatgcatcgttcagactatgctgagaagcaattgaagatcatgcaacaaattgatgaagaccacacactgacacaacttgcaaatgcatggctgggcattggctgtggtggctctaagatccgtgaagcttatctcatattccaagacttcg

SEQ ID NO: 457092 - DNA, 508 bp, Sorghum bicolor
cgtccggtaggtggtgtgcaccggcgtgcgaggacgatgtacgacacgtacatgattgatgagaaggagcacaagcgcaagcagcacctttgctgaggtcggcgtcatcgacgacggcgcctttgaactgtacgagaagcacgaggcgaagaatgaccaggtatgcacgcgcaccgtcacaagatcgaggtggagatcgcggtggaggcggtcgtgggatccggcggtttgaacttccacgagcaccacgagaagaagattgaccacagggaggccgaggaggtctgtggtgagaagaagcaccacttattggggtgatttttcccagtgacaacgtgcgtgcacgtacggccatatgtatgtgatatgtgcgtgtatatgtactgttgaacacggatatgtatctacgcgtgcttgtgatgagagtgagatcgatagatcgatatgtgggtctgtgcgcgagatctgcgtcatgtgtatgcgtgatgaataagtggctactatatat

SEQ ID NO: 457093 - DNA, 376 bp, Sorghum bicolor
cgtccgagcagcgtgccgcaggcggtccggtctcatggcgcccttcgccgtcctccgctcgtcgtctccggtggtggccgccgccgccgcgacggcgccgtcgttcagtcgtcgcatgtccagccacgcatctgcactgcgcatcatctccagcaagagccgcgtctcgtgcaggggcagggcatccagcaggtcgctgtccatcaggtgcgagcagcagagcgcgaagcagcagggcggcggcggcggaccggacgtatggctgggccgcgcggacatggtcggcttcgcatgcgcgatcgccgacgaggtcggcaccggcaaaggcttcctccagaacttcggcgtggctactccggcgccgacgctggcgctc

SEQ ID NO: 457094 - DNA, 432 bp, Sorghum bicolor
  unsure (1)..(432): unsure at all n locations
cgtccggtagagcaatcctctgtttctcactcatcgtcttcctctgctccagtttttgttgtcgattcaggcaatggccgacgaagttcagcagctcaccagggccttctcaggccttggcgggctcggcgtggatgagccgacgatggtgtcggcgctggcgcggtggcggaagcagcccgagaagcggtcggggttccgcaagggcttcccgggcttcttcaagagccacagcgagatcgaccggtgcgaggacgagtacatgctgcacctggccgccgagttcgcgcggttcaagaacctgatggtgctgtgggcgatgcacccgtgggagcgcgacgcccggctggcgcaccacgtnctccaccagcagcacccgcccgccatcggcgnggaggtcggctgcacgcggncccgccaccaggtcctggg

SEQ ID NO: 457095 - DNA, 540 bp, Sorghum bicolor
cgtccgagaaccctgagtggctggtggtcattggcgtgtgcactcacctcggctgcatcccactgccgaacgcaggagacttcggtggctggttctgcccatgccacggttcccactatgacatttccgggaggatccgcaagggccctgcgccgttcaacctcgaggtcccgacctacagtttcttggaggagaacaaactgctcataggctaagatctggaaaaccacctgtctatttatctacttcactcaggtgaacccctgctgtgctgttatattgttccttctttttatggtttggctaaaaatttttttgcatcacgaggatcattgccatgccttgatggtcgactgttatctgccaaagtgcattttccaagtacaaaataatgtgatactgtgctgctactgaatgtaagttggaagtcatttgggacttcatttttctgggataccataggaaagatatggattattacatcttttgtggcacatcctcgtgtgaagaataagcaggtaccattattttttccccaaa

SEQ ID NO: 457096 - DNA, 370 bp, Sorghum bicolor
cgtccggactgctatacacgacacaggagctatactacctgatgtgctgtgatctgatcgacatggccgcctgcaccatggctctaagctgccgcgcgctcgggatctagcctgtgaccaccatcacctgggacgtcttctgagatggccgcatcaccatgcgcatgattgctgccaagcgcaagccagcgtcgtccggaagccactgatgcggggccgaccgcgtgctgtacctgagtccgttcttcggagagcccccatgctacactgaccggagagctccgagagtactacggctgcgacactgacgggctgactgaggaccgcgagaccttctactataacctggagctggatgtgatccactgac

SEQ ID NO: 457097 - DNA, 326 bp, Sorghum bicolor
cgtccgatcgccatgacggcccccgtcatcaccaccggcgagcccgagcccgtggcgatgaccgcgccggtgatcacggacgaccagcaggcgcctggcaaggtgacaatgcagttcctgctgccgtccaagtacaccaaggtggaggaggcgccgcggccgacggacgagcgggtggtgatccgcgaggtgccggagaggaagttcggcgtggcgaggttcagcggggtggccacagagaaggcggtgagggcgaaggcggaggggctcaaggccgcgctggagaaggacgggtacgccatcaagggcccgttcgtgctggcgcg

SEQ ID NO: 457098 - DNA, 480 bp, Sorghum bicolor
tgctgtccgagtgactgatgttgtcgggggacctcgagcaccaccaccggggcggcggcggtctcgacgatggcgtccttcaggcgccggaacggctactcgggctacctcaagtccatggcggcggcctcgtcgtcgtcgtcgtcgggcggatttgacgggctcatgaacaccgtcatcaagaagaagctcggcatcatcccaaaggatctcaattggggcgaccagtcagacgacgtgttcgtagctctggagggagacttcatgaagcccaggatagaggaggtcgaccggctcctcaagctcggcgtcaatgtcaccatctacaacggacagctggacctcatctgcgcgaccaaaggtacgatggactgggttcacaagcttaagtgggacggcctcaacagcttcctgagcgctcccagaacgcccatctactgcgacaatgaagggcagtctggcacccgcacccaagccttt

SEQ ID NO: 457099 - DNA, 386 bp, Sorghum bicolor
cgtccggcacacacgcctgttctggcgtagcaacacgagcctataagtgccagatgtgtcgatggcaggactcacaaggccaatgagagcggactgcacactggaaacatctataaggacagccacgaggtggcacacatgaccgtcaactacaacaggtcatgatgtcgccaaagtacatcttccattagcctggctgaggtgttcctcacacatgacccctttgagagctctctccagatagaaaacgggccaactgcctaagcttgctacacagaacgccccctaaactaggtctaacttgaaggtggacatttgttgagaacatggtggagagactttatcagttgctttcttcaacaaggttgagctggattacgtttctt

SEQ ID NO: 457100 - DNA, 364 bp, Sorghum bicolor
cgtccgccccgcgtccgcccacgcgtccgttggattcggcggcgtctttctgctgcaccacaggtctggctgatatgatttagcaagaacagggtgttacttgatcattaaaacgtgattggtcttgctggatgctactatggataatagcgtaaactagtgatgctgttagttactggactttaggcatctagggtgcgtaactcaatccgtttacctagcaccacaaggcttgtattgctcttccacaaacttgttttgatggtttaggctggtctcatttcgctcgccgatactacgggaatgggttttggtttctttttgtctggatactaagatgttttacttggccaggttttctctt

SEQ ID NO: 457101 - DNA, 452 bp, Sorghum bicolor
cgtccgcccacgcatccggtggacacacagggggtggggtacagatcgctgggcacaaggacattcttgaaggcgatccttacctgaagcaggggctgcggctgcgcaatccctacatcaccaccctgaacgtcttgcatgcctacacactgaagcggataacggaccccagcttgaaggggagggcgggacctccgctgtccaaggagctcgccgaccagaacaagcccgccggactggtgaagctgaacccggagagcgagtacccgccggggctggaagacacgctcatcctcaccatgaagggtatcgcacgcggcatgcagaacaccggctaggccgtttccccttcactcagctgctgaggactggacggagattatactcacagcttgccccatgggggcgttttgtcagtgttagatggagatgctgaaaactgacaccacctg

SEQ ID NO: 457102 - DNA, 460 bp, Sorghum bicolor
acgcgtccggtccagtcacttcagcatgccaaaaacggcgtggatatcgtctccggcagcaaaatccgaacacattttgcaagaccaaactggagaaaggtattctctgatttggccaatgcacacaggaactctcgcataggagttttctattgtggatctccaacgctcacaaaacagctaaaggatctttcgaaagaattcagccagacaaccacaactaggttccatttccacaaggagaacttctgagaccacatatacttgaagcttcgacggattgaaaacataattgtataggaaagaatacgatagcattggcatagcagatttagttttacaagttttgatgtccgcggggttggacaaaatatgtgtacaaagctagatgtcaccttgatacatagattctgaaatgcttcaaatatctaaattggagaagggaaactactttcttcct

SEQ ID NO: 457103 - DNA, 381 bp, Sorghum bicolor
  unsure (1)..(381): unsure at all n locations
cgtccgcttgcatttgacacaaggtctgcaaaacaaatgtctcatcaaaatcagcaatgagggggcctggagatgtgcagggctctttcatcgctgaagccatcattgagcatgttgcctcggcactttcagttgacactaacaccataaggaggaagaaccttcattacttcnagagccttgcgggggtcgacagaaataccctacgagaaccatttacatactaaaatatgtgaagtgcttaaaataaggaattttattatataagcgcaagcggttctttgagacatagagccgatgttatgtgattggataccggatgtaagacttataancactgggcttggttccgacgttaatgtgggctttcgtgactggtgt

SEQ ID NO: 457104 - DNA, 335 bp, Sorghum bicolor
  unsure (1)..(335): unsure at all n locations
cgtccgatgccctgcacagagctttcagtgttttccttttcaactccaaatatgagttgctactacagcaaaggtctgcaacaaaagtgacatttccacttgtctggacaaacacctgctgtagccatcctctctaccgngagtcagagttgattgaggaaaattgtgcttttgtgagaaatgcaggggagcgcaaactatttgatgaactgggaatagcggctgatgaattacctggtggtcaccacattcctggctgggaggatacattacaaggaccgtttttgagaaaacgggccctgaagagatncggtggaccgacgctgacgctgact

SEQ ID NO: 457105 - DNA, 434 bp, Sorghum bicolor
  unsure (1)..(434): unsure at all n locations
ccgtccgcagggaaggacctgggtacccgctcgttgatgcctggcatgagggacctgtgggcgacaggatggttgcatgaccggatacgtgtggtggtttcaagcttctttgtcaaggtccttcaacttccatggcgatggggtatgaagtacttctgggacacattactggatgctgatcttgaaagcgatgcactgggctggcagtacatcactggctctcttcctgatagtcgagagcttgaccgcatcgacaatccgcagtttgaaggctacaagttcgacccgcatggggagtatgtccgacggtggattcctgagctcgtaaggctgccgacagaatggatacatcatccatgggatgcacctgtttccgtgctgcaagctgcaggaattgagctgggatccaactatccnctccccatagttgagct

SEQ ID NO: 457106 - DNA, 266 bp, Sorghum bicolor
  unsure (1)..(266): unsure at all n locations
gtcgacccacgcgtccgggatttgattcgggaaagtggtattgcgtacactattgtacggccatgtgcattaactgaggaaccagctggagccgatctcatctttgaccagggagacaacatcacaggaaagatatcaagggaagaagttgcccgtatttgtgtagcagctctggcaagcccaaatgcagtggggggggggttcnaggtcaaaaacactgttccatttaatgaaccatatntgattgaccctaccaatcccccatc

SEQ ID NO: 457107 - DNA, 416 bp, Sorghum bicolor
  unsure (1)..(416): unsure at all n locations
ccgtccgccagactacgtgacctcactaaggaggtggcagcagcagttgtgagggaggcagtagcagaggatctagctgagggataccgtgacatggatgcacatgagcttgcacgactcagtgaggaagagactattgaatatgtcaagacgaacatgtggagtcctgtctatccaacaataatatacaagaaggactagatagctctatttgctattttgcatattttcagtgatcatgtatgatatactttaggttgcgttctggaaggtactccagaagtgtaggtacgttagttataagcaagcagctttcattgttcgttgacctcacttttaattgaatntaggacacgaggcccttttgggccaataatataggccacagttcctgacgtactccatcgtgctgaaca

SEQ ID NO: 457108 - DNA, 488 bp, Sorghum bicolor
  unsure (1)..(488): unsure at all n locations
cgtccgttactttttactccttcacaagaaaacttcaagtcgagaacaactatcacagcttccttttgttgagcattttgagaaagttacttacaatgacctagcccaagcaacaagggatttctcagaatctaacctgattggaagaggaagctatggttcggtgtacagtgggaaattgaaggaaaacaagatggaagtggctgtaaaggttttcgaccttgacatgcgaggtgcagagagaagcttcttggcagagtgtgaagcactgagaagtattcagcatcgaaatcttcttccgatattaactgcctgctcaactgtagatagcgcaggcaatgttttcaaggctttagtttatgagctcatgcctaatggcaatttggatacatggattcatcatagaggggacgagggagctccaagcaactgancttgattnaaaggtaggcatagctgtcaacataaattgtgcattggattattta

SEQ ID NO: 457109 - DNA, 397 bp, Sorghum bicolor
  unsure (1)..(397): unsure at all n locations
ccgggtcgaccacgcgtccgggaggtgccccctcaggatttctctaagcgtgttttggaagggttccaagtcaccccaatctggcaccagggtttcatacgtgatgatggaaggtcaaagtacgtgccaaatgtccaaacagctcgctgggagtacagcactcgtccagtttatgggtggggtgatgtcaaatctaagcagttgtccacagctggttggcttgcagcttttcctttctttgaacctcattggcaaatatgcatggctggtggcttgtccacaggatggatagaatgggatggagaaaggtttgagtttgaaaatgctccatcttactcataaaagaactggggtggaggttttccaagaaaggggtattgngtgcttctgttgaagt

SEQ ID NO: 457110 - DNA, 412 bp, Sorghum bicolor
cgcgtccgcccacgcgtccgcccacgcgtccgcccacgcgtccgcagggatcacaaaccatcttgcaacagggagaagatgcgtattgaggcattgggtggatatgtcgatgatgactacctgaacgggcagctcaatgttgcgcgagcaattggggattggcatatggaaggcatgaaggcatgtgatggtcttggccctctcagtgccgagcctgaggtaatgacaacagatctgactgaagaggacgaattcctgatcatgggttgtgatgggatctgggatgtattccgcagccaaaatgcggtagattttgcccgccgtaagctccaagagcacaatgacccggccgcttgctgtaaagaactagttgatgaggccatcaagaggaagagtggtgataacctttctg

SEQ ID NO: 457111 - DNA, 384 bp, Sorghum bicolor
cgtccgcgccatggtgggcttcatgtacgcgctcagcctgtcgaggcgtaacggcgatgggggtctcctatagcaggccgtgaacggatccggtctgacctgcttcgcggccacgggacgacgagctctccgttgcgactatcgtgccgttgctaaagggggacagcgccgaggacaggagcgacgccagcatgagcgccgacaccaagctctggaacggacgcttcgtcatgctcggactcgtcatgctcatcttcactgaatacctcactgatgccctgaacatcaacacctagatctagatgcataccaatgcatgtataatgcggagcaacttctgaagaatatttagaactatactagcacaactgcttatagtgcacg

SEQ ID NO: 457112 - DNA, 518 bp, Sorghum bicolor
cgtccgactgaatgtccctgggcgccctcctcgattcgcctggggccacagcacctgtgttgttggagggacaaaagcaatcgtgcttggtgggcaaactggagaagagtggatgcttacagaaatacatgagctttctttggcaagcaactcagtttgagttcaaattaatgcgcttctctcatgcaacctgaagcttgattgtcttcaccagcagaactagaagaatggacgatgagcatactgaatcttctggcagctacttggatttacttgggagatgaaatggtttccactggtttgctgctttatgtagacacaaagggtagtgatatgttcatttttattgccgtttgtttggccttttttaccagataattacaattcataagctactattgtggaatgagtaccaaattttatatgtattctcagatgtttcttacttgcaatatgttaggaaaacaaaagactacctgtatatagtttaatcttttgatgtacggtacatggaaaaa

SEQ ID NO: 457113 - DNA, 107 bp, Sorghum bicolor
  unsure (1)..(107): unsure at all n locations
gcgtccggtgattctctccggatctaggggaggggggntttgtgccaggagcatactgcgagcagaccaacgctggatgctgcagccgcgaccggctttcgcctgcg

SEQ ID NO: 457114 - DNA, 507 bp, Sorghum bicolor
cgtccgcccatgcatgcacatatgcattgacagctatgatgactgctcttatgacaagtgatattagaagtgagatgttgagctgggaggagattttatgagaaagaatgtcttactgctttgcctattgcgaatattgatcagactcttgtgcagacggtggtggaaagggtgcgttctaccatgccacatagcgatcctcgtccatagcatgcctcctctgatgcattgtctgttgcactgatgatggctctaatggaggctctaatagagaaggtccactcttactgccagatcatctatgagagcctgatcgagagtgtggactagtctaaccactctatgcatgctcgtgtgcgtgccttcatggtggacaactggtccactaccggttgctcgggagcaaggtagtgatcaccgcactgggatcacatcttgacccacctagcgaccgagaccgcggacgagaccgctccaatcaaccaacacctcatccacgacttcatg

SEQ ID NO: 457115 - DNA, 388 bp, Sorghum bicolor
  unsure (1)..(388): unsure at all n locations
tcctgacaatcaggcagggtcttggtgttggtgggtggaaccgcctactggctttgacgtaaggcattctgagatgatggaatgttttataatggttggatccttggggttgagggaatgaaagtgggaggncagaagttgataatcgttcctcctgaactggcatatggaaagaagggggtccaggaaattcctccaaatgcaactattgagctggatgtcgagctactatcaatcaaacaaagtccattcgggactcctgtgaagatcattgaaggatagttgtgcatagagttctgaaggaaatggtacatatttgcatggacagtggagtgttgctattgaaaaaggctagtttaccaaatatgcttgtgctattgcattgata

SEQ ID NO: 457116 - DNA, 575 bp, Sorghum bicolor
cgtccgatcaaacagctacctgaacccgcagaggcggccggcgcgcgcacgcagatttttagtttagttttagtttcttctccagctctcctccgacccggctcgtgttccgcccggccggatccgacggtcgctcgctgctgcagcgggcgcttgctgtgcgtcgcgtcggttcggccggagggagggagggaggcggagcctagccttccctgggtctcggagatggcggcgccgccggcgagggcccgggccgactacgactacctcatcaagctgctcctcatcggcgatagcggtgttggtaaaagttgtctccttttacggttctcagatggctccttcaccactagctttatcaccaccattgggattgacttcaaaataagaacagttgagcttgatggtaagcgcataaagttacagatatgggatactgctggtcaagaacgttttcgaactattacaaccgcctactacaggggtgcaatgggaattttgcttgtctatgatgttactgatgagtcatctttcaataatataagaaactggattaggaacattgagcaacatgc

SEQ ID NO: 457117 - DNA, 437 bp, Sorghum bicolor
cgtccgatccgagagcgcggagcgcttccccgggcagcggcggacactaggagcagccgtcagcagccactgaggagcgacctgttgccgccgcccacctgtcgactgccgagctcgctcttggtcttcttcctagtctaatgtgaactttgggagaggggatgatgcggatgagaagctcgaggatttgctcaaacagcacggctaggtggagttcagcttatgtggacctgcgtttaccaccgatgaggccgacgacgacgccgtttgcttgagctttgctgtctggatggctaaagccacacgcgatataaaggctactgatatcgcggtactttgggtgaatcggctcagctagtggactacgtttttcatcattctaactgcccttctttatgctcaaattgatgctttattgccaaaatgagagatattgc

SEQ ID NO: 457118 - DNA, 371 bp, Sorghum bicolor
cgtccgcccacgcgtacgggtgaactgaacccactgcaggatgctgctggtggaaagaaaatatcaattaatgatcttgtcatcaaggctgcaactatgtgctcttcggaaggtcccacagtgtaacagctcatggatgaatgattttattcgccaataccacgatgtgaacatcaacgtggccgttcagactgaacatggattgtttgttccagtaattagggatgcagacaagaagggacttggtacaattgctgaggaggtgaagcagttggctcaaaaagcaagagataatagcttaaaaccagcagattacgagggtggcaccttcaccgtatcaaacttgggaggtacctttgaattaaacaatt

SEQ ID NO: 457119 - DNA, 398 bp, Sorghum bicolor
  unsure (1)..(398): unsure at all n locations
cgaccacgcgtccgctccagcacacacacacacacacacgtatacagcctctcttagcttagcagctccagcnnaccggccggccggcaccacaacaatggccaccgtcctgagcagcctccgcgcgccggcctcgaccttcccctcctctctccgcgtcgcggcagcaccggcggcgccggccaccgnggcgctgctgcctgcggnggacaacaaggtaccgggcatggccgcccgtggcgccaggctgcgcgcgcaggccacctacaacgtgaagctcgggacggcgggggggggggtggcgtatgattggcgcatcgacctggtccttctcgttcattccgatatgggatgacccanntnaanntaatgaggcngataggggaaactattttgca

SEQ ID NO: 457120 - DNA, 325 bp, Sorghum bicolor
cctgcgtaccgtccgattcccggtcgcccacgcgtccgatgttccttcttcacacaactggacttccgatgtgaaccgtactgagtatcagctgattgacatatcagaggatggatttgtgagccttcttacttagatggcaacctaaggatgatcttagctcccaactgatgagactcttgtggcccagattaaggaaggttttggggtgggaaggatcttgtgtgactgccagtctgtatgggggaggagcgatctgcgccctgaaggatttggccccagtaacttccctgccttggaagacggaactacctgatctcaaaac

SEQ ID NO: 457121 - DNA, 469 bp, Sorghum bicolor
cgtccggtgggtatggagttgtttaccgtggtcgcctcataaatggtactgatgttgcagtaaagaagctccttaataacatgggtcaagctgaaaaggagttcagggttgaagttgaggcaattggacatgtcaggcataagaatcttgtccgccttcttggatattgcgtcgagggaatacacaggatgcttgtgtatgagtacgtgaataatggaaatttagaacagtggcttcatggtgcaatgcgtcaacatggtgttcttacttgggaagctcggatgaaaatcgttcttggaattgctaaggcgcttgcttatttacatgaagccatagaaccaaaagttgtgcaccgtgatatcaaatctagtaatatactaattgatgaagaattcaatggcaagctttctgattttggattggccaagctcttgggtgcaggaaagagccatatcacaactcgagttat

SEQ ID NO: 457122 - DNA, 179 bp, Sorghum bicolor
  unsure (1)..(179): unsure at all n locations
gtccgccccgcgtccgcccacgcgtccgcccgacgcgtgcgcagccaagttctaccaatgatccatttggacttcgaagggtctcttatggactggtccaaatattggttgagaacaagaagagctttgacctnaggcgagctcttaccttattggctggggngcaacccatataaata

SEQ ID NO: 457123 - DNA, 341 bp, Sorghum bicolor
cgtccggtgaagcacggggcccgggtggtgatcgcggacatcgacgacgccgccggggaggcgctggcgtcggcgctgggcccgcaggtcagcttcgtgcgctgcgacgtgtcggtggaggaggacgtcgcgcgcgccgtggagtgggcgctgtcgcggcacggcgggcgtctggacgtctactgcaacaacgccggggtgctgggccgccagacgcgcgccgccaagagcatcctgtccttcgacgcgggcgagttcgaccgcgtgctccgtgtcaacgcgctgggcgccgcgctcgggatgaagcacgcggcgctcgccatggcgccgcgccgcgccgg

SEQ ID NO: 457124 - DNA, 346 bp, Sorghum bicolor
acgcgtccggaacgttcaaaaatggttgtagcacaaactgttgagactggagctcaaactgctgctacattaacagcgcaaacagagcaaatgaagagaattggtaatgagctagatactgtccacttttcactgaagaaagctagcaaactagtgaaagagattggtcgccaggtagcgactgacaaatgtatcatggcattcctctttcttatcgttgtgggtgtgattgctatcattgttgttaagatcgtccatccgaataacaaaaacatccgagacattccaggactggctccgcctgctcaaaactaccagaacaggggattattgtggggagaagctt

SEQ ID NO: 457125 - DNA, 336 bp, Sorghum bicolor
cgtccgagcttctgcacacaaagaacagaagagaagaaactcaggacaaactcgagagtgtcttaggcgactccttgacatgttgtgaaatagatcctgctggtgaagacatgttgtcttgcctccaatcctgggcttcgctgacgcctgctattatggaacagatgtttaacacaaatctcatagaggagcaatcgatcagcacaaggggtggtaccatctccgtgacaatggacaactcgcttagcactgtccatactcttattcagattcagtgtggtgaccataagggcctcctatatgatatcatgaggacggtcaaagacctgcacattc

SEQ ID NO: 457126 - DNA, 458 bp, Sorghum bicolor
cgcgtccgatttcatacagaagagagccctcaagctataacctaaatcaaatgatggtctgttatctctgaagacaaataaagaaacttttggtgggttctcacatgtaatggtcgcaaccaggtcgcagaccaaatacaaagttgcaatccttgtagaaccttggactggaagaggtgggggtcgaaatggataagaatggtgcgatagtggttgatgagtattctcgtacctcagttgattccatttgggctgtgggagatgttaccaatagggtcaacctgacaccagttgcactgatggagggtggggcatttgcgaaaactgtctttggcaatgaacctaccaaaccagattacagaactataccttctgctgtgttctcccaaccaccaattggacaagttggtcttactgaggagcaggcaatcgaagagtatggagatgttgatgtcttt

SEQ ID NO: 457127 - DNA, 294 bp, Sorghum bicolor
  unsure (1)..(294): unsure at all n locations
gtcgaccacgcgtccggatattcagaggatganatctgatgcggtatcgccgggcttatgcgcagccatggggtagatcacgtctgaggtatgttaatgatggaaggcccttttggcaatacatagtgagttcatccactggctgttcagatctacagtattttgaggaactgtatcagtactatacaactgagaaggcttggcatctctgcgatccagatgctggacgtgtttttgaggcattgaggagggctggtgtcaaaacagctggcgtgtccaacttttacacctcgt

SEQ ID NO: 457128 - DNA, 374 bp, Sorghum bicolor
  unsure (1)..(374): unsure at all n locations
gtcgaccccacgcgtccgtgaccggtacaattattgtctcagtcggtggaacactagctgcagccgtggccttccttattgctagatactttgccagagagagaattcttaaaatggttgaaggaaataagaagtttctggcaattgataaggcaataggtgaaaatggatttaaggtcgttactttgcttcgtttgagtcccctgttacctttctcccttgggaactatctgtatggcctgacttcagtgaagttcttgccatatgtcttgggcagttggttgggaatgcttncaggttcatgggcttacgtcagtgctggtgcattctggcgagctataatttaagatgagtcggaaattggtcgggaggaa

SEQ ID NO: 457129 - DNA, 489 bp, Sorghum bicolor
  unsure (1)..(489): unsure at all n locations
cgcgtccgcgactcgactggcggcgccgcctccgcgtcgtgctcggcgccgacaagggcgtcgcgtacctccacgagctcgccgacccgcccatcgtccaccgcgacatcaagtccagcaacgtcctcctcgacgagcgcctcaacgccaaggtctccgactttggcctctccaagcccctcggcgacgagggccggggacaggtcaccacgcaggtcaagggcaccatgggataccttgacccggagtactacatgacgcagcagctgacggagaagagcgacgtgtacagcttcggcgtgctcatgctggaggtggccacggcgaggaagccgctggagcgcggcaggtacatcgtcagggagatgaaggcggcgctggaccggaccaaggacctgtacggcctgcacgacctgctggacccggtgctgtgcgcggcgccgtcngcgccggaggggatggagcaatacctggacctggcgctgcgct

SEQ ID NO: 457130 - DNA, 574 bp, Sorghum bicolor
cgtccgggggaagccggtgcccgtgacggtcgtcgggttccgggagaggcggcaacgtggtgacgcaggtgaagacggccgtcacggacgggtaccacgccgtccaggtcgggtaccacggcgtgcgcgaggactagctcacccgcccggagctgggacacctgggcgaggccggcgccccgccgctgaagcagctgcaggagttcaggctcaccgccgtcgacgccttcgagcccgggcagccgctcgacttcgccgacctcttgaaggagggcgacatcatcgacgtctccggcgacaccatcggcaaggggttccaaggtggcatctagaggcacaacttcaagcgagggctgatgacacacggttccaagagccacaggcagctgggttccatcggagcggggacgacgccggggcgtgtatacaaggggaagaagatgcccgggaggatgggaggaaagaagaccaagatcaggaagctcaagatcgtcaagatcgacaatgatctccgggtgctcatgatcaagggtgccgtgccaggaaagcccgggaacctcctccgcattacgcc

SEQ ID NO: 457131 - DNA, 219 bp, Sorghum bicolor
  unsure (1)..(219): unsure at all n locations
tcgactacgcgtccgtgatcctatgtcactgaagatatgttgaaacaagttttcaccccttgntggggaagtggtccatgttaagatccctgttggcaagagatgtggttttgttcaatatgctaacagatcttctgcagaggaggccttggtaattctgcaaggcaccttggttggagggcagaatgtgaggctttcatggggncgcaacccttcaaa

SEQ ID NO: 457132 - DNA, 658 bp, Sorghum bicolor
cgtccgagaatattgaggagtggccacaacgaggtggagctaatggaagcttaagatttgatgttgagttgaaacatggagccaatgctggtctgataaatgctctaaagcttatccaaccaattaaggacaagtacccgagtatcacttatgcagatctatttcagttggcaagtgctacagcaatggaggaagctggtggcccaaagattccgatgaaatacggacgagttgatgttacaggacctgagcagtgcccacctgaagggaagcttcctgatgctggcccaagttcacctgctgaccacttgagggaggtattctacagaatgggccttgatgacaaggaaattgttgccttgtctggagcacatacacttggaaggtccaggcctgaacggagtggctgggggaaaccagaaacaaaatatactaaaaatggtcctggtgcacctggtgggcaatcatggacagttgaggggctgagatttgataacagttacttcaaggatatcaaagagaaacgagatcaggatcttctggtcctacctacagatgctgctttatttgaggacccaaacttcaaggtctatgcggagaaatatgccgaggaccaagacccattcttcagtgactacgctgaggctcatgctaaact

SEQ ID NO: 457133 - DNA, 493 bp, Sorghum bicolor
  unsure (1)..(493): unsure at all n locations
tctacgtgtccggcctgcggcagtggcgtcttcgtcgtcaacgtcggagacgtcctcgagatcttcaccaacggcaggtacaggagcgtcgagcaccgggccgtcgtcaacgcccacacggagcgtctgtccgtcgcggcgttccactctcccagcatacatgccaccattggcccgctgccggagctcctcggcgaccaggaggcgcccaagtataagacgctggaccaccaaagcttcatcacgctcttcttctccgccaagctccagggcaagagcttcttggaacggatgaagaagaagaagctctctgattaattaattaattactcgtccgttcctttcaggcaattaatctcacaatcactacacgcattttagcttttggaggcacttgcttttgttgttcggccttgttcagttctcaattttttttaattatgtattgtagccctttngtttttatttggcaaatattatttaattatgaact

SEQ ID NO: 457134 - DNA, 454 bp, Sorghum bicolor
cgtccggcacaagaggtgcctggtgatatttgaggacgtggacatgcacaggaagcggatgcttgaagagttcttgcaaagatcaagatgtggcaaggtggggacaatcaagatgatcatcaccacaaacaatcggcgtgtcgcaaacatcgtcgggacggtggagccgatcaagctgatgccgttgccatgccctgagtactggttcttcttcaaggcgcacgcattcgccgggagagacatcgaggagaatccacggctgatgtctacagggaaagccatagcgaagaagctgaacgggtcattctttggtgccaagatcattggaggggtgctcagggatcacccggatcccaggctctggtgcaaggtcatgagcagcagcatcggagggatgtctccccttggtgatggcatcagctacatttcggacttggctgatagcttgctgccc

SEQ ID NO: 457135 - DNA, 221 bp, Sorghum bicolor
cctgtccgcacacataccaccaacaccaagcatcagatagaagaagcagtgatctgatcgacatggccgccgccgccaccatggctctgacctcccgcgcgcctcgtcggcaagccggcgaccaccagcaccagggacgtcttcggcgagggccgcatcaccatgcgcaagactgctgccaagcccaagccagcggggtccggcagcccctggtacggggc

SEQ ID NO: 457136 - DNA, 577 bp, Sorghum bicolor
cgtccgtcgagatccacggcgcgcacggatacctcctcgagcaattcatgaaggagagctctaacgaccgcaccgacgagtacggcggcagcctggagaaccggtgccgcttcgccgtggaggtcgtggacgccattgtccgcgaggtgggcgcgcaccgcgtgggcatcaggctgtcgcccttcgtggacttcgtggactgcgtggactccgacccggtggcgcttggccactacatgatccagcagctcaacaagcacgagggtttcctctactgccacatggtggaacctcgaatggcgattgtcgacggccgcaggcagatccctcacaggctcttgccgttccggaaggcgtttcacggcacattcatcgccgccggcgggtatgatcgggaggaaggcaacaaggtagtggcagaaggctatgctgaccttgtcgcatatggaaggctcttcttggctaacccggacctgcctaagaggttcgagctgaatgcgccactgaacaagtacgaccgttctacgttctaaacgcaagattcccgtgttggctacacggattaccctttccttga

SEQ ID NO: 457137 - DNA, 411 bp, Sorghum bicolor
cgcgtccgattgagaggaggaagcaagcagaagaagcacttgagatctggcagaaggaatggaagaagctgagtcaccacctatcacatgttgccttatcacttccatctccaagtatagctgaggatactgatgattcaagcgtggatcctggagctgagttgtgccagcaaataactgtttcacaacttgtagctgctgctattgcccagggttttgctcgtgctgaagttgaatcagagatggaaactgtgattgcagcaaagaactttgagattgcaaggctgtcggatagggtccagtactatgaagctgcaaacagggaaatgtcccaaagaaaccaagaagctatcgagatgtcaaggcaacaacgcaaggagcgtaagaagcgacagaagtgggtctggggat

SEQ ID NO: 457138 - DNA, 311 bp, Sorghum bicolor
  unsure (1)..(311): unsure at all n locations
gtccggccaaattatgtggtgattgagcagaggtactttgatttcgagatgttcccagcaaacgatgatcatccgtcacatgatgtggcaaggggacagaggttcgtgaaagaggtgtatgagacactgagggccagtcctcagtggaacgagacggccctgattatcacatacgatgagcatggcggattctacgaccatgtccctacaccggttgtcggagtgccccaacctgatggaatanttgggcctgatccatactacttcaagnntcgaacggcttggggtgcgtgttcccaccttttctcatc

SEQ ID NO: 457139 - DNA, 205 bp, Sorghum bicolor
  unsure (1)..(205): unsure at all n locations
cgtccgacagcatgatcatgatctttgtgcgcacatgtgaatctactaggctccttgctcttatgctgaggaatcttggtttgaaagctatgtctatcagtggccaaatgagtcaggacaagagactaggtgctttgaacaggttcaaagcgaaagattgcaatatccttatttgcactgatgtagcaaggcgnggncttgacat

SEQ ID NO: 457140 - DNA, 483 bp, Sorghum bicolor
cgtccgcggacgcgtggggtcgatttgttcccccaaatgtccgccctccgctccaccggccgccgcgccccgatccagatcaggagctgtgagatggacgcgaacaggcgccagagtgggattcagcagctgctggctgcggagcaggaggctcagcaaatcgtgaacgcggctagagctgctaagtcagcaaggcttaagcaagcgaaagaggaggctgagcgggagatagctgaataccgtgcccagatggaggctgagttccagaggaaggttgcagagagcagtggtgactctggtgcgaacgtcaagcgcctcgaggaagagacagcggcgaaaatcgaacagctcagccagcaggctgcaagcatctccccagacgtcattcagatgcttctgaggcatgtcaccaccgtgaagaactgaggaacgatgtctccaagttatgcttgcaaacttgtatcatcgaatctatttattttt

SEQ ID NO: 457141 - DNA, 252 bp, Sorghum bicolor
  unsure (1)..(252): unsure at all n locations
tcccggtcgaccacgcgtccgatcgcgacgacatcgtgctccccgtggcggacgcgatcccatgggaggagatcgccgtgttcgtggccgaggacgacgtcctgaagctggacaccatcctgacgtccatacccatggaggagatcctccgcaaacagcggctgctggcgaacccgtcgatgattcaggcgatgctggggggggagcccgnggagncccgggacccgtttcaccangtgcttaacggggtgg

SEQ ID NO: 457142 - DNA, 110 bp, Sorghum bicolor
  unsure (1)..(110): unsure at all n locations
cgtccgggcttgctgtggatacctangcacccggagaggaggaagggcgtancaagcgacnaaatgcttcngggagttnaaaataancatanatccggagattnccaaat

SEQ ID NO: 457143 - DNA, 447 bp, Sorghum bicolor
cgtccgcccacgcgtacgatcaaaagattcaccggtgcaggacaaggagatgttatcgcgttgcctgctggtgtagctcattggtgctacaatgatggtgaagtgccggttgttgccatatatgtcactgatatcaacaacggtgctaatcaacttgaccctcgacagagggatttcttgttagctggaaataagagaaaccctcaagcatacaggcgtgaagttgaggagtggtcacaaaacatatttagtggctttagcactgaactgcttagcgaggcttttggcataagcaaccaagttgcaaggcagctccagcgtcaaaatgaccaaagaggagaaattgtccgagtagaacgcggactcagtttgctgcacccatatgcatcatggcaagagcaggaacccggactcgtgccatccggagagcatcatcaatacggagga

SEQ ID NO: 457144 - DNA, 467 bp, Sorghum bicolor
  unsure (1)..(467): unsure at all n locations
cgtccggcaggagtcacaaatgcgaagccagtggagagggctgtactcgtcatcaatgtcgttttgagcacctcaccgcccttgaggcaacacaccagcagagatctgaagctggattcactgagtactacaacattgaggcaagaaatgagttccgttgtgccggagtgagcgtgaggcgcttaggggtcgagagcaagggcttagttttaccaatgtatgctaatgctcacaagcttgtctacatcgtccaaggtcggggagtgtttgggatggcactgcctggttgtccagagacgttccagtcagttaggtctccctttgagccagaagtggcaacagctggtgaggctcantcatcaatccaaaaaatgagaaacgagccccagcaactttaccaattccaccaaggtgatgtaatcgcagtgccagctggagtagcccactggctatataacaatggtgat

SEQ ID NO: 457145 - DNA, 298 bp, Sorghum bicolor
gtccgggataccttctttctgtgaaagcatacactgtttttgccactcatatggaacgcttgtcagaacttgcaacaatgtatccaaatgtgaagatcctccattttgaagttgacttaagaaatgaccgcttggatttcaagttccgcctaaaggatggcgtgcgaccggtaccgcactatgggctgctgctggccagactagctgctatcccttcttcagctttggactctggagcacgtgtcacttcacagattgaggagcatgacttgacgtggatggatgccatctgcgaggt

SEQ ID NO: 457146 - DNA, 200 bp, Sorghum bicolor
ccggaaaaaacctttctttctccggtctgatgcgagtacataacttctgcccctgttgtttgcatggcttgagaggggaatggtgttgttgcatcatctcgcaagttaataggagctgctaatccccttcaagctgatccaccgaccatacgcggcgatcttccagttcatacaggatggaatgttgtccatcgaagtga

SEQ ID NO: 457147 - DNA, 275 bp, Sorghum bicolor
cgtgcggcagagctagacgcaccggaacctcgatctcacccagcacaacgagcagggcgacaggtactcgggactcggcacacagggttgatgaagccctaggctttatgtttggctgatgggcgtaaccagtggaccaccccttgatgacatgtactgatctctggaccttacatgattgccttcttgtacgctatgaacaatgtctgacctgtcaggactccactaatggtcatttctacgactgctgtgcccacatgctatgggtggtccaa

SEQ ID NO: 457148 - DNA, 521 bp, Sorghum bicolor
  unsure (1)..(521): unsure at all n locations
cgtccgcccatgtgtccgcccacgcgtccggtggaagtgcacatctataccaggcaggggggaggaaaccttggcacagtatcaactttgtgtgtgcgcatgatggatttacgctggctgatttggtgacatataacaagaagtacaactcttcaaatggtgaggataatagagatggagaaaatcataacctcagctggaactgtggggaggaaggagaatttgcaggtttgtcggtcaaaagattgaggaagaggcaaatgcgcaatttctttgtttctctcatggtttctcaaggtgttccgatgttctacatgggcgatgaatatggccatacaaaaggaggcaacatcaacacatactgccatgaccattatgtcaattatttacgctgggacaagaaagaagaatcctctgacttgcaacggttcttctctcttatgaccaaattccgcanacaatgcgagtcccttggcctcacatacttcgcaacagcttaacggttgcattggcatggccat

SEQ ID NO: 457149 - DNA, 368 bp, Sorghum bicolor
  unsure (1)..(368): unsure at all n locations
gcgtccgaacccagtgcatcaagcagcgcaatggggagcagcaccatggctctctcctccacggnnctgagcagcnnagggccctagaggcancacaccanncaaagaatctgaagctcggaattcactgaatactacaancattgaggcaagaaaatgagttcncgttgtgccgggattgagcgtgaggcgctggggggggganagcaanggcttagttttaccaatgtatgctaatgctcacaagcttgtctacatcgtccaaggtcggggagtgtttgggatggcactgcctggttgtccagagacgttccattcagttaggtcctcctttgaccaagaggtgtccacagctggtgaggctcaat

SEQ ID NO: 457150 - DNA, 371 bp, Sorghum bicolor
  unsure (1)..(371): unsure at all n locations
ctgtccgataattcctactcccaattgtgcactgagtccattaggcctacccttgcgcccgggagaaccaatatgcagtttctataatcgctatggcatgtgcaagtttggtccaaattgcaaattcgatcatccaatgggaagtgctatgtatggccatgcttcatcgccaactagtgaggccccaacttctctgcgtatgctggcacatgtaccatcgcatccagaagtatcacctgacagtggctcgggaaggtctaggaggattgcccattctgattcccagcaaataccctctgttgaaaggagcactgagagagaggcgtcctaagccatcctcggtgttttcgtncatgctgcctnccatnctt

SEQ ID NO: 457151 - DNA, 435 bp, Sorghum bicolor
cccgcgtccgcgccgcgctgttctgacatgccgttcgacgccattttcctcatctacaactctctatctattttagcgcccttactaactatgccatggctctatggcccagctatttggtccgaacgtaaatccatggcacaaccctcggcaaggaggttttagggagtgtagatttgatagactacaagcatttgaaccacttcggagagtgaggtcagaagccggggttacagagtactttgatgagaagaatgaacaattccagtgcacaggtacatttgtcatccgacgtgtcattgagcctcaaggccttctggtacctcgatacagcaatactcctggcatggtctacatcatccaagggagagggtttatgggattaactttccccggcttgccagcaacctaacaaaaaaatgcggacattgtttg

SEQ ID NO: 457152 - DNA, 437 bp, Sorghum bicolor
  unsure (1)..(437): unsure at all n locations
acgcgtccgcccacgcgtccgcccacgcgtccgcccacgcgtnncgaccacncgtnnngaataaaaagaagggaaaaagaacatgaaatnctgcaacatgaaaaacattgaatcacaagacgattttgacaagcagctcctgttggccagcgataagctcaccgtggtgcacttcttttcccctagttgtggagctggcanggccctncnccctatggtatgtcaattggctggcatgcatccggaactggcatttcttatggtcaactccaatgaacaaaaggagatgtgccgcangctcaatgttcatgtattgccaatgttccgcttttacagaggtgcagaaggccgtatctgtagcttcagctgtacaatttcaactatttataaaatcaaagatgcattgaaaagggatggggttcaactagagaatcttt

SEQ ID NO: 457153 - DNA, 418 bp, Sorghum bicolor
cgtccggttcagatggagcaatgccagtagttatgattttggatatgatggagatgccattgacatttcagatcatatcagtattgagtcccagagatctcccacaagctcagtgaggttcctgaagtgtgggctgtgcgagagattcctgcgccagaaatcgccctggacctcgaaccggattgttcgaaacgccgacatgccagtagcagcggttcttccttgccgacatgccttccacgcggattgcttggaggaaagcactcccaagacagaagtccatgatccaccctgcccgctgtgcacgcgagccactgaagactatgggcatgtgtcgttctcagaacctctgcatgttgccctccggtccgctcgcagcaggaacctttccttgggcagtggtgctggtgggagtagc

SEQ ID NO: 457154 - DNA, 400 bp, Sorghum bicolor
  unsure (1)..(400): unsure at all n locations
ccggtcgaccccgcgtccgcccacgcgtccgcccacgcgtncggaatctccgaacgacaagtttgaagtattntatattgactaaggaaaccaanaggcggnngnaaaaaagagatcgctntntggntccctgaangtttaactgantggaggagcaaccttnacccttggatctatgagtcttaaaacttnncgccaaggggggatcccctttggggggctanttttnnttaaatatttgaattttgtttcaaaattnacatttgtctgtcctcagaaacaacattataattcttctgatactacatcacaattatatttctccctgaactaatatgcttaataaatttntggaatggaaataaaagaaaaaataaaccaacaattatttttttattat

SEQ ID NO: 457155 - DNA, 245 bp, Sorghum bicolor
cggtcgaccacgcgtccgatcccccagtacttcgactctttgaggagagagattacaaaaaacataggtatgaacaacagaagaagaaaaagattcagcagaagagatctgtcgcgaaacgcatgggcttgaaggagttgaaaatgggatacaacattgacatccatgattacagcgtgaggcttaaagctgcaaaaaagtttcttaaagctggagacaaggttaagataattgtgaacttgaaa

SEQ ID NO: 457156 - DNA, 223 bp, Sorghum bicolor
  unsure (1)..(223): unsure at all n locations
gtccgtcgaccatgcaccctaccagaatgtgttctacaatggcactgtcgaggtcgttgaggctggaggcttactcagtgttgagtcggtgttcctcatcacccttggaattgcacttcttggtctctttggattgggggcatatggccaggttcaacagntntcgaataaaacaaagaagggccggggggtggaactctgaactggaacaactgatgccaac

SEQ ID NO: 457157 - DNA, 105 bp, Sorghum bicolor
tgcgtccgcttgaccctatgcaaagggattactggttaactggaaataagagaaaccctgaagcatacaggcggtgagtgctgaggagcgggtcacaggaacata

SEQ ID NO: 457158 - DNA, 362 bp, Sorghum bicolor
  unsure (1)..(362): unsure at all n locations
cgtccgggagcgttggcgggccgtggcaaggcgatcggcgctggcgccgcgaagaaggcgacgtcgaggagctccaaggccgggctccagtttcccgtcggcaggattgccaggttcctcaaggccggcaagtacgccgagcgcgtcggcgccggcgcccccgtctacctcgccgccgtcctcgagtacctcgccgctgaggtcctcgagcttgcgggaaacgccgcgagggacaacaagaaaacccgcatcgtgcctcgccacatccagcttgccgtgcgcaacgacgaggagctgaccaagcttctgggcggcgccaccatcgcgagcggtggcgtgatgcccaacatccaccancacct

SEQ ID NO: 457159 - DNA, 539 bp, Sorghum bicolor
cgtccgcaatgaatatgtcatatgcaatggttgcaagagtccggataccattctttctaaagagaacaggctgttcttcctccgatgcgagcagtgtggttcgtcgaggtctgttgctcccatcaaggctggattcgttgcccaagttggccgtcgtaaggctggatcttaagttacctaatagtactgcctggactcgcttcccgatcatgagaatccaaactagtttgcctgtccaccaaaatttctgttccactttcctttgtgcctacaccgtttactggatttctgctgttcactatacttggattggagctatgaatttatttcatgtgatgaaaaaaaaaaaaaaaaaacctacatcaatagttgaatacagtgagcacacgcccaacctctccctcatcggtggtcctactccattctactgagctagatactgcagtttggactactgctccagttctcagtatcacttgttataaactaagcaagctgagatatactgaatatctgaaactgttttgcatataaatatg

SEQ ID NO: 457160 - DNA, 425 bp, Sorghum bicolor
cgtccggcctcctctgataacacaataaagatcattggcgtaagtggaaactcacaccagcagcttgcaactttgagtggacaccagggcccagtatggcaagtcgcatgggctcatcccaagtttggttccatgctcgcatcctgcagctacgacggccgggtgatcatctggaaggaaggaagcaagcctgatgaatgggcactggtacacacctttgctgagcacaagtcctccgtgaattccatcgcatgggcgcctcatgagctgggtctatgcttggcttgtggttcatcagatgggaacatttcagtcttcactgctcgttctgatggaggctgggacaccacacgtattgatcaggcgcatccagtcggtgtgacctcagtttcttgggccccagcaatggcaccgggagctctaat

SEQ ID NO: 457161 - DNA, 288 bp, Sorghum bicolor
  unsure (1)..(288): unsure at all n locations
gtccgtattatctntggattgtcctaatgcgcctttgcatcgttgagtaatttttacaggattcacatcacaaggaaagtggacaggagcaagatggagatgttcgaagttcccagaatggtgcatcacgttcaccatctgagggaaaattgaaccaagctatgacaatcgtgcccatgccatcaagtggcccagtaactggtccaactacaaacctaaatattggaatggactattgggccaacacagcaagctctgctcctgcaattcatggcaaagtgaccccaa

SEQ ID NO: 457162 - DNA, 562 bp, Sorghum bicolor
  unsure (1)..(562): unsure at all n locations
cgtccgacttatgaacaggattaaagagattggagcaagctatggcaagagtccaacccaggtgtctctgaactggctgacctgccaggggaatgtggtgccaatccccggagccaagaatgccagccaggccaaggagttcgctggtgcactcggttggagcctgacaggagacgaggtcgaagagctacgaactctggcacgcgagatcaagggcatcaagatgcctatcgaggagtcgtagatacctccgtatttcaccaaccccatgcatggtatagcactgattagagattataaggttttaaagcgagaagaagaaaacacacggatctaaaaaggaaccaagatgtgtaagtactaagtagaaaatgcagctttcaacgaatctcatgcctatcagcctatgcactataactctgctgcctgttctccgctttacaaatacttagaatggaaagatagagactattgtgccgcanagcaacacaaaagaaactactcaaagtgaaagaaaagttacggtttgctttacagcgtttgtaaatttatgacatgacta

SEQ ID NO: 457163 - DNA, 456 bp, Sorghum bicolor
  unsure (1)..(456): unsure at all n locations
cgtccggctcccagctcgtccacagccgcgtcgaccgcgcccgcgccgggcaagctgccggctcggcgggcatcggcatcacggtgaccgcgctcccgttcccttgcgccgaagccggcctgccggcgggctgcgagaggctggaccacgtcccctcggtcgacctcgtgcccaacttcttcgacgccgacgcgccggccgagctgcatcgtcgccgggatgtgcaacacgtgggcgcacggcgtggcgcgtgagctcggcgtgccctgcttcatcttccatggcttcggcgcgttcgctctgctgtgctgcgagtatctcancacgcacaagccgcacgagggcaagtcgctggacgaggccatcgacgtncccgtcctgccgncggctttngagctcaagttcgccaggaggcagctgccgctacagtttcctgcctttgtgcctcaattccgg

SEQ ID NO: 457164 - DNA, 396 bp, Sorghum bicolor
cgcgtccggctactgcgggcctgaggtcgactggctgaggaccggagacctgctcctggacggctacaccatgagctacttcagcggcaggatcccgatacaacgctggtggtggacgtgatcgcggagatcgcactgatgagcagcgcctgagtactaccggatcattaagggactggaccttgaggacgggctgcaccccgggggggccttgtacccgctgcgcctgatcagcaaacatgcacgcccgtgccatctttgaggctgcgatagcaatgtccaaccagggtgcagaagctttacgatagatcatggcatctattgctgcaacaccagaggaagtgcgacataaagcgaatgttatcaaacaaactgccgataaagtaataacctatg

SEQ ID NO: 457165 - DNA, 515 bp, Sorghum bicolor
cgtccgcacagacgaccacttggcagtaagccgagctcagtctttcgaagctccatggttcctggatcccttgttctttggtgactatcctcaccaaatgcgccaaatcttaggtccaaacttgccggaattcacagaaggagagaagcaactaatgaaaaaccaaattgacttcatcggagtaaatcactacaaaacattatacgtcaaggattgcgtatattctctatgtgacttggacacctatgctggtgatgctttagtttctgaatcagcagaacgaaatgggatacccattggaaagccgacaccggttgcaaacaactatgtggttccaagctctatggagaagctggtcatgtatttaacgcagagatataaaagcatacctttgtacatcacagagaatggttatgcccaaataggcaatagcagtaccacaacagaagaattaattaatgatactgaaagatcaagttacattcgtgactacctcacttacttgagctttgcat

SEQ ID NO: 457166 - DNA, 470 bp, Sorghum bicolor
cgtccggcgcttccaagaggtgaatttgcttcaaaagcacttagccacagcttcactgtgtttgccaaagatatggttgaggcgatatcattctcaaatctgtatgcccctgaacatttgatcatcaatgtaaaggatgctgagcagtgggaggagctcgttgagaatgcagggtcagttttcttgggccaatggaccccagagagcgtgggcgattatgcaagcggaacaaaccatgtccttccaacctatggttacgcaaggatgtacagtggtgtatcactgaactctttcctcaaatacattactgtccaatccctaacagaggaaggactgagaaagctgggtccatacgtcgcgaagatggccgaagtggaagggctagaagcgcacaagagagccgttacccttaggctgcaagaggttgaggcctctgtaaccgtatagctgctgtcatgattcattgtaat

SEQ ID NO: 457167 - DNA, 440 bp, Sorghum bicolor
cgtccgcccacgcgtctcgccacgcgtccgcccacgcgtccgcccacgcgtccgggagctgctaaagccatgtatccagcagcaggttatgcagttccgcaagtccaaccagttctaccagatagtgatccgacaaacaccactatatttataggtaacttggatcagaatgtgacagaagatgaactcaggcagatctgtgtccaatttggggagcttatatatgtaaaaattccagccaataaagcttgtggatttgtacaatatgcatctcgggcatcagctgaagaggcagtacaacgtcttcatggcacaacgatcggccaacaagtagtcaggctttcatggggcaggagtcctgcgagcaagctagatcaatcagctgtctggagtcaacatgctgattctaatcattgggcaggggcttattatggctatgg

SEQ ID NO: 457168 - DNA, 181 bp, Sorghum bicolor
ccgattcttccaggtatgtaccagaagaagattcttgatggtgccactttcactgtaccttcaggaaagagtgtggcaattgttggatctagtggagcgggaaatcaactattcttagacttctgttcagattctttgattcgacttcaggatctgtaagaatatagaagtattggggggg

SEQ ID NO: 457169 - DNA, 525 bp, Sorghum bicolor
  unsure (1)..(525): unsure at all n locations
tcccggtcgccccgcgtccgcgcgccttccacctcaactccaaccgcttcgcggcggcctgccggagtcnctccccaagctgcgcctcctccacgagctcgacgtcagcaacaaccgcctcaccggcgggttcccgcagcacatcctctgcctgcccaacatcaagtacgtcgacctccggttcaacagcctctgcggcgccgtccccgccgcgctgttcgacaagccgctcgacgccatcttcctcaacgacaaccacttcgacttcgagctccccgacaacctgggcaactcgccggcgtcggtggtggtgctggcaaacctgcgcctgcgcgggtgcatcccggagagcatcggccggatggcgggcacgctcaacgagctcgtcgtcctcaacgccggcctgcggtcctgcatcccgcaggaggtcgggtggttgcgcgagctgacggtcctcgacctcagcttcaacgagctgcaggggatgctgccgggagccatggcggggatgcacgagctccagca

SEQ ID NO: 457170 - DNA, 439 bp, Sorghum bicolor
  unsure (1)..(439): unsure at all n locations
cgtccgggcaaatgctgaggactctggtgctggtcccggaacaaaggattatgtgcatgtgcgcatccagcaacgcaacggcagaaagagtctgactacagtccagggactgaagaaagagttcagctacaacaagatcctcaaggatctcaagaaggaattctgctgcaatggtactgtagtccaggatccagagctaggccaggtaatatgcgagagcaatgcgtttaaagttcacaaaaatggtacctgctggttgtgggtatactgatgatgtatttgtcctctgcaggtcattcagctccaaggtgatcagcgcaagaatgttgctactttcctagttcaggtattcanaatcttcaaagctgaacagctgaatactggtttaacagactgataaaatgttccgctgtttatactgatgatgnnattattactt

SEQ ID NO: 457171 - DNA, 438 bp, Sorghum bicolor
cgtccggcagacagaagtagttgaatccttactttttgagatgcaagatttaggtataagaccgagtgctggatcgtacaattgtctcataagtgcctatggtcgccagaagaaaatgagtggaaaggctgaagatgctttcttgaggatgaaaagggaaggtattaagccattatcttcttcatataatgcactactctttgcatatgcagttaatggattgcatgaaaaagctcataccatatatgtggatatgaaaagagaaggacttaaacctaccttagaaacgtatacagctttactcaacactcttaggagagcaggtgacacagagaagctaatggagacatggaaaactatgattgatgaaaaggttggtggaacacgagtcatattccatgtggtgctcgattgtttagcaaaacatgggctgtatct

SEQ ID NO: 457172 - DNA, 499 bp, Sorghum bicolor
  unsure (1)..(499): unsure at all n locations
cgtccggatgcggtctgcttcccccttacactcttctcaagtttatttgaacctggatggtcttctgggagttcagcagtctccattaagggccttttatcattgctggtggaaggaggcgctgacaatgtaaatcagtgtttccttgaagcagcacgctttggaagtactgaacttgtacgcattctgctggaggttgcatatcagaatagcttggctgtggacaccgagctggctctagtatatgcctctcattactgcaagttcaacacaatggaatgcctagttgatgaagggaacgtgaattctttcctcagccctctgataaaagctgcagagcgtgggtgcttgcaggttgtccactggtttgtcagtcgaggcatctctgaaattgagatgtgccttgccctgacaactgctgcctccagtggccatttcatggtggcctcgtatttgcttgcacatatcccccagcanattcttgaagctctcagcactc

SEQ ID NO: 457173 - DNA, 402 bp, Sorghum bicolor
  unsure (1)..(402): unsure at all n locations
cgtccgggttcactaggggaaaggcacccataactcagcagttaccaggagaatccgacgcagagtacgcagagttctcctccaaggttcagcacttgaaaggtgacaggcaggacttcgaattcgtcaagacaagcctggctgctaagggatacgatgtcgtttacgacatcaatggacgtgaggctgtgcaagttgagcctatcattgacgccttgcctaacctggaacagtacatctattgctcatcggcaggagtgtacctgaaatctgacattcttccacactgtgaggttgacgcggtggaccccaagagccgtcacaaggggaagctggagacggagagcctgctgacatcgcgcggcgtgaactggacgtncatcaggcccgtgtacatctacg

SEQ ID NO: 457174 - DNA, 364 bp, Sorghum bicolor
  unsure (1)..(364): unsure at all n locations
tcgaccacgcgtccgtatttttgaggacgatcaaaccagacatgtcacaagccgcatcattggaacacgaggttacatgtccccagaatatgccatgcgtggacagtactcggccaagctagacatatttagcttcggtgttctagtcctggagatagtgacaggccgaagaaacaactacgcagtgaactctgagcattctccaaacctcttctgtcttgtgtggaagcactgggtggagggaacaatcgcacagatagcagaccctagtctgggcaggcactaccccatggccgaggttctcaaatgcatcaatattgggctgctttgtgtccagcaaagccctacngaccggccatngatg

SEQ ID NO: 457175 - DNA, 415 bp, Sorghum bicolor
  unsure (1)..(415): unsure at all n locations
tgcgtccgggcgtatctgatgagagtggctggggctgtcattcacagccatggaatggagacttgcattgcaacaatgctcaaccctggtgcaaaggagttcaggatgacccacatggaaatgatcaaaggaatcaaaggtcatggctaccgtgatgaattggtcattcctattgttgagaatactccttatgagtatgagctcaccgactccctaagtgaggcgattgcagcatacccaaaggcaactngctgtgcttgtaaggaaccacggaatatatgtatggggtgactcttggatcaatgccaagacacaggctgaatgctatcattaccttttagatgcttgcattaagctctattanctgggtattgattggacaactcctgagcatggtccaataaacaatgcaaag

SEQ ID NO: 457176 - DNA, 441 bp, Sorghum bicolor
  unsure (1)..(441): unsure at all n locations
cgtccggtgagcgtcaactctattccaactagcaaggaggatattcgtgatcttggacctccggataaggttgccgaagctttgataaaaaaagttctggcaccgccaacacagaagacaaagttaattgaggcgaaagagaatgatgttgatgggagagcttactacacttttgagttcacaggtcaggctccaaactacaccagacatgcacttggtgctattgtgattgcaaatggtaaattttacacattgaccactggagcaaacgagagaagatgggaaaagatgaaggataggctgcatactgttgtcgattccttcaaaatcgaaaatagaatatgaggaatgcctgaattgctgtgctgtttttccttttgttgatttgctttcttttggagctgcnatggtgagattttagtantaaatgtcgggaatgtg

SEQ ID NO: 457177 - DNA, 393 bp, Sorghum bicolor
  unsure (1)..(393): unsure at all n locations
cgtccggaaaaatcacacagtgtatgtgagaaaaaggccttacctgaaaatgtttcttgagaaggttgctcagatgtttgaggtcgtcattttcacagctagtcagagaatctatgctgagcaacttatagataaacttgatcctgatggaaaatatatctcacggcgtatttatcgtgaatcttgggtgttctctgacggttgctatacaaaggacctgacaattctggggatcgacttggcaaaagttgcaatagttgacaatactccacaggttttccagttgcaagtggataacggcataccaattaagagctggtttgatgacccctcanatcaggaattgatcgagttactccctttgctggagagccttgtggattcagaggacgt

SEQ ID NO: 457178 - DNA, 369 bp, Sorghum bicolor
  unsure (1)..(369): unsure at all n locations
gcgtccggtggttttagcaatggcttcttccccttcataattgctgagaaggatgtatgctctgaggtttctgagctggagagcatatttgagtcctccagtaacgaacatgcaaatgttaatgatgatgctagggaccaagctctggagtttataaatgagctgggttggcttcctcatagagcgaacagaatgtctaaagaggatgaaactgatacgtctctagctgcctttaacatgtggagattcaggaatcttggtgtatttgccatggagcgggagtggtgtgctgtgatcaaaatgctgttagatttcttatttattggccttgntgatgtgggatcccgatctccanaagatgtggggctt

SEQ ID NO: 457179 - DNA, 500 bp, Sorghum bicolor
gtccgacggacgcgtgggaaaaaaaaaaaaaaaaaaaaaaaaaaaaaaaaaaaaaaaaaaaaaaaggagcggaagataaaaatctaaaaactgatttaaccaatagcggataaaactatagaatggggggccggtcctattattaaatttttttcgccaattctggtgaatcttttggttccaaaatgggctctttttttgaatttcccagggaactttttggggctgatcaatttgggatacaggctggattttttttttttggaacaacccacctcccccggttaatttttgcttccaccggggatttttggggaaatttttttcccatttccctgcctacgggtttcctccaacataacccctttggggttttctacccaaaaggagggggccaactttttaatttttcttccaaaaggggccccccaacttggcttattttgaaggggggcttttgtggaaaactgtggggaaacccttatttatttctttttttt

SEQ ID NO: 457180 - DNA, 422 bp, Sorghum bicolor
cgtccgcgtgaacccgccgccgccgccgccgcaggaggaggagacgcgccaaggagagcacgcgaggaggcgaccatgagggccaagtggaagaagaagcgcatgaggaggctgaagaggaagcgccgaaagatgaggcagagatctaagtaagctggtggagatggatggtggacgtgatggcatgcttgagtacatacatttcttcggatgcgtttgctcatggagaggcgtgaacctggtgtgcagtcacagtttgccatctgtcaattggcttgtctcggaaacctgcacttcagtaggctatcgtggttctagttatatccagagttttgcactaagacaactcggtctgttttgtgagcctattatgatggagctttattttgttgtaatatcgacctacctatttacctaaaatt

SEQ ID NO: 457181 - DNA, 269 bp, Sorghum bicolor
  unsure (1)..(269): unsure at all n locations
cgtccgccacaaataaacaccatatatccagctcgatcgatcgacgataaacaacaatacatggcgaagcagcagcaggcggtggcgctgctgatgatgctggtgctggctgcggagacggcgtcggcggcttcgtgcaacgcggggcagctgacggtgtgcgcgtcggcgatgttgtccggggcggcgccctcggcggcgtgctgctccnncctcnnggcgcngcnggggtgcttgtgccngttcgccnngncccccgccttcgcgcg

SEQ ID NO: 457182 - DNA, 242 bp, Sorghum bicolor
  unsure (1)..(242): unsure at all n locations
cgtccgcaactttatagaaagcgctcaatatgagaaaacagcaactatatggaccagtacccttcagagaacaattttgacagcaagtccaattgttggatttcctaagatacaatggcgtgctcttgatgagatcaattctggagtttgtgatgggatgacttatgaagagataaagaaaaatatgcccgaggaatttgagtnacgcaagaaggacaagctaagatattggtaccccggtg

SEQ ID NO: 457183 - DNA, 467 bp, Sorghum bicolor
cgtccgctacacaatttcacaggactggtcccccggcagtcaaggagattcactactccgcgtggactgcgacgtatacaggttctcaccttcgaacgagactggggatacaccgacttgagcaacgccatagagctcgtgtgtgcgcctgaggagctaggaggcgacaacggcaccttcagcacgtacggaggtgccgatcagatacaagggctggcgtctcaggtgatggagacgctggacacgatcaacgttgccgggcgcaaggtcacgccataaaatggcacactggggcggacatgggataacgacgagaaacttctcgtggacgccgattggggcaactacaaggggtggccatttaacggggggagagttatcaaaatggtagaaagggcatgaccaaagatgcggctgcccacaatggctaacacaccgcaagataagggaaggcaggggaaaatgtg

SEQ ID NO: 457184 - DNA, 358 bp, Sorghum bicolor
ccgtccgattcagcaccactaactccaagtggcgatcaccatggcagagcaatctggggcccagaatgcttgggatatgctatctgatgagcagtcacagaaacacatcactactggtgctggtgacctcaatgacatacttggtggcgggattcactgcaaagaagttactgagatcggtggtgtcccaggggttggtaaaactcaactggggattcaactagcaatcaatgtacaaatcccagtggaatatggtggccttggtgggaaagcagtttatatcgatacagaaggaagtttcatggttgaacgtgtctaccagattgctgaagggtgtatcagggacatactggagcac

SEQ ID NO: 457185 - DNA, 449 bp, Sorghum bicolor
cgtccgcccacgcgtccggtgggcaccgtgactgacgacaagaggatcaacgaggtgccggcgatgaaggtgtgtgcgctcaggttcactgagacagctagggccaggatcatcaatgccggtggagagtgcctcaccttcgaccagcttgcgctccgtgccccgctcgggcaaaacacggttctcctgaggggtcctaagaacgctagggaagctgttaagcacttcggccctgcaccaggagtgccacacagccacaccaagccttacgttcgctcaaagggaaggaagtttgagaaggcaagaggtaggaggaacagcaggggcttcaaggtctaaggagccgcagccatgcaaatccatgtcattttgctctaatcagctatacattactgttttggggtatcagagttgcaatgttttacatgtcaaaatctcaagttattacc

SEQ ID NO: 457186 - DNA, 431 bp, Sorghum bicolor
cgtccgtcaagacatccaatttctaaacttgagtttgaatttgaaagaaggaagctggccaaagatgatgttagagaattgatctatcgagagattttggagtatcatccacagatgctggaggagtacatgaaaggtggagaacagattagcttcctctatccaagtggagttgatcggttcaaacggcagtttgcacatcttgaggagcattatagcaaaggagaaagaggttctccactgcaaagaaagcatgcttccttaccaagggaaagagtggttgtatcgaaggatggcaatactgaacaacatattaatgatcaggagaggagtgcagattctgttgcccgcactactgtgagccctccaaggtcagaagatgccgacatgaatgatgtgaaatccacaagtttaagctctcggagctacct

SEQ ID NO: 457187 - DNA, 307 bp, Sorghum bicolor
  unsure (1)..(307): unsure at all n locations
cgtccgcgagatctctcggcagtcccgtctctttgcggcgttgtccaagaaggtgatagatctcgatgaactgaggatgctggcggctcagggagtcccagacgccgcgggcgtccgggcaactgtgtggaagctgctactgggctatctgcccaatgaccgctcgctgtgggagcaggagctggcgaagaanagagcacagtacgctgctttcaaagatgagttccttagaaaccctgtagaaatatcgcgacaggtgcaaacagaaggccaccacaacgtaaatgaaaagcatgttgacaatggg

SEQ ID NO: 457188 - DNA, 362 bp, Sorghum bicolor
  unsure (1)..(362): unsure at all n locations
cgtccggttcctccagttagaattatagttgctgatggagaagaagatgttactatcaaggttagtgatgaaggtggcgggataccaagaagtggcctcccaagaattttcacgtatctgtatagcactgcaaagaatcctcctgagctagatagacctaatgtaggagtaactatggccggatatggtttcgggctcccaatcagccggctttacgctcggtattttggcggcgacttgcaaatcatctcaatggaaggatacggtaccgatgcttacctccacttgtcacggctgggagattcanaggagcccttgtcttgacgacatatttctgnggnccccaatcnattttttttttt

SEQ ID NO: 457189 - DNA, 274 bp, Sorghum bicolor
  unsure (1)..(274): unsure at all n locations
gcgtccgaatgcttttatggaattgttatgttgaacactattggctatgtatattcaaggcaagctgcaaaagaacttggaaagaaagcaatgtttttgggggctccatttattgctgaatggtctacagacagaaggcatgttaccacagcccaagaaccacttgatactttttcacaaggggtgtggtgtacggcagagcatttgaggacacataatattgctataccgcacagcacagattncagntataagcccatngagcggaaagggc

SEQ ID NO: 457190 - DNA, 347 bp, Sorghum bicolor
  unsure (1)..(347): unsure at all n locations
cgtccgtgctgatattgttagtgtccactgcgaacaaacatctactatccatttgcaccgaacagtcaatcagattaaaagtctaggagcaaaggcaggagttgttttgaatccagcgactccactcgctgcaatcgattatgttcttgatgttgttgacctggtgttgattatcgtctgcagtggtgggttggccgacctcagctctgccgtgagcgagttgagagctcgatcgattgatcgccgtgtggtcacccggaagccgatgctgcanggccggncgagttggaagatggttctcgtcgcattaacggccttgagttgatnncgccgagcctgaccttgag

SEQ ID NO: 457191 - DNA, 456 bp, Sorghum bicolor
  unsure (1)..(456): unsure at all n locations
cgtccgtgtatcccgccgtgggatcggagggagaggccgggaggcgggcatgtgcgatctggtggcccgcacgggccggcacctgcagcgctacgagaacggccgtcgccttgtggccgggtgcataccattcagatatagagatattaatgatgaagcttctgatgatgaacaaaagaaacttgttgaagttctcatgatcagctcccaaagtggaccaggtcttctatttccaaagggaggctgggagaatgatgaaactgttgaagaggcagctgcaagggaagctatcgaagaagctggagttcgaggagatttagtgcaactgttgggcttctatgatttcaagagcaagcaacccagagctgcagaacatggatgcctgctcgattaagttaacggtgtacgagataataagtttgttgtcntaagtactgatgatgaattacaagcatc

SEQ ID NO: 457192 - DNA, 312 bp, Sorghum bicolor
atcccggtcgaccacgcgtccgcggacgcgtggggctacatacgagagctgcgcacccgcatcgactccgtcaagaacacgcagaagatcacggtggccatgaagctggtggccgatctacaaggtccggcgcgcgcatgaggagaacttcttctaccaccccttctcggaggcgcttactgaggtgctctacaacattaaccagaagatatagtcggacgacatacatattgcactctatcatataccctatgctgaagaactgtacactatgggtggctaggaaaatcttcagacagttaagaagtacta

SEQ ID NO: 457193 - DNA, 435 bp, Sorghum bicolor
cgtccggttagagcctgcgttgttccaagctttgcgacctcgacggaccgacttatagcccttctctgaaagctgctagcccatcatacgcaaagtcatggttgctcaagaacacagtttctgtgaaatggtcgcggactctttcatccttaaaaacatgagcgactagtgtggtctttcctactgcggagggaccgacaattggaaggacctacactggttctttgacaccaccaggaggctgtgtgtgcagaaggaagtcgatgacatattgtgcttccatctggcgaccaaacatgcagtttcccagcaggagatgcatgctgtaaggctgcctgtacatgcggtggtagttcgccaagaacaggactagttcatgtgcatcaacaatcatggtgctcaaagtgtaagcaccttctgcatttctttgagata

SEQ ID NO: 457194 - DNA, 347 bp, Sorghum bicolor
aacataaactctcatattgggtgcgactatggcagatggtgatgccgggacagaactcgctgaaacatacgttctgttacatatgtacacgccagctgcctttagtgatgaggagctaatcttagtccaaccaactattccactctatcatatagcctatgctgtggtactgtacactatggttggcttggatattcttcgtacagctcagaagtactgtgcataaacaatccagttgactggaggcatgaatacacgtgccttttgtggagatagttgcgcacgtctgcaatcattcggtttaccgacgtaaggaatttagcggaagaggactcacatcttgcaat

SEQ ID NO: 457195 - DNA, 379 bp, Sorghum bicolor
  unsure (1)..(379): unsure at all n locations
cgtccgacttcagcaggatacttatctagcattggcgacagcatttgttattttgagattgctgtatcatctttatccaaagataaattcctttgctagatgggcatggaggaggcataatctgttttcaaacttgatgggggcacatgaatatttcctcacctaccttgagcaagcaagacagaagtttcataggctgtacccttcaagttcaaagcgaggaaatttgcaggagggggcaatgaacgcgactgcttgggcttccaaatcattagcatctgtttcgattggagaaccaagtgctattggaaggacaaactctacaagtgaagctaggatgaagtgtataaccctnttttgtccacaggggatatatgta

SEQ ID NO: 457196 - DNA, 355 bp, Sorghum bicolor
cgtccgcggacgcgtgggttgaagtagtgactggggttgccaagaaacaaaacaaggagaagggccccaatagtaccagcaaaagcaacaaaccaagttcgaaaatgacatcaagacccgagtctcattcgaaggcgacaaaagtggcagcgccccccaaggatgacgatgatgagagcggtgaaaaatatgaagaagaggaagagcgtgataacaccttatgtggatcctgtgggacaaatgatggcaaggatgaattctggatctgttgtgataagtgggagcggtggtaccatgggaagtgtgttaagatcacacctgcgcgtgccgagcacatcaagcactacaaatgccc

SEQ ID NO: 457197 - DNA, 453 bp, Sorghum bicolor
  unsure (1)..(453): unsure at all n locations
cgtccggtcctctctccccccttttgctgccgcctgccggccggaaggaagggaggtgcgctcatctgtgcagcggcggcttcggagtccggaggggctccgaggggaggtccggcggggagccatggcgcggaagcacggctggcagctcccagcccacaccctgcagatcgttgcaattacggttttcttccttctggtggttgcgttttatgccttctttgcgccgtttttgggaaaacaagtcgtcgagtatattgcaattggcatttatactcctgtggcacttgcagttttcatcctttacattcgatgcacaagtataaaccctgcggatcctgngatcatgtcaaagtttgaggatggccttatcaatataccaatcaacggctctgaaatagaaggcatgaatttgccccagaaagtaaacaatgctactctctactactaaaa

SEQ ID NO: 457198 - DNA, 395 bp, Sorghum bicolor
  unsure (1)..(395): unsure at all n locations
cgtccgcagaacttgaggaagaggttccacttgagtctaactgaagagcaatgcgtatccctggtgctctcactgatcagtagcagcatggatgcttggcgcactcggcaatatgattactaccagagagtattgaatggaattttatgattttccccacaagagtcacggattcattcagaaaccaaacttcttgtatccttggagcaaaccatgggattgcataggtcagtttggggctgatctatactgggtaattgagcactgtgttttcatgtggcattgcacatttttggtcaactagggaaacagattggtgcctgcattctactttcatgtgatcccccctctgacagangtaagtgtacagtcatcggcagttatctaagtagtgc

SEQ ID NO: 457199 - DNA, 396 bp, Sorghum bicolor
cgtccgtgaaggtggatttgggtctgttcatcgaggtgtccttcctgacgggcaggctattgctgttaagcaacacaagcttgctagttcccagggtgatgttgagttctgctcagaggtggaagttcttagttgtgcacaacaccgaaatgttgtcatgctgattggtttttgtgttgaggacagaaggcgtttattggtttacgagtacatctgcaatagatctctggattcacatctctatggtcgaaatagagaaacattggagtggactgcacggcaaaagattgcagttggtgctgctcgtgggctgcggtacctccacgaggaatgcagggttggctgcataatccatcgtgacatgagaccaaacaacatccttgtcacacatgattt

SEQ ID NO: 457200 - DNA, 537 bp, Sorghum bicolor
  unsure (1)..(537): unsure at all n locations
cgtccgcagcaaggcagcaagcagctcactctcagctcgctccctcactactagctagtactacatagcagcagcaatggcgcccaccgtgatggcctcgtccgccaccgccgtcgctccgttccagggtctcaagtccaccgccaccctccccgtcgcccgccgctccaccaccagcctcgccgctgacggaggagcagctgctgaagcaggtggactacctgctgcgcaacaactgggtgccctgcctcgagttcagcaaggaaggcttcgtgtaccgcgagaactccacctcgccgtgctactacgacggccgctactggaccatgtggaagctgcccatgttcggctgcaccgacgcgtcgcaggtctacaaggagctgcaggaggccatcgcctcctacccggacgcctacgtncggatcctcggcttcgacaacatcnagcaagaccagtgcgtcagcttcatcgcctacaagcccgcgggcagcgagtgattaaactgctagctagctcctgcgtgagctaatggcatat

SEQ ID NO: 457201 - DNA, 361 bp, Sorghum bicolor
cgtccgcgttcgcggaccggcccatcaaggagtccgcgtacgggctcctgttccaccgcgcttcgacctgcagagcaccaggtccaggtgcgaccgcctcgtcccgctcgtgaaccgcttcgtcggcggcatcatcgacgagcaccgcgcccggaacgacctccggtccgctccaccacacgccgtcatggacttcaccgacgtgctcctctcgctgccggccgacgacaggctcaccgactctgacatgatcgccgtcctctgggaaatggtgttccggggaactgacaccgttgccgggctgatcgagtgggtgctggcgaggctcgtgctgcacccctgacgtgcaagcccgtgtcca

SEQ ID NO: 457202 - DNA, 406 bp, Sorghum bicolor
  unsure (1)..(406): unsure at all n locations
cgtccgcccacgcgtccgcgcgctccgctcccagggcctccaggctgttggttttgatagagatgtccgcaagcaggaggatgcggacagagttctcgctgcgacagttgcgcatttcggcaagcttgacattcttgtaaatggtgcagccggcaacttccttgcttccccggaggatttgacgcccaagggattccggactgttcttgagattgacactttgggtacatacacaatgtgctatgaagccctcaagtatctgaaaaagggtgggcctggaaaaggcccgtccactggtggcctaatcattaacataagtgcaacactgcattacactgcgtcttggtaccaaattcatgtctctgctgctaagggctgnggttgatagcatcacaagatcactggc

SEQ ID NO: 457203 - DNA, 362 bp, Sorghum bicolor
tcgaccacgcgtccgacagttgaaacttccagggcaatcaccctcaccacgatgcggtcattcagtaacatctggtggaccttatctcttgctgtttggaggacatggaactggcggttggctaagtagatatgacgtgtactacaatgaatgcattattttagacagggtgtctgttcaatggaagcgcctaccaacaagcaatgaacctcctccacctcgggcatatcattccatgacttccatagggtctcgatatcttttatttggtggctctgatggaaagaatacatttggtgatttgtggtggcttgttcctgaagatgatcctattgcgaaaacggaacatagttcttaacatc

SEQ ID NO: 457204 - DNA, 169 bp, Sorghum bicolor
  unsure (1)..(169): unsure at all n locations
cgtacgcccacgcgtccggctttgtattgactgactcccgcctgcctgacatgccaattatttatgctagtgatgcttttacatcattaacaggttactcaagagaagaaatattgggctgtaactgcaaagtcttaaacggtccangcactagcttggaggttttaga

SEQ ID NO: 457205 - DNA, 198 bp, Sorghum bicolor
cgtacgcgcacaaatgaaccttgggattgtgattagttacttcaatgcaaaatttttcaggaacagtcttaatgtgtggtaccagttcattccccagctgatcttcttgaacagcttatttggttacctgtccttgctcattattattaagtggtgcacggggtcaaaagcagatctataccatgttatgatctacat

SEQ ID NO: 457206 - DNA, 340 bp, Sorghum bicolor
  unsure (1)..(340): unsure at all n locations
cgtccgggccgacctccctccccttccccgggtaggcgtcgtgttcagcgccgagaggtccctgagccacgtcacttggtacgggcggggccccttcgagtgctacccggaccgcaaggcggcggcgcacgtcggcgtgtacgagagcagcgtggaggagctgcacgtgccgtacattgcccccgtggagtgcggcgggcgggcggacgtcaggtgggtggcgctccgcgacggcggcgggctcggcctgtacgcgtcggcgcacggcggctccccgccgatgcaggtgagcgccagtactacngcgccgggagctcgacaggcgancacgtcacaggct

SEQ ID NO: 457207 - DNA, 339 bp, Sorghum bicolor
cgtccggtgaaagttccttgcttcaggagcacactttgcccataatgggacctgagagactacaggaagttgggtcctgcctgacgatggacaagtttgagaaaatggtgcgaccatttgccatgcccccagaggacttcccccctgctgcccctccacaagccttaggctacttctccaaaggggcaggaggagtgcttgaaaggttggttagcctctggcctttccacaagagcgcaaatgcggctaatggaaaatagctgaaagctacaaattcctgaaatcagttaatgtaattatttcttggtttggaacacttcttgcacaccggccaatttt

SEQ ID NO: 457208 - DNA, 426 bp, Sorghum bicolor
cgtccggtgagtatgaaccttcaggtcgtccacttgatgggacagactatgctcgggcacagaatgcacggcgcttcatgatctacgttcattccaagatgatgatagtggacgatgaatacatcatcgttggatctgccaacatcaataaccgctcaatggatggaggcagggactctgagaacgccatgggcgcataccagccgtgccacctgaacaccaaaggccaggtcgcccgaggtcaggtccacggctttcggatgcgctgcggtattagcacctcgggggctacacgacgatttgctcaatcccggcaggctggagtgtgttcagagggtgaaccagatggctgacaagtattgggacctctacgctagtgataggctcgacgccgaccttcctgggcacctgctcagtaccccgtca

SEQ ID NO: 457209 - DNA, 343 bp, Sorghum bicolor
acgcgtccgagataagatcgggccgaccatggccgtgctgaggctcgacgtccaacggaacatcgagaggctgcatgagctgtacctgttggacccagtcaagtactctaccctaacggaggtagtggagaaggaagtcaaggagggcactgcaaggaaggtcgatagctgtgcaagggctgacctgtggcttgctagatccatggactacacaattgcgctggtagtgagcatagaagaggactctgatgagcatcagcagcagagcctcgcgcagcttgacgaagacccgtacgaggcctgtctgaagccatggcatggctggatctcttcggcggactgc

SEQ ID NO: 457210 - DNA, 435 bp, Sorghum bicolor
cgtccggcgagttcccagttccgctgctccaattccactcggcatggctccgcaggcgtgggtcgtggcggagaacggcgaggacctccaacgacccagggaattcgtgcctctttctgagctcgaagatttggcgtgttgtattggcatttggaccctaagaaatctgaaagcgaggaggagctagcgaaaatccgcaaagacagaggatacagttacatggatcttattgagatatgtcccgacaaactggaaaactatgaggagaaggtgaagaacttcttccgtgagcacatgcatcctgacgaggagatccgctattgcttggagggcagtgggtactttgatgtccgtgacaaagatgacaggtggattcggatctggataaaggaaggagacatgatcatcctaacagctggaatttatcatcgattc

SEQ ID NO: 457211 - DNA, 404 bp, Sorghum bicolor
cgtccggtgcttgactcccccactcacccgacaccacttctcccacgcagcgactcctcctcctcgatctctccctcgcggtcagcccaccaggcgagggcgccggccaaggacgcggggctgccccaccaagcgagggcgccggccaaggacacgaggccgcccaccgccggccaccagggcgcagggctccgcacgcactctctcgtgatgccaggtgcctaggttttcgtcggcccttggccatgtcttcgctggacccttcgccggcgacgagcaccaatagataaactggcagcagtgatgatatgttccatgggaatatttgctgggaggccacacgacaccatgcggccacgacgagcacccccgcagcacgcgggcgagtcgcacagccatccttg

SEQ ID NO: 457212 - DNA, 270 bp, Sorghum bicolor
  unsure (1)..(270): unsure at all n locations
cgtccgcaggcagcagatcgcctcgccggccatggagagctgggcgacctgggtggggaccagcgtcacctccgccttcttcgcctccctcgagcgctgctcctgcatcaacctctccaccgacgactacgactacgactaccgcgaccacgacgaggccaaggaccgccccctcattcttgccgncgncccccggcacgacgacgttgccaagcccgatccagacttcttccttcccggccccggtcgcaaggaccagaagcaagagca

SEQ ID NO: 457213 - DNA, 458 bp, Sorghum bicolor
cgtccggctgcttcgcctgctttgtgcggagattatcagcagtaggagtcggaactcctagcgactcagtctctagctgacgagacatgggtgggtgatcgctcgaactggtgtatccagctccaagatccagcgcgtccctatgactcgcacgaggactaattcgtgctgcgcaggcggacgtcgatgtggagcctgaggtcgccgccggcgctcccaagaagaggacgttccgcaagtacagctaccgtggcgtcgacctcgatgcgctgctcgacatgtccaccgacgacctcgtccagctcttccccgcgcgcgccaggagaaggttccagaggggtttgaagaggaaaccgatggcgctcatcaagaagctgcgcaaggcgaaaaaggatgctccagctggtgagaagccagagccagtgaaaacctatcttcgcaacatgatcattgtccct

SEQ ID NO: 457214 - DNA, 398 bp, Sorghum bicolor
  unsure (1)..(398): unsure at all n locations
cgtccggcggaagcgcgggcggaaacccgcgaacgggcgggaggagccactgaaccacgtggaggcggagcggcagcggcgggagaagctgaaccagcggttctacgcgctgcgcgccgtggtccccaagatttccaagatggacaaggcgtcgttgctcagcgacgccatcgcgtacatccaggagctggaggaccggctccgcggcggcggcgggtgctcggcggcgcgcccggagagccccgccgtggaggtgaaggcaatgcangacgaggtggtgctgcgcgtgacgacgcccctgtacgcgcacccggtcctccaggtgttccacgccatcagggacgcccagctgagcgtgggcggcgtcgcgtgagcgtggcgacgacgccggcgcacac

SEQ ID NO: 457215 - DNA, 298 bp, Sorghum bicolor
aaaatgtcagaggccgacttgcgtgtgattgggctatggccgagcctcgtcgtgatccgtgttctgctgcccctgaggcggtgggttcttgggtttgagttggtgcaggaggtggtggtcaagaagagctggctgctgctgaggtcgtactcggagcacatgaagattcctgttctgcttcaccacggtaagtctatttccttgtttctcatcatcgtccagaacatcaacgaggtttggtcctctgacacgctagcttttcttctgtctgtcgactcttacacccgtgccgttcttt

SEQ ID NO: 457216 - DNA, 443 bp, Sorghum bicolor
  unsure (1)..(443): unsure at all n locations
cgtccgggagatcaacccagagaacccaatcatggatgagctccgcaagcgtgcagaggctgacaagaatgacaagtcagtcaaggatctcgtgatgctgctgttcgagacttctcttctgacctccggcttcagcctggaagaccccaacaccttcggcaccagaatccaccgcatgctcaagctcggcctgagcatcgacgaggatgagtcggctgaggctgacgctgagatgcccccgctggaggacgactccggcgagagcaagatggaggaggtcgactaagcctgccggctgccattctatccgtcctctgttggacgcttttggcccgtatcgattntgtgttgccagctacgggaatgtggatcagctttttatccgtgttagtatcagagtgtggtatcttttgaacagnttttcggtgctcgtaatgcaatta

SEQ ID NO: 457217 - DNA, 461 bp, Sorghum bicolor
cgtccggaaaattgaggatctggatttcactgatgaggagatggacatgtatgtggatctccacccgatcacaaatacatcaccttacacagtggttgagacaatgtcactagcaaaagcggcaatccttttccgggaactcgggttgaggcaccttttggttgtgccaaagacaccagacaggcctcccatagtcggcattctcacaaggcatgatttcatgcctgagcacattcacagtctgttcccgaacttgaatcctcacaagtaccattcagcatcaatggcaggttgataatgaggcttttttttctgcttcccatctatgtacattatttggatgcggatgctggctgtatgtaattgcaaaggtgtatctggtgttcaattggatagagctcatcttctctacatggtttgggctgtgtggatttttagcatatgctctttttgcaataaaa

SEQ ID NO: 457218 - DNA, 373 bp, Sorghum bicolor
cgtccgcgaggattgggatccccgtccggttccggatcggaggcaacactccagaagtagctgtacctgactcgatcagcgtgtttgtttgggcgttgagtatcagggatacaagaacgtacaatctaggtcaggtatcgatgctaagcctagccagaggagtggcaccactgcagacaccttcattgctgacctgtaagttgacctggctaccgttcaaatcaagacaggagctccctgccagtcttagcgcctgtccaaatacaaccagctcctgacgatcgaggaagagctcgatgatgccttagtctaccacagatcaaagctcacggcaccagtggagccctactaaaccacgagagcccagagtctt

SEQ ID NO: 457219 - DNA, 477 bp, Sorghum bicolor
cgtccgcacgcctccgacgaggtgtacctcggccagcgcgacgagccggagcgctggacgtcagacgccaaggcgctggacgcgttcaagaggttcggcagccggctggtggagatcgagaagcggatcgagaagatgaacgctgacccggcgctcaagaaccggaacgggccggtgaaggttccctacatgctgctgtaccccaacacgtcggacgccaccggcgagaagggcgaggggcttactgccatgggcatccccaacagcatctctatctgagcagagatttgttttgtcccgccgtggatgatactacgtgctgcttattggtagctatatatatgcgttcgctattgtcagcgtgtgatgtgttgatgtgtttcaacttttaattcgtcaaaaaaaaaaaacgttgacaggggcgtttttggtggaaattaaataaacataaattatttgtcttatttatactataaa

SEQ ID NO: 457220 - DNA, 441 bp, Sorghum bicolor
  unsure (1)..(441): unsure at all n locations
cgtccggagcaagccttgtcttcgaatgcagcttccgtagctggcaaggtacatttttagaggtaaaagggctatgttcagcaatattacttttatggttaattctgcactgaacttttacagccattttttgttacgaatgatgaacctatggaaacatgggagtttatgaattgcattatggaagccatgggttgtcagaggcccaggattaatcttcctgccaagatgttaacgtctgcagccttggtttccaaaatgattcatcacaggcttggttttcaaatgctttccacccctcttctccattcagatacaatatacttcttgtcatgcactagaacctttaacacttcaagagccagaagattacttggataccacccgattgtaacattggaggatggaattatgaagactgntgggtcatttacagaacta

SEQ ID NO: 457221 - DNA, 488 bp, Sorghum bicolor
  unsure (1)..(488): unsure at all n locations
cgtccggtgaatctgctgtggactttgttgcaaggaggtgccggctcgctttccttgacacagatgctgctggtagagcattgccccgaatcgttgaaattttagcttcagagcacaagtgggacaaggcaaggaggaaggtggagctgcagaagggtagagagttcttggaaacattcaagtcatctaagaatgcccaattccgtgatgggaaacataatggaccatgaccgaatacactgttttttggtgaataagcgtggatcttatacacaagttctcttgaacaagcaggctccgatacaagagtgagcccgtgaatgttgaaagngtcggtttccacatttccacgcatggctgtgaaatcgatgtcctgacttccagcagaataacatgtggtcacggcactatataattgtaaatgccccaggatattagtccaacttaaaaataaactggaatcagagaccaaagatttcttgctcctc

SEQ ID NO: 457222 - DNA, 358 bp, Sorghum bicolor
cgtcctgaggcatggagagaacctattactacagctcttgcccaagctggcctgctggaaccacaggatgtagacccactgaatgtaactttcatggcatgccctgacttgccactatgccctttggcacagacagaagctgaacgggggatcttacccattcttaaacggattacgacagttttcaacaaggctggtatcaaggactcacagtctgtggttgcgaggataactggctgccctaatggatgtgctagaccatatatggccgaacttggatttggtggtgatggcccaaagagttaccagatctggctgggtggaacaccaaaccagagtacgctagcagagtcattta

SEQ ID NO: 457223 - DNA, 287 bp, Sorghum bicolor
cgtccggcagttcctctaccgcacccagaaggagctcgccgcatgcaccgacgagatgtgcttaaccatggacggctcggcgagctcgtaccagctgctgggcaacttcgccgcggcagaactctacggtggactggagcgggggcggcttgtcactactgtttgactatatataagcatgctacaggtagtaactaaagactcagtggtcgcacttgcgtagctcattcatgcgttatggattctcttcatgcggcgatagaacgctggtatcttctcctggaaaa

SEQ ID NO: 457224 - DNA, 374 bp, Sorghum bicolor
cgtccgctgggtcttaagaaccagaaggatcagcatttctcgaatctaatggtggagcagaaggaggaactgaagaatcgcgccaaccacttgataaagacactggagagctgtggctgggatgttgccattggttgtggtggcatctcaatgttggcgaagccaactgcctacatcgggaagcccttcaaagctgatggtttcgacggcaagctggatgcaagcaacatcagggaagccatcctcaaggccactgggctcagcataaacagcagctcctggacggggatccctgactactgccggttcagctttgctctggagagcggtgaattcgagcgtgcaatgggatgcatagctcggttcaaggagct

SEQ ID NO: 457225 - DNA, 454 bp, Sorghum bicolor
tccgggtcgaccgactcgacccacgcgtccggtgctgttccgacaaattcttcctgggctggagtctttgctgtcttgcctgagaaggattgctgaaaagaaggggaaaaccatgtctcaggtggccatcaactggtgcatctgcaaaggcacaattcctatcccaggcgttaaaatggtcaggcacgtcgaggagaacttgggtgcgctcggctggaggctgagttctgctgagatcgcagagcttgaggccgcggcgatggcagctccaaagaagatgggcccagaatgtcttccagactgcctgatcatgtgcaggaacctgagtctgaaactctgaataccgaccccaggatgattttgaacctgaatctcggtaccaaatataacagacaatggtgtcagatgagagttgagagggggtttctttgctgaggtcagattttcactcgca

SEQ ID NO: 457226 - DNA, 272 bp, Sorghum bicolor
acgcgtccggcaagacatccttcaccatgaccaacgtcaaggcactgctcatggacatggtggtcggaggtacagagacgacgtcctacactgcgggcagagcattctgggcatttatgcagaagccggagctgatggcaaaggtgcgagacgagctggacgcggtggtgggcagggacgcgttggtggaggagtcgcacctcccgcagctgcactacctgcacgcggtgctcaaggagacgctgcggctgcacccggcgctgacggtgatg

SEQ ID NO: 457227 - DNA, 219 bp, Sorghum bicolor
  unsure (1)..(219): unsure at all n locations
acgcgtccggttttcatcatggcgcctctcatactgccctttttgctcgtgtacttctgcctcggctacttggtatatcggaaccagattctgaacgtgtactacccaaagtccgaaatggggggcaagctgtggccgatcatgcacaacaccatagtgttctcgcttgtcctcacgcangtgatcgcgctcggcgtcttcaccatcaagcactcccct

SEQ ID NO: 457228 - DNA, 383 bp, Sorghum bicolor
acgcgtccggccggtgctccaggacggcgacctcaccatcttcgaatcccgagcgatcgcgaggcacgttctccgcaagcacaagccagagctgctaggcaccggcagcctggagcaggcggccacggtggacatgtggcttgaggtggaagctcaccagctgagcccgttggcgatcgccattttggtagagtgcatcttcgcgccgtacctcggccgcgagcgcaaccaggcggccgtcgacgagaacgtcgagaagctgaagaaggtgctggaggtgtacgaggcgcggctgagcgagagcaagtacctcgccggcgacttcctcagcctcgccgacctcagccacttcaccgtcatgcactacgtcatggccaccgagt

SEQ ID NO: 457229 - DNA, 366 bp, Sorghum bicolor
cgtccgctcggcgcgctcggctgcgtgttcccggagctgctcgcccgcaacgacctcgccgacgaccccgaggccttcgccgagctcaaggtgaaggagctcaagaacggccgccttgccatgttctccatgttcggattcttcgtccaggccatcgtcaccggcaagggcccgctcgagaacctcgccgaccacctcgccgaccccgtcaacaacaacgcctgggcctacgccaccaacttcgtgccccggcaagtgaggaggtgtccggatgcatgtgagcgcgcgcgcgcactggtttcggcttgtaccatgatgtaaattactgtaccagggttcaatcaagaaggaataactgtgttcatt

SEQ ID NO: 457230 - DNA, 265 bp, Sorghum bicolor
cgtccgcttttttttttttttttttaattctcttacatcacaagacagcacggattgcacatcgactcctatattttaaacgcactcgagctggaatctactatctgatcctgcactgccaatcatcataattgccccttataccggtctctcaccttaccgcatattctttcatcatagactagctcaaaaagaatttggagctcatcttcgtccatccctgttcttattcggttgcataaatagcatgatggactttatctat

SEQ ID NO: 457231 - DNA, 487 bp, Sorghum bicolor
  unsure (1)..(487): unsure at all n locations
cgtccgaagggagtctgctcaacttggattaagaatgctgttccatcagaagagagcaaggattgcagctgggctccgatatttgtgaggcaatcaaacttcaaactacccgctgatccttcagtgccaatcatcatgattggccctgggaccggtcttgcacctttccgcggcttcttgcaggagagactagctcaaaaagaatctggagctgagcttggtccatccgtgttcttcttcggatgcagaaatagcaagatggacttcatctatgaggatgagctgaacaatttccttgagcaaggagcactgtctgagctggttcttgccttctcgcgtcagggccctactaaggaatatgtgcaacacanaatggcacagaaagcatctgaaatctgggacatgatatcccaaggtgcttacatctatgtctggtgggatgnccaaagcatggccagagatgtacatagagttctccacaccattg

SEQ ID NO: 457232 - DNA, 501 bp, Sorghum bicolor
cgtccgggaccttggaatcaataagctagaagtgtcaaagggagctgtagagcctcatgaggcgtggagcaagaacgtacttgagaggctcacttctgatgctcagaggctgttgagcatccaagcgagcattgaggagttgaagcacaaaatggaggggccgtcaaagggcaaatccccaatgaattctgagtacagcagtgtgagcacgcagctgcatgagacagagggttttgtcttggaacagatcaatttcaacaacaaattgaccaggaaggctgagaactatcctgcgttgtcagataatatgaacaccgagcgagaagggtattccagcaggaggaagatctccgagcaggtgcagaaagggtcagaaaatgtggcaaggttggaactggaacttcagaagatacagtatgtcttgctcaagcttgaggaagagcacgagtacagaaggctcaaggtctctgataagcgcacccgtgtgcctttgagagacta

SEQ ID NO: 457233 - DNA, 334 bp, Sorghum bicolor
  unsure (1)..(334): unsure at all n locations
cgtccggcgcatcgccgacaaagatggcacagggagggtccggaacatctacttcccgttcgacgcggacgcggacacggcgctgagcgtggccaccgagatggtggcggagctggacatcaccgaccacgaggtcacccacatcgccgagatgatcgacggcgccgtcgccgcgctgctgccgcactggaggccaggccctggcatggacgacgacgaggacgacgactatgacggcggcggcggtacggacgcgtcaggcgctcgctggccgtgcaagaactgccggtccagcgcgtnctcggncgggtcactggacgactacatgtcggcg

SEQ ID NO: 457234 - DNA, 419 bp, Sorghum bicolor
cgtccgcgagcctgcttgtctgtcgcctcatccttccctagctagagactgcagagtatagcgtcgagggggctccggtggcagacaccatgggtgagatcaccaacgtgatggagtaccaggccatcgcgaagcagaagcttcccaagatggcctacgactactacgcctccggcgccgaggacgagtggacgctcaaagagaacagggaggccttctgcaggatcctgttccggcctcgcatcctgattgatgtctccaagattgacatgaccacaagtgttctgggtttcaagatctcaaatgcccattatggttgcccccactgccatgcagaagatggctcacccagattgggagtatgcaactgcacgggcagcatcagcaggagggactatcatgacactgtcatcatgggc

SEQ ID NO: 457235 - DNA, 425 bp, Sorghum bicolor
  unsure (1)..(425): unsure at all n locations
cgtccggngaggtgcgccaccggaagcggaaacctcaggaaccatcgaccaaaccccgtcgatccggttgcggcgcggcgcggcgtgctagatagctaccgacgatggtggtggaggagatcaccgagggcgtgaagaacctcgccgtcgccggagatgcggcggcggcctcaggcggagaggggcagaggaggggcggcggcggcagcagcaaccgcatccaggtgtctaacaccaagaagcccctcttcttttacgtcaacctcgccaagaggtatatgcaacagcacngggatgttgagctatccgctcttggaatggccatagcgacagttgtgaccgtggcagaaattctgaagaacaatggatttgctgttgaaaagaagattaggacatctactgttgaaataaacgacgaatcaaga

SEQ ID NO: 457236 - DNA, 414 bp, Sorghum bicolor
cgtccgatgaagcaggtaatcgatcggtacgactcccattccaagaatctccaaaagtctgaagcgccgtctcagctgcagtcacatgcagatgagaggagaggagctccagaggctgagcgtccaacagctgcaagagcttgagaagaccctcgaatctggcctcggctctgtactcaaaaccaagagccaaaaaatccttgacgagatcagcggtctggaaagaaagagaatggagacgcagcttggcgtcgattcagaaattgtgtatgaggaagggcagtcatctgaatctgtgacaaacacatcctatccgcgcccatcaacagacactgacgactgctccgatacatcgctcaggctagggctaccattcttcagcccgaagtgatggaaaatcaggaaacttgacat

SEQ ID NO: 457237 - DNA, 279 bp, Sorghum bicolor
cgtccgagaggataaggttgctgcttctgctgagctgcctaagaggacccctacgctcaatgaaaggatcctctcttctttgtccaggatggctgtagcatctcatcaccggcctgatcttcgagatcggtgctggtgctcctgctgcattcaatgtagccggcgggaccacctacggtagccgagttcattattggctccacaagaaaacttggccgaataatggtgcacgagctcttttctgatgggcacaatgcccgcaccattacagggtcattc

SEQ ID NO: 457238 - DNA, 345 bp, Sorghum bicolor
tcgactcacgcgtccgaaaaaaaaaaaaaaaaaaaaaaaaaaaaaaaaaaaaggaaaaacaaaaaaaaaaaaaaaaatagactaaaaataaaaaaaaaaaataaaagagtagggggaaaaaaaaataaaaaatataattaaaattgggggcggccgttcgaaattaaaaactgggtttaacttggaaacgggtttcccattttaagaggggaaccccctcctccgggttttaatccttttaaccctctttggccccattggccttttggggaaccgagggcgttttttaaacaaggagttaaccggcttaaaaaaggccgttttcaaacccggaaagggttttcg

SEQ ID NO: 457239 - DNA, 439 bp, Sorghum bicolor
cgtccgcttcactctgctcaaattgttgcttcgtataacctggtctccgaataccccggagtagagtagctgcggttggctggatctcagatcggtgatcacataaacaatggtgaaggctgttgctgtgcttggtagcagtgagggtgtcaagggcaccatcttcttcacccaagagggagatggccctaccactgtcaccggaagtgtctctggcctcaagcctggcctccatggtttccatgtgcatgctcttggtgacaccaccaatggctgcatgtcaactggaccacactacaatcctgcgagcaaggagcatggagcaccagaagatgagaaccgccatgccgggatcttggaatgtgacggctggagcaaattgggttgctaacatcagtgttaccgacaggcagatcccactgactgggccaaactcaat

SEQ ID NO: 457240 - DNA, 238 bp, Sorghum bicolor
  unsure (1)..(238): unsure at all n locations
gatcgaacgattgtctgaacaatcatgtacagtatgcataaataaagacatatacaatttacagcatattttattgatcaggtcagaacatgcatacaaatacactactggcggcgcaccgtgccgccggcggtgcccggggtcgtgttcctgtcgggcgggcagagcgaggaggaggcgacncanaacctggacgccatgaacaagctggaggtgctcaagccctggacgctgtcct

SEQ ID NO: 457241 - DNA, 363 bp, Sorghum bicolor
cgtccgaatcgctcaactcatccagtgttgacttatccaattataaaaaggttgtttcaggaggtgtcgcatcaaacaagtatgttaggactcgcttgaatcaagttgctgagaataatggcctacaacttgtatctcctcctccaagcctttgtactgacaatggcgtcatgattgcttggactgggattgagcacttcgctgtggggagatttgaggatccacctgctgctaacgagcctgatgacaagcagtatgagctgcgaccaagatggcctcttggtgaggaatattcaagaagggagaagtgttgcacgatcattgaagaccgctcgagtccatccatcactaacttctatgata

SEQ ID NO: 457242 - DNA, 312 bp, Sorghum bicolor
cgtccgaccacgtcggtgttgctcacgtggacgctcgtcattctaggcatgcaccctgagtggcaggaccgcgcgagggaggaggtcctcagcgtgttcggtagggacaagcagcccaattttgatggactaggtcgactcaaaacggcaagtgtttctttattacaataccatgtatacatgtttgctccaagcctatattacctgctaacattgtctatacctaaatgatatccaggtgacgatgatactatatgaggtgctcaagttgtacccaccggcagtgaccctaaaccgaagaacattcaaaga

SEQ ID NO: 457243 - DNA, 435 bp, Sorghum bicolor
cgttcggtaaaatagctgctgcagtggctgaggaaacatacctacctcttgtgacagcagagaacaaggttgaagctttggcagcgcatgacgtctttgtcgagagcagtggcgcggtaaatacaatttctgcatctcttatgaagatagcaaatgacatacgcttgctaggaagtggtcctcgatgtggtcttggtgaactaatcctaccagaaaatgagcctgggagcagcattatgcctggaaaagttaatccaacccagtgcgaagctctgacaatggtttgtgctcaggttatgggtaatcatgttggtgttacagttggtggtgcaaatgggcattttgaactgaatgtttttaagcctatgatagcagccggattgcttcgatcattgaggttgttaggggatgcatctgtgtccttcgagaaaaatt

SEQ ID NO: 457244 - DNA, 436 bp, Sorghum bicolor
  unsure (1)..(436): unsure at all n locations
cgtncgcccacgcgtccggtggatgtctatggcctctggtgtcattggtcgtttaatggcattccttactgagctttcgttcaactggactggcttcatcaatgccatgatatcaaacatctcattcacttacacgagcatttattccaagaaagctatgactgacatggatagcaccaacgtgtatgctacatctcaaaattgctctcatcgttgcattcacctgcaataattggcgaggccccagctatgtcgatggattagtgtgccattgaaaagacgttgcaaagttgtagtgaccagtctggtgactgtcaccattgataccagatgtacaaccctngagcgagggctcttacacatctgcggcatgtgtgaacgtgtttgcatggtctcaacgtgctgggacaaattcacacaacggatggccgtcatg

SEQ ID NO: 457245 - DNA, 532 bp, Sorghum bicolor
  unsure (1)..(532): unsure at all n locations
cgtgcgcgccatgatccggttcatcctgctgcagaaccggcaggngaagacgcggctggccaagtactacgtcccgctcgaggactccgagaagcacatggtcgagtacgaggtgcatcggctcgtggtcaatcgggaccccaagttcaccaactntgtcgagttccgcacacacaaagttatctacagaagatatgcaggactttntttctctatgtgcgtggacatcactgacaatgaattggcatacttggaatgtatccatttgtttgtcgagatattggaccatttcttcagcaatgtgtgtgaacttgatttagtatttaacttccacaaggtctacttgatactggatgagttcattcttgctggagagcttcaagaaacaagcaaaagggcaattatagagaggatgggcgagcttgagaaactggaatgaaaagaaacaacggtgtggtactggggtgtacattagcataagtctggagctagttctgcccaattgacaaggtacttccatattnttaacgat

SEQ ID NO: 457246 - DNA, 519 bp, Sorghum bicolor
  unsure (1)..(519): unsure at all n locations
cgtccgcccacgcgtccggctcatcagcatcagttcaatttgcatgctgcattggatgttgctcaggaccttgcatggtctactaatgcaatgtttctgagatcagttgatagattcagtgacttcgtcgtgtctgtatatgtaactgctggtcataccagatttatgttgcttcatgactcacggagcgatgatggaataaagagtttctttcaggaggtccatgaactttacatgaagcttaatattcagatatagttcatggcttttcctggttatttactctgagatgactgcgatgcgatgttacaaaattttgcacctacatcattggatatcttttctctgtacaatccaatattcttcatcctttccttcttctgacattatgggcttttctttgtgaaacttttgctgtgcaaatattcctcaatccgctctacttgcctggttctcgcatcacatcttcctatnttgataccaaggttaggacgctngcaaggaaatacctttagcatg

SEQ ID NO: 457247 - DNA, 463 bp, Sorghum bicolor
  unsure (1)..(463): unsure at all n locations
tcgacccacgcgtgcggagcanactctacaccaacacaatcccaagaacaccgagagaatccgaagatgagcgtggagatcctagacgggagcacggtgcggagcttcgtcgaggacgaaggcgccttcaactcctcggtggacggccggttcgccgcgctggacgccgaccacgacggcctgctcacctacgccgagatggcaggngagctcatgagcctgcgtgtgctggagaagcatttcggcgtggacgaggccgcggtggcgcccgacgagctcgcagggctgtaccgcagtctcttcgcgcggttcgacagggacggcagcgggatggtggaccgccatgagttccgggcggagatgaaggaggtgatgctcgcagtggccaacgggctcggcttnctccccgtgcagatggtcgtcgaggaaggcagctttctcaaggtcgccgtcgacagggagc

SEQ ID NO: 457248 - DNA, 472 bp, Sorghum bicolor
cgtccgctagtactcgtggcaatctttctagcagttcttggcctgacggttcttcccgttaatgtcatcgtcgggagctatgtcaccaactgggtccaggacaggtatgtgatgttcgttactcactaactctgaaagccggagagaccattagaccaaccgcattttgctcattctggacttgtttttttccttgctcaaccaactaccaaaggcaaattctggtggcctccgagatcatggtgttgatcggcattgtcatgagcttccgcttcacccctcactactccgttccccaatatgtcacgtcagctctcatcaccttcgtattcgccgaggtgctcgaaagagtgaacctgtccctcctctctcgcgtgatgtcgtcgaggctcttccgcgggacctacaacggcgggctgctctcgacggaggccggaacgctggcccgcgtcgccgccgacatgactatcac

SEQ ID NO: 457249 - DNA, 480 bp, Sorghum bicolor
  unsure (1)..(480): unsure at all n locations
cgtccgattttccagagaagagaatntctannaattgaaaatatacattggtatgggagtgatttatctgaaccacgttgggaggatcctagtagcaactntctntgtatgcacataaatgcggagctggacgagaagctaccagattcaactggaggtgatttgtatatctgtttcaatgcaaacgaggagtcagcaagtgctactttaccagctattgcagaaggatccatgtggttgcgcttggttgatacatcacttgcatttccaggtttcttttcaagagggtctaatcctgaaatacacaaagtgctaggattttcctcatatcaagtaaacgcacatagttgtgttttgtttgaatcgaagagggttctttcctagtttctaatgtcaaccaggaagctcgtgtggtttcagcaataacaagaaactttgtggataccaactttgagaggacctcagtttcaataagatgca

SEQ ID NO: 457250 - DNA, 533 bp, Sorghum bicolor
  unsure (1)..(533): unsure at all n locations
cgtgcgcgaaatccattaacaattttacaattcttttgcaacagtgctgcgaaggatacctgcgaagcaatggaccaatgggccgagcatggtcaagcagagacagctctgagtaacatccttccatgtgtggatgaaagcacaacgaatcgaacattgtatcagagcaaagaggttgtggtgaggcttgttgggatagttaacagagctatatctgctctttcaaatcgaagaccacatcataagcatccaggacagttcatgccttacttatgttctccctacgattcaaacctcaatgatcggccgtgcaatcatagggaggtcacatttgaaaacgcaacaacagtaagttttggtattcttcagtctttggaaatgtttnttttcccacttaagtttttcacatagcanacagtccttttttactctgtttgatttgcatatgtgcgtcacccaactggcatgattttagatagcttggttgatggcgttttcacttttcaggcttggttgaattatacatgcatggt

SEQ ID NO: 457251 - DNA, 586 bp, Sorghum bicolor
  unsure (1)..(586): unsure at all n locations
gtcgacccacgcgtgcgggtgcatgccagatggattggggcgccacctatacctgtggagcaattacaattgcaatcactgattgatgcaatcaaatntatgattgatccaaaggtaaaggaacgagctgttcagctagcaaaggcaatcgaatcagaagatggtgttgatggngctgtaaaatcctttntaaaacatcttccacagaaaagggattccgaggcaacgccaactgcaccacagtcaacattcatgcaaccgctgcttctccctgtaaagaggtgttttggcatggcatcctaattcctaaccccgcatttccaagcacctgctttggctttgtggcaagtggcatcaccggtccggaacaagttgcgccacatgcttaggagaaggggaagtaccaacatgcgtagccagtcgtttcatcctacctataaagattaaagaatgtagaggcctgtttggttccccttactaaattttaatcagctgtgactagtggaactaaactattttagctccttttagtcagtgtgtttggaagtttagctactaaagtgactaaaatttagctggctaaaat

SEQ ID NO: 457252 - DNA, 186 bp, Sorghum bicolor
aaccccccttgaaccggcctataaagcccggcgggtgtgggggtaacccccaggggaaccgttacatttgcaagcgcctaagcgcccgctcttttcgtttttttcctttcctttttcgccactttcgccggttttccccgtaaagttttaaattgggggctccttttagggttccaattaagtgtt

SEQ ID NO: 457253 - DNA, 528 bp, Sorghum bicolor
cgtccgctctcaagctcaagcagaatggatggatggggaacttcgctctgggtgcaagttacatcagcttgccctggtgggctggccaggcgtgtatgggaactcttacaccggatattgttgtcttgacttacttgtacagctatctggtcaaagcatagaaaatggatgctgatgtcaatgatgtgcctcaaccctgtagcttgttccttcatggatgtacaatttccaaatggacaattgacgtatgttgctggtgaggggataacagcaagtggtttaatccctttatttggcgggttactccaagcacatggaaagtgtcctggtgatacaagagtgagcttctctttcaagaacaaacaaggtactaggttcactccaacgtttcagtggcctgacaattccgtttcacttggagttgcacaagctgtagcatggaagaggtctggccttatggtgaggcccagcattcaaatcagtgtttgccccactttcggaggaagtgatcctggaatacgcaccgag

SEQ ID NO: 457254 - DNA, 553 bp, Sorghum bicolor
  unsure (1)..(553): unsure at all n locations
cgtccgagagcaacggattgccattgctagggtnggtttgaagaatgcacctatattgttgttggatgaggccagctctgcaattgagtccgaatcaagtagagtggtacaggaagctctcgacactctagttatgggtaacaagacaacaattctcattgcgcacagggcagcaatgatgaagcatgtggataacattgttgtcctaaatggtggtaggatagttgagcagggcacacatgactctctgatggaccagaacggtctatatgttagattgatgcaaccccattttggcaagggtcttcgccagcatcggctaatgtaattattgttgggcttgttaggtgtaaattatcctagggcatgatcaggtttccttctgctcttggtgcagccattcaggcgccctttttggcacatgaaagtgctggaagttgccgccctgctgatgctgttctcagtaagcggaatgctgacctgatcttgacaaaaaaaattagcttgcagattcaggtaagtaactgtgttgaaactggagggcacaactcat

SEQ ID NO: 457255 - DNA, 617 bp, Sorghum bicolor
  unsure (1)..(617): unsure at all n locations
cgtccgccacgctctccaatccggcaatccctccctctcgggcggcatggccgccgccctctgcctcccccgcgccggngccccgttcatccgtcctccgagcctctcgtttcgcgccgtgggcggctccggtgctccgtcgtcgactcctctccgggcctcccaccgccggcgagctcccgcccccggcgctcccgccgatttcgaagctcgctgacccgccggtcgtggggacgcccgagcccccgctgccgtttaggtccgtggaggcggagatcctccgcgatatcgaccccgtcgtccagctcatcaaggatatcctccactcggagagatacggagatggtgaatgtctctgcccaaaggatgaaaatgtcgtcgtggagaagctcctctcctaccatccacgcgcgcacgacaaaattgggtgtggacttgacgcaataatggttgataggcaccctgagttcaggaagtcaagatgtctttttgttgttcgcacagatggtgtttggatggatttctcataccagaagtgcctccgtgcatacatccgagaaaagtatccgtctcatgctgagagatttatacgagaacattttaagcgtccatgacag

SEQ ID NO: 457256 - DNA, 572 bp, Sorghum bicolor
acgcgtccgcggacgcgtgggcggacgcgtgggctgagcaagcgcaagcgaccaacgcacgctatcgattgagcaatacttgggacgacagcaatgtcccttcagttccgttccgttccgttccatggacaaggtgctggcgttctcgatcctgagcgcgtcgccggccgacatctccgcgggcgccggctccggcgggagctgggcgcggctgtcgtggcggaggtgcgccgacgaccagcaggccgccgccgccgccgtggcgggacgacaacgggaggagcaggaggaagacaaggacaagcgaggctcgtgctcccgctcccggggaggaggaagagcggctcctgcggcggcgccgcggttcgcgccggagttcgacggcatcgactgcttcgagaccatcgtgtcgcactgatgtcaaccaatcatcactacggctcgggagacgcacgcacacgctcttgatgagttgacctcgtcgacaccactggatattttttcttcaacatattattatagactctgatctgacatctgaggatgcagaattgctgatcgatccgatccat

SEQ ID NO: 457257 - DNA, 585 bp, Sorghum bicolor
  unsure (1)..(585): unsure at all n locations
cgtgtcgggagcgttccgccttagagggaagcatacgcgaaagcgtgggtcgacgaagcggaagcgagaatgtcggcttgagtaacgaaaacattggtgagaatccaatgccccgaaaacccaaggtttcctccgcaaggtttcctccaggacggtgcacctgacaacttccactttgttgaggactgggtcaagattggcttccctgccaagatgaaggtgaagaaagagaacgcttcggtgccgttcgatgaccaatgctacattctagagaaggaggccgtgaatgtgtccttggagaacctcaagacctacccattcgtcaaggaagggctggccaacggtaccttaaagctggtcggcggccactatgacttcgtgaaaggagagttcctcacatggaaagtctagagctaaggcacccggacggcccaactcctacatcatcataaatntataccacatatatacctaccgatatgcacccgatcgatgcgaatgcgcggagtactacatgcatgntttcagcaactacatatatacatactcgatcgccccaatgtgaatgtaataagcaatagcatt

SEQ ID NO: 457258 - DNA, 239 bp, Sorghum bicolor
aacgcttctgagccgttcgatgaccaatgctacattctagataaggaggctctgaatgtgtccttggagaaccttaagacctacccattctttaaggaagggctggtcaacggtaccttaaagctggtcgtcggtctctatgacttcgtgaaaggagagttcctcacatggaaagtctagagcttatgcacctttactgtctaacttctacattattataaatctataccacatttatt

SEQ ID NO: 457259 - DNA, 393 bp, Sorghum bicolor
  unsure (1)..(393): unsure at all n locations
cgtccggttgaaacgtgtntttgtcattggtttctcaatcgttgtttttggcaacataatttccacacaaactggaattggcacgtccattgccatagcgggtgttgctttgtactcttacattaaggctaagattgaagaggagaaaaggaaaaagagcgcatgatgaggtgactgctgtgaatattatcgggtggctgagttatacctnctcggacacaacatcgtcgacaatctcgacctacttctatgccttgttttgtttcatcttggtcagttggccattgttgtcccaactgtgataacttgaattctgttgggatggcaggatcaattcgtctagaaactgtgtgactgagcagggtcgctgactatgatctgatcctgtcgatc

SEQ ID NO: 457260 - DNA, 472 bp, Sorghum bicolor
  unsure (1)..(472): unsure at all n locations
cagaccggcggcttctggggaagtacgctggctngttcatctctaccggcacccagggtggtggacaggagagcactgctctcgctgccatgagcaccctcgcccaccacggcatcatctacgttcctcttggctacaagaccacattccacctcctcggtgacaacagcgaagtccgcggtggtagcgcttggggcgccggtaccttctccaacggcgacggctctcgccagccctcccagaaggagttggagctcgctaccgtccagggcaaggcattctacgaggctgttgccaaggtgaacttccagtgactgcaaggtcgggaagacaagcaagaccccaacacggctgagcctaccactgctactgcgggcaatggaagcgcaaaggagactcctacatntgcgcctaccaccaacgcaaccactcagcagcagacgtncactcaaccacagcccagagatgagaa

SEQ ID NO: 457261 - DNA, 541 bp, Sorghum bicolor
  unsure (1)..(541): unsure at all n locations
cgtccggccgctcnttctggggatcactgctgatggctgcgtcgccttctctgatgacattgacatgctcaaaggatcatgtggcaaatcgctcgcgcctttcccacatggtaattaacgactcatcaagcaactgtcagatcagatcagatcacgtcttgacttgtgtgttgccaaacaccagatctctgaaactgaaaatgttgcttgccaatggcaacaactgctgaaggcagtctgaagattaaagtttctgtacaacatccaaattaagagcactcatcctcgttttttcgttttagctgatctcataatgctgcattattgtaggttgcttctactctaacgcccttggaggcctgaagtgctatgagaaccccaagcacaaggtcactgctgttcctgcagacgaggaagaaatctgtggtgcaactttcaaggtggaagggtctacagtcctgacagcgctgcatttttaggagatttccgtgtggaagcgtgggtggagcgcaatgcaatgcagaactngtgtacatgcatg

SEQ ID NO: 457262 - DNA, 508 bp, Sorghum bicolor
  unsure (1)..(508): unsure at all n locations
tcgacccacgcgtccgtttctcgttgaagcattaattgagatgttcccagctgttgagcttgttgagttactggaagcctttgagaaaagaccgcctgagtgcttgcggacagagacactaaaggtatactgcctgtggtcaatctgaaagtgtatgagtggtatcagtaccacacagtcatttcgtttactgtttgttgtcaatttggttcatatctgcatagactctgctcttctcaataactttatctaccttatttatttagttacttggcagcttaccataacttgcttggatcaaaaggctntgttgttattgcatttaagttattggtgaattttgcactttgcagacccggaggagggatcttgctgctgctcttataccaagaggatttaatttggacccaataagcaaatggtcaaaggtgggattagttgtctattactcaaccattttaactggtgctactactgaatatatggctggacattacatgaaacaagg

SEQ ID NO: 457263 - DNA, 498 bp, Sorghum bicolor
cgtccggtttcaacagacacacaagttgccatatggcgtgattcttctcgaagaaggttggttgttgcctttcgaggaactgaacaatcaaggtggaaggatttgcgaactgacttaatgcttgtacctgctggactaaacccttagaggctgggtggtgacttcaaacaagaagttcaagttcacagtggattcttaggtgcatatgactctgttaggaacaggatcatgacactcatcaaatatgccgttggattcctggatgaagaagatgcaggaaccatacctagttggcatgtttatgtgactggacacagtttaggtggagcactagcaacccttcttgctcttgaactctcatcaagtcaaatggccaagaatggtgtcatatttgtgacaatgtacaattttggctctcctagagtgggaaatagaagattcgctgaagtatacaatgcgaaagtaaaggacagcttgagaattgcaaccatcgagata

SEQ ID NO: 457264 - DNA, 335 bp, Sorghum bicolor
cgtccgcgcggacatccaagctgagatccgagcggtgtaacgaagggagcgcctgttggagcgcacgatattgcacccaaggtaagagctagagggagatgttcaaaactaccgtgcagactacaaaccatatatcaatcatttgatagaggctatggagtttgctaatgagggtgctcttactgagacattaacaatgacatgatgcgtggtgactcgagatcaggctattaataccatggttaacgcgctggctgatgtgctggacgttataacatacggtctgaccatgaggccatacatgcggcacatgcatcgttatgagcatgttactg

SEQ ID NO: 457265 - DNA, 410 bp, Sorghum bicolor
cgtccgggttcatcagcaaaggatgttgctaagcagctaaaggaacaacaaatggtgatgccaggccatcgtgaatcaaacttgcagaaggaactgaaccgttacatccccactgctgctgcatttggtggagtatgcatcggcgcattgactgtcctggctgatttcatgggtgcaattggttcaggaactggtatactgctcgctgtgacaatcatatatcaatacttcgaaaccttcgagaaggaaagggcgacagagcttggtttctttgggttttgattagtagctgtggaaccttgactttggctatagctgaattttctttgtagtctgctgtagtgcttaaccagttgtaacttaaaagaagttttattggtaggttgccttcttgcggccacaatcatgta

SEQ ID NO: 457266 - DNA, 416 bp, Sorghum bicolor
cgtccgcggaggaggagtgacaggccatcctcacgctcggagcagttcaacatcctacgccgcatgggcaccgagtaccctggagcgggtgaatatgacaagttctttgaggagggcatttataaatgtgctgcatgtggaactcccttatacaaatcatctacaaagttcaactcagcgtgtggctggccggcattctatgagggactatctggcgccataaaacagacgccggaccctgatgggaggcatacagagatcacatgtactgactgcggaggacatttgaggcatatattcaaaggcgaggggtttaaaacgcctaccaacgagcgacactgtgttaacacccatttcgtttatgtcacactccatcactagtaagaagcctgaccgccgactaacttctaccttta

SEQ ID NO: 457267 - DNA, 409 bp, Sorghum bicolor
cgtccgagttaatgttgtagttgcaatcaacaaatttgcatcagatactgaagcagaaatgaatgtggtgcgtagtgcatcaatggctgctggtgcttttgacgctgtcgtctgcacgcaccatgcccatggtggtaaaggagcggtcgagcttggacttgctgtccaacgagcatgtgaaagccagacagaacctctgaagtttttgtatcctttggaatctagcataaaggagaagattgagtcaattgctaagttttatggtgccagtggtgttgaatactccgagcaggctgagaagcagattgagatgtacaccaagcaagggttcttcaacctccccatctgcatggcgaagacccaatactcattctcacacgtgccatccatgaagggcgcgccgaccggc

SEQ ID NO: 457268 - DNA, 346 bp, Sorghum bicolor
cgtccggttgcgcttaaacaggcaactactccagagtacagagcttaccaagagcaagttatcagtaactgtgctaaatttgcgcagagcctgactgcaaaaggatatgaactcgtctccggtgggactgacaaccatttagttctggtgaatctcaagaataaggggatagatggttcgagggtggagaaggttttagaaagcgtgcatattgcagcaaacaagaacacagttcctggtgatgtttcggctatggtaccaggaggcatcaggatgggaaccccagctcttacgtccagaggatttgttgaggaagatttcgctaaggttgctgacttcttcgatg

SEQ ID NO: 457269 - DNA, 285 bp, Sorghum bicolor
cgtccgggctcgtacccaatgacctcacgctgatacatgggctcatgggtgactcgacgtttttgttggtgtatcagtacatgacgcttaccaggtacagtatgaacgccttgtgcactgaccttttctgcttactgccgtggaacagaccttagaacaagtttatttgctcttgccatggattccagtacaacaaccagggcaaggtggtctatggaccggctcctctatcgttggcgcttatttatgcctactttgactacggcaaagttcttttttttccgt

SEQ ID NO: 457270 - DNA, 379 bp, Sorghum bicolor
cgtccgctcccactcactctctcgcagctgctaagcgaagccatgggcaaggacgacgtgatcgccgagttcatcgcgacgctgctgttcctgtgacatcaccgtcgccaccgagatcgggtacaagcaccagacggacgcgacggcgtcgggcgccgacgccgcgtgcggcggcgtgggcgtgctgggcatcgcgtgggcggtgctcctcgcggcctacgccgacgcggtctacggtgttccacctcggcggagacgagagcggactatgaaggggcgtgctctgctgtgcagttggagcggtcctgggtcttagacaacccgtctctttgaggactgtcattagaggaagatcaaggggtgcgcttaagggaaaaca

SEQ ID NO: 457271 - DNA, 340 bp, Sorghum bicolor
cgtccggccctgggccagtttctagcacactccaaggttatgccatggccaacatgctcttctacagtggtagcctgctttggggagcggataggactgatcctgtcatgaaattgtctttcctctggaggcggccacgggtggtgagaaaacacatggattttatagctggtgtattggacggacacattcttctgggctgtgacccgggtacctggaaagcgtatgtgtcgcaatttatgttcctggtggtgaagtttgttccatcatggttgcgggatataaagctggaaacgctaaagaagatagcagctgggacttcggagttggcatgaacatg

SEQ ID NO: 457272 - DNA, 424 bp, Sorghum bicolor
cgtccgcccacgcgtccggacccctcggagcttaggagattggcctcgaggaaggaggagattcacaacagcctccgaggcggctcctaccaccagatgaggaacggttcccgggagttcatgagcacgctcgccaattacaagatccccattgctgtggccaccacacgcccacggaaggttattgaggaagccattgaagctgttggtgtgcgcagcttctttgatgcggttgtggcagcagaagacgtgtaccggggcaagcctgacccagaaatgtttctgtacgctgctcagctcctcagtttcatccccgagaggtgcatcgtgtttgggaactccaattcggcggtggaagcagcacacgatgcccgtatgaagtgtggtcgggtcgcaagcaagcacaaaatctacgagcttagtg

SEQ ID NO: 457273 - DNA, 465 bp, Sorghum bicolor
cgtccgcccggttcggactctgactcttcgtcgtcgtcttcgtcctgcgccaccccacgccgcggcccaagctcccccgcctacacccagcaatggccgcagagttacaggcaatcgattgacattcttagtagcgtgcactcatccaatctgagctttttggggactccaacgctgagcagactgtcaaattctttccttgccatcaccgattcttttcggggcaaagcccctgaaacaatctcaaactttgtcaagccacttcttggtcccacatcaagtgatgagcagcagcagcagcagcatgaagatacccgaaagagttctcagtacattatgccctcaagaaaatcatctttggaacaaatccctgaggatcaaaagccactggtagttggtcatgaggcgtctcgtaatcgaaattgctcttacacccaaggagtgatgaatggaataaatgttcta

SEQ ID NO: 457274 - DNA, 370 bp, Sorghum bicolor
cgtccgcttttcttccgtggaagccttgcctacatatttactgaaagtcaagcggtagctaaagcagtcgccgacctttcgcctctgctagccttctccatattgttgaacagtgttcaaccagtgctatcaggtgtcgctgttggtgcgggctggcaaagtgtagtcgcctatgttaatgttacgtcatactacctgattggcattcctcttggagcagtcctgggctatgtggtggggcttcatgtaaagggcatttggatcggaatgctgcttggaacactagtccaaactattgtgcttctcttcataacgttaaggactgactgggaaaaacaagtggtgactgctcaagagagactaaagaaat

SEQ ID NO: 457275 - DNA, 500 bp, Sorghum bicolor
cgtccgatcaagtggaactaagttatgatggaacccttcttgatgctgcaagcatggcagcaggagtctcttctcccaacttttcagcgccagccaagtggcaacaagatatattgtcacagctaaatctgcatggagagggtgccattttaaaggtaagcttaggaggcccagacattgttgatggacgcttgttagctgctctaagggtgcttcttgcggatgatccagaggctttgcacaagcatgacctgaaaacactgatgtcccttgatgtgcaagctcctttaggccccgctattgaagcatcagcactccgaacagttcttgccctttgtgcgattgctctccaacacttccacacaaagataatggacgacgaggccattctaagaggggggccacctcttaccacggagctggctgtccagtttagaatgcagaagaagttcatgatcgttgacgtgatgcagaatgtcagcaggagaatcaagatgcta

SEQ ID NO: 457276 - DNA, 357 bp, Sorghum bicolor
cgtccgtacatgcttccttgacattgagaaggcttgccaaggattggaccaatccattgggtcagatggagtgcttaacatgacaatattccgtcagggaaaagaaatcgaccttattgttggaactgatgtaagagatggcaatggtacaacccgaatggttaattggtgtggatgcattatccaggatcctcattcagcagtgcgtgcacttggctttttaccagaagaaggtcatggtgtttatgttgctagatggtgtcatcgaagtccggtacatagatatggcctctatgctctccagtggatcaatcaagttaatgggcaaccaacaacggatctggaaacctttataca

SEQ ID NO: 457277 - DNA, 423 bp, Sorghum bicolor
cgtccgcaagatcaactgggccctgaaggacaagcaagagttcatcgacatcgtggagactgtttacaggggcgcccggaaaggccgtggtctggtgattgctccaaaggactactccacaaagtaccgttactaagaagtgaagcattcacgcggagcagcagctgctgtttgctagcctagtatgttccccttatgcaatctattaggggatgtttactcagacagtcagttcgactggcaatgcttaactgtatcttggcatgccctagtatattcaagttgctggcgttaactatatcttggcatgccaaagtgatcttgtgcagttgtgatttgaggtgatcgctggagttcctccccccaaaaaaaaaaggatttgcgttttttcttcagattatatttgatgttaacattctttat

SEQ ID NO: 457278 - DNA, 533 bp, Sorghum bicolor
  unsure (1)..(533): unsure at all n locations
cgtccggtggtatactgcctcgtcaggcttgcccccgctttttgacgagcacaagataagaactgctctgcagaaaatatgggaattcaatgtgatgaaggttaaaggaggacggatgggagctgtaaatggtatgactccaaagggaaaggtggacgagacatgcatgcaatctcgtgaaatctggactggtgttacatatgctgttgctgcaaatatgctgctccatggaatggagcatcaaggctttacaaccgcagaaggaatttttattgccggatggtcagaagaaggatatgggtattggttccaaacaccagaaggatggaccacagatgggcattatagatccctcgtatacatgcggcctcttgccatttgggcaatccaatatgcagtttctcctccaaaggctattcttgaggccccaaaagttaacctgatggaccgaatacatatatctnctcacatggcccgagcaattagcgagataagcattagaaagatagcacctgacaacagatgtttcccta

SEQ ID NO: 457279 - DNA, 310 bp, Sorghum bicolor
cgtccgcctacgcgtacggccacgcgtccgtctaccttgaaggcacgctgcccggcgactatggattcgacccgatggggctctcggacccggagggcaccggcggctacatcgagcccaagtggctggcctacggcgaggtgatcaacgggcgcttcatgatgctgggagcggtgggcgccatcgccccggaggtcttcgggaagctgcgcataatgctgccggagacggagatgccgtcgttcaagacggagaatggctcgcccgctggcaccacccactacgggctccacttgtagtcgctctgcgt

SEQ ID NO: 457280 - DNA, 404 bp, Sorghum bicolor
cggtccggatcccggtcgaccacgcgtcctggcggcggcggcatggacgcgatgccgccggcgttcaaggccgaggcggcggcgtgggcggtgccacgtgacggcgtggtgtcccgaggagcaggtgctgcggcacccggccgtgggctgcttcctgacccacagcgggtggaactcgacgtgcgagagcgtggccgccggcgtgcctatggtgtgctgatcgggcttatcggaccagtacaccaactggaagtgctccagctaggtgtggggcctcagtactacgctggcatcaacggagtagacgttgcagacaagctgtaccctctgtgggatctttgacccgctaggctagtccagtgacctttgatctgactgcatttttaaggagtatgagatcaaga

SEQ ID NO: 457281 - DNA, 235 bp, Sorghum bicolor
cgtccgccgaacctgaagatggcgcttacggagacgctgccgctgcacccgacgaggacgctgctggtgcccctggagacgatgcgggacacgaccatctggggctactacgtgacggccaacacccgcgtcttctgcaactcctgggccatcggcagggaccccggagctggccgcccccgacagttaaccccgaccgttttggggagcgcgttactctacgtcgccttggcta

SEQ ID NO: 457282 - DNA, 309 bp, Sorghum bicolor
cgtccgcccacgcgtccggtcgttgggttgaacttggatgagagcaaagtacgccgtgctggacctgctgagaatgttcgtgtcaaattgtccggagttgaagaggaggatgtaatggctggatttgtactttcaagtgttgctaatcctgttggtgcagttagtgaattcatcgctcagttacagattcttgagttgcttgacaatgctattttcactgctggctacaaagctgtgttacatatccactctgttgtcgaagagtgtgaaattgttgagctcatataggaaattgacatgtagaaaaag

SEQ ID NO: 457283 - DNA, 247 bp, Sorghum bicolor
cgtccggccaaggagagtggtgttaaaggttgtgcttattgtggtgggcttggccatcgtgtcagtgactgtccaaagctggggcaccaaaagtccatggcaattgctggctcgagaaaagactactttgggggcggtggttaccgaggtgaaatatgattgctctaggttgatgcttgagtttggtttttatgtgcttaataatcttatctttagtatattcatgtttcatgcttcagttagctct

SEQ ID NO: 457284 - DNA, 318 bp, Sorghum bicolor
cgtccgaagacagccattgtgttctgcaatactaagaagacagcggacatgcgcgctaaggatctggacaaggcaggctttcgcgtgacaaccctgcatggtgggaagtcacaagaccagagagagatcagccttgatggatttagaaaccgtcggttcaatgttgtttgggctactgatgttgcaaggcgtgggattgatattcctgatgttgcacacgtgattaactatgagatgcctagttcagtcgacacatacacaacatctatttgaaggacaggttgtgctggaaagaaaggagtggcgacttcattttta

SEQ ID NO: 457285 - DNA, 258 bp, Sorghum bicolor
cgtccgctaccagctgatccatgccagatgggccatgctcggtgccgctggcgctgtcatcccagaggcctgcaacaagttcggcgctaactgtggccctgaggccggatagttcaagaccggtgccctgctcctggacggcaacaccctgagctacttcggcaactgcatagtcatcaacctggtggtggccgagatcgcagagatcgtgctacgcggcggtgccgagtactaccggatcatcaacgtgactgtacc

SEQ ID NO: 457286 - DNA, 269 bp, Sorghum bicolor
  unsure (1)..(269): unsure at all n locations
cgtccgcccacgcgtccgcccacgcgtncgcccacgcgtccgtggagtgttccctgataccaacacatacaatgtggtcctccagctnttgctggagggaaggaagctccgagaggcagctgcaatatttagtgagatgatcaagaatgaatgttggccaaacgaggaaaatngttcacttgcacttcgcatgtgtttggtacacgctattgggagactgggatcaaagtctggagctgcatggtggagaatggcttgccacctttaga

SEQ ID NO: 457287 - DNA, 252 bp, Sorghum bicolor
cgtccgtgctttttctagaggccccagtgactgttcagggtgttcggtttttgcagctctcacctggggaatttttctttacaacattaaaggggtcaggttattggggccttttacttggaagtcctatcattttgtatgagatcattgcatttggtatcccaggtttaacaagggacgagcggaaatttctcgggcctattgggttggggtcttctgttctattctacctaagcattttcttctcctaca

SEQ ID NO: 457288 - DNA, 271 bp, Sorghum bicolor
  unsure (1)..(271): unsure at all n locations
cgtgcgcactaacaactactactcccacaactactgtgtatgtggcgcatgcacacgcaggtgggcctgctgaacgtggacgggtacgacgagtgnctgctggcgttcatcgacaaggcggtggacgactgcttcatcaagccctcccagcgccacatattcgtgagcgcccccggcgcctgcgaactcgtccagaagctcgaggtatgcatggtaaacactagtacatatagtacgagctagtagtactccaggctacagtgacccaatc

SEQ ID NO: 457289 - DNA, 279 bp, Sorghum bicolor
  unsure (1)..(279): unsure at all n locations
cgtccgcccgagaaggacgaggccgaggactacctgggcatcgacctgcacctgccgttgttgcagatggtgaagagctggcaggacggggaggccagcatgacggacggcggcagcatcctgagcctggaggacagcaagggcagcatccctgctcgccctgctgggttcgcggagtccttcaccttggccgacggccggngaagaggactggatgaggaagaagacagagcgtcttcttggtatcgatcgcatgatctgatcatatctaccgggagg

SEQ ID NO: 457290 - DNA, 314 bp, Sorghum bicolor
cgtgcggtcatttagacctgtcatccttccggattctgcccggcttgaattaaagataccagatgaggcaagaagcaatgcatgggtttcatgggatggcaaaaggaggcagcaactgtcaagaggagactctgttcgaatatccatgagtcagcacccactcccaactgttaataaatctgaccaaacgggtgattggttccgcagcctgatcaggtgcctcaactggaacgagagattggaccataatgcactatagacactagaatttttttttgttgctgtacatatctatctagatttacataccgaaa

SEQ ID NO: 457291 - DNA, 282 bp, Sorghum bicolor
cgtccgcggaactcgtgtaacgcgtctcacttgaggagtgaagcggtatcagctggcgtttggagagtccatgcatcaagggacagcgagctgcaaggcagtagcgctagcagtccgtttgacaggcagcaaggtgaagggaggggtcctgcgccaccctttccagcatcttcagttggaaacaggcaagcttaagctcaagctcaagcctcctctgggagcagggagaatccgagcagagtcattagggttgttccccacactgcgcgcactgcttcggag

SEQ ID NO: 457292 - DNA, 147 bp, Sorghum bicolor
cgtgcgatttatcaaattcgcgaggcaaatcaaatgattgaagagtttatgttggctgcgaatgtttctggtgctgagaagattttgagaggggttgcccttatgttcattggtaagggggcattctagcccaacaaaagagatgct

SEQ ID NO: 457293 - DNA, 385 bp, Sorghum bicolor
  unsure (1)..(385): unsure at all n locations
cgtccgagcccggngagctcaagtcctggtccttctaccgcgcgggcatcgccgagttcgtcgccaccttcctcttcctctacatcaacccaggtgtgactttcgggctgttcttggccaggaagctgtccctgactagggccatcttctacattatcatgcaatgcctgggtgccatctgtggagctggagtggtgaaaggcttccagcaggggctntacatgggcaacgggggtggtgccaatgttgtcgcccccggctacaccaagggtgatggccttggcgctgagatcgatggcaccttcatcctggtctacaccgtcttcttggccactgatgcctagaggaatgccatggactcccatgtttctatccttggcccact

SEQ ID NO: 457294 - DNA, 261 bp, Sorghum bicolor
  unsure (1)..(261): unsure at all n locations
cgtccgcaaggttctgatggcagatttcttcatggctgaccagctaaccagccagatcccactngtaagacacctcgagttcacggggtgttgcttcatggctggaacttttagaactcacgaatatggaagctgtaccagcagctctctatacaaaaacctggcgtacgtgcttttcttgctgtcatactactggagagcaatggcacgtttgagaaggtacctggaagaaggccatgatcttaaccagcttgtttatgc

SEQ ID NO: 457295 - DNA, 283 bp, Sorghum bicolor
cgtccggaagcacaccgatgcttcaataaggaactaaaaattgggcaaaggatgatgacaatatctacagttggtgttcctaatacgagtgaagatgctagcgtctcataagcttcagtcaacactggctgtcagtctgcatgccccaaatcagaagctgcgggagacaattgttcctagtgccaagtcttaccccttgggagcactgatggatgactgcaagaaatacttccttgaaactgggcgcagagtatcctttgagtacactctgctagctgggatc

SEQ ID NO: 457296 - DNA, 278 bp, Sorghum bicolor
  unsure (1)..(278): unsure at all n locations
cgtccgatccgcgagcgcggcgcgcttccccgggcagcggcggccactggagcagccctcagcagccactgaggagcgacctgctgccgccggccaccgtcgcctgccgagctcgctctcggtcttcttcctcgtctaatgtgaactttgggagaggggatgatgctgatnagttgctcnaggatttgctcaaacggcacggcgaggtggtgtacagctcatgtggaccttcgtctgccaccnttgaggccgtcgacnacgccgagtgcttgtccttt

SEQ ID NO: 457297 - DNA, 305 bp, Sorghum bicolor
  unsure (1)..(305): unsure at all n locations
cgtccggatggacctgtcgatgacgtttccgcgcctctccaacctcacaatcgaccactgcatagacctgaaggagctgccatcaagcatctgcgagatcagctcgctggagaccatctccatctccaactgccacgacctcaccgagcttccctacgagctgggcaagctgcactgcctgagcatcctccgtgtctacgcctgcccggcgctctggcggctcccagcgtcngtgtgcactctgaagaggctcaagtacctcgacatctcgcagtgcatcaacctgaccgacctcccggaggagc

SEQ ID NO: 457298 - DNA, 183 bp, Sorghum bicolor
  unsure (1)..(183): unsure at all n locations
cgtccgcccacgcgtccggtataattgatgttgctttgagtaagggcttccaggttgaggagcgacttgtttcagtggatgaactgcttgatgctgatggagtattctgcacaggaaccgctgttgtcgngtcttctgttgggagtataacatatcaagggataagaggggaatacggccacc

SEQ ID NO: 457299 - DNA, 230 bp, Sorghum bicolor
  unsure (1)..(230): unsure at all n locations
cgtccgattaagcacggcttcagctataatggaaaagatttcttgtactcaggaattcttggtcagccacttgaggcatacatcttcatgggaccaatctagtatcagaaactgaagcacatggttcttgatatgatgcatgctcgagctagtggaccacgggtgttactgacctggcaaccaactgagggaggaaaccgtgatggatgcttgcgtctngnngaaatgga

SEQ ID NO: 457300 - DNA, 382 bp, Sorghum bicolor
  unsure (1)..(382): unsure at all n locations
cgtccgctcggagcaagataggactagttagctacatacaaggcaagaaccagcagtggagcgagggagacactgagagagagagagagaggaaacaatggcggacaaggaggatcttaagctcctcggcctgcagctgagcccgttcgtgatccgcgtgtgcatggcgctgaccatgaaaggagggagtttcgagtacgtcgaggaggacctgaacaacaagagtgagctcctggtcaagtccaacccggtgcacaagaaggtgcccgtgctcattcacaacggtaagcccgaccccttcgaacagctgnacgtcgacgagctgttcgcttgctcgacgatactttcagacgcgaccccttcgagcgcgccaatggtcgct

SEQ ID NO: 457301 - DNA, 467 bp, Sorghum bicolor
  unsure (1)..(467): unsure at all n locations
cgtccgcaggggtgttttcctgatgtttgtacatatacaattctcatgaatggttcacataaggtgaggaaccttcctatggcaagagagttctttgatgagatgctgagcaaaggtttgcagccagattgctttgcctataatacaaggatttgtgcggagctaattctaggggatactcataaggctttccagttgagggaggtgatgatgttgaaagggatatatcctggtacggtcacatacaatgttattatcgatggactgtgcaagactggtaacctgaaagatgccaaagatttgaagatgaagatggtcagtgatggtttacagtctgactgtgtataatcacttgcttgattcatgcacactgtgaaagatgactcctaagtgaagcatgtgaactncttaattgcatggtctcagatggtttgcaggccctcctgtgtgacctacactatattaat

SEQ ID NO: 457302 - DNA, 294 bp, Sorghum bicolor
cgtccgctaacatggagctttgtcaacttgtgcaacctttcaggtggtcattgacttcaccgcctcctggtgtggtccttgccgcgccatcgctccactgtttgtcgagcacgccaagaagtacactcaagctgtcttcctgaaggtggacgtggacgaactgaaggtgagagcacggtgtcccgacagcgactcaccagttcccctttccattacggggtactgatgctgtgttccttgttccacaggaagttactgcagagtacaagatcgaggcgatgccgacctttcact

SEQ ID NO: 457303 - DNA, 231 bp, Sorghum bicolor
  unsure (1)..(231): unsure at all n locations
cgaccgaatccatgagtggacctccaaaggtgataaacaagacagtggatggaaaactactagagccttatgagatagctgctgnngaggtcccagaagagtgcatgggatcagttgttgaacttttgggaaaagagcgtggacaaatgggtgacatggaagctgatggncctgagggaacaacatgggtaaattacaagatttctaccagaggcctnattggacttcgga

SEQ ID NO: 457304 - DNA, 183 bp, Sorghum bicolor
  unsure (1)..(183): unsure at all n locations
cgtccgccgacgcgtccggtgaaggaacgtgttctgcaaccagacgctcaggtaaacggctggctctcggacaggtactcacaaagctatgcgcgggccacggcgctggaaacccttgatactcggactgagacttacattctgttagatcttccagaggaactggttgtngaaaggctggtt

SEQ ID NO: 457305 - DNA, 197 bp, Sorghum bicolor
cgtccgcacgatcgtgtgttggcatctcctgggatcagtcggtctcagagtgcgcaagagcagatgcactccagggggctgaaatactgttcgagcccactgcactaggatctgaaccccacgatgctaacctggatccccgttaacattgtgagcgggtgatgcaaggccatgctggggccaacttggtccctcta

SEQ ID NO: 457306 - DNA, 344 bp, Sorghum bicolor
  unsure (1)..(344): unsure at all n locations
cgtccgcgcgctccgccaaggacgagtgggccgtgtgcaaggtgttcaacaaggagctggcggcgaggaccgagccaatggcggcggctgtggccggcgccgagctcgagcgcgtcggttcgctgggctttcttaacgagctcctcgactccgcggagctgccggccctcatcggcgccgacgtggacgaggtgatcgacttcaagggccccgcggncaccttcggcctgcacgccggcgcgccgggcacgagctacctttcggtgaagatggaggagcacgcgctgctgcatcagatgcagtaccagcaagatgccgcccccgatgttctacttgagccagta

SEQ ID NO: 457307 - DNA, 123 bp, Sorghum bicolor
  unsure (1)..(123): unsure at all n locations
cgtgcgggcctnccaactcttcctcgcttgaggttcaataaagaaggcaatcttcttgctgttactacagtggacaatggttgtaagatacttgcaaatgctgatggactcagaactctacgc

SEQ ID NO: 457308 - DNA, 329 bp, Sorghum bicolor
  unsure (1)..(329): unsure at all n locations
cgtgcgctgctgttccatacgatgatgatgaagatgtcctttccggttcagttctctcaataaaagagcaaattgaagaaccagcgcgagaaaagtgtactcatatcaatgcttttcagttgatcggaatggcttcttcccttgatctttctggtttatttgaggaagtggatgcanctcaaagaaagantcggttcacttcaacgcatccgcccgaggatttattcgacaagttttatggcgttgcgatggagatgggattctgagttcataggagtgcaagcaagctcaaagtcttgaagaatatcannngttccaagaagtccagg

SEQ ID NO: 457309 - DNA, 300 bp, Sorghum bicolor
  unsure (1)..(300): unsure at all n locations
gacccacgcgtgcgcggacgcgtgggcggacgcgtgggcgagctctggctcgggatcctggtccggctcaaactcaggctcgaacgcggngtccggcggcggcgcaggatggtacgctggctctcacgccggctcgtacgccggctcgaacggtggaggctcatgttcgtacgcggtctncaacggcggntcctacgctggctcnnacggaggatgctctggtttgnnctgnggctccaacgccggatgctgctgtggctctggcnctggctcgtatgcggggtctcgagctggctccta

SEQ ID NO: 457310 - DNA, 232 bp, Sorghum bicolor
cgtccgcggacgcgtgggcgagcacggcatcgtcagcaactgggatgacatggagaagatttggcaccacaccttctacaacgagctccgtgtcgcccctgaggagcaccccgtgctgctcaccgaggcgccggtgaaccccaggcgaacaggagaagagacccaatatgttgagacttaatggccgcagatgtgcatcagtggcttcttatgaggacacaagatggtgatt

SEQ ID NO: 457311 - DNA, 324 bp, Sorghum bicolor
  unsure (1)..(324): unsure at all n locations
cgtccgcggacgcgtgggcgaggacgaggccccggaggctgacactgacatgccccctctggaggacgacgccggcgagagcaagatggaggaggtcgagtaagcctggggggtaccctgtgtcccggctgaagagcgagttgttagcgtagctattctggttatcgtgtctgaacgtctcggtttattttgtgtggtttacttatgctagcctgcaatgtaatggggctggatgcgtgtgttatcgaactaagtaccgtaatgttggtataatagtgctgctattatccgttaaaaataaatttnttggttttatgattttat

SEQ ID NO: 457312 - DNA, 343 bp, Sorghum bicolor
cgtccggcacttcgaacaagagggcaaccgagttatatcggttgaggagttagcacaggaactaaatctcgcgccaactcattactccatcgtgcaagattggatcagaaagtcggacggcaagcttaactttcttgggtttaccaaatttttgcatggtgtcacaatacggggctcaaatacaagacgacactaacggttgcaattgattcgctttaattaaagccttataatattggccgatgtgtacctgctttgtgcggccttgttgtaagacattgtggtgcgcgtgtgcgaagttgtagcatgagactgatgaaattgtgtaaaaaggatgttttgt

SEQ ID NO: 457313 - DNA, 257 bp, Sorghum bicolor
  unsure (1)..(257): unsure at all n locations
cgctgtgcgcgcacatctggagggccgtgacgcgcgcgcggcggctgctggcggccgacaagacgacgacgttccgtatggccgtgaactgccggcaccgcctgcgcccggcgatctccccgctctacttcggcaacgcgatccagagcgtggcgacgacggcgaccgtggccgagctggcgtncaacgacctgngctgggcggcggcgcggctgcacgccaccgtgacgtcgcaccgagacggggcgatccggcgc

SEQ ID NO: 457314 - DNA, 231 bp, Sorghum bicolor
  unsure (1)..(231): unsure at all n locations
cgtccgtggaatttaccatcatttcgagtgggctattggaacagatgaaggaaaatctgatattctaaactgtgaaaatgtgggcatgaatgggcaagtgcacaggaaaggccttgatctttgatcagttgaagactatcntgttacactgagagcatggaggctggatggccgctgtacagaattctgtgtgaaggcccatgcctngagggccagtcatgtgttcacagg

SEQ ID NO: 457315 - DNA, 362 bp, Sorghum bicolor
  unsure (1)..(362): unsure at all n locations
cgtccggngtcctacaaaagagtatgttcagcacaaaatggcacagaaggctgccgagctctggagcatcatttctcagggaggttatatttatgtttgtggtgatgcaaaaggcatggccagagatgtccatcgcacactacataccatcgtccaggagcaggggtctatggacaactcgaagacagaaagctacgtgaagagcctgcagatggaagggagatactngagagatgtttggtgacgtatcaaccaaatgtgaaccccgtgcttactgcgagcttccccgcaaaggggggaaaaaaaatcagaggcgccggctgggaaatgattagtagaaaattacatgatctgtttgaatg

SEQ ID NO: 457316 - DNA, 329 bp, Sorghum bicolor
cgtccggaaccctttagaaaccctactccgtcgaccatcccaaatacacacaaatccttgatattctatcaaccccacatccaccgcagacgtggaccgaccactcttcacccagaagttctttcacaacaccgccaaaatgagcgaagaccacaagggcgtacacaacctcatgaacaaggcgcagctcgaggaggtcatggcagtcaaggacagcctcatggtcgtcgactgcttcgcggtatggtgcggcccttgtaaagtgatcgctcccaaggtcgtccagctctctgagaagtaccccaacgcgcgcttctacaagatcgacg

SEQ ID NO: 457317 - DNA, 384 bp, Sorghum bicolor
cgtccggctgagcactacttcaacatgatgaaggaagagtacaaaatagagcctgttgtggaccactacgggtgcatgattgacatgtttgtgcgcttgggacaattagacgatgcattttccttcatcaaaaggaccgggtttgaaccaaatgaagccatttggtctagcttggttgctggatgccggagccatggaaacatggaccttgccttctatgcagctgatagactgctcgagctccagccaaaaggagttgaaacctatgtcttactgttgaacatgtacatttctaatgagagatggcatgatgtggctagagtgcggaagctgatgaaacaagaagatcttgggattctcagagaccgcagctggatcacaatc

SEQ ID NO: 457318 - DNA, 226 bp, Sorghum bicolor
cgtccgtttggaagtgcaaggcctgcaagaaaggaaatccgttctcgttctgaggcattacaattgcaggaatgggctgctgagcattgctctgcaccttatcgggcccctgaattatgggacttgccaagccatgccgatatcgatgagaggacagacatctggtctctaggatgcaccctttttgctatcatgtacaatgtttcaccatttgagtatgctcttg

SEQ ID NO: 457319 - DNA, 154 bp, Sorghum bicolor
cgtccgcttgtggggacacagacgaggttccacctccccgtgtggctgggagtcggcgccgccttcatgtgggccatcgacaggacatagagacgggcgaagctaagggatggcaacagtggcatcttcaggtaccctgcctgctgggaggttt

SEQ ID NO: 457320 - DNA, 211 bp, Sorghum bicolor
actcaacaacctactaagagatgcagctctacgcttcaaagattttgaatacaatagcaagattctcaaagaggaagttgagaagtataaaaggcatgctgaacgattggaaccttgtatcactgataccgtgcatttcatgaaccagtcgattgtgcagaagaagaaaatattggttgaaggtgcgcaagctaccatgttagacatagac

SEQ ID NO: 457321 - DNA, 300 bp, Sorghum bicolor
cgtccggtgactgccactgctctccctgcatgactggatgggtcttgatgtcgtccctgatgcctccaaaacattcaatgacagcattggcacacgacgcagactatgattaggaacggtccgatggtagtgtttgagttcccgtcgtctgcagctgacactgaggcgattgacacgaagctggctgcgcttacaaccacaaagggtgtcaccaccatcatcaacggctgtgattctgttgctgctgaacagaaggctgacgctgccgtccagacgcaccacatttcgaccggcggtggt

SEQ ID NO: 457322 - DNA, 184 bp, Sorghum bicolor
cgtccggccaagaacggcgtcaagttcggcgaggcggcgtgactcaaggccagtgctcaaatcttgtccaaaggctggctgaactacctgagcagcacgtacctagtgcacgcgcagagcatcctgacaatctgggcatgccaagtcgtgctcataggctctgtggagggctaccgcgtcagct

SEQ ID NO: 457323 - DNA, 250 bp, Sorghum bicolor
cgtccgcggacgcgtgggcggacacgtgggcggacgcgtgggctgtctcgtggtctcgtgggaaccatgcagtacccccagtctaagaagcgcggtcgtttactgagaacgaggaggaagagcgctgaacaagatgtcatggctgacgtacgtcgacgaccacctgatgtgcgagatcgatggccatcacctcagcgccgtcgacatcttctgccttgaccgcagtctatgggctcagtccacgggcttt

SEQ ID NO: 457324 - DNA, 303 bp, Sorghum bicolor
  unsure (1)..(303): unsure at all n locations
cgtccgngactgatgatggacttaagttttttgaattcctccaactagcacaaaccttgtgcttgcccattgcttgtagggaggggccatcatctatcaagaggcttcatcatcaacaatagctgcattcttaaaggattgttgtaatggtattgagttagccagggtagacccctagactgcatagggttcattacttgcaacaatgggacattcagagccctttcatctttattatgnnttaattggaaatctagaatgttcaaattactactattaagataactacttaaagttctattc

SEQ ID NO: 457325 - DNA, 395 bp, Sorghum bicolor
cgtccgcccacgcgtccggtggatcctcgcgtacacatcattttcccaactgttcccactattggggtttggcaatctgcctgagctcgtgagggtggaggaaatatcacagaccattgattctgagaacttcacagtgcaaaactgtataaagttttcaggacctttggctacaacctcagttgccaccaatgcaaaatttgaaatcagaagccccaagcgcgtgcagatcaaatttgaagaaggcattgttggtacaccacagctgaccgacttcattgtgctaccagagaagtttgaattgtttggacagaacatcgacctgagtccactgaaaggcatatctacatctatcgacaatgcagcatcctcggttgcaaagaccctatctgatc

SEQ ID NO: 457326 - DNA, 413 bp, Sorghum bicolor
cgtccgggactgatgatggacttgggttttttgaattcctccaactagcagaagaccttggtgcttgcccagtttgggtggtaaatgatggggccagcatctatcaagaagtttcatcagcaacaatagctgcattcgtaaaggatgttgttaatggtattgagtttgccaggggagaccccgagactgcatggggttcagttcgtgcagcaatgggacatccagagccctttcagctttattatgtttcaataggaaatcaagaatgttcaaagtactactataaagataactacgtgaagttctattttgcaataaaagcatgctattcagacaataaaatcatatcaagctgtgacagatctgcaattcaccaatcaacccaactgatttggatgaatgtcaagtctata

SEQ ID NO: 457327 - DNA, 301 bp, Sorghum bicolor
cgtccggttagctcttcactattaatatatgatccacttattcctcttacaaagtttcttggttttttttttgcctaagctggctataagcctgcgttgtgctctctctcatgacttgtctccttcacacttatcatttagccagcttacagcccatcataatacttgctcttatagttaggtaggtggtcaatattaatacatggctcatttatctctcacaagagtgcttcatctctctcctctatctcagcatttagccggcttgtagcctactataataattcggctaatacaatca

SEQ ID NO: 457328 - DNA, 220 bp, Sorghum bicolor
cccgaatcccggtacacccacgcgtgcgggacgcgcgtagggtgtgtgtgagagacgaccatcccaccctctacaacaacaatggccctggagacgtgcttcatagcgtgggcggtgcacgcctcccctgccgctggtggcaaagacagcatgctcctcttcgtcggcagcagcagcggcagcggcagttacctggttctgtcttcgaagctgtccgact

SEQ ID NO: 457329 - DNA, 273 bp, Sorghum bicolor
cgtccggtcaaatcgaatcttacggcatatgtatagaacattaaatatagattaaaaataactaattgcacagtttgtctgtaatggacgagagaaatctacagtgtccaaatctaaaaaaaatagatctaaacaagtcccgagtaaaaaaccaaggatgcgagctggatcagtcatcaccaaagatctgggattcgactgaaatactcgtcacatcgtatcccaagtctattcttcctatacgtaaaaattagatctaaacaagtcccgagc

SEQ ID NO: 457330 - DNA, 516 bp, Sorghum bicolor
cgtccggcgagctgcttactgtggatgagccatactctgatatgcgtgctgctgaaattattgggggcattgtaaacgattccctacgtcctgaaatcccttcgtggtgtgatcctgagtggaaggggttgatggaaagctgttggtccagtgatccagctgagagaccgtgcttcactgatatatctcaaaggttgaggaaaatggccgctgcaatgaatgtgaagtaaaggtttggaagccataaatggatcatgtaagtgttcccacatccaatatagtgattacaagaggaaggcagagttcaaactggattatgagtatgtttcaaatgtcttggcagcatctcagtttaccctactccaagtgattatttatcaagtgcttacttcatggaagaaaaagtatgtcatggagattccaaagcatgtttaatgatatttttttttaatccttgcagtaaccggctatcaaatgccttcggtcgaaaacaagtatgctatatagcgtattgtc

SEQ ID NO: 457331 - DNA, 306 bp, Sorghum bicolor
cgtccggcgagaaacaacgcaagcgaaagcagagcagaaggaaagcgagaagccagagcagcgagcgaagcagcaagcaagctagagcagagagctagcaagcacgccggcgagcgagagcgagagagaccaggcaggcaagatggtgcagcaacaagcagcgaaggaggtgatcccgctgctgacgccttacaagatgggccagttccagctctcccaccgtgtggtgctcgcgccgctgacgaggtgccgctcctacggtaacgtgccgcagccgcacgccgtcgtgtactactcgcagcgcgc

SEQ ID NO: 457332 - DNA, 398 bp, Sorghum bicolor
cgtccgcccacgcgtccggcgttttattggcgatgaaaatggcaaggtgaaggcccttgaggtagtgcgtgtgaagtgggagaaggtggatggaagatttcaactcaaggagatcgaaggatcagaagagattattgaggctgatctcgtcctcctggctatgggattcttgggtcctgaagcgactatcgctgagaaactgggtttggagaaggacaacagatcaaacttcaaagcgcagtttggagactttgcgaccagtgttgatggtgtgtttgcagccggggactgtagacgtggacaatcactggtggtttgggccatcactgaggggcggcaggctgctgcatcggtagacaagtacttatcaaagtatgatcagaatgctgcaggcgaca

SEQ ID NO: 457333 - DNA, 358 bp, Sorghum bicolor
cgtccggaaatatacggctgaagatccaacaaagtccagactatgctgatcagccagattatgaagctggactggaggacttcaaggaacgtgtgatcaattatgaaaaggtctacgagccagtaggggaaggttcttacatcaaaatgattgacatggtaaaggggcaagatggtcagttacaggtaaataatatcagcggttatctccctgggaggattgtcttcttcttggtgaactctcatcttacaccacgacctattttgcttaccaagcatggtgagagtttacataatgttagaggaaagagtcggggtgatacagttctaagtgatactggagaactttatgcaaagaa

SEQ ID NO: 457334 - DNA, 558 bp, Sorghum bicolor
cgtccggttcctattcaagcatgtattggcacaaaggtcattgcgagcgaagccctgtctgccatcaggaaggatgtcctatcaaaatgctatggtggtgatataacaaggaaaaagaagttgctgaagaaacaggctgaaggaaagaaaaggatgaaggcaataggaagggttgatgttcctcaagaagcattcatggccgtgttgaaactggagaaggaggtgctatgaaagagctcatggaactttgtgtctctgtaaattaaagatctcttcttgtgcacaactccactccgcaagtttactcaagagagttttgagacaacatggcactgtgattcaacctggcagctctggaccaggggaaccagtctaactacagatcactcccagaacaaaagctgctaatctagcgactggcattcactaatgttgtgttgtatgtcaggttatgatggtaaacaatcatgttgaacagagttttgcctggcacatgtatacgaaatatgtcaaaaggcgtcatggaatccaatttcttgtaatgctacacaaacttgt

SEQ ID NO: 457335 - DNA, 452 bp, Sorghum bicolor
cgtccgttctcttctccgggaaaatttcagatcccggaaacaactggaattgaagtagccactgatgctgttgccgtgttcttgagctcatagattgctatttgttaatgctcaaattgtgtgcctgaccacagaaatctctaggcgacgaatcgagcaggtagaggaggaatcaggcatccatggctgagcatcttgcgtccatctttggcacggagaaggaccgcgtgaactgccccttctacttcaagatcggcgcgtgccgccacggcgaccggtgctcccgcctgcacaacaagccgtccatctccccgacgctgctgctgtgcaacatgtaccagcggccggacatgatcaccccgggcgtggacgcgcaggggaaccccatcgacccggagcggatccaggaggacttcgaggacttctacgaggacatcttcgaggagctgagc

SEQ ID NO: 457336 - DNA, 361 bp, Sorghum bicolor
cgtccgatctgtaactacttagtaacacacagtgagaaagtgtctgacgcgtacaagaactacacgcttattttccttgacaagaacatcaccaacgctggggaacttatcaacgtttggcaagtagccatccaacgtgcatacccaatcctgattattgctgaggatactgagcaagaagctcttgctactctcgatgtcaacaagcttacaggatcattgcagactgctgccatcaaaggccatgcttttggatagcgcaagactcagtacttggatgatatcgccatacttactggagcaactgtgatcagagatgaagttgggctggcacttgacaaggctgacaaatcagtccttg

SEQ ID NO: 457337 - DNA, 356 bp, Sorghum bicolor
cgtccgatcatggttaccggcaagatctattgtcctggagtgtttgaaatcaagagaaaatattgatctaagtggagaaatcatggttttggatagattctgcgcgtggaaacttcatctatttgagcttgaagaggagctgaagactgatcctctgaccaagtatgtgctgtatcaggatgagaggagcaagagttggcgagtccaagcagttggagttgctcctgacaggttcgagagccgaaaggctctgccagaaaagtggaggggcatgagagatgacgaactttcagcagaaaacggcattcctggttgtgtgtttgtccatatgagtggcttcaatgggggcaacaaga

SEQ ID NO: 457338 - DNA, 298 bp, Sorghum bicolor
  unsure (1)..(298): unsure at all n locations
cgtgcgaaaggatatgcaatcattttctaccggggtaaaaactacaggcgaccccaaatcatgaagcctaggaatctattaacaaggaggcggagcattggcacgctctatagagctgcaaaggcgggaggccttgaagcatcacatctctagtctgcaaggcaagatctggaagttgcagtcacaacttgtacaaacaaaggttgctagcgaaaagcangatctgaagctgcttcaaacagttgaggatgacctgtcatcagatgatgatgatgatgtaaagggatgatgggaggag

SEQ ID NO: 457339 - DNA, 385 bp, Sorghum bicolor
cgtgcgcagccagctcctgtaccttatggaaaaggagttaatctggatatttggtcacattcctgggttttctgctaccctgcgatctgtgagggccaaactcaatgctgccaaggacaagtatctatcaccaccaacaccagtctcaccgtcctcacaaatggaggagaaacagtggaatttctcttttacattggtttggaactctatagtgtggcttgtgcttctgaacttcttcattaagataatcacgtcaacagctcaggattatctcaaaaagcagcaggatatggagatggaactgatttctgattccccgaccctggaacaaaactgactactggtgcaactaggggtggttatttcagctgctagctgcaaaaga

SEQ ID NO: 457340 - DNA, 254 bp, Sorghum bicolor
cgtccgcctacgcgtactcctgtaactactccattaattctatccattgatctgcatacttaacaattcatgttactcctggggacgcttggagctacgccagttactaggatatcccctctcatgccactgctctctcttataatgacctcctcaagagcttccttacgtgctatatccccttggaatttaccatagctgggaccatcttccaaggtcgtacccaagctaagacacttggaacgcatcttttt

SEQ ID NO: 457341 - DNA, 289 bp, Sorghum bicolor
cgtgcgcgacggtcgaccgaaagaaacagccgtggctgatattcatcgctcatcgcgtcctcggctactcctccggttacttggacggcagggacggatcgtttgctgagccaatgtcccggcaaagcctccagaagctctggcagaagtatagggtggacttggcgttctacggccaatttcacaactacgagaggacatgccctgtctatgaggaacaatgcctgaacctagagaagttccactacttgggcaccatgaacggcaccaatcacgtaatcttttgggg

SEQ ID NO: 457342 - DNA, 392 bp, Sorghum bicolor
cgtccggaaatccgaaggcaaggtgcggttgactggcttgggtgcccgtgacagtctccgcctagaggcaggcctctgcctgtacggcaacgacatggagcagcacatcacgccagttgaagccggcctctcatgggcaattggaaagaggaggaaatcggaaggcggtttcctgggtgcagatgtgatcctaaagcagcttcaggaaggcccaaagatcaggcgtgtcggcatgatcacgcaagggccgcctgcacggagccacagcgagcttgtgagcagcttcggggagagcatcggcgaggtgaccagcggagggttcagcccgtgcctgaagaagaacatcgctatgggctacgtgaaatcaggaatgcacaaggctgggacagaat

SEQ ID NO: 457343 - DNA, 424 bp, Sorghum bicolor
cgtccgggaagatgctcctgccccttcggagagcaagacctcaaagaagaagaaaaggaaggacaagagtttaaaggagggaaaagaaacacaagaagcaggtgacgggtcagaggagactgccagtgcaggacctgatgaagataccactgctgtggatgtgaaggagcgcttaaagaagatggcttcaatgaagaagaagaaatcgagcaaagagatggacacagctgccaaaattgccgctgccgaggccgcagcgaggagcgcaaggcttgcagcagccaagaagaaagagaagagtcattacaaccagcagcccgtgcggtaaatgggcataaaattttgggtgctctgagtttgatatccccttgttcgttttggactcacaataaaacttcttttttgagttgtggtatttatgact

SEQ ID NO: 457344 - DNA, 521 bp, Sorghum bicolor
  unsure (1)..(521): unsure at all n locations
ctgcgctccacactaagaccggccccgagggggagaaggacccgagcgccccccgtcccaatgggagccctctggcgaggctgcctcctattccttgtcgacagcaaactcntcttccatacgctcgaaaacatcgtcgaacgcgccgtcgtcccgtggtatgcagagtttcggaacactgggctggagagatcaaaggcccttaaaaatgatctggaattgttcaatcaacatggtcacacaatttccgtaaccatttcccctggcactacatatgcctttcttcctgaagagcttcttataagggatcccaagcatttatttgcatttctatacgtttcttttcttatactcttgaatccttatgtttgtaaaaagtttttatataattcatacaaaaataacttgattttctatttgaggctattttctattttttaaaactctaaaaaatttaaatattatttaatatttttttttttaaatttctccttttttacttctttattttttttttattt

SEQ ID NO: 457345 - DNA, 335 bp, Sorghum bicolor
cgtgcgctctcgcgttacgcgcaaccacttctccctcgactccaagtccaccatcggcgtcgagttcgccaccaagtccctgcagatggagggcaaaacaggaaaggctcagatctgggacacagctgggcaggaaaggtaccgtgcaattacaagtgcctactaccgtggtgccgtgggagccctgcttgtgtatgacatcacaaagaggcagagcttcgagaatgttcacaggtggcttcgtgaactccgtgaccatgctgactccagtattgtgataatgatggtcggtaacaaatctgacctaatccacttgagagctatctctgaggatg

SEQ ID NO: 457346 - DNA, 385 bp, Sorghum bicolor
cgtccggaaatattgtatctaagtgctcttgtcacaggtggacttgggtaatttagtttcgggactctcgcttgtgcttgggagtgatttggggacagcggccaaatattttcgagagaaaatttgaggctcccattcaccctcctctggtcgccgttttcggtccttcaataccaatcaaaccagttcctgagccaaccgaacatcttcttcaaaagcagctattatatcatcatgcatgccaattgacgaaaggtctacaattcaccgcacgacacatggacaaactactattttctaatgtggctctagctagcttgttatattatatggaggctctcatggaagtgtaggatcctttcaaaggtagtggcaggcgtactct

SEQ ID NO: 457347 - DNA, 363 bp, Sorghum bicolor
  unsure (1)..(363): unsure at all n locations
cgtccggaaaggttcaagctacttagccacttgaaattcccatggtcggtcaatgatacgtctgcgagtcctgatggcaaactagttgctgggcttggcgatagctctgagtgtttggtagctgatgctcagtctggcaaggaaatcgcaagcctcaatgggcacctagactactcgttctcatccgcctggcaccctgacggccgcgtccttgccaccgggaaccaggacaccacctgcagactgtgggacgtgcgcaacctctcgcggtctntcacggtgctcaaggngagaatcggcgcggtgaggggcctcaagttctcgtcggacggccggttcctggcaatgtcggaggcgcggact

SEQ ID NO: 457348 - DNA, 448 bp, Sorghum bicolor
cgtccgcccacgcgtccgctttgtgagcagtgggtatgctttcgtccatgcaaactccattgctgatattgtggctgttgagcgactagtccgtgtggatcaggtcgacccagcattggttcagatgggtctcgcacacttcactgccaagcttggctcggcctctactgacctggagaaggctgaggctcatatcggagtcgatgttcacagcgcgctcaatgctgcattgactggttaattggtggcatcttaaattgtctgtttttttcattgagtctaagtttgcaaactcatggacatgggatggagggaatgatcctaaataaattatactccatctaaaacatggacatttgttccttgttacctgaatcctgcatggatttctttgtgcactggtaaatattttaactttgagctcaagacctggagctgttattttttt

SEQ ID NO: 457349 - DNA, 406 bp, Sorghum bicolor
  unsure (1)..(406): unsure at all n locations
cgtgcgggccgcagggacgtgtggagaaggagaagctggactccttcaacctgccgttctacgcgccgtcggtggacgaggtgagggacgtgatcaggcagagccaggcgttcgacgtcacccacatccagctcttcgagtccaactgggatccgcacgacgacatggaggacgacgacggcggcctcgtgctcgacggcgtccagagcggcgtcaacgtcgccaagtgcatcagggccgtgatcgggccactcatcgcgcaccacttcggcgaccacgtactcgacggcctcttcgagctctatgccaagaacgtcgccgtgcacctncagaaagtgaagaccaagtaccctgtcatcgtcgtttcactcaaggcatcaattagtcgtgcgccaaagaaccaagc

SEQ ID NO: 457350 - DNA, 444 bp, Sorghum bicolor
ccggtcgaccacgcgtgcggaagaaatctcagtggcaagatgtaattgatctcaatcttacaggtgtcttcctgtgtacacaggctgcaacaaaagtaatgatgaggaagaaaaaggggaaaattatcaacattgcatctgttgttggccttactggcaatgttggccaagctaattatagtgcagccaaggctggggtgattggtttcacgaaaacagttgccagggagtatgcaagcagaaatatcaatgtgaatgctattgcaccagggttcattgcatctgatatgactgccgaacttggagaagagcttgagaagaaaatcttgtcaaccattccattaaggagatacggccaaccagaagaagttgcaaggcttgtcgagtttctggcccttaaccccccaactagctatttgaccggacaggtgcttacaattgatg

SEQ ID NO: 457351 - DNA, 283 bp, Sorghum bicolor
  unsure (1)..(283): unsure at all n locations
cgtgcgaatacaaactctgacattttcctacaaaaagatgaacccattttgtctaccttttgcaactacaaacatacgttcgtgctatactcgctatttatctcnaccttcttttcactaattactctatttttacccttttacctactaacaacttttctatcttcaacttacttaaacttataataacactattaacatatcaatctttcttattttatgtaccatatctttttattctttttaaaatctttatataaatatttatctattatttattaaa

SEQ ID NO: 457352 - DNA, 255 bp, Sorghum bicolor
cgtccgggcacctaagagagatgaatggatgaccacattgccaccagagagaaaagcaggagtgccgatgcattcaactaggtcatttagtatgaatggtaaagaaggacgtggagacacaagtgtctggactgatacccctcttgatagagcacaaaaagcacaacaaagctatctagaagcctacaataagacaaaggcgattgcagaaagcgaggatgtaaagagcaaaaacccggatgcttcaattgtaga

SEQ ID NO: 457353 - DNA, 253 bp, Sorghum bicolor
cgtcgcgcgaaatcagactaccaaaatgtgatggtttttcagtcctctacgtacgggaaggtgctcgtcctcgatggggttattcaggtgacggagagggatgagtgtgcctaccaagagatgattactcacctgcccctttgctccatcaaagatcccaagaaggtgttggttattggagggggtgatggtggtgttctgcgtgaggcttcaaggcattcctctgcggaacctattgacatctgttgaattg

SEQ ID NO: 457354 - DNA, 260 bp, Sorghum bicolor
acgcgtcgcgctcaagacgaaatcaaatatttgacagaccgcatacagaatggtggcacagaaattgtggatgcaaaggctggatgaggttctgggactatgtcaatggcttttgctgctgcaaaattttgtgatgcatgcttgcgagctatgcggggcgatgctggcattgtggaatgctcatatgttgcatcacaggtgacagaactgccgctctttacctcgaaagtgcggcttggccgtggtgaagctgaggagat

SEQ ID NO: 457355 - DNA, 432 bp, Sorghum bicolor
cgtccgcccacgcgtccggcggctaagcaattaatccatgggttgcttcagagagatccctcttctcgacttggttcaagtgccggtgcaggggatatcaagcaacatcccttttttaaagatatatactggccactcatccgttgcatggtgatctggaaattgagcctttgaaaagtatcttggataattgtttggtacatcactaataaagaacataacttcgcatgtgcaggagcccccagagcttgatgttccactgaaactaactcggaaggaacctgaactaacagtgaagcctgaggaggatactcatgctcagattcttgacacattttaagggcaggctgtaccaataccaaccccggcgccccgcgtggaaagaacgttgttgagcatgtacatattaataaaagagttttcatcggcaag

SEQ ID NO: 457356 - DNA, 473 bp, Sorghum bicolor
cgttcgaggacagcgtgggtcaatttcctggatttggaagaccctttgtgttcaatgcagagatcttaaaaagagttggacgtacatctgaggccaaagattgagctcgagtggctctgaaatcaccatggtggacacttggctgcagttacgaagaggctgctgaactagctgggtgggaggatgagcagctcgagtttataagagagaaggtaactgaggagggtaagcgtgaggatctgaagaaaggaaaggctccagaacaggtggttcttgacgaggcagcattcttaatggatttagcgtctgtggatggtaactgggatgaggttgtggatcggattgctgagtgttacataaaagctggctttatgacattgcaaatttcatggctacagggaatagatgttagatttccctttatccaaaaaataatacttagctaattatagggcgggctgtttatatgatca

SEQ ID NO: 457357 - DNA, 396 bp, Sorghum bicolor
cgtccgacgaaatggtgtaattgaatttggcgaatttgttcgatctcttagtgtgtttcatccagatgcaccagaagaacgggaggttgcagtgggcatttaagttgtatgacttaagacagacaggctttatagaacggcatgagttaaaggagatggtgttggctctgctggatgaatcagatttggatattgcgagcgatgctgtcgagatgattgttgataggacatttgatcaggctgacacaaaaggtgatgggaagatagatcaagaagaatggactgcatatgctaaagataatccatatgtgctgaggaatatgacccttccctacctcaaggacattactatggtattcccaagctttgtgatgcactcaaaaatcagcgaaacag

SEQ ID NO: 457358 - DNA, 413 bp, Sorghum bicolor
cgtgcggcaaaactttcagattttggcttagcaaaagccggtccaactggggataaaacccatgtatccacacaagtcatgggtactcatggatatgcagctccagagtacattgcaacaggccgcctctctgcaaaggcagatgtctatagcttcggggtggtgttgcttgaattgctcactggaagaagggccctggataaatcaaaaccaggctttgagcagaacctagttgactgggccagacctcacttgggcgacaagcgcagactataccgtatcatggacacgaagctgggaggacagtatccaaaaaaaggcgcaaatgccattgcaagcattgtcttgcaatgcatttgcggtgaccccaaactgcgtcctcctatgttgcaagggtttgaaagacctggaac

SEQ ID NO: 457359 - DNA, 289 bp, Sorghum bicolor
  unsure (1)..(289): unsure at all n locations
cgtgcgcccacgcgtccgctttttcaccgctggtcctgatgaggtaaagtgttggcagatcagacgtcagactaaagctggtcaagctgctggtgcaattcacactgatttcgaaaggggctttatatgtgctgaggtaatgaagtttgaagatctgaaagaactgngaagtgaatctgctgttaaggctgctggaaaatacaagcaggaggggaaaacctatgtggttcatgacggggacatcatcttnttcaaattcaacgtgtctggtggcgggaagaagtaaaaa

SEQ ID NO: 457360 - DNA, 382 bp, Sorghum bicolor
cgtgcggttcaagagtgaaatcaagggagttcaaggttgaagcaaacgttggagctccacaagtcaactaccgcgaaagtgttgtccaaagtgtggagaaatacaatatgtccacaaaaagcaatctggtggatctgggcagtttgcagacattattgtgcgttttgaacctttggaagctggaagtgggtatgagttcaagagtgaaatcaagggaggggcagtgcccaaagaatatgtaccaggagtgatgaaaggattggaagaaagcttacccaatggtgtcctcgctggttacccatttgtggacttccgggctgtgctggttgatggctcatataatgatgtcaattcaagtgtcttagcattccaaattgcaacc

SEQ ID NO: 457361 - DNA, 342 bp, Sorghum bicolor
acgcgtccgcaagcagctcaccctagacctgtgcagccaccccatctccacaatcacacacttacatcaaacactgccagtcgaggagcatcatggcgttcctctccatcatgtacactcaacgaccactactctcctacccagcaccaaggccagcacgaacctatccgactacctatcgtacgcctactttccagcacccacgcctggcgccagcgcacaccgcccgttcggcgacacctacgtctacagcctggacttcttcctagaccgctgatcgccggcatactacaacgtgctggccaagcgcctgtggagctacaacaagcacttccgatcccc

SEQ ID NO: 457362 - DNA, 488 bp, Sorghum bicolor
cgtccggttgcttcagttcctgctgctgcctaactgtgattttcgtccttcaccgccgttgcccgcacgtgacacgcatggcggcaagcgctgaaccgtccaccggctcggcaacagccaacaacaggcttgcgttgcgcaccgactcggctcgtgtcggttctgtcgccaccgcgcgcgggccacggcgctccgggatctcggtgaccgcttctcgtcagagaactatcagacaaggatggcgacttacgagcccaagaacattctcatcaccggtgctgctggttttattgcatcgcatgtcgccaaccgcctggttaggaactacccgcactacaagattgttgtcctcgacaagcttgactactgctccagcctaaagaacctcaacccctcgcgggcttcaccaaatttgaagtttgtcaagggtgacattgcaagtgctgatctggtgaactaccttctggtcacagaatcgattgacacca

SEQ ID NO: 457363 - DNA, 456 bp, Sorghum bicolor
cgtccgggcaaaaaggccaccgtacctatcctcgcacgctccctccctcccggtgccgtcgccccgccaccgaccgatcgatcggtcgtcggctcggtagccgccgccggatccggatcggccggcgccatgtcgaaggccagggtctacgccgacgtcaacgtgctgcgccccaaggagtactgggactacgaggcgctcaccgttcaatggggtgagcaggatgactatgaagttgttaggaaagttgggagaggaaaatacagtgaagtctttgagggtattaatgttaacaataatgagaaatgcatcattaagatcctcaagcctgtgaagaaaaagaagatcaaaagagaaattaaaattcttcagaatctttgtggaggccctaacattgtgaagctgcttgatattgttagagatcagcattcaaaaacaacccacttgatctttgag

SEQ ID NO: 457364 - DNA, 420 bp, Sorghum bicolor
cgtgcgagtagtgccaaatggcaccaaaccctttccaaagtccataccgcacttggtggattaaatatttatgaccttcttgaaccattcctggaccggaccaacaccaaagaagggattccacaaaagaaccaactggcttcaaggttcaaagatcttggggtgacttggaaggccctttcagttagaaattgaatgcctggaccggcctggcctttgagagcttctggaagagatgggcgtgttccattatggcaagagcttgctggattaagtccccggggaattccatggatgaatgatgaaagtgcaaccgcatggcttaacaatgattacctcagatctgcgattcatgctgaaccaggcaggtcaattggaccctggcaggtattcacagaattagattttgatcatgatgct

SEQ ID NO: 457365 - DNA, 316 bp, Sorghum bicolor
cgttcgacacatggcaaatgattcgaagtcactatgagaatattagtggcatcaactacgaccttcctcgtgtaattgcgcaggcacctacgatgtgaaggtggggagcatgttggtggcaacatgtatgataatgttccacgtggagatacaattatcctaaagtggattcttcacgattggggcgacatggactgcgtcaagatcctaaagaattgctatgcagctctctcaaggaacgggacgaatatcattctggagtgcatcctcccagagacaccaaacgaaacactaacatcacagctagcgttcaact

SEQ ID NO: 457366 - DNA, 409 bp, Sorghum bicolor
cgtccgcaaatggggtgacaaatgccactttgcacatggtgaaaaggagcttggcaagcctaagttgatgggcagctatatgccacctcccgtggggccaagacgcgcactggtcattttgcacctccaccaatggccagccctggcttggccactccagctagcttcggcgcttctgccacagccaagatcagtgttgatgcatcccttgcaggtggcatcatcgggaggggtggagtaaacacaaaacagatatcccgagtcaccggggcaaagctggccatccgggaccatgaatcagacaccagcttgaaaaacattgagcttgagggcacctttgatcagatcaagaatgctagtgctatggtcagtgagcttattgtcagcatcagtggcaatgccccttcac

SEQ ID NO: 457367 - DNA, 385 bp, Sorghum bicolor
  unsure (1)..(385): unsure at all n locations
cgtccgggactgctacgtggactccatggtgaagctgaccatccccgaggacggcgggaggccgctgacggacggcgagatcgtgagcctgggctccgagttgctcagcgccggcaccgacaccacggccaccgcgctgcagtggatcctggcgaacctggtcaagaacccggcgatgcaggacaggcttcgggacgaggtgtccagcgtcgtcgttggcgccgacggcgaggtgcgggaggaggacctgcaggcgatgccgtacctcaaggccgtggttctggaggcgctccggcgccacccgccgggccacttcgtgctcccgcacgccgtgcacgaggacacgacgctagatgggtaccgngtgcccgccggcgcgcccgtg

SEQ ID NO: 457368 - DNA, 532 bp, Sorghum bicolor
  unsure (1)..(532): unsure at all n locations
cgtgcgcccacgcgtccgcccacgcgtccgggagtcgtattcgtctggtgttgatgtactgctctcattgcgagatcttcagctaggagcgagaggagatctgaaagtgattgtcccaggacgaangaggcagttcattcttggtgaacaggaaacttcgctatattgctataaggctattttattggacgccaagaagcaaacagaaacatttgtgtaccactgtggagtttttattgtgcctaaggctcgggctcaggaatggttattttcttcagaagaaggacagtggcatgttgttgaaagtgcaagggctgcccgtctaattatggttttcttggacagcagacatgcaaatatcgacatggatattattaagaaggattnatctccccttgttaaggaattagaacctggaaatcctgaagaggaggcccctataccgttcatgatggcaggtgatggtggtaaacaaagacatattctgcaagaggcaacttcagaaataactggtccaatggttgtggaagat

SEQ ID NO: 457369 - DNA, 259 bp, Sorghum bicolor
cgtccgcttcgcggtcgacgagcgcccaccattaatggtgttgccagtctcaacaagacactatcaacaatttcctttaggactaaacattgccatggacataccagatagatccaccctgtagtcaaaatgtgtggcatcacatcagctagagatgcataattggctgtaaaggcaggagctgaccttataggcttgatactgtggcccaactctaaaccctctgtctcgtttttggaggcaaaagaattttcaagag

SEQ ID NO: 457370 - DNA, 440 bp, Sorghum bicolor
cgtgcgggcccctgaaccggagcctacgttccagattctgacgaacccagcccgggtcgttccagcccaggagaagttcataaaattcctagaggacagcaggtacaagccggtgaaggctgccccctcaggattcgtcctcctccaggacctcaagcccacggaggccgaggagctcgccctaactgacgcgccgtcaaccgctgccacgaccaatgccccggcatccagtgccagcgagccagccgccatggctgtcgacgatgagccccagccgcccccggctttcgagtacaccgaatagaggtgatgatgatcctcggatcagggtgtatgggttgggttgggcttgctggagtaacttcggattggcggatgactgaacctcggcgtttcacttattcatcatttatttaacttgcatatacttttgctcaaaa

SEQ ID NO: 457371 - DNA, 417 bp, Sorghum bicolor
cgtccggagagatgctggtctctcgcagccgcagcctgttccaatcggggcactagccactgcgcttgctaatgccccaccagatcagcagagactgatgcttggtgagaacctgtatcctcttgtagaacagctagagcgtgagcaggctgctaaggtcaccggcatgcttttggagatggaccaaacggaggttcttcacctgctggagtcaccagatgctctcaaggccaaggttgctgaagctatggaggtcctccgctctgcccagcatctccagcagagcaatgcctcccccgagcagcagctggctaatctatcactgaatgatggtgttgtttccagctgaatgtttctgatgatttggaaactgctctcaatttttgcttgataccatcctatctagagtgcaatgac

SEQ ID NO: 457372 - DNA, 272 bp, Sorghum bicolor
tccacatacccgggccgacacacgcgtgcgaacataaaaataaaactaaacatccctgactattatgctcccacacagctgttcaaacctaaataaaaattacggagcgtttcttcgtgactttttttctatcctcaatttaacctttttccctattttcatcattaacctttccttctacaaatttcttattcgccctgctatgtactttgatctcatagttgatagccagcccattgttcactactacaacatttgaacaacattgtttt

SEQ ID NO: 457373 - DNA, 269 bp, Sorghum bicolor
cgtccgcccacgcgtccgcccacgcgtccgcggacgcgtgggtgagaaagttttcgccaatgcgggtaaaactattggctacaaaattggaactatgattgaaattcccagggcagctctagtggctgatcagatagcagagcaggctgagttcttctcttttggaacgaacgacctcacacaaattacttttggctacaacaaggatgatgtgggaaagattattcccatttacctggctcagggtattcttcaacatgacccctttg

SEQ ID NO: 457374 - DNA, 345 bp, Sorghum bicolor
  unsure (1)..(345): unsure at all n locations
cgtccggcgccgccgaccgccgccgccgtcatcctgcggcacgcgtccacctcctgtcggacggtggacgccctggggctccggggccaccgcgccggcgtcgtcgagggggatgatggggcgctgcanaaggcagtagcacttgtgctgcagaacaaggaagattttgtcgctattcttttttatgcttgcgggtgtcctgtttctaaaattttctggacagattttcaaaagctgtcatccttttttccaacaattgctcatttttcttttgaagaatctaatatcaaaccaaggtgcgtctttctaaaagagataaacaactgcagctagattttactatac

SEQ ID NO: 457375 - DNA, 325 bp, Sorghum bicolor
  unsure (1)..(325): unsure at all n locations
gagccgatggagctcggcggcgtcaggtaccaggcaggcgtgatgctgatgctgacgctgctgtgcatccaccacgacaagggggtgtggggccccgacacaagcgagttcaggccgcanaggtttgccgaggggatctccaaggcgtacagggacgcgccggcgttctttccgttcggctgggggccgagcacctgcatcgggcagagcttggcgctgcttgaggacaagatgggggtctccatggtactgcagcgctacgggttccagctctcgccgggctagaaggacgcgccggtttcccacgggatgctgcaagcggagc

SEQ ID NO: 457376 - DNA, 243 bp, Sorghum bicolor
  unsure (1)..(243): unsure at all n locations
cgtgcgcgaactcattcttacgatgccgtcatacaccagtcttgagaggagggtgaccatgagggcctttggtgcaaacctggttggtaccgagccaacgaaagggatgggtggaacagtgagaaaagcancatagctttatgagaaacatcctagtgcatacatgcttcaacagtttcagaatcctgctaattgtaaggtacattatgagacaacgggtccagaaatattggaggacacact

SEQ ID NO: 457377 - DNA, 276 bp, Sorghum bicolor
cgtccggaatgatgcaactctttatgcctgtttctcagcatatccttcttgttccgatgctcgagtcatgttggacaacaaaactggacgctgcaggggttatggttttgtctccttccgtaatcaacaggaagctgaaactgctataacagaaatgacttggaaatggctttggagcagacaaatatagtgcaactgggcaacaaagaacaattcaaaagagaaaccagaaactgacaatcattatgcagttgtactaacaaatggtagcttcag

SEQ ID NO: 457378 - DNA, 238 bp, Sorghum bicolor
cgtccgagcagatgaggttatcactgcatttggaaggttgcggactatgtttggatgtgattattataacatcaagccagatctattttcatgggccagggctctttcaaatgcctatgtacccatcggggcaactcttgttagccaagagatatcagatgttattcattcccagagcaataagcatggttcatttgctcatgggtttacatactctggtcattcaatttcctttgct

SEQ ID NO: 457379 - DNA, 167 bp, Sorghum bicolor
cgtccgggtgcctctgatcctgggtatctggggaggcaagggccaagggaagtccttccaatgtgagcttgtcttcgccaaaatgggcatcgagtaagcgacaatgcatgctatatatgctagccgactataattctgtcatctacgtacgtatattagtaataaaa

SEQ ID NO: 457380 - DNA, 179 bp, Sorghum bicolor
  unsure (1)..(179): unsure at all n locations
gtcgctgaccgtgggcgcgcagatcctgcggtcggagggcgcgcggagccgcttctggggtgtctccgccaccatgctgcgccagacgctctactccaccacgcggatgggtctgtacnacattcttatgaccaagtggacacccccggcggacaacaacgggaacggcggggtccttc

SEQ ID NO: 457381 - DNA, 415 bp, Sorghum bicolor
  unsure (1)..(415): unsure at all n locations
cgtccggacaaaacaggatttgttcctgaggatgctactatagttggaaacacttgtctgtatggagctacaggtggtcaggtatttgtgagaggcaaggcaggagaaagatttgcagttagaaactctctatgtcaggcagtggttgagggcaccggagatcattgctgtgagtacatgactggtggttgcgtagttgtacttggcaagtgctgtatgaatgttgcagctggaatgactggtggccttggctacattctatttgaggatgatacaccttttccccaaggttaacaaggaaattgtcaagatgcagagagtgaatgctgcanctgggcagatgcagctaaagagcttgattgagtcctatgttgaaaaaacgggcagcgagaaaggagccacgattttgagggaa

SEQ ID NO: 457382 - DNA, 349 bp, Sorghum bicolor
cgtccggagatcaagaaggtggccaagcagggacagatgggagctgtaaaaattatggcaaaggaccttatccgcacaagacaccaaatcacagaattggatgccctcaagtcccagctacaaggtgtatctcttcgtattcagactctgaaatcaacacaagcaatgggtgaagccatgaagggtgtgacaaaagccatgggacaaatgaacagacagatgaacctgcctgccctggagaatgatatgctggagtttgagatgcaaaatgagaagatggagatggttagtgaggtgatgaacgatgccatcgatgatgccttggagggtgaccaggaggaggaagaaa

SEQ ID NO: 457383 - DNA, 346 bp, Sorghum bicolor
cgtgcgggacccgtctcggagcaagttatggtcctccagaacattggaacatcagttctcgtctccccaaaccagcttccagatctgcaccgagtgctggctgaggctgcaacgctcttgaacacggaagctcctgacttgtacataaggcagaatcctgttccaaatgcttacaccttaccaatcaatggcaaaaaaccattcattgtctttcacacaagctttgtggagctgcttactccaaaggaattgcatgcttgtttggctcatgagctgggtcacctcaagtgcgatcatggtgtatggctcacttttgccaatatactcacaatgggagcatacactg

SEQ ID NO: 457384 - DNA, 498 bp, Sorghum bicolor
  unsure (1)..(498): unsure at all n locations
cgtccgctcctacctccagccgccgcggtcctggctccgcgccacgcccgagtcgcccgagctcatgcagatcctgctccgccgaatcaaccgcccgctcgcgcggctccgcgtctccctctccggcgccgagttcgtcttctccgagccccactccaagcgcctccgcctcaagctccgcctccgccgcgaggtgctacacggcatcgtcctcgagcagacgcaccccgtcgagttcgtcgtgcacgaccgactctgcgactcctgctcccgcgcgcaggccaaccccgaccagtgggttgccgtcgttcagctccgccagcacgtgccccaccgccgcaccttcctctacctcgagcagctcctcctcaagcacggtcaggcttcccctgcgatccgagtcgcggcggccccccggggtctcgacttcttcttcggcgtgcgttcccatgccgcccgcctggtcgacttnctcggcaccgtcgctcctatccaaac

SEQ ID NO: 457385 - DNA, 153 bp, Sorghum bicolor
cgtccggccggcgggccgatcggctaggtcgtcgacccgctctacccaggcggcagcttataccccctcggtctggccgatgatcccgagggcttcgggcggctcaaggtgaaggagctcaagaacggccgtcttgccatgttcttcatgttc

SEQ ID NO: 457386 - DNA, 120 bp, Sorghum bicolor
cgtgcggcgagacgcggctgcacgagttcaggcggtgctctgtgtgcggcgtggtgaactactgcttccgcgcgtgccaggcgctgcggtgggggatggctcacatggcggagtgcacgc

SEQ ID NO: 457387 - DNA, 345 bp, Sorghum bicolor
  unsure (1)..(345): unsure at all n locations
cgtgcgggatcctgtcgtcacatggagcctatgttcgagcatcaggatgcttccttcagtacagtagtccccatatagaaggggacctcacagacatggtcggagccgttgtttgacccaacagctcttgggcagtcaaggcggaagaagcaaactaccctagatgctaaggctgctgcttactcaaagcagctccaaaaggaaacgggagggatacgagcccgataataaagtgtcccantgctggcgagcaagctccacaattttccttcaaaaaaaaaaaagaaaaagaaaatgaagtgtgcttttttttggtcatcaagatgtggagggacccggggaaag

SEQ ID NO: 457388 - DNA, 391 bp, Sorghum bicolor
  unsure (1)..(391): unsure at all n locations
cgtgcgaggccatatgaccaaaaagttgatgtctacagctttggcattgtgctctgggaactcataactggcatgctcccttttgctaacatgacagcagtgcaagctgctttcgctgtggtgaacaagggtgtccgcccagctataccccaggactgtctgcccacccttgctgagatcatgaccaggtgctgggatgcaaatcctgatgtgcgtgcggcattcactgatgttgtgagggtgctggatcatgctnagatggatatcctgagcactggccgcaaggcccgatttcggtgttgcatctcccaaccgatgactanccgctgaatcaaagcaaagagagtctaaaagaactccatggaagcataattgagtgtatttatcatgt

SEQ ID NO: 457389 - DNA, 293 bp, Sorghum bicolor
cgtgcggactagttctagatggaagtccagaagcgtcttcatgaacagcttgagattcagagaaaattgcagttgcggattgaagagcaaggaaagtatctgcagatgatgtttgaaaagcagagtcaatcaagcacggataaagtccaggatccatcctcaagggatacagtggcaaaaccatcatctaccctgagccaatctttaaacaaggatagtggtgcagccatggatccaaaatgaacaggagacaatgacgaaactgcaaaactgggagaacgatcgtctggatc

SEQ ID NO: 457390 - DNA, 339 bp, Sorghum bicolor
cgtccgtgaaaggcgagaagcaacttgtggaaaaactactgcaaacagaaataaatctactccgctcaatcagggatggttcggctcttatgcagcacatggaagacttctactatgtcacccttcttgagaatgtgaaatcaaggtatcaagtggtagatggtgccaatgatgaataccgccaattgacaagcgtatcctagtaaaattgcacagtgatacacagttatttgtgaagggtgtcaagcagtctgggctttcaagtgtcgtgcacagtgatacctgatacggaattattgaggccgaagcaacaaggctgtttgtatttagctattttgg

SEQ ID NO: 457391 - DNA, 244 bp, Sorghum bicolor
cgtccgaacggcattggcaccagggagagagctgccatccagcggctcaaggagatatccaccaacgggttggagaagctgatgaaggaacacgcagctggatgcaatagtggcggccaacagcgacgccttctctgttctcgccggcgggggctatccgggcatcttcctgccggccgtgtacgacaagcaaggagtcccctttgcgatatgctttggggggctcaagggcctcctagccaag

SEQ ID NO: 457392 - DNA, 340 bp, Sorghum bicolor
cgtccgcttgctcgctggactgcccaggctttgcttgctggtgctgacatgatgaagttgggctatgtgtcacgtgtgaacccccgtgatcactacaaccattctgtgctcactgtgatggggtacaagccaagggattttgccgcacagatcaacctgaacactgcaaacatgtggggaatcgtcaagtcaattgtggacatttgcatgaagtttgaagagggcaagtatgtgtttgtaaaagatccagcaaagccacaggtgaggatctatgaggtgccatctgatgcatttgagaatgattatgttgaatataccttgtaaaatatatgtagcacct

SEQ ID NO: 457393 - DNA, 299 bp, Sorghum bicolor
cgtccgagcagagccaattaacgctctgacaccctacacggcgtaagtagaggccatatatcacgagaaagttatttttgcccgcatgtgctgcaactctctctaccactggattcgcattgaaaaatgtgcaaacatacatctcaatacgaatctgctttgagatgtgtgtttgcacacttctcaatgcgaatccagtggtggagagagtaagagcatatgcccttaatgagaaaaaaaaaacctgcgttccatatattatatcacatcgtgcaccttcatcccctttcctcaaacag

SEQ ID NO: 457394 - DNA, 378 bp, Sorghum bicolor
cgtccgtgatcatcagagaacacattctcatcacgaacctcttcacatgtctgtggttcaatgaagttgaccgcttcacctgcagggaccaaataagtttcagcaccgtccgggacaaaatcagggctagagttggctggatgcccgaaatgttcatggactgcgagaggcgcaactttgtcgttcaggtattgccgctgacccaaacccattatgtcattcggtcctgccccacctttttctgttgcacggctgcctgacagttagtgcacaaataaactagtgtccctattaagttgtgtgtactcctaccggccgacatgttagctcaaagtcatctgtcgctgtgcattgaccagcgtacaccggagctctgag

SEQ ID NO: 457395 - DNA, 414 bp, Sorghum bicolor
cgtccgccagaagcttcgcttcactctgccctccgccgccgccgcagctgccgcaggcgggaacttggcggtgatactacgcgcgactgctctcttctcgttccggcgcaggttttgttcacaatggcccgtgtgtatgttggcaacttggatgcacgtgtgacttctggggaactcgaagatgagttccgtgtgtttggagttctgcgaagtgtttgggtcgcacgtaaaccacctggctttgcatttattgattttgatgacaggagggatgcagaggatgctattcgtgatctagatggtaagaatggatggagagttgaactatctcgtaattccagtggccgtggtggtcgtgatcggtatggtggatcttgagtcaagtgctatgagtgtggggagactgggcacttt

SEQ ID NO: 457396 - DNA, 305 bp, Sorghum bicolor
  unsure (1)..(305): unsure at all n locations
acgcgtccggcgatcgcaactcctgccccgtctgccgccacgagatgcccaccgacgccaccccgcgcgccgctgccaacgctggggcagccggggaggaggaggaggcgacggtcggctcaccatctggaggctccccggcggcgggttcgcggtggngaggttcgcgggcgggcggaggcctgaggagcgcgagctgccggtggtgtacacggagatggacggcgggttcaacagcggcggcgccggcgcgcccctgcggatctcctgggggtccaggcagacggctttcacggacaggggca

SEQ ID NO: 457397 - DNA, 302 bp, Sorghum bicolor
cgtccgatttcggttaatccatcggcccaataaccagttggatgaaaaaaggcgtttaaggatggcacttgatgtggcgcgtggtatgaattatttacacaattgcacccctgtcatagttcaccgggatttgaagtctccaaatctacttgttgacaaaaattgggttgtgaaggtttgcgattttggtttatcacgtctgaaacatagtaccttcctctcgtcaagatctacagctggaacagcggagtggatggcaccagaagtacttcgaaatgaaccatcagatgagaaatgcgacg

SEQ ID NO: 457398 - DNA, 318 bp, Sorghum bicolor
cgtccggtcgcattgtctgaggcattagggacatgcactcgtctgaagaaacttgatctccgggacaacttgtttggtgttgatgcagggttagctctcagcaaaacccttccaaagcttcctgatcttgttgagctttatctcagtgatctcaatcttgagaacgagggcacaatcgcaattgtcaaagccctcaaacagtcagcaccgcagttggaggtccttgaaatggcaggaaatgaaataaatgccaaagcagccccagatttggcagaatgcttaacagcaatgcagtcactgaagaagctgaccttggct

SEQ ID NO: 457399 - DNA, 383 bp, Sorghum bicolor
  unsure (1)..(383): unsure at all n locations
cgtccgggttacattgctggtgtcttctgtgctattgtgtctcacccggctgacaatcttgtgtctttcctgaacaatgccaagggtgctacagtgggcgatgctgttaagaagctgggtctctggggtcttttcactagaggacttcctcttcgtatcgtcatgattggtacccttactggtgctcagtggggaatttacgatgctttcaaagtgatggttggactcccaacaacgggaggacctgcaccagcagcggtggctgccccagcagcagaggctgaatcgaaagccagtgcttgattttctgtatctctgagacatatntggtgaggntgagtgtgaattactcagagctagtcctgatatttttttctaacgaa

SEQ ID NO: 457400 - DNA, 381 bp, Sorghum bicolor
  unsure (1)..(381): unsure at all n locations
cgtccgcgcacgccgacgacgccgcggacgccgccgtgctgctcatggagaggtactccggggccgagcacgtcaacgtcgggagcgggcgcgaggtgacggtgcgcgagctcgcggagacggtgagggaggtggtcgggtacgaggggcgggtcgtctgggacacaagccggccggacagcgtgatgaggcggctgctggatagctctaagatggcggcgctggggtgggagcccaaggtcgagctgagggacgggctcaagaagctgtacgagtggtacctgagtggccgcgccgcaagcttccaaccatgaactcatgactgtgtgtanacgtagctcaacaacttgtctactttttaatgaacactcgatctatgat

SEQ ID NO: 457401 - DNA, 304 bp, Sorghum bicolor
cgtccgcttttgtaatgaaaggttaccttggcgaggaggattctacatctgagatcttcgacagtgaaggatggttgaggacaggagatctctgttatattgaccaagacgggtttggttacattggtgaccgactgaaagagttaattaagtataaaggctaccaggtagtatctgctagtgttactagtattctaatcagcattctaatgacccagcattccatcagagcatctgatctgttacagacttgcagtgtcagcttgccttcgcccttgaatgctgatggcataatatatgtttc

SEQ ID NO: 457402 - DNA, 426 bp, Sorghum bicolor
cgtccgccacaaccccggcggcgcacggctccccgtctcccctccactctctccacccactccttccctttggcgccaagtccacccgcccctccgattccggccgtcgtccaggtgccgacagttgagcaggatgggactgaagcgcctgatgacatgctgctgctgcattgcaaagcagcacgctgatgacgaggacaagattgattttggaggtggcaatgttcatgttgttacaagcaaagaggactgggaccaaaaaattgccgaggcaaacaaggatgggaaaattgtggttgcaaacttcagtgcttcctggtgcggcccatgccgtgtcatttcacctgtttatgctgaaatgtcacagacataccctcagctcatgttcttgacgattgatgttgatgagttaatggagttcagctc

SEQ ID NO: 457403 - DNA, 305 bp, Sorghum bicolor
cccggtcgaccacgcgtccgccgtcgtcgacgtcggagggtgggtccgtgtcgccgtcgcggaagcgcaagagcgagagcatggacaccgcgccggcgccgcctgccgccgcgcagcagcagcagcagcacggcacgcacctgcaccagcagcagcacccgggcctcgccgcaccggaccagaacgagtgcacctccggcgagccgtgcaagcgcatccgggaggagtgcaagcccaaggtgtcgaagctgtacgtgcacgccgaccccgccgacctcagtctggtggtcaaggacggctaccag

SEQ ID NO: 457404 - DNA, 328 bp, Sorghum bicolor
cgtccggcttcctcggcgccgtctcgttctggccgctcaccgtctacttccccgtcgagatgtacatcaagcagcgccgcgtgccgcggggcagcaccaagtggatctgcctccagacgctcagcgtcgggtgcctgttcgtgtccatcgtcgccgcggccggctccattgccgacgttatcgacgcgctcaaggtctaccacccgttcagcagtttattgttgtttagctggagaggaggatggacgtatgtactgcatgcagtattcaatgcgttcaacgactttggtcaatcgtactacaaggggtcaaggggagggagagagaa

SEQ ID NO: 457405 - DNA, 391 bp, Sorghum bicolor
  unsure (1)..(391): unsure at all n locations
cgtccggtcgcgccgtccgccgacggcaccatgctcgtctgcgatgccgacaagggacttttgagagtcggggaggaaggagtgacccttcttgcgtcggaggtcgagggcaccacgatcaggttcgcggacgcggcgatcgaggcctccgacggcacggtgtacttcagcgacgccagcaccaggttcggcttcgacaggtggttctacgacttcttggagtcccgcgtcaccggccgactcctccggtacgacccgcgcaacggcgagacgtccgttgtgctcgaccgcctcagttgcgccaacggcgtcgccctgtcgagggacgagacatttgtggtcgtctgcgagacgtgaggttcatgtgcctgaaagtgtggctgaangggag

SEQ ID NO: 457406 - DNA, 480 bp, Sorghum bicolor
cgtccggttttgaatttcgcttgagagttgctcttggaccttctggagatttgagtctaacatcacgaatcaggaatacaaacacagatggaagacctttctcttatacatttgcataccacacatacttctctgtctctgacataagtgaggttcgtgttgaaggactggaaacaatggactaccttgataacttgaaggcaaaggagcgtttcacagagcaaggcgatgctattgtttttgaatcagaagttgataaagtttatcttgctgcaccctccaaaattgctatcattgatcatgagaagaaaagaacatttgttgtgacaaaagaagggcttcctgatgctgttgtttggaacccttgggataagaaggcaaaagcaatgcatgattttggggatgcagaatacaagagcatgctgtgtgtggagcctgcagctgtagagaggcctattactctgaaacctggccgagagt

SEQ ID NO: 457407 - DNA, 425 bp, Sorghum bicolor
  unsure (1)..(425): unsure at all n locations
cgtccgcggacgcgtggggaaggatgcgaaggacttcctatttggatcctttgacgtgccattagccaacctggaagcaagcctaagaacttatgaaccttcagaagagccatttgacatatctttggtgtcgagagaagtcaggtcgctaccacttaaagagaaggcagcccctggcaagaagccacctgccgctgccgctgcccctgcacctgtttcaaccgttgatgcttatcagaaaatgctttcatccattcctgagttctctgggtttggaagactcttcaagtcctctgaacccatggagctgacagaggcagaaactgaatatgctgttagtgtggttaagcacatntatgacggctacattgtattgcagtacaattgtacaaacactatagaagaccactgctagaagatgcact

SEQ ID NO: 457408 - DNA, 310 bp, Sorghum bicolor
  unsure (1)..(310): unsure at all n locations
cgtccggngagaggaagcagtgaagtctgaggttgaggatgatgatgagcaggatggcaatgaggatgaaaatgagtaaatagtaggatggggaacagcagctttgcaattgggtgtttgcttcttgtttagcctccaatgtgctgttccttttgctgttatatatgctgtatgctgtaagaaaaatctgtacatgatggaaccttaggctatggatgctgaggccgtaactagaggagctggatcttgccgcttgagatggtaactggttttgtatactatgggctcctgagtcagattgtgtcaaaaa

SEQ ID NO: 457409 - DNA, 312 bp, Sorghum bicolor
  unsure (1)..(312): unsure at all n locations
cgtcgcnggtggtacatggatgacagtcaagaggaccataggcttcctcatcatcgcgagcccaaagaattcattcctctcgacaaactttcagagctaggaatattaagctggcgcctaaatgctgatnattgggagaatcatgagaagctcaagaaaattcttgaagccaggggttactcttacatggtttgccaataaggtggtctttttcggcacttttgtgtttggtattctaccttgagtagcaacggcaatacctattcaaaagttgaaactaatgcgatacgcatttttcttatgcatgacatt

SEQ ID NO: 457410 - DNA, 211 bp, Sorghum bicolor
acaaacccagaaaggccatgccgctgtactctattggttgaagaccaacgtatcatctcaagaagactctagcactcgaataatctatggacgttctgcgaatgcattcaatagtgcatagctagcaaagaaagaatatatcgatggttttcttgctggcggtgcctccttgaaggctccttatttcgtcaccattgtcaactctgtgact

SEQ ID NO: 457411 - DNA, 274 bp, Sorghum bicolor
cgtccgcctacgcgtgcatctcctggaatacaggcaagcacggaaaactctcgatgtatgtcttacacaaatgaaagcttttgcagatagatgggcaagcggggccgatgttgtcatcgcatatgaccctctctgggctatcaacactggataagttgctactcctgaccaggcccaggaagatcatgccggtctacccgattggttgacgaccaacttattacctatagtcgcctctagcactcgaataatctatggaggttctgtgaatgca

SEQ ID NO: 457412 - DNA, 405 bp, Sorghum bicolor
cgtgcgctagccactcagaatgaagctaagatggtgctgaagaacaagtcccccaactggcatgaaccactgcagtgttggtgcctgaggttccatgggcgggtcacggttgcatctgttaagaacttccagttggtggcttcaggagagagtgatctgaataaccagggtgatgacgacgtgatactccagtttggcaaggtcgggaaggacttgttcaccatggactaccgttatccaatatctgcattccaggcatttgccatctgcctgagcagctttgataccaaaattactcgcgaatgagtcaaggtgcgaaggaagtgaaccagctagatacagcaagaatacctgagctttaagccggagaggttggtgataaagtatcatgggagagctgatact

SEQ ID NO: 457413 - DNA, 221 bp, Sorghum bicolor
tgacatctgtggcaccttcatgctgaggtacaccgcgttctcggccactgatgccaagaggaatgccggggactgccatgttcctatgtcttgcgccactgccaattgggctcaaggagctcctggtacaggttggcaccattcgcattactggcactggcatgaacccagctaggagcccttgcgctgccataatctacaacagggatcatgcctggagc

SEQ ID NO: 457414 - DNA, 244 bp, Sorghum bicolor
cgtgcgccaaatttcacaacccccctagcccccagccaatctcgaatcccgatgctcccagcctccaccgactccctagcggtcgtcagggcgggtgagcttcctccgctcgctagccgactccttctcctcgctgctcttctcgtcgtggggcgaggcggcgcccatggacgcggggggggcggcgccgtccccggcggctgtggtgggggagcgcgtggcggtgaagctcaggggctacttc

SEQ ID NO: 457415 - DNA, 296 bp, Sorghum bicolor
cgtccggctgcctacatttacaagaaggctggcaggtggaagcaatccattgctctatcaaagaaagacaacatgtacaaggattgcatggagacatgctcacaatctggcgaccgtgaactgtcagaggacttgcttgtctatttcattgagcagggtaagaaagaatgctttgcatcctgcctcttcatttgctacgacttgatccggccagatgtcgctcttgagcttgcatggatgaacaacatgttggactttgccttcccatacctgttgcagttcatccgtgagtacac

SEQ ID NO: 457416 - DNA, 313 bp, Sorghum bicolor
cgttcgtggacgcgtgggcagacgcgtgggtgcactctgtgatgtcaattcaacctaaccaatcaaggcctcaactgctatggttcgtggggcgcgataaggacttgcagccttggattgctagagaccatgaacaaagtctgaagatgtggacagtcaaccaacgtatagtgaagcttatagctgagcttatgaggaaccatgacagccatgaagctttggtgatacttgctagggtctctaaccttctaattgttgctacttgatgaatgcttgttgactgcgaagctcgtactttgccacaacttgaact

SEQ ID NO: 457417 - DNA, 443 bp, Sorghum bicolor
cgtccgccttcgaggccgtctgcgaggagctgggcgccgccgtcgccaaggaggacaccatgctgcgcgccgccatccccgtccgccagcgggtcgccgtctgcatctggcgcctcgccaccggtgagccgctccgcctcgtgtccaagcgcttcggcctcggcatctccacctgccacaagctcgtcctcgaggtctgcgccgccatcaaggccgtgctcatgcccaaggccgtgcagtggcccgaggcgcccgacgccgccgcgggcgtgtccgcgaccttcgaggccgcgtcggggatcccgggcgtcgtcggcgccatgtacaccacccacatccccatcatcgcgcccaaggccaacgtcgccgcctactacaaccgccgccacacggagaggaatcagaagacctcgtactccatcacggggcatggcgtggtggac

SEQ ID NO: 457418 - DNA, 557 bp, Sorghum bicolor
  unsure (1)..(557): unsure at all n locations
cgtcacgcagagaagatgagtcgtgagaatagcgcacatccttctctttcttgcaacgcaagagttgattctggcattgatgcatcaaaagaggaagtgactggtataatgctaactaatgatgactatgatccaggaaatggtctaggagcaataaacgtagaaaatgattatgaaacagatcttccagactttgatccaataaggcaccacaacaattactgcccttgggtgaatggaaatgtcgctgctgcatgttgtattagtactggttcgagcacagctctttcaggctggcagctcacggtagatgccatcgagactttgcagtctcttggtcaagctcaaaaccagaacatgcagtcagactctgcagcttcattatataaggatgatcacgtcccacctagccggaagctgttgaaaagggcaaaccacagcaagagctgatctttggagcttcacgcccaagagcaagattctnctatgctcatagaaaagttgtcttctccaggccctaacctgagcaggggcaatggtttgcggttttgtgaacc

SEQ ID NO: 457419 - DNA, 561 bp, Sorghum bicolor
  unsure (1)..(561): unsure at all n locations
cgtccgagagaataatcagccttgtccagaagctacccagaatattcagaacaaagtgcaaagtagttccaccagaagctgcaagaaggtccataagcaaggcagtgccctcggcagatcgattgatctaacaaagttcacttgctacgatgagctgattgctgaactggatcagatgtttgactttgatggtgagctgaagaatccatgcaaaaattggctggttgtctacactgacaatgaaggcgatataatgctggttggcgatgacccctggaatgaattctgcgacatggtccacaagatcttcatctacacaagggaggaagtggaaaggatgaacccaggtgccctaaactcaaggtccgaggatagtctgtctgactcgcagggaagagggttggcttccaaagagccgccccgaggtggcccgtctacttcgactcccaattccgagagctgctaattnttccagtcagtgaggtcttttgaagtggtggatgaagcagacaaaagcatcagagtgaccggaagaatgagaaaagggacgagtcttgtagt

SEQ ID NO: 457420 - DNA, 557 bp, Sorghum bicolor
cgtccgcggacgcgtgggcggacgcgtgggcggacgcgtggggtgacggaatgccgagttggggcggcattttcatattttgaatgtcgataagccctctctatcgccattttgtatgtcgatatgcgtttacaattttgcttgtattttgattcatatgatttccatagctgtccactaaaatactattatccaaaaaaaacaaattcataaactcatatacgtatacaaatgagattgatttgttgattcacatgtaatagtaggaaacttaaattctccctgctttttcttaaaaagattcattgcaggatgatgcaccactgcctcattcatccatatacgtagagtatatccataaagcaatgcatggaagtgatacaggtgcatacgacgctaaaggaaggtttgttcctgcaaagtttgaagaaatattcacaaagcatgcaaaggtcagaccagatgcactaacggttcgaggaaatggaggagatgattctagcaaatcgagatccattagaccctcaatcatggtctgcacctgaaggagaatgggg

SEQ ID NO: 457421 - DNA, 429 bp, Sorghum bicolor
cgtccgagctggcaaagcagcagacgttttctactgtctaaagctcctggaggcaacaggaagttggactgttccgggctctggttttgggcaaaaggaaggggtgttccaccttcggacaactatccttccagctgaggaagacttccctgccatcatgtcgagcttcaagaagttcaacgactcattcatggagcaatacgagggctactccaggatgtgaacaagaacagaaacaagatatactgaaggatcggctgagagattcgtttccagtctcagcacaaatggagcgtttctgaagattttcaattgaaagttgattagttgtaactctcttaaaaagaagcaattgctgcctttgaagatatgtatagggaacggaagttctgtgggttattattgaataacgatctgccattttcttct

SEQ ID NO: 457422 - DNA, 432 bp, Sorghum bicolor
cgtccgcccacgcgtccgaaaggagctatttagcaatatcttgctttctggtggttcatcatcaatgctggagttaaaggagcgcctagagaaagaagtattagaggagtctccgcaagctgctcgtgttaaagtcatggcaagtggaaactcagtagagagacgattcagtgtttggattggagggagcattcttgcatcccttgggtcgttccagcaaatgtggttctccaaagcagagtatgaagagcatggggtttcctatattcaaaggaagtgtccttgaagcaggggaatatgtacaaccaataatatgctttaggagcctttgttgccaaagggttctttgtgtacaacagcttgatgccttgccatgttggccaatgaagactcgagactctttttaagtgacattaattgttgtcatgagta

SEQ ID NO: 457423 - DNA, 548 bp, Sorghum bicolor
  unsure (1)..(548): unsure at all n locations
cgtccgctgctcaagtcgctccgccaccgcgccgtcatgcgcctccacgcctcctgggtcgacgccgacgccgccgacgcgcccgcgactaccgcgcccacccggccccgccgcgccgccgtcaacttcgtcaccgagctcttcacctccggcacgctgcggcagtaccgccggagacacccgcgggccagcgccgccgcggtccggcgctggtgccgccagatcctcgagggcctcgcgtacctccacgcgcgcggcatcatccaccgcgacctcaagtgcgacaacatcttcgttaacggcagccaggggcaggtcaagatcggcgacctcggcctcgccgccgtcgtcacccgccgccgccgccgcggtaacgcggcgagctgcgtggtgggcacgccggagttcatggcgcccgaggtgtacgccgaggactacgacgagcgcgccgacctctactccctcnggcatgggcgtcctgaagatggtcaccctcgagtacccttacagcgagtgcgtccaccccgtgcacatctacaagaaagtca

SEQ ID NO: 457424 - DNA, 559 bp, Sorghum bicolor
cgtccgggaagccgtacctgcgggagcactcctgcctcatcttcccgcccccgcgcggccgacgcccgttggcggtcatcaagttcctcggcggcgccttcatcggcgccgtccccgaggtcacctacggctacctgctggagctcctggcgcgggagggctttctggtcgtgtgcgtaccctacaacgtcaccttcaaccacgaggccgccgcgcgggaggtcttccagaggttccatgcctgctacgacgcgctcctcgcgtcggggctcccggaggccggccttagcggcctggacatcgcggagctcccgctctactcggtcggccacagcaacggggcactgcttcagctgctagtgggaagctacttctcagaaaagataccaaaggccaacgctattgtctcattcaacaataggccggcttcggaggctgtgccttactttgaacagatagggcccctttttaagtcacctgatgcctatgatggaggcctcacctgtttactcggtggccagaaatgcatcaggagatgcatggaaggctctgtttgatt

SEQ ID NO: 457425 - DNA, 556 bp, Sorghum bicolor
cgtccgcaaatacagactgccgcgtgctaataagaggtcgcggcagcattaaagatccagcacgggaggagatgatgcgagggaagccaggatatgaacacctgaatgaaccccttcatatattggttgaggcagagctacctgttgaaatcatcgatgctcgcctgatgcaagcccgcgagatccttgaagatctgctaaagcctgtggatgaatcccaggacttcttcaagaagcagcagctacgggagcttgcaatgcttaatggtacccttcgtgaggaagggatgcagagatctggttcagcgtcccctttccacaacagccttggaatgaagagagctaagacaagggggtaatgaacagaggtgcaagcatcatgaagggagaaccaaatcatctattctgagaccgatcctgtgtacacatggggttgccttgctggctactggcccaatacggtcttgcaacacaagcatcggggcggccgtaccgtacctgataaaacatatatctggagttgtgtttcctgctactggggtagtttggttatgcg

SEQ ID NO: 457426 - DNA, 420 bp, Sorghum bicolor
cgtccgcgccgacgtgttcaccatggtcggactgcaggaattcttctacgatcaggtgcccgacgagctgcgcagcctcgggctggcgctgtacctcagcatcttcggcgtcggcagcttcatcagcagcgcgctcgtgtcggtcatcgacagggtgacgacggctaggggcgggagctggttcaacaacaacctgaaccgcggccacgtcgactacttctactggctgctcgccgcgcttagcgccgtcgagctcctcgcctatgtcttcttcgcggtgacatacaagtacaagaacaaaagagccgtacatgcaactgttgagagttagctagagctgtgtggtactggtacgccatacataagtcaatagtataggtgataagatacccaaccaagagagtaaatgtttttttcccg

SEQ ID NO: 457427 - DNA, 556 bp, Sorghum bicolor
cgtccgcccacgcgtccgcccacgcgtccgcccacgcgtccggtgcgacgaaggacccggcgaacgcgcagaggcacaagatcgaggccgccgccgccggtcctcctcactgctcgccgcgcgttgcaatgggtatcgacctagtcgccggcggccggaacaagaagaccaagcgcaccgcgcccaagtccgacgatgtctacctcaagctcctcgtcaagctgtaccgcttccttgttcggaggaccaagagcaacttcaacgctgtgatcctgaagcggctcttcatgagcaagaccaaccgcccgcctctctcgctccgccgcctcgtcaacttcatggagggcaaggagaatcagattgctgtgatagtgggcaccgtgactgacgacaagagggtctatgaggtaccagcaatgaaggtggctgcgctcaggttcactgagacggccagggcccggattgggaatgcctgtggcgagtgcctcacctttgaccagcttgcgctgcgtgccccgctgggccagaacacggttctgctgaggggacctaagaa

SEQ ID NO: 457428 - DNA, 179 bp, Sorghum bicolor
cgtccgctatcttattgactaagtgactctcacgagagctcctgcctcacatgtgccaacatcatgagcagcgcttcctgcacgaccaactgcctcacgccattcgtcaaggtcttgaacaaaggggtccgcaatcttaaaggatacaatgacaacaccccactattacacgggtgacc

SEQ ID NO: 457429 - DNA, 550 bp, Sorghum bicolor
cgtccgaaacaaagcgtccaataatcggccggctaacaagtgtactacgttgcagctaataactgggtgtgtgttcctgcagtacacgttcgtgcgcgtgtgacacagagagcattagagctcagaactgagatatacagatggaggcgaggaggagcagcgcagcgctggtgggcgtggccgtggtcgcgctgctggtggtgctcgtgcccgagacgtcccgcgcggagcggttcgtcgtcggcgacgcggcgcggtggacgtgggggtacaactacacggactgggtcatcaagaagggacccttcttccaaaacgacaccctggtgttcatgtacgacccgccgaacgcgacggtgcacgcgcacagcgtctacctgatgcgcaacgccgcggactaccagtcgtgcaacctcaaggcggccaagctggtggccaacgtcatgcaggcgccgctaaggttcgggtcgtgctcaagaagcgaaagcagcactacttcgtgtccggcgagcgcggcggcttccactgcaccatggggaacatgaagttc

SEQ ID NO: 457430 - DNA, 355 bp, Sorghum bicolor
  unsure (1)..(355): unsure at all n locations
cgtccgggagagaaaacttgcctatcgaattcttagatgttttttcaaagaaatattcagaactgaggcatgacctgatacggacagaacgacatctgttgaaggagatggggtttatttgccatgtcgagcacccccataagttcatatcaaactaccttgcaacacttgaagcccctcctgagcttactcaagaggcatggaaccttgccaatgatagcttaaggacaactctgtgtgtgcgatttaagagtgaagtagtagcatgtggagttgtgtatgctgcagctaggagacaccgtgtacccctttctgaagatcctncgtggtggactgtctttgatgctgatgaagc

SEQ ID NO: 457431 - DNA, 234 bp, Sorghum bicolor
ggggtacgcgcccaggtcgccgagcagaagacagcggtgcagaaggcccaggaaaactttacccgtcgcaagaacctggcggccggtggcgcgatttcccaggaagagctgtcccacgcccgtgacgacctgacctccgcccagagcgcgctgaacaacgtccagcatcaactcaacagcagcaatgccctggtggatgacaccgtggtatccaatcacccggatgtcaaagcc

SEQ ID NO: 457432 - DNA, 413 bp, Sorghum bicolor
cgtccgcggccttattattcattgcacacaccggcatatacatttacgggaacctaatcggatgttgttgttccttcagctccgagcgcgtagcagaagggccggccatggatggtcctcaggttgcactccgcctccgacacgagggtcggggcgaattcaagcagcccgccccaagagcaggtcggcctcatctcgtagccggtcatcatgctgtccagtgccgtcctcagcgcgctgcaccggcagtagggaacgatcttctccagctccgagcagcacctctccttcagcaccggcaaggggacgacggggccgatgctgacgccgcaggcccggcgaaccatgtacgtgcggcagctcgggagcgggttgagtgggatgactagccctggctcgcaccaattggcaac

SEQ ID NO: 457433 - DNA, 441 bp, Sorghum bicolor
  unsure (1)..(441): unsure at all n locations
cgtccggccagctgtgtaccacatctggaagatggacaagatggattttctggtgtgtgtttgtgcgttggccggcgtcatcttcatctcagtccaagaaggcctggcaatagcggttggtatatctatatttagggtattgatgcagatcacaaggccaaagatgatggttcaaggaaacatcaaagggactgatatttacagggacctacatcactacaaggaggcgcaaagagtttccgggttcttgatcttggccattgaagcaccaataaacttcgctaactgcaactacctgaatgaaaggattaaaagatggatagaggaagaatcttttgaacaggataaacatactgaactccatttcataatcttggatctatcagctgttcctacaattgacacangtggcatagcgttcctcattgacataaagaaatc

SEQ ID NO: 457434 - DNA, 463 bp, Sorghum bicolor
cgtccgcggacgcgtgggctgcaaagttcggcggccggaccggggacagggtcgcccaaggcctgagagagcatggtacgttcttctccaaccaaatcacggatgaattcctctttctcctgtccgtccatgaattcatctctcgatctgtatctgaggctgaacgtgctgttgctcgatggtgtttgcagtgactctggggccaaagctgtacgagaccgtgaagggcaagctgtcgctgggagcaaggatcctgcaggccggcggcgtggagaaggtgttccggcggtggttctccgccgacaagggcgagaagctcctcagggcctctcagtgctacctgtcgaccacggccgggccgatcgcggggatgctcttcgtgtccacggagcggatcgcgttccggagcgaccgctcgctggcgctgacctctccccagggcggcggcacggtggtgcgggtg

SEQ ID NO: 457435 - DNA, 364 bp, Sorghum bicolor
cgtccgcaccaacaaccactccagaaattcagagggctaacttggggtggacggttcttaatatgagaggcagtgggaataaatgaccttttgtcatttgacttcatggatcctccagcatctcaagcacttatatcagctatggaacaactgtacagtctcggtgccttaaatgaagaaggtcttcttaccaggctagggagaaaaatgtccgaatttccacaagaaccacctctttctaagatgctccttgctagtgtagaccttggatgcagtgacgaaatactgacaatcattgcaatgattcagactgggaacatattctatcgaccaagggagaaacaagcacaagcagatcggaaaa

SEQ ID NO: 457436 - DNA, 450 bp, Sorghum bicolor
cgtccgccgctgctccgctggtcgacaacacctgcagcgacagcttcgacctctacaacgggcggttcatgtacaacaagaactccaccgagctgctcaaccgcgtcgagtgggccatggactccgtcaagaagaagctcttcgacggcctccacgacgtgctccggaagcagctcttcgaggggtcgccgcacgcccccaatgtctcctcctccaacgtccgcaagtaaccaccgtgcttgctgctcatgtcatgatcgacattgtaccagtctgtatctgtattcttcaccccccaattcagatttgactttgttgagaggggttcgttcccgtactctttcttccttgtcagttctgctgtgttccatttccaagtgagggagaaaaagaaaatcttatctgtggtagcttgacactggaatttgtgatatggtcacgaataaaatg

SEQ ID NO: 457437 - DNA, 504 bp, Sorghum bicolor
cgtccgcagacctctgggagccgagctttcctcatgccctgattctgagcctcttggtcgtgttggcttgggtctctatggtcggcttctccccgttactactgccaatttcaaagctacgtgtactgcagctgcatataggggcactcttgtccacaagctccttcaaggacagttttttgctgctggcagacaaggttctcggcgtgacaagggtgaggtcgagcctccctcgggccttgttaggaattctgagactgttaaccctaaagcattcgaattaaggcatgcaaggcctggcacgctttccttatgccttggacagaatgatgatgatgatgacatcaagctcaaccctaattatcacaatgttgaattcttggttactacagggccaggaccctgtcccgagcttgatggccagaatattgtctttgggactgtattggaaaggatggatgttatcaccagcattgcaaccatacctacctacaaaccagctga

SEQ ID NO: 457438 - DNA, 565 bp, Sorghum bicolor
cgtacgagcaaattgagacctccatgaggtcagaagagaatttgctgcatcttaaagcagcgaatggcgcacaaagatacaagagtgagatccgtgctcttgagcagcatattgcacaactgaaggtgtccttggactctttgaaggttgctgcccccaagtggggaactgacaataaaacctatgcattgcatctttctgaagggagaaagaacagcaatgcccaaattttgtccaacatagcagtaccccaagatctcgattttgatgatatacagcgcgatcgggagtgcgtcatgtgcttgagtgaggagatgtccgtggtgttcctcccttgcgcccaccaggtcgtctgtgtcaaatgcagtgacctccatgagaagcaagggatgaaggaatgcccttcatgccggacccccatccagcgcagggtgtgcgcccgccccgccggtttctagatttcacatataccatttgggatttacttttttttgtttcaccttgattgctcagcttgagttgatggaagattggagagaataataatgaggggtgagtggtgaaa

SEQ ID NO: 457439 - DNA, 579 bp, Sorghum bicolor
  unsure (1)..(579): unsure at all n locations
cgtccgcgcacagatacattggttgatttagggcttgtttgaatgagtttcagattcttaaaaaccagttgttgcctctagtttctaaaatctagatcctgagcaaaaactggtggggtatttggatcccctagttgaatctggcttcatttattgctcacaaggtcacaagaaagtggcaaaagctgggtatcaacagcttcttgatttttaagaatctaacaaaaattgacacaagaaactgggcaaaaactagcctgtttgcatcctacccaattttcaaaaacccagattcttaaaaactggagggatccaaaccggaccttagctgtttagtgataatcttggattgttgatgaggctaagcaaatattatggatatatgtgctttaatatggatgaaaaatttgcatacagtgctttaagctacgctcaactgtctgtgtgactgacctttagtaatatgcactactgatgtatttatgtngctggtgattttctgtgattccttgctgactcaggttctactagatgctcaatctcgagatgctaaccttcgaacagtagcagaaagcaacc

SEQ ID NO: 457440 - DNA, 470 bp, Sorghum bicolor
cgtccgccaacatgtccaacaagctatgaaccttctcaaacttaacatgatggtttgtatttgcatgccatctgtcttactgagggtaattactggttgtggttcagaaggtactgggaagggaaaaataaagcgctcggttatagagcttgcagagaaggaacatattgagtggcgcgaagagaactctggaactgtagcccttcggcttggtgggccaagagagtatcggttccttgagcatgaaaacgattctgactaagcggggaagccttttcaggagactttaacatagattaacctgtgatctaatctatgtatccccgtatttatctgtatttatgtgttatgattatggatacctaggctgtgacgaaggctgtagttctgacacagaagttcggtattgtagttgaagtaaattatggtgtaatgttgatcccaggctgctaactgtgtaatgtagtctg

SEQ ID NO: 457441 - DNA, 575 bp, Sorghum bicolor
cgtccggcctgttgtaggcaaagcaagaaaattgaaggatcttatgataaaaagtgacaataggatgtgtgctgattgtggtgcacctgatcccaaatgggcatctgctaatattggagtgtttctttgcttaaaatgtggtgatgttcatagggcacttggacctgacatttcaaaggttttgtctataactttggatgattggtctgatagtgatatcgactctatgcttgaggttggtggaaactcatatgcaaattcaatttatgaggcttttcttccaaaagatcacccaaaacccaaaccagattcaacgatggaatataggacaaaatttataagagctaagtatgagacacaagattttttgaagccaagtttgcgcatttcatcaagatcatcttttaaatctaccacttctgtgaagagtgtagataacaatttctctagcacttcaaagaaggatgtctctgaagatacaagagaattttgtggagagctgaatattacagtggtgaaaggtactaactttgcccgtagagacatgctaacaagtgatccatatgttattttaa

SEQ ID NO: 457442 - DNA, 530 bp, Sorghum bicolor
cgtccggaggcatgcgagctatcgcagagcttctgatccctcagttggagttcctcaacgaggaaggagcacaggctgaactctgggcgttgtcaaagattttcctggacacacttgcacaagagacaggacagaaagttactgccattttccccgacgctggagcagctgcccttctcaagtatcaatggaaagatgcgcaattcaagtgtgccagcttaggtgaccggaagccagttgatcctgaagatgaggtcgcagttatgattatccctgatcatcagatgctggaagctgttgaacgcatcgcatctcaactctctgatgatcctataaaacctcttgtcatgtggaacccacgccttgttagtggagatgttggagtaggctctaatgtccggaatctgcgcagaaatttcttaagtacttttaccactgtttactcaatgaggccattgccaactggtgcagtctttagatgctttccagggcagtggaaagtgtttatgatgatcaaataggccaaatcg

SEQ ID NO: 457443 - DNA, 411 bp, Sorghum bicolor
cgtccggatcaacactactagctctagctctgcgccatggcgcccgtcaaggcgcaagacgcgagcactggccagcagactatgcttgatgctcagctccagctctggcaccacaccttcggctacatcaaatccatggcgctcaaggccgcgctagacctccgcatccccgacgccatccaccagcatggcggctcagccaccctcccacagatagccaccaaggccacgctccacccgtccaagataccatgcctgcgccgcctcatgcgcgtgctcactctgaccggcgtcttcagtgtcgtccacgacggcgccggcgacgagcctgtttacgggctcacgccggcgtctcgtcttctggtcagctcggggcgcctgaacgtgactccattcctgaccttgatgctc

SEQ ID NO: 457444 - DNA, 578 bp, Sorghum bicolor
  unsure (1)..(578): unsure at all n locations
cgtccgcttatttctcttccacagccgcgagccgcttaccggcgcagccatggcgaaggagcgcggcgccgccaccatcgcggcgtccagctacgaggtcgacctcggcaatctcatggcgtacgatccgtcgcaccaccgccgccgcctccagggaggagctgaggcaggagtgcctgcggaaggggacggagctggcgcaggcggtggccgacgccctcttcgcgctgccgcccaacgaggaccgtgacggccccatcgtccacctcccgccgcccaccgtcggactcccgcgcgagaagcatcttcccaagccaaagccaccgaccaagtgggagctgtttgcaaaggcgaaaggcattaccaagcgcaagaagaacaagcgcgagtgggatgagcaaactcaatcctggaagtggacttacggttacaaccgtgttagatgccgatcattgaagccaaatcgactgacgagcctggtgttgatcctttcgcacaaagaaggggatgaaaagaagaagagggttgaaaagcangaaaagaacaaactagagaacttaaagaaagctgcaaagatt

SEQ ID NO: 457445 - DNA, 458 bp, Sorghum bicolor
  unsure (1)..(458): unsure at all n locations
cgtccgcagatcagtgccggactacgacggcctcagccggctcaaaatcgtgaccatggtgctgtacgaggtcctgcggctctacacgccgctggcggcggtgcaccggcggacgtacaagcccatggagctcgggggcgtcaggtacccggcgggncgtgatgctgatgctgccgctgctgagcatccaccacgacaaggacgtctgggggccggacgccgacgagttcaggccggagaggttcgcggaggggatcgccagggcggcggcgtccggcggggacgcgccgccggcgttcttcccgttcggctggggtcctcggacctgcatcggccagaccttcgcgctgctggaggcaaagatagggctcgccatgatcctggggagcttcgtgttcgagctcttcccgtnctactcgcacgcgccgttccccgtcgtcttgctgcagccagagcac

SEQ ID NO: 457446 - DNA, 537 bp, Sorghum bicolor
  unsure (1)..(537): unsure at all n locations
ccggaatgacccacgcgtctcaaggtgagctggcggggcgccgacgaggcgaagaggctggtggacgaggagggctacacggtgctggacataggacaggaccancgcgagagggcacagggaagtcctctacccatgtgcctctcttcattgagaaccaagacaacgacattgggaccatcgtgaagcgccagctgcacaacaacttcgcggngctcttcttcggtctgcccttcaccaagctcaacccggatttcgccaggacagtcaaggacaagttctcgccggagagcaaggtgctggttgtctgccaggaaagtctcaggtcagcagccgctgcagatgcgctggagaaagaaggtttccaaaatattgcgtgcattacgtcaggtcttcagacagtgaagccaggaacgtttgaatctgtcggaaaaagtgagctgcaaaatgcggngaaagctggtcttgtcaccatccaagggaagatttcagtagtcctttgggactgtactgatcagtgcctatcttgttataaca

SEQ ID NO: 457447 - DNA, 638 bp, Sorghum bicolor
cgtccgcccacgcgtccgtgtctgtgtctcaggaggaaattgttttcaacgttgggaagagtgtagttgagaacaaatctgatggtcttgcattcagacgggctggattacaaaaggaaggatcaaaggttgtctatggtgttccaaaacatggaaagaagaagaagtttatggaagtaagcaaacattatgacgcaggccagtctgacaagatttctgagggcaatgcatctaacagatttgtgaaacatctgatgccattgccaaggccacgtgaaaatactaccaaagttgatcctattagaggaaagagagtaggtgagacgaggtctagattacctaagcctaccaagtctcagagcgttggaggtagcagtgctcctgaaaaggattccatgcccatgcatgttcaaaattcttgtgtttctcaaaggagttttagttttgcgggaagttcgacaagcacttccaacaatgagaagcccaccttagttaaaaataatcctgcgcttggtgggggccttagaactgaagttccttctgtttctgaactgcaaactgcatctactgttcctagttccaagccaaatgtatccactactaatcgagctaaaaggaaatatgttcccactgtcagt

SEQ ID NO: 457448 - DNA, 480 bp, Sorghum bicolor
  unsure (1)..(480): unsure at all n locations
cgtccgcccacgcgtgcgccgtcttctgctacaccgagttcgccgtcgagatccccgtcgccgggggctccttcgcgtacctccgcgtcgagctcggcgacgccgcgcgcttcatcgccgccgccaacctcatcctcgagagcgtcatcggacggggccgtggcgcggtcctggacctcctacctcgcgtcgctcatcaacaagcccgccagcgcgctgcggatccacgcgccggagctcgccccgggttacgacgagcttgaccccatcgcggtggtcgtcatcgccgtcaccgccacgctggccatgctcaccgccaagggcacctnccgcgtcaactgggtcgcgtccgctggcacgtcgtcgtcatcggcttcgtcatcgtggccgggttcatccacgccaacccggccaacctcaggcccttcatgccgtacggcgtgccgggcgtgttccggcggcggcgatcgtctacttcgc

SEQ ID NO: 457449 - DNA, 602 bp, Sorghum bicolor
  unsure (1)..(602): unsure at all n locations
cgttcgcagcaactgaacttggtgagctccgctctgttcttaagaagtcgttagtggattcctgtggcaaggatttgtttcagtctttatatgcttcgtggcgccactctccgatggctacgataagtttgtgtttacttgctcaacatacagtcacgcaagctgtgttattcagtcactgggagaagaagacataaatgtgaaatttttggttcagttagataaattgatccgtctcttagagactccagtatttgcttacttgcgtttacagcttctcgagcctggaaaacacacgtggcttctgaaaactctttatggtctcctgatgctgttgcctcagcaaagtgcggccttcaagatcttgaggactcgactgaagactgtgccattcagtgaaaatcttaagcgcacatcttcagcaaatccatactctcagattctgcaagtgacagaagatggcaatagaaaccaagacacacagaactatagtgcaatcaatttcccattccttctncagcaatttgagaacatgcagctgcagcaccgtaaccatttgaaggatcagctgcaatcccgcaaatctgcttcagctctaacat

SEQ ID NO: 457450 - DNA, 617 bp, Sorghum bicolor
  unsure (1)..(617): unsure at all n locations
cgtccgcctggatggttccagcctattgtagaatatattgcgaaattcaaagagctctccttcccattcgcttctgcaactcaagcatatattgatttgcgttatggtctcctgctgcagctgctgaattaattcttagggctcactgacctacacacaactgcatatttggtgctgccatcttgccccacactttaacaaggccatcctagaacgtatgtgccttttgatggctatctcaagagccaagaatcatgtgtggactggtacctgagcaaattttttcacaatcacatatctgttgagcacggctgcacaagcaccatagtacacatcgtatagatgatggaaaggggaaaatacagtgtttgcatttgtttcagaattgttctatcagccagctgagaggatctttcacattaatctggagaatgaccaagaggaacacgtgagagaccagctgaacaaaggagttgtacctgaggacattagtgttcactgctacatnncgcttccgtatatgtacttggngtacaggagaataaaggaggcttaatctggctggtccggtctggtcttttgagaatgacatcagtttcatgtggaggaatccattc

SEQ ID NO: 457451 - DNA, 524 bp, Sorghum bicolor
  unsure (1)..(524): unsure at all n locations
cgtccgcgcgatgccggggagctgttcgcggtcaagtccgcgccggcgtcgtcggcgggcgccgcggagctgctgcggcgggagcgggggatgatggcaggcctccgctcgccgcacgtcgtcccttgcatcggcggccgggcggcgcgacggctcgtaccagctcttcctcgagttcgcgcccggcgggtcgctggccgacgccgtggccaggaatggcggcgggcgcgggctcgaggagcgcgccgtcgcggcgtacgcggccgacgtggccgcgggcctcgcgtacgtncacggggcagggctcgtgcacggcgacgtcaagccgcggaacgtcgtcatcggtggcgacggccgcgccatgctcgctgacttcgggtgcgcgagatcggcggaggccgtcggcgggccgatcggaggcacgccggcgttcatggcgccggaggtggcccgcggggaggcgcagggaccacccgctgacatttgggcactgggatgcaaccgtatcgagatggacaccagtc

SEQ ID NO: 457452 - DNA, 622 bp, Sorghum bicolor
  unsure (1)..(622): unsure at all n locations
cgtccggtgcccattccccactcctcccgccggccacccccaaaagaatcggaaattacaacccggtccacgggtcggatccccatccccacccaacccggagctaacctcctcctcctcgagctcgctcgtcggccagcgatggggatctcgagcatgnnccggagccgcgggacccagcctgctgtggtaccctggtggtcaacacnggtgatctcgatcacnggcgctggcggggctggtgcgcaaggcgctggtgttcctggacctccaggacgacgacgccggggaccgcctcgtggcgtcagcgcccggcctgggcctggcggaccggttcctgagggcgttccggccggcgctgtacggggtgctggtgtcgacgtcgacgacgtgcagcgcggcggaggcggacggcgacgactgcagcgtgtgcctgtccggtttcgtggccaaggccgtggtgaaccgcctcccctgcggccacctcttccaccgcgcctgcctcgagacctggctccggtacgagcgcgccacgtgcccgctctgccgcgccaacgtgccccntccgcccgaagagacgcccgtgctccgctacccggagctcgagtgatcccgtccccct

SEQ ID NO: 457453 - DNA, 564 bp, Sorghum bicolor
  unsure (1)..(564): unsure at all n locations
cgtccgccgacgcgtgcgcccacgcgtccgcccacgcgtccgcggacgcgtgggtccgaggagcgagttcagaagcgccctcgagagggtggtgcactacggtctcgagcggattcagtaggtatacttaccggcggctccacgcggtttctttagttctctgaaagatcctgggggctccatgtggatgtagagcaactcctgccggaatcccgatatttggctccggngagatgattggcgcagcagcatcacatgcgagtgtgtaaccgacactgccgcgtacccaccaacctcgtgggaactggagcattttgcttctgcagctggtgtcatgtatattgtatctgcaaggggaataggaaaacaaaaaagagagaggcaggtagcatatattgtatagttggttctccatttctttgggcactagcataaagcttggtgtgcagtagttctaatgttgtattgctgttgtaagctgtaactacaaacagagaaactgttctggacgaccacgacgttgacatgacttatntatgtatagatatgcaatacttnctgatc

SEQ ID NO: 457454 - DNA, 599 bp, Sorghum bicolor
  unsure (1)..(599): unsure at all n locations
cgtccgcgggcatgtactcgctgctcaagcacgcctcctgcccggagtcgctcttcttccacttcctcgccgcggagggcggcggcgcgccgggcgtcggcgacctccgggccgacgtgtgcgcctccttcccgtccctgcgcttcagatctacccgttccgcgccgacgcggtcgccgggctcatctccgcgtccgtgcgcgccgcgctcgaggcgccgctcaactacgcgcggaaccacctcgccgacctgctcccgcgctgcgtcccgcgcgcgatatacctcgactccgacgtgctcgccgtcgacgacgtgcggaggctctgggagacgcgcctgcccgcagccgcggtcgtcgccgcgcccgagtactgccacgccaacttctcccgctacttcaccgaggccttctggaacgaccccgtcctcggcgccagagtctttgctggccgccgccgcgcgccctgctacttcaatacgggcgtcatggtcatcgacctccggagatggcgcgttggcaactaccgccagcgcatcnagcgctggatggagatgcagaaggagaaaagaatctacgagcttggctccttgccccctt

SEQ ID NO: 457455 - DNA, 614 bp, Sorghum bicolor
cgtccgggatgcaagagctaatggcacagcgtggtggggcaaatcagcagaatgcgggccaacaaaaagctcaggaagatgcgaaacaggaagctgaggaacgccgagagatgatgcttgctcagatattatcttctgaagccagagaaaggcttcccgcatagctttggtcaaacctgacaaagcaagaggggtggaggatgttttgctgagagctgcccaaactggtggaatatctgaaaaggtgtctgaagaaaggcttatctcccttctagagcaaattaacacccagacaaacaagcaaaccaaagttacgattcagaggcggcgaagtgtccttgacgacgatgattagatgcgacctgcaaaactttgcttcagagtgtatgatgggctggtgattgattaaaagcggtaccgaactgtttgcttaaagacaatgatctgatgcgactatcaacagccatcaaaacttggtacttggtagactatttcatggatattcggttgtatatgatccgatgtcttattggtgtgtgtgtgccccattgaggacagtcgatattggctgtgtcgtttatccctgaaacaccggtctttcttgagttatgggc

SEQ ID NO: 457456 - DNA, 627 bp, Sorghum bicolor
  unsure (1)..(627): unsure at all n locations
cgtccgatgcaactgagagtttcatgtttaaatagtgtatcaaatcttaacgtagacacgccatctttcttcgtggtccaagtgtcaaatattgtttgatggtcaacggttcgcactttgtatgtccttcatgaacgcaagatatttacaaactatctttgagtacactttcatgaacaatgagctcactggcatttggtttccaggcagttctatctttgtatgcttctaaacggatctctggtattgttgtgcacattggattcaatacaacttctgttgttcccatctttcaaggtagggtaatgtatgagataggtgttgaaactgtggggcaaggtgcccttaaactcactggatttctcaaggagttaatgcagcggagaaatatatcctgtgagtcgctgtacacagttcgaaccatcaaggagaaactntgctacgtggctgctgattatgaagctgaattacggaaagatacacaagcatcctacgcggntgatggtgaagggtggttcactctgtcagaagagagattcaagactccagaaattctatttcagccccatatgggaggaatgcgtgctatgggctttgcataagcagtaactctatgtatggatcact

SEQ ID NO: 457457 - DNA, 389 bp, Sorghum bicolor
  unsure (1)..(389): unsure at all n locations
atccaaatgagcgngggcgcgtgggtcgcgccgcgtctaaatttctaatacggctcattcttgattgaaccctggtacagtaatttacatcatggtacaaggcgaagcagttctctcgcgcactcacatgcatncggacaccttctcacttgccggcacgaagttggtggcgtaggcccaggcgttgttgttgacggagtcggcgaggtggtcggcgaggttctcgagcgggcccttgccggtgacgatggcctggacgaagaatccgaacatggagaacatggcaaggcggccgttcttgagctccttcaccttgagctcggcgaaagcctcggggtcgtcggcgaggccgagtgggtcgaagctgccggcggggtagagcgggtcga

SEQ ID NO: 457458 - DNA, 407 bp, Sorghum bicolor
cgtccgccgacgcgtccggctggtcccatgacggcgcgaggcagaccatagcaaagctcatggccagtcaggacggttcagacgatgctgtcgagctgggcgtggcgtccagcaatgcacactgcttcgcgttcctcatcaaagatcccaaaaaggtgaaaacggtcgatgagatgagagagaggctgaggatgcgtggtctccggtgccacatcatgtactgcaggaacgcgacaagacttcaggttgtccccctgctagcatcaaggtcacaggcactcaggtaccttttcgtgcgctggggcctatctgtggggaacatgtatctgatcactggggaacatggcgataccgatctagaggagatgctatctgggttacacaagactgtcatcgtccggggtgtc

SEQ ID NO: 457459 - DNA, 555 bp, Sorghum bicolor
  unsure (1)..(555): unsure at all n locations
cgtccggagaagacagctctgccggcacttgtctgtcgttggtatcgccggcatctaagggcgcgatttctcccgtggctaccagcgataacgccagcggcagattttgtcccaccatgccaccatctggctcttctggggtcaccttgcactctcaggctcagcagcaggctagcaggaaggcgaggcggtgctggtcgccggagcttcaccggcagttcgtcgccgctttgcatcaactcggcggccctcaagttgctactccgaaacaaatcagggaggtgatgcaagtggacggtcttacaaatgatgaagtgaaaagccatctccagaagtaccggctgcacaacagaagatcccccggtgttgctccggtgagccagccgatcatgttggtgggtggcctctgggctccacaggagcaaagcagctccggttcaccccagggtccgcttcagttctcgggatcaagtgtggccatttctaccgncaccgtcggcggtgacagcagcggcagcagcagcgacgaagacgacaagtccgaaggctacagcc

SEQ ID NO: 457460 - DNA, 558 bp, Sorghum bicolor
cgtccgaagggaagaaaggagtttatgatcattcgccagagaattgtcaagttacaggctcatgtacgaggacatcaagtgaggaagaactatcggaaggtagtctggtcagttggtatcgtcgagaaagtcatactgagatggaggagaaagaggcctgggttacgcaattttcagcctcagaaacaactagaaggtccatcacaaatccagcctgcgaaggctgaggatgaatacgatttcttgcacgacggcaggaggcaggccgaagccaggcttcagagagcacttgcccgggtgcactctatgtcacagtatccagaagcaagggagcagtaccacaggctcacaacctgcgttgctgaaatgaaacagtccaggatgatgcaggatgagatgctaagtgaggcggctggtggtggtgtggacgatttcatggctggactggaggacctgatctgcattgatgatgccgcgatgtctgccatttggtgaagctgtgagagccttttagatcagttattaggcagggaggcggtttccttattccttgtcaga

SEQ ID NO: 457461 - DNA, 554 bp, Sorghum bicolor
cgtccggttatatttcaactgtctgaagacatcccttgcatttctgctgttgttgtggctctccttgctgatccagagccaaaaattgactacaccctgaaggccattggaggaagcctaactgcagttcctggactttctgacatgattgatgacactgtcaattcaattgtttctgatatgctcttgtggccacacaggcatgttgttaaacttggtgtcaatgttgatacaagtgacttggagcttaaacctcagggaagactttctgttactgtggtaaaagcaacttctttgagaaataaggagatgattggtaaatcagacccttatgtgaaactgtacctgcggccaatgtttaaggtcaaaacaaaagtcatagatgacgagctgaatccagaatggaatgaaacatttgatctgattgtcgaagacaaagaaacccaatctgtcatttttgaggtttacgatgaagacaaacttcagcaagacaagaagctgggtgtggcaaaactagcagtgaaccctcttgaacctgagatcacccaagaatt

SEQ ID NO: 457462 - DNA, 554 bp, Sorghum bicolor
cgtccgcgcttcaaggcggggtaagggaaaaggtggagctggccaccaagtttggcctctgctgcgccgacggtaagcgggagatccgcggtgacccagcatacgtgcgggcagcgtgcgagggcagcctcaagcggctcggcgtcgactgcattgacctctactaccagcaccgcatcgacaagaaggtgccgatcgaggtcacgattggtgaactcaagaagctagtggaagaaggaaagataaagtacattgggttatctgaagcatctgcgtcaacaatccggagagctcatgcagtccatcctatcactgcagtacagattgaatggtcattatggtctagagatgtggaagaagatataattcccacttgcagagaacttggaattggaattgtagcttacagtccactaggaagagggtttttgtgcagtggagcaaaactagttgactcactgtcggagcaggacttccgcaagcatatgcctagatttcaaccggagaatattgacaagaatgctaagatattcgagcatgtgaacgcaatggca

SEQ ID NO: 457463 - DNA, 567 bp, Sorghum bicolor
tggggcccacccttccgggaagcgcaagatgcttagaaaatctcttcaacatctatgctcttcttctgagatcggggctgctcttgacaacattggtcttccagttacagctagaccttctgatctaattttggatgatttcgtgagattgcacaaccatttgacgaaagtatgactatagagtgccttcaaaatgcctaaggaattgcttgttggcatggtgttgaacagttgaagtaacttaggcctgaccgcctgagagttgctctgcaggtgccttcagctcagctgccgcagcacaggtttggtattctggcgtgcaggctgcagttctcctgcatagttgatcatgttcaaacttcaaaccaacagatttccatgccatggaaaatgcagaatcgtcctgaaaagaagggtgctacatctacgtgtgccgcgtatttacagttcacgatctatgatgtacataacgggatctgctggttcatcccttcgcaaataaaagaaggccaaaagatgctggagcaatgcgaatgcatatcaatgatggtttgccggtgcatgtgc

SEQ ID NO: 457464 - DNA, 559 bp, Sorghum bicolor
  unsure (1)..(559): unsure at all n locations
cgtccgcgacaacgaggtcaagaactactggcggacaagggtgcagaagcatgccaagcagggggagtgcgacgtcgggaggcaccggttccacgacgccatcaggaacctctggatgccgcgcctcatcgagaggatccacgccgacgaatcatcatcagccgccgtcgccgccgccgctgccgctgccgagaacgtctctcgctactacacgggcgcgagcccatcgcacgagctgtcgtcgtcccaaccggcggcggcgtacggaaacgctgtgcccgtcggcaactgcgcgcgcgcgccgtccccggacgcgtcgtcgagtgtcaccgggtcgtcgtggtcacgggaggcgtcgccgccgtcgcagctccaatcgagcagctgctcgaccatggcgggatgctctacttctaccgaccaatgccacaacaacggatgctccagcgccacgagcgtcgtcgacatgttccactagagcntgtcggagctttttgctcgagccaaccatgacgacacggaattcggattcggattgggagaaaccggagacaactgg

SEQ ID NO: 457465 - DNA, 554 bp, Sorghum bicolor
  unsure (1)..(554): unsure at all n locations
cgtccgcccacgcgtccgcccacgcgtccgcccacgcgtccgcccacgcgtccgcccacgcgtgcgcggacgcgtgggcggagcggtacgccatcttcccggagatacaaatcgtcatgcagcccatgggcatggtggcgggcggcgcgcctgttgggtctgacgccggcaaggtgccccggctcggcgtgctccccaagtatgccacggacgagtcggagatgcggtggttcgaggtgccggggttcaacataatgcactcgctgaacgcgtgggaggaggccgacggcgaggagctggtgctggtggcgcccaacgtcctgtccgtggagcacgcgctggagcgcatggagctcgtgcactcgtgcgtcgagaaggtgcgcatcaacctgcgcacgggcgccgtgtcgcgcaccccgctatcggcggggaacctcgatttcggcgtgatccacccgggctacctnggncggngcaaaccgtacgggtacctcggcatcggcgaccccatgccgaagatctccggcgtggccaaactggacttggaccgcgcc

SEQ ID NO: 457466 - DNA, 443 bp, Sorghum bicolor
cgtccggagtatctctggtgcattgaccctttagatggaacaacaaactttgcacatggggacgcccagcttttctgtgtccattggtgttctcttccgtgggaagcctgctgcttctactgtggtggaattttgtggtgggcctatgtgctggagcacccgtacaatttctgcatctgctggtggaggagcttattgtaatgggcaaaagattcatgtcagtcagacaaacaaggtggaacaatctcttctcgtcacaggttttggatatgaacatgatgatgcctggacgaccaatataaatttgttcaaggaatttactggccttagcaagggaatgcgaaagcttgggtctggcccttcttacatgttccacgttggacttggtattacaaaagcttactgggaataccgacttaagccatgggatatggctgctggcg

SEQ ID NO: 457467 - DNA, 559 bp, Sorghum bicolor
gcgaacgccgttgccgcccggtgcgtggaagtgcttgacggtgcccgggctcggaatgaacttcgtcgggtcctcggcgttgatccggcactccagggcgtgaccgcggatcaccacgtcgtcctgggtgtaggacagcgggttgccggcggcgatgctgagcatctccttgacgatgtcgatgcccgtgaccatttccgataccgggtgttccacttgcacgcgagtgttcatctcgatgaagtagaagttgccgttctcgtagaggaactcgaaggtgccggcgccacggtagttgatgtcgatgcacgccttgacgcagcgggcgaagacttcctggcgggatttctcatcgatgcccggggccggtgcttcttccagtaccttctggtggcgacgctgcagcgagcagtcgcggtcacccaggtgaatggcgtggccctggccgtcggacagtacctggacttccacgtgacgcgggttggtgaggggatttttccagatacaccatcgggttgccgaacgctgcaccggcttcggtgcgggtcagtttggccga

SEQ ID NO: 457468 - DNA, 406 bp, Sorghum bicolor
cgtccgagacgagccgtttaaataggtgtcaagtggaagtgcagtgatgtatgcagctgaggcgtgctaacgaacaaacgattaattgttgcagaatgctactgccttttccgaataaatctgtgacgattgtaatcgaattttcaacttgaataatagtgtagatgctaaaaaaaaaaaaaaaaaaaaaaaaaaaaaaaaaaaaaaaaaagaagggcggtctaaaaaaaggaagctagctttacgcaggcctgcaatcaaatacgcttgcttttaaagggggcgaccttaatataagtgaccggaatttaacaaactggcggctggttaaaaactgcataacctgaactaacttaacttaattgaaattcatcttttttcagctagttcgctttataccaggtgg

SEQ ID NO: 457469 - DNA, 558 bp, Sorghum bicolor
  unsure (1)..(558): unsure at all n locations
cgtccggccgagcaagaactactgcgacgcgaacaacacggagtggccgtgccaggcggggaaggggtactacgggcgaggcccgctgcagatctcgtggaactacaactacgggccggcggggcagagcatcggcttcgacgggctgggcgaccccgacgcggtggcgcgcagcgccgtcgtcgcgttccgggcggcgctctggtactggatgaacagcgtgcacggggtcttcgtctccgggcagggcttcggcgccaccatccgggccatcaacggcgcgctcgagtgcgacggcaagaacccggactccgtcaacgaccgcgtcgcctactacaagcagttctgccaggatttcggcgtcgacccaggaagcaacctcacatgctgatgactgacgtcgtgtactagttgtgtggatgtggtcatgtggatgtgattcggtttggtagtgtgaattgtgtgtaaatngtgtgtttggggatcggagcggcgagacatcaacaagctagtaggttagggatgtgatgttgtgattcagagacttatatatacgga

SEQ ID NO: 457470 - DNA, 251 bp, Sorghum bicolor
  unsure (1)..(251): unsure at all n locations
cgtccggtggtggccgtgatcgcgagaggacgcccagcctgtgaggacgcacggacgccgggtcatgcgctgctgagctgtatgtgagggtctgaagaatgtgccatgcccatgcgtgtaaattaccaagagggggaagaatccttttcattctgatctctgatatgagtgctctgcttcaatttgtgcctgagatgtgctactcacttaagtttttggaagttaattagttcgtgcgcgtctgngacana

SEQ ID NO: 457471 - DNA, 607 bp, Sorghum bicolor
  unsure (1)..(607): unsure at all n locations
gcgcgtccgcagtttttttatgttgactgcacacatttgagaatcatgagtaaagaataatggaaataggtggcgttcacaatttttgaatgcccatacaacccaaaggtatcagatggatttgaagtagaatatgttttttaaagtttccattttaattgccttcttcctcatgtgcagctgtgtccattgtatccacaacccagaagtgttactgaatgaactcaaatcgccgtctgatttgctcgattttggcgagttctcagattgcatgaatttcagtactcaggatggcagccccttgctaaatgttgtcaacccaacatttgactatgtgccaccgaagcttgtgagcctattcatcactgacactgggggccacagtccatcttatatgtatcggctaattgctgagtattactcagctgatgatctggtagtgagacggaaggcaacatcttgaaagaagacaaaaagcactgcagagtccccttggtgctcttattagcgatggtgctgtgctcaagtggaatcacctgtttgtggtccaattactgtcaaactgcangaaatcaatgcangcattctcgcgcatttgttgtaacca

SEQ ID NO: 457472 - DNA, 622 bp, Sorghum bicolor
  unsure (1)..(622): unsure at all n locations
cgtccggctcgccgagctcgcgctcctcgaccccaagcgcgccaagaggatcctngcnaacgcgggggtcgcttctaggtgcaaggagaggaaaatcaantacaccagtgagctggagaggaaggtgcagacgctgcagacagaggccaccacgctttcggcacagctcacgcttcttcagagggacacctcaggtttaaccaccgagaacagggagctgaaactccggttgcaggccatggaagaacaagcgaaactccgagatgctctaaatgacgccctgagagaagaagtccagcggctcaaaatagctgtagggcaagttcctaacatgaacggaaatcccttcaatggaggactaccacagcagcagcagatgccaagctatttctcacaacaacagcagatgcaatacttcggcagccaccagggccagcatcacaatccaaaccatcacccccagaactcttcaaacggtggtgggcagttctttgagtgactccatggatttcatgtgaggaccgaggagacagctcaggagttgcctgagatcacaatcacataccaacttcaactaaagtactgtaaaggtagctgatgtataccatattcagtaatgata

SEQ ID NO: 457473 - DNA, 473 bp, Sorghum bicolor
cgtacggagacagggagcttagcatcaggcaagctgttgttgattgggtgatcgatcgatcgagggtgtgtactaggggccactggagaccgtcagaggacgagaagctgaaagagctcgttgcgctgtacgggccgcacaactggaacgccatcgccgagaagcttcaagggagatcaggtaaaagctgcaggctgaggtggttcaatcagctggacccgaggatcaaccggagccccttctcggaggaagaggaggagctgctcctcgcctcccaccgcgtccacggcaaccggtgggccgtcatcgccaggctcttcccggggcgcaccgacaacgccgtcaagaaccactggcatgtgatcatggcgcggcggtgcagggagcggatgaggctctcaaacaggcgtggcggcggcgctgcaggtgcggctgtcgccggcgccggtgctgtggaagatgacaataaccct

SEQ ID NO: 457474 - DNA, 631 bp, Sorghum bicolor
  unsure (1)..(631): unsure at all n locations
gcgcgtccgatttggaggaggatgagattgcaaattatgctttgaacctcgaaaaggtcttggctgaactgccaggtccagtcctaaatggtacaacgcttacagtcgaggattttcaccaggaactaaaatgcagtatcaacatcaaacacagggatgagttcgatgaagaaaaggagcctgacggaatggttcttgctgggtggtctggcccagttgataagcaaattaccagtaatggtgagaatagatcagttccatcttcatcgaatacagaagatgttgatggtactgccgaggatatatcagcgaagcctggaatgaagcgtaagctgaacgaaatattagaggcaaaggaaaattttgatgctcttgaaaatccttcggatgttggttcaagcagcgctcaagttgttgaagatgatgacgacgacgagcttgttatgtttgatgaagacccaaggcaaagcaagaaagagagattgcnatagcaaactggtgcagcgagtacaagttctggactcccggcatcatggctaacacattgttcaatcataacatctttgataacttatctatgcggtgatatgctaggttgatgttgagacattggtaacaatgcctgagatac

SEQ ID NO: 457475 - DNA, 480 bp, Sorghum bicolor
cgtccgccgcaggtggaggaggggttccacgccggcgcccgcctcagccccgccgagcttggcgagagcatgctcgctaaccgcgggtccccaagccgcgcactccgcaccgtcatcagcgcgctgcagcacgtggcgccgtcaccgtcgtcagcgcagccgcagcggaccagcacggcggcgcggccaccgaggctgacctcgagatggtccgggcacctcgatgtggccagcgccgcggcgtcggatgaggccagcgcggcggaacagtcaccgcgaagcggaggcgggggaggtttcgccaaggacacgccgatcagggagatcaagaagctctacggtatgatcaagtacaggagtcgaaaggacgccggcgtcgtgccggtggacgacagcgcggcgtcgctgaacgggcggggcagcgacgtttgctccgagaaggaccggtgattagttaattgggctttcttgttctttttc

SEQ ID NO: 457476 - DNA, 428 bp, Sorghum bicolor
gtcggacgcgtgggtttttgagggagcgatgcatcacactttattgattatcaaacatggttacatcgtttaccagagtctcaaaaataaaaccagaggattcatcgactcaaatactttttttttcaaaaataaagctactctagctagttcatgcgccacctgtgtgtcgttaactgaacagagcatcctgggagcagtgcacggcgtcctcgtggaaaatgagaaagaaaatgatatttctccactgcctccgcctcctttcatctccagtataatgtatggctcgataagaatacaagacacacatctttacaaatcacaacactggtaaacttgcacagagtaaatgattacacgtccagttccttatgcgggtacagctacaggtctttggctggtcttgattcctttgatagcttcagcga

SEQ ID NO: 457477 - DNA, 349 bp, Sorghum bicolor
  unsure (1)..(349): unsure at all n locations
tccacaagatatctatattattgtcaatgaccccccacaacaaccctgtgttcttacattgtcaatatttttttttctgnttngaaataccaacacaaacataccctaatttcaattttatcggccgtcttcttgcaccaagattaaactctttaaagaggatttaagcctctacagtctgtcttcttttcatcagacctacaccctcaattaaatattctttcaactactaacaactcaacgcaataacttcctatcaacacttcatctaacccctccatatcttcatttaatctgacttaccctctaatctcatttattcaaaactttcaaaatcccatcacatcct

SEQ ID NO: 457478 - DNA, 604 bp, Sorghum bicolor
cgtccggagagatcacagctacagaacaaagagcgggcatttcaattgttgagagcaaaactgtacgagataaaattaagggagcaacaagagtcaataagaaaccagaggaaaatgcaggttggtactggtgctcgatctgagaagataaggacatacaattacaaggataacagagtgacagaccatcgattaaagatgaactatgaactgaccggcttccttttaggagacatcgaatcggctgttcagtcttgtgctacactggagcagcaggagctcttggaggaaatggccagttccgtgggcgcagtgaacgtatgattcaggcaattcggcgttgagatcaggtcatcaaatagaatcaagaaactcatgatgtgttcaaaaccgatgaagatgattgatagttgtacaagaaactgacaaaatgaactccacataggaaatttttctgtagtccacatggtcatgagttcatgacttatacccatagaccaaacccatgcattttagcttccttaacgacagcagatttttgagtattagaaaatatacacggtatgtacaattcaactgctccagtattcacaagttaatgcat

SEQ ID NO: 457479 - DNA, 462 bp, Sorghum bicolor
cgtccggcttcttgagatgatgtcagggcgcagatcaatggacaagaatcgccctaacggcgagcacaaccttgttgaatgggcgcgccccctcctaggagagaggcagcgcttctacaagctaatcgaccctcgcctggagggcaacttctcagtgaagggcgcccagaaggccgcccagctagcgcgcgcctgcctcagccgggaccccaaggcgcggcccttgatgagccaggtggtggaggtcctcaagccactgcagaacctcaaggacatggcaagtgcctcctacttcttccagacgatgcaagctgagcggtcgagcagcatgaacgggaggagcagccatggcctcaagacgcagagcccattcgggcggaacgggcagccgcccatgaggagcctctctgatggcccccgcgcctccccgttccgctactcaccaaagccgaacgtgaaatg

SEQ ID NO: 457480 - DNA, 446 bp, Sorghum bicolor
cgtccgcttccagtcatgtatgttttggtggtttcaagcacaggttatattttttgagttaatgtgggatggatgctcctgggctaagtgcatctaattctatccctggtcaatcaagaacacggaatacgccgccaaatatataacgcgatatatatatatttaattgcacctttactgtgcacccaccggcgacactgctggtgccccaaaaaggcgcgtgccgctctaccaggaatcaagctttcctacgcgtccatccaaactcatatcttttttatcgcgtgacctatattcaattaactggccagctgtttacaacctcgacgactggaaaaaccctgcgcttacccaactgaatcgtcttgtactacatctcgctcttggcagttatactaatagcgaacaggcccccactcttccccctactcaacatttgcgcaacc

SEQ ID NO: 457481 - DNA, 643 bp, Sorghum bicolor
cgtccgggctctactggtcaaagagatgctcctggaagggttttcaaaaacagaaaaatgcctgggcgcatgggtggtgtgcaacgcacagtgaagaatgtatgggtttaccaaatagacccagccaggaacttactatatctgaagggccaggttcctggtcctcaaggtagctttgttttcgttaaggattctatatacaagaaacctgacacagctttgctcccatttcctacatatttcacgcaagaaggcgagcctgaagacttggagcccctgattgctgatcttggtgatgttgatccattcatggcagctgattaaaagacaatggacaaagttggcgaactcccttagtgttttatgcactccttgagcttgtctgttccacgagattgtgaaattctcgatggatttgtgagcagttcctgaatcacaagcttcatccggttactggccagcctgatcaatgttgttccatgtacattaccttggcagtataccagggccccaactcaattagggtttttagattattgttttgattgactgagttgaacaccttttttttaataaaaattgtaagcgaagccacaggtagtagtatataaaattggaatatttcactcctgatagtgagatc

SEQ ID NO: 457482 - DNA, 477 bp, Sorghum bicolor
gcacgcgtccgtgccggacctgccggcgttcgcgacgggggcggtcacggggcccgtggtgcgccgggggggtccatagcgggcgggtgcgagtacaacctctcggagctgcggatggagtgccacatgggcacccacgtcgacgcgccgggacacatcaaccaggcccacttctccgccggcctcgacgtcgacacgctcgacctcgaagtcctcaacggacctgcattgctagttgatgttccgagggacacaaatataacagctaaagcaatggaattcctaaaaatcccgagaggagttcgccgagttttattcaggacactgaacactgacaggaagttgatgtggaggaagggaggtgacatgagctatgttggatttacagaggatggcgcacagtggttagttgacaacactgacataaagctaactggagttgacggtctatcagttgcagcatttgattacttgatc

SEQ ID NO: 457483 - DNA, 520 bp, Sorghum bicolor
gagttttcgccaccagctgatccaagcgagaaaaaggctgatgatgctggaacaggtaaagatataatgagggaacggcgccggcaagtgtttttcagtggtattatcactgctgttggaattgtcttgcataatattccagagggaatggctgtatttcttggatctgtcaagggtcttcatgtgggtctgaacttggctgttgctattgctttacataacataccagagggggttgctgtagctcttccaatctattttgctaccaaaagcaaaaagcaggcatttgttgtggcagccggctctggtttggccgagccactaggggttattgctgtagctttcttgtttccaagcagtttgaatcctgacattcttgaaggcctacttggatctgttggtggtgtcatggctttcctcactttgcatgaaatgctacctcttgcatttgactattgtggccagaagcaagctgtcaaagctgtttttgtgggcatggcctgcatgtctgcaagcttgt

SEQ ID NO: 457484 - DNA, 448 bp, Sorghum bicolor
cgtacgctcacgcgttctctcaggcgctatttggtgtattcgatggccacgccggaaaaaaggcgggtgagttcattggggagaacatgcccaagtttatcaccaaggagttcaagaaggtaaacggtggagagatcgaaagagccttcaagaggagttacctgaagactgtcgaggagttcctgaacagggacgagagctgtggcacatgctgtgtcacaaacggtctacaaaagggttgacttgtcgtctacaatgctgcagacttccgtgcggcgctcaacccagcagggaaggccgatgcactcacctcttaccaccaggactatcaggaggacaagaaggatagaatttagaattctatatgtcctactagccttataatctcttgcacaaactctgctaatgcaattgaattatgcatctctctgaatcaactagatgattg

SEQ ID NO: 457485 - DNA, 483 bp, Sorghum bicolor
cgtacaggccaccctttttttttttttttgcacacatcatcatcatcatcaagccattgattcaggggagaggggacatattatggaacgagtatcccatttttacattggtttacaacatagtacaagtacaccatgcatcgcaccacgaacattccatcatcattgacagtctactccgcagtccgcccccacaaaaaaatgaagtttcgctatatttagctctgcagggcaaagaagagaaggaagttcgatttgagttgaaaacacatggctccaagagggatgatggccctgttatcttggttgtaaatgcttgtgccagtcgtgaccttcatgaccatgttgttggggtgtgctttgtagcccaggatatgactgttcataagttggtcatggacaaatttactcgggttgagggggactacaaggcaatcattcacaacccaaacccgctcattcctcctatatttggtgctgacc

SEQ ID NO: 457486 - DNA, 537 bp, Sorghum bicolor
  unsure (1)..(537): unsure at all n locations
cgtacgggcgcgtgggctcagatgcgcggaaaacccagcgaagtattttgctaagctctganaagggccattaaaggtttaggcaccgatgagaagacacttacaagggtcgtggtgacgaggactgagattgacatgcaatatatcaaggcagagtacttcaagaagtataagaagccattagctgaggctatcaactccgaaacttcaggaaactatcgggcgttccttctttcacttgttggtcatggccactaggctaggtttcgaccatgggagatgatattccatcgatccaccctaaatgcagcgatctaccaggaaaacttatgatgttgccatttatctgtcgtgactcgtggattcgtctaactgccgcatatgtggttcccagtatgcttgtctaatgtattcgtgtatatatttggattgaaactgggtttcttgttggaaaattctggatggggcatagagctgttgctggtcacggtgggcttgacttgacttgtctctatgacaccaataatattatgtaat

SEQ ID NO: 457487 - DNA, 533 bp, Sorghum bicolor
  unsure (1)..(533): unsure at all n locations
cgtccgcggacgcgtgggtcttgatacttgaagaaaagcatagccggggtctcacagagatcacagacgacttctgcccagcgctgancatgcggcaactgtaccggatcagtacgatgtactgcgacnacaagtatggaaccctgggcattccatcagaagtcatctcgagcatgcgaatcaagatgatcgagggctcgagcactccatcggcgcacgacgacatcaactcgttcctgctagacgatgacttcagcataccgttctccgtcgatgacttcacgaagcttatagtgcacgtcgacgtagcggacatggacctgccaccactgattcaggagagcaacggctccaaactgggacactgaactgatcgacaaacttggcagggacaaatatgcacgcccttttttgtgttgcggtgatgtacatagtgcgtgatatattacgacatataccacagttttgatatctgggtttccaacttttgattgcatatatatacggttttggtttttctttttngactgatc

SEQ ID NO: 457488 - DNA, 250 bp, Sorghum bicolor
ggtgacccacgcgtccgagatgggtctgagcgaccagtacattgttgccctttctggtggccacaccttgggaaggtgccacaaagagcggtctggttttgagggggcctgggcgttaggcccttttgtcttcgacaactcttacttcaaggaacttctgagtggtgacaaggagtggccattctttcaagctcccaagttgacaaaaacccctgcttaagccaccccttgcctttccgcccctctttgt

SEQ ID NO: 457489 - DNA, 515 bp, Sorghum bicolor
cgtccgcaacaacaacctcagcgacgaggagagccggcagctggacaagcggtcgcggcagatccagtcggagatccgcacggtgggccacatgcgccaggcggacctgctgccgctggcggcgcacgtgccgcgcccggactgccactacctggtgtacgagtacatgaagaacggcagcctgcaccacgcgctgaaagccggcaacagtgccgtcgaggtcgaggacggcggcggcggcgaggacggaggcaccggcacctgcaccggaacctccggcgggctttcgtggccggcgcgtctccgcgtggcggtgggcgtggcggcggggctggagtatctgcacgtctcccaccagccggagatcatccaccgggacctgaagccgggcaacatcctgctggacgacgacctggagccccggatcgcggacttcgggctggccaaagcgatgccggacttgcacacgcacgtgacgggtttgaacgtggccgtcacgcttgggtacattcgcg

SEQ ID NO: 457490 - DNA, 504 bp, Sorghum bicolor
  unsure (1)..(504): unsure at all n locations
gacccacgtttncgtcttgatgggagctcagttcaagcaccattcatgtccagtacaaaaaagcaatatattgtgtcttacaacaacttaaaggtgcttaaacttccatggcagcagttgggtacaagaggcaattctccatgtacattcttcttccagatgcaagatggcatctggagcttgtctgaaaagttgagctctgaaccagagttcctggataagtatatcccaatgcagaaggttccagttggacagttcaaggtccccaagttcaagatatcctttggatttgaggcatctaaattgctcaaaggtcttgggctccagcttccattcagcgcacaagcagacctatcagagttagttgattcaccagagggacagaacttgtctgtttcgtccgtattccacaagtcattttgtcgaagtgaactaagaaatgaacttagggccttctgcgcaatttgtttaaccagttgtgctccggtcattctcgatgcctta

SEQ ID NO: 457491 - DNA, 354 bp, Sorghum bicolor
  unsure (1)..(354): unsure at all n locations
cgttcggtgacaccttggtttctaatgaaggcgatcgcaaagcggttccaggatacaaaatctggtggatctattgtgttcttgactcaaattgtgggtgcgttatagaggatggtatccaggttctncaacatatggtacaagcttaggagctattcaccaattggtcctactgtctgcaatggagcttggcaagcacaagataagggttaacgcaccctgtcgcttcctgcatctgcaggacaagtaccctatctttgttggtaaggagaatgcttataaagcaactgcagaggtgttgcccctactgaagatagctgagatccatagaagttccttatctttcattgttct

SEQ ID NO: 457492 - DNA, 496 bp, Sorghum bicolor
  unsure (1)..(496): unsure at all n locations
cgtccncgggcgcgtgggcggactcctgaaccgactcctgggcggacgcgtgggctagctcagagcaaagctccctctcgtctcagtctcagtctcaggcgctgctgtgcatcnttttgctcctgtgctcgctctcaacaatcaaatggcggcgccaacggcaacggcaccggcaacggcaacggcaacggcgccccccttgtggtgttcgatttcgacaagaccatcgtcgactgctacagcgacaactgggtcgtcgacgccctcggcgccacccgccggttcgacgacctcctccgccacctcccctggaaccacgccatcgatgcgatgatgggcgagctgcactcggacggcaagacggcggaggacatcatgggcagcctcagaacggcgcctctgtcgccgcacgtcgcctccgccatcaaagccgcctacgccctccggtgcgagcttcgcgtcctcagcgacgccaacgccttcttcatcgacacca

SEQ ID NO: 457493 - DNA, 508 bp, Sorghum bicolor
  unsure (1)..(508): unsure at all n locations
cgtccggcgtcgcggagcgatagcgcttggcggccttggcgtgcgagcggcgcccttcacgtacgcggcgcacgcgctggccntcacnncgggggccatgtgtctattctgggccatggagttccncnncnnnctcgccatctagccaccaacaagaacctcatcttcaacgttcaccctgttcttatgcttatcggttatattattatcggcggtgaagctataatggtatacagggtacttccaacaacgaaccatgacacaactaagctgatccatctaattctccacgggattgcacttgtccttggtgccgttggaatatattttgctttcaaaaatcacaatgagagtgggattgccaatctttacagtctgcactcttggattgtgatcggaacaattactttatatggtattcaatggataattggatttgttacattcttctttccttgtgcttcgccaaacgtgaaaaatggcgttctttctttgcacatactctttg

SEQ ID NO: 457494 - DNA, 626 bp, Sorghum bicolor
  unsure (1)..(626): unsure at all n locations
gtcgacccactcctccngccggccggcgtcacacaagtgtcagtcatcacaacctanctagctagaaggaggcagtacagtacacatggctccctccgtgatggctacatggcgtcgtgggccaccttcggcgtcggggctccattccaanggctcaagttaccgcggaggactccccatcgcccgccgctccaccaacggcgaaaggatcagctgcatgcaggacacgtgtggccgatccaaagcatctaccagctgccgccattgtcgactgaggagctgctgaagcagcatcagaagatggagtacctgctgcgctccaactgctgggtgccctgccgcctcgagttcagcaaggtcggcttcctggaccgcgagaacaactcgaggtcgcccgggttcaacgactgcagacactacaaaagatattttattttttgacattgtatatatctcatagtatatacaacttatctcatatatagctggctgtttatgacatttgtttcacgcaaatagtcaccttaaaataaaaaaaaaaagggctggctctctaaaagatccaaacttaccttcttcttcattgcaatattataagttttttttttaatgtcactcaaatatta

SEQ ID NO: 457495 - DNA, 527 bp, Sorghum bicolor
  unsure (1)..(527): unsure at all n locations
cgtnccccgcctgctgcggccgccgccgccgcgcccgcacagccgcagcaaccatggcggattcgaaggccactgcggcggtcaccctccgcacccgcaagttcatggccaacctcctcgtggcccgcaagcagttcntgctcgaggtcatccaccaggccgcgccaacgtctccaaggcggagctgaaagagaggctggcgaagctctacgaggtcaaggactccaactgcatcttcgtcttcaagttccggacccacttcggaggcggcaagtccaccggcttcggactcatctacgacaacctcgaggccgccaagaagttcgagcccaagtaccgcctcatcaggaacggccttgctactaaggtagagaagtcacgaaagcagatgaaggaacgtaagaacagggcaaagaaaatccgtggtgtgaagaagacaaaagctggagatgccaagaagaagtaagggggaagtttggttgctgccatcttcatcttgtttgctttggtttgttagggtgggttcc

SEQ ID NO: 457496 - DNA, 363 bp, Sorghum bicolor
tcccggtcgacccacgcgtccggacgcgacgcaggaggtaagcaacacctctccataccgctcacaagatgatacactctcttctactctctctgacctcacaccgccgacaatatgagggccacgtgggatattatagatggactggaaaatcacaggcataattactttcactcacattcacaatttacagcatgtaatattggaatgtacgcaaaggattgtatagggcatggtggaagtgatagtctccacagctatataccttcactaaatcacattatcgaagacatataagtgcttcttgacaaaattataaatgagaattcatgtgtcccttgatatcttctaggtcactccact

SEQ ID NO: 457497 - DNA, 473 bp, Sorghum bicolor
cgtccggggcggtgaccccagcggttgggtcgtgccgtgcgtgtccccacctcgccgccatcgtttctgctccaccttcagccaatcccagccgggcccagccatgtctgcaacggctctgctccttcccagcctcgccgccgcggccccacgcccacgcagcagctccggctccggcgcggctccctcgactgttgctctcggtccgtccggcctccgcggcggcggctcgcggtgtcggccgtgcaagagacgaaggacggggaggcgaagacggccgaggagatcaccgagaagtacgggctcgagttcggcctctggaaagtgttcagctccaaggacgacgaggaaagaggcggcgaggggaagaagtcgcggacggaccaggccatagagctcctggcaaagtacggcggcgcctacctggccaccttcatcttcctctccatcgactccttcaccctctgctacct

SEQ ID NO: 457498 - DNA, 458 bp, Sorghum bicolor
cgtccgggcgtccccgcggtgggcgtcctttttctgcaccgggagataaaccgaccgcacccctgaccgctacccgcagctgctcctccgcgcggcgcagcgcctcctgttcttggcgagcaattcttgtaaagcattgtcaccaccacttgtaatgggtggaagccagtacgatgatgaatgggtgttgcccagtgccgatatcactcttgttcttgttgggaaacttggctatggcaagagtgcaactggaaatagcatccttggacgggaagcatttgtatcggaatattcacatgccagtgttactaatacttgtcagttgggaagcactaccctgaaggacggccgcaccatcaatgttattgataccccagggttatttgatatgagcatttcatctgattaagcttgtaaagagattgtttaatgtattaacattgctaaagatgggatac

SEQ ID NO: 457499 - DNA, 553 bp, Sorghum bicolor
  unsure (1)..(553): unsure at all n locations
cggtcgacccactcntnccggacgcgtgggaaagaaaatnctaacaccanttnangtacttgattttttagatcaagggacagtgcatttttaagtccccataatcccatcagttaatgggctattcaaataacatgttatggtatcnattttctgtgataataacatccaaattccttaacaggtcctctgtaaatcgtatccatcagagtttactgcatactttcattactgtagatcactacgattttaatataaaccggattactcctatttgaagagactcttccgtgacttatttatccactagggtatggttaaacattagaaatctgtaattgatgttccttgcacctttatttttgtttttttatgtagcttattctggatactttcaaggtaccaactagattatgtatttgactggaccattattaaatatcctcagtttatagataaaaacaaacttcacgtatgcatgcattttatttatttacatccctttattaaccaatgcgatttttattttgtcttacatttttcaatttttctt

SEQ ID NO: 457500 - DNA, 522 bp, Sorghum bicolor
cgtccgtggggatgccgtaaataacttcaccagaaagatggatgatctgaaaagaaaaagggatgatctgaagactcgtgaagcgattttggagcaaacgtggcaagagggctccaaagacttggaacagttgatgaacagcatgagcacttatctagccaagcaagaagaagtgcacgaagaagatccgagacttgggctcgttgcctgctgatgcttttgaagcgtacaaaaggaaaaacaagaaacagctacataagatgctctatgactgtaatgagcagctgaagcagtttagtcatgtgaaccaaaaggctcttgaccaatatgtgaacttcacagaacaacgcgaacaactgcagagaaggcgagctgaacttgatgccggtgatgtgaaaattatggaactcatatcggttttagaccaaaggaaggatgaatcaattgagcgcacatttaaaggggttgcaaggcacttccgtgaagtgttctctgagctggtgcaaggtggtcatggatatt

SEQ ID NO: 457501 - DNA, 501 bp, Sorghum bicolor
  unsure (1)..(501): unsure at all n locations
cggtcgacccacgcgtccggggcggcacgtttgtttggggattggcttgtacgagctcttcatcagcaccatagactcctcttatgggtccaacctcttcggccttttcgggcttgcggatcggcccaagtgggttgaaatcaagtcnttagatgatctcaagacaaagctgggtcatgtcattgtcctggttctactggttggcatattcgagaagagcaagagggtgaccattacatcctgtactgatctcttatgctttgctggatcgattttcctatgttcagtttgcctctacctactttccaggctcaataccagcaaatgaggcagccatgcctgaaataagagtgtntgtatataagtgattggtctgttctgttgctgtgcaatgcctcaggttgtgttcttgcagtaattaacttggaagtgtggagatacagatttcccatgtactcatgtatggctagggagtttcagttaggcacaaccacactacat

SEQ ID NO: 457502 - DNA, 438 bp, Sorghum bicolor
  unsure (1)..(438): unsure at all n locations
acccactcgtccagggcgtgctgggggcggaaagtcaacttttatccaatcacttttcaggatcgttgaaccaaggggaggaacaatctaaatctacaatgttnacagcgttgaggatagntcttcatgatttaagaggaagactaatcatcattccgcaggatccaactatgtttgatggaacaatgatagggaatctggatcccctgaatgagtaccctgatcatcgtgtgtggtatattttttacaaatgccagcttggtgatatatctcggcaaaacccaaataaactggactctacagttgtcgagaatggctaaaatttgagtatttctcagattcaactatttttccttctaatggttcttctaaaacaaaataatcttcttgttcttgattaatcaacttctttaatttactcctcttctattgcgatta

SEQ ID NO: 457503 - DNA, 498 bp, Sorghum bicolor
  unsure (1)..(498): unsure at all n locations
cggtcgacccactcttccacggagccgctggtgaagcacctggtcatcgtcgccgtcgacggcaaggcgtacgcgcggtgcacgcaggtgcacccgttctgctaccacctccgggccagggtcgcctgcgtcgacgactacgcntcngancantcnttcatgtcgaagactacnnctggacctgatgtnggcgccggaacccggttccaggncgcgggtgcttgcagcttcggctaccagcttcgtcttcacggacatggacatcctctggctgcggaacccgctgctgcgcgtgcccgtcggcgccgacctcgccatgtcggccgactacttctacggcgacaacccgtacgacctgaacaagacggccaacggagggttcgtgtacgccaaggcgagcgccaagacggcggcgttctacgactgctggtacgaggcgcggagggagcacccggggaagaacgagcaggacgtgttcgatcaggcgaagcacgcgct

SEQ ID NO: 457504 - DNA, 549 bp, Sorghum bicolor
cgtccggaaaagaaagagcctgagattgttcgttcgcctagagctccaacccattctttcaagaagccgattggtgctaaaaagcctggaaatgggactgggggacttggtgcgcggaagcttacatcaaagccaaatgaaagccttatggcagaagcccgaagaaccagctcccatcctgccatcggtgactgagagtactgcaactaggagcaaaccccatacttctcgatttgaatatgtacaaaatgcacctgccgctcctaagactggtagcagctcagaagacaaccacatgagtggacatgttgcacccccaaagtcgtcgaacttctttgctgaatttgggatggacagtggatatcacaaaaaatctacattcagctcattcaaagtgcacattgaggaaagcagtgaagcatgacagaaattctcgaatgcaaaatcaaattcatcctctcagttttttggtgatcaaagccagttttgaaaggacgctcaagtttcttttcaaaagttttaagggtcttctgccatattaagggctga

SEQ ID NO: 457505 - DNA, 446 bp, Sorghum bicolor
cgtccgcgaagccatggcgccgagaacgtcagagaaaacgatgacaccggcggcggcggctgccgccacggggctcgcgcttagcgtcagcggcggagccggagccaggggcccgcacttcagaggcgtcaggaagcggccgtggggccggtacgccgggagatccgcgacccggccaagaagagccgcgtgtggctcggcacgttcgacacggccgaggaggctgcgcgggcctacgacgccgccgcgcgcgactaccgcggcccaaaggccaagaccaacttccctttcccttcgtcgtgcatgccactcgccgccggcgccggcgccggcagcttgcctgcggcgaaggccgtcaccggtggccgcggcagccggagcaacaacagcagcaccgtcgagtcttttagcagcggcagcgacgtgcaagccgcgcccatgcaagc

SEQ ID NO: 457506 - DNA, 334 bp, Sorghum bicolor
  unsure (1)..(334): unsure at all n locations
caatgtgaaggtttcttcaaaaaacaaggtgccttttttggaacacaacaaccaggtgaaaggagagagcttggatttggttaagtacattgacagcaacttctaaggtccatcgttgcttcctgaggatccttcaaagaagcagttcgctgaggagctgcttgcatatactgatgcattaacaaagcattatacttctctttactcagcaaggaagatgtttctgagggaactgttgcttgttttgttaaaataaaaagccccctgtgggaaatttaatgacaggccgttttttttttgttgagttnnagtngggggggattggaatttttac

SEQ ID NO: 457507 - DNA, 483 bp, Sorghum bicolor
cgtccgcccacccgtccgagccgtcgtggtagagctagtggcccagacagcgccggcccactgccgggtcgcttgcagggtcacgagcaagtacctgcggtagcaccacacgtcggtggacatgcccctggacgcggacctgttcgcggtgcccgcgcgccagaacgcgcccaagcaggtgcacatccagctggccgaccacacgggcacctccatgttcacgtcctgggtcaccggcgacgccacgggcatcagcagcctcctgtacggcctggtcgacgtcaagctcgacctcaccatcaagggctccatctcgcgctacacctactacaactacatgtacgagtacatgcaccacaagacgctgacaaacctgcagtaccgctccaggtaccactacgccgtcggcgtcacggtgcgcaacacgttgcgcacgtcctggttcaggacgcctcccgagctcggtctcgacgtgccgctgat

SEQ ID NO: 457508 - DNA, 423 bp, Sorghum bicolor
cgtccgaacccgcctcaccccattcatcgacgggacgacctcgccggcgagagagagagagagagtgacagatggaggcggcggcagcggcggccggcgtggagctcggctcctcgaagccccagatcgcgacgcaggcggagatggcggaggcccgggtgcccctcgcctaccgcgaccagtgcgcgcacctcctcatcccgctcaacaagtgccgcgtcgccgagttctacctcccctggaagtgcgaacccgagcgccacgcctactccacgtgccagtacgagcttggcatggagcggatgctttagatgcagcccccccttttttttttcccccccccccccccctttttttcccccccccccccccccccccctttttttccccgccccccccagcatctattttggcccccccccc

SEQ ID NO: 457509 - DNA, 619 bp, Sorghum bicolor
  unsure (1)..(619): unsure at all n locations
cgtccggctcgaagctccgcctcctcccgaacccgtaccgtcgccatggcatccggctggcctgtaagctccaaggaagtgctgccgtctcccctgacctccgcctccgagccccctcccctcttcgatggcactaccaagttgtacgttgcctattattgcccgttcgcgcagcgcgcttggattgccaggaactacaagggtttgcaggataagattaagattgtcgccatcgatcttgctgacaggccagcatggtacaaggagaaggtttatccagaaaacaaggtgccttctctggaacacaacaaccaggtgaaaggagagagcttggatttggttaagtacattgacagcaacttcgaaggtccatcgttgctccctgaggatcctgcaaagaagcagttcgctgaggagctgcttgcatatactgatgcatttaacaaagcattatactcatctttactcagcaaggaagatgtgtctgaggaaactgttgctgctttggataaaatagaagacgccctggggaaattaatgacggcccgtctttcttggtagttaagncggggggaaanggatatgaaaaaaaaagggaggcgcaccccccccccccccc

SEQ ID NO: 457510 - DNA, 419 bp, Sorghum bicolor
  unsure (1)..(419): unsure at all n locations
gaccggtattncccggctcgacgcacgcatccaagaacccttggcctgcccccccccccaagcacatccaggccgctcaaaaaggggatgttacttttccagccaagggcgccaacatcccnacctatgtcttctgtgttaacaagggcaactactaccagcgtatcccacatcatcagcaactcttcctgcacgaccaactgcctcgcgccattcgtcaaggtcttggacgaggagttcggaatcgtgaaggggaccatgactacaactcactcgtacacgggtgaccagaggctgctggactcgtcccaccatgacctccggagggcccttgcggcatcacttaacatgatacctacaagcactggctccgccaaggccttggcgctggtgctgccccaactgaaggggaagcttaa

SEQ ID NO: 457511 - DNA, 499 bp, Sorghum bicolor
cgtccgcccacgcgtccggccgccgggaggagcaggtggtcccttcgtggcatgacgggcctggtcaccggcggcacccgcggcatcgggtactaactacgcacaatcaacaggtggcgcatgctggcttgctgtgtaacggtaactgaactccatgtgctcaggcgtgccgtggtcgaggagctggcggcgctgggcgcggcggtgcacacgtgctcccggaacgaggcggagctccgcgaccgcctggccgagtgggaggccgccgccaagaccaacggcggcggcggggtcgtcacgggctccgtctgcgacgtgtcggcgcgtgaccagcgagagcgtctcctccgcgacgtggccgagcgcttcggcggcaagctcaacatcctggtgaacaacgtgggcaccaacttcggcaagccgacggcggagtacaccgccgaggactacgcgttcctgatgtccaccaacctggagtccgcctaccacctgtgccagc

SEQ ID NO: 457512 - DNA, 454 bp, Sorghum bicolor
  unsure (1)..(454): unsure at all n locations
gccgcacgcgtccgcggactcgtgggggtgaacggccanaancccctgcccgcgcccgcgcccgctccaggcctggangaggcgacgccggcgcccacctanctngatctggtgcctgtgtccaacctcccccgcccgctcagcatcagcgacctttccccggcgcccatgcacgggtcgcagctccgcgtggcgtaccagggcgtcccgggcgcctacagcgaggccgccgccgccaaggcctacccgggctgcgacgccatcccctgcgaccaggtcgaggtggccttccaggccgtggagctctggatcgccgaccgcgccgtgctccccgtcgagaactccctctgctgcagcatccaccgcaactactacctcctcctccggcaccgccttcacatcgtcggggaggtccagctccccgtccaccactggcttctcgggctccccgggg

SEQ ID NO: 457513 - DNA, 499 bp, Sorghum bicolor
cgtccggtcggcggcgagcgctttctttgtcttggaagacgatttggtttggcggggagagagggttgtgctagtaattgatccaagttaaggcgtcgccatgagccggtcagggcagcctccggatctgaagaaatacatggacaagaagctccaaatcaagctgaatgcaaaccgtgttgtcattggcacacttcgtggatttgatcagttcatgaatctggtcattgacaacacagttgaggtcaatggaaacgaaaagaatgacatcgggatggtggtcatcaggggaaatagtgttgtcatgattgaagcactcgaaccagtcgccaaggctcagtgaactttcagcggatctagatgtggttcagtcgttaagctagtagtattaattcaaaactgttgtatggcattgggcatgttttagcctgagttccctcattcttactcatctgcaagcttgcgcacctctttattactgtatagctctacaagattt

SEQ ID NO: 457514 - DNA, 485 bp, Sorghum bicolor
cgtccgtgcctaacctcaaagctagcactgcatctccaaacatcactcaacctatccaggagtggaataatgggaaggacgaatacattgtttcttaatcacgaattgaccatattgccttcgacaaggttgactttccggacgcagatctgatcgcaaacttcatggacattgtacgctccgctgtgaggaacacgccatctggtgctaaggggatatactggaaaacagcgtacttcatctcatccatggtaccttctatcaagctaaacatcaaagaaatgcttgattatggttaggactgatttgactagatgtgaccacaggcaccagttaagtcacattaactatctgcctcttgctacaaatgagcggagacatccacgtggggtatggcaagtaggtgcttagctacagtttgttcagtatttcgggcacccatcatcagagcagttgaagtatgcccagattgacaaccaggtggt

SEQ ID NO: 457515 - DNA, 515 bp, Sorghum bicolor
cgtccggctgaagaggccggggaagaggatgaagatgatgccatggaaagggatggaaatgaggttggtggtgatggtgcccatccacagaaacatgccaagagccctgaactggcaagagaatttcttttggatgctgctgctgtaatattcaaagaacaggttgagaaggccttcagggaaggtacagcacagcaaaatgcacatagtgtttttgtgtcccttgctttaaaacttttggaacagcgggttcatgtagcatgcaaagaaatcattaccttggaaaaacagaacaaacttcttgaggaagaggagaaagaaaagcgtgaagaacaagagcgcaggatgaagaggagaacaagagaaagagaaaagaagaacaggagaaaagaaaggctgaaagaaaaggacaataataaagggaaaagactagttgaatcaaagtcaccagacgatgtttcatcttcagctccaagcaactcctcaacatctatcaatgattattcgacaaatac

SEQ ID NO: 457516 - DNA, 295 bp, Sorghum bicolor
  unsure (1)..(295): unsure at all n locations
ggccgcgcgtgcggaagcaacaagaagcctgtacctaatggtattgtctatggcaaacccaancaccacattatggcgcatgggaaattccagaggaacaacatttcccttccttaaaataaaactggacttaatcttggtacattgacaattcttaactcctactgggtgaatgatgttagttcctacaagtactttgagatcatcctcaattatattaaccacacagccatctaaaccaatccaaagatcaactttctatacaacctctatccacaaacaccatgagctactt

SEQ ID NO: 457517 - DNA, 478 bp, Sorghum bicolor
  unsure (1)..(478): unsure at all n locations
ccggnnccgaatggccgggtcgggccgcgcgtccacccacncgtccgacaggatctactgcaaggccggggatgaccagnacancctgggcgcccaggacggctaggtctgggtggtncncactgancgtaacnaccacacgcagcactggattaaggacatgaagtacagcactagggtgaaggatgaggaaggctaccctgccatcgtcctcgtcaacaaggccactggagaggctctcaagcattcccttggccagtcacaccctgttcctctgacccgctatgatccagacaaactggatgagtcggtcctgtggacagagagcagggatgttggggatggattccgctgcattaggatggtcaacaacatctacctgaattttgatgctttacatggagacaaggaccatggtggtgtgcacgacggaacaacccttgtgctgtgggagtggtgtgagggagacaaccagcgc

SEQ ID NO: 457518 - DNA, 492 bp, Sorghum bicolor
cgtccgtctgaccaatggcggttagtaaaatgtttgaattcattaattagcagctttgaggtagttggattttgtgagttgccaatctcattcgatgcttcataacaaaataaaataaaatatgcaggacaacattaagcatatatggggaactgccgtcaacaggtgctgcgcatcaatccatgtccaggctggcacctcatggctatcgaattccttttgttgtgctacaagaggcaacaaataacttcgatgagaagatggtcattggagttggagggtttggaaaggtctacagaggagtgatgcaggatggcaccaaaatcgcagtaaagcagggcaaggctaaccagatgtctggacaagggttgagtgagttccggacagagatcgatgtgctatcgaagttgcgacaccgccatcttgtagcgctcctgggttactgcaacgagcacaacgagatgatcttggtgtatgagtacatggagaacg

SEQ ID NO: 457519 - DNA, 468 bp, Sorghum bicolor
  unsure (1)..(468): unsure at all n locations
gcgtgcggccacgcgtacggcctnggccactgctgcagnatnnggcgaaggcaggaaccaaggcaccgcgacagcggcgacaaccacaaagcacccccggcatccacctggctgcacatgcattgtgtgcatccagccggccagtggcaagggcccgaagcacaacccttcgtgcacctgcaacgtgtgcatgacagtcaagcgtctgttcaagacactgatgatgaggaagaagcagcggcagtcggagcgagaggaggcagaggccagcaagaagatcacatgggtgaacagagaagagcctgaggggagcaacctgtcaagatccccgcagacgctggacaccacccgagacaacagtgatgtgaccatgtttgacaaggtggccgacatgaacaaggggcacatcgaccttaactttcaccctgcccctgacgaccgtggcgatcatggacagcatggcgtgca

SEQ ID NO: 457520 - DNA, 582 bp, Sorghum bicolor
cgtccgcgagacgccatggttcaacaagccatccatcgccaagcccgtcaaagcctccggggccggcggcgccgagccgccggccgagcctgtctgctccgtaaaggacggcggcgacaaggacgagccgccggagacgctgaacgcgttccacctgatttccctctccgcggggttcgacctctcgccgctgttcgatgtggaaggcggtcccgcgaggtgccataaccgggagggcggtatgcggttcgcgacgcgggagtccgcgagcggcgtcgtctcccgtctcgaggaggtggcggcccgcggcggcgggcggatgcgggtgaccaagagcggcgcccgcggcgtgcggctcgagggcgcggagcgcgggggccgcaagggccgcctagccgtggcggccgacatcttcagcttatcgccgtccgtgctcgtggtggacgtcaagaaggacgggggcgacacgctcgagtaccgctccttctgcaacgaggagctcccggccagcggctaaggacatcgtctgggcggccgacccgaagcccgccggcaccggcaccgccgtcgtcgtgtgacgcc

SEQ ID NO: 457521 - DNA, 441 bp, Sorghum bicolor
  unsure (1)..(441): unsure at all n locations
cgtccgcccacgcgtccggcggagcccatctcaaacccgcaccactaccagccctacggcgagatctggaccgtcgacatcnacgggtcgggcatccgccggctcacgcacaactccttcgaggacgggacgccgtcgtggacgccacactacctgaagccggaggacgtcggcgagacgctgcaggcctccgggacgtgcgcgtttgaggattgccactggctcaacattgctgcccagccagatggcctcatgtgtggcaagcacggctgatgtagaatctgtgatgggactcatgtatgtatatatagcactatagcagcgatcatccagtgcagtgatgccatcttgtttgcttgcatactactgatatgaataaggtcatgtacagtgatgccaagtttaaggcaaaaattaaagaaactccacatacttatgacg

SEQ ID NO: 457522 - DNA, 497 bp, Sorghum bicolor
  unsure (1)..(497): unsure at all n locations
cgtccncggacgcgtgggtgcaactccagtgattcttcctacaaacatatcananaattgctggttgggcacatagttgcttgccnanaaaatcaatgagaaatcnaggctcttaattctatgctctccatctaatccaacaggatcagtatatccaaaggagctgcttgaaaaaatagctgatatagtcaagaagcatcctaggcttctggttttatctgatgaaatttatgagcatattatttatcagcctgcaaaacacacaagctttgcttcactgcctggaatgtgggaaagaacattaactgtaaatggtttttctaaggcttttgctatgacgggttggcgtcttggttaccttgcagcccctaaacattttgttgcagcatgtggaaagatccaaagccagttcacctcaggtgccagcagcatatcacagatggcagggcttgcagctctgaaccttggctatgctggtggtgaagcagtattaaata

SEQ ID NO: 457523 - DNA, 645 bp, Sorghum bicolor
cgtccgcggaaggagcggaactttgataagaagatccggtacactgttcggaaggaagtggcgcttgggatgcagcggaatagaggtcagtttacatcttcaaaaccaaagcctgatgaaatagcagcatcagaaatggcagctgtagatggctccccaaattgggcgttagttgaaggccgacctccatctgctgccgaatgtcatcattgtggtactaatgcaacagctacgccaatgatgcgtcgtggacctgatggaccaagaacactatgcaatgcctgcggcctcatgtgggcaaataagggtctcctgagggacctatcaaaatctcctgtaccacttcaagttatgcaatcagctccacttctagatggtggtaatggaaatgtcatgtctgcgcctggctctgagctagagaatgctgcagctgccatgaccaatggccacgagtcatcaagtagtggtgtttaatccagcgatgggggcaaagcacgagcatcatccccgagtgatctctgcggtaggcggtcagttgttgtactataactttgagttggagtctgcttagatatggaaatcctttatttatcttgcgttctgtaagttttaagagctgcgacagtgttttatcccgtgtaatca

SEQ ID NO: 457524 - DNA, 646 bp, Sorghum bicolor
  unsure (1)..(646): unsure at all n locations
cgtccggtcatggagcacagagccaagtacaacgacggtgatgacatcccaccattggtgattggggtgagtgctcctcaaggaagtggaaagaccactcttgtcttcgcacttgattatctttttcgggttgctggtaggaattctgtcacattgtctatagatgacttctatttgacagcaaaagaacagaatgaactgagggacagaaatcctggaaatgctcttttagagctccgtggaaacgctggaagccacgatctccaattctcagttgaaacacttgagtcactgatcaaactaacaaaggaaggtatgaagatgaaggttccacggtatgacaagtctgcttttgggggaaggggtgaccgggctgatccttctgtatggacagaggttgaagggcccttagaggttgttctgtttgaaggatggatgcttggatttaaacctcttccaaatgaagaagtgaaaaaagtggatccacagcttgaggtggttaacaagaaccttgaagcatactatggtgcttgggacaggttcatccaatcatggattgttattaaaataagagaacccaattgtgtataccagtggaggctgcangcagaggtagctatgagagcagatggaaaacctggaatgt

SEQ ID NO: 457525 - DNA, 345 bp, Sorghum bicolor
  unsure (1)..(345): unsure at all n locations
cgtccggcgtacatgtcagggatgcaacatcacagcaaggggagcgggtcgaggtcgtcctcatcgtggcgccaggtgaaccctgggtcatcgttcacnccatgcccttccctgccctactcaaccagaaccccgacgggcaagtgccccgttaacacgctttagctgctgtcgtgcatggacacgctcaactgcctcttgcactccattatcccaaccaaggccagacacacctgctggccgctgttatcctgcgtgagctatcttgactccccgctctgactgtgtactaccatcaagggcaaggcgctcagagtcagtgtctgctaccttacccatcttgtg

SEQ ID NO: 457526 - DNA, 611 bp, Sorghum bicolor
  unsure (1)..(611): unsure at all n locations
cgtgcgcggacgcgtgggtgggaaaagaaaagcctgtggaggaatctagtcctgaatatgagaagctgggaaatggatatttgagctagaaaatcatttancanaggcccaaaaacaagcataccgtcttgtgaaaagacacagagaacttgggcaatccttggcggacttcggaaaggcaattaagcttttaggtgcttgtgaaggagatttgatggaaaaggtgttttctgaagttggttctaagtcagagatgttgtcaataaagctgcaaagagaggcagacaaccttctctttaactttgaagaacccttgaaagattatgtgcgtgctgtacaatctataaaagccactatgctggatcgagccaatgctttcaggcagcactttgatttggatcaggagaggaagtataaagagcttaaccttgaaaaattgaagttcatgaaccctgagaagtatgccgaagcagagtctgagtttagagagttgaaagcagacagtgaggaggccacaaagaagtttgaacacatagttagactaatgaatgaagagctcgctcgtttccaggagcaaaagacggctgatattggactcgcattccatgagt

SEQ ID NO: 457527 - DNA, 646 bp, Sorghum bicolor
  unsure (1)..(646): unsure at all n locations
cgtccgcccacgcgtccgggaagatctaagcgtgatcaaagaaatatgcttcaaaccatgcgtcggtgactgaagcaccaaagatctgttgctaagaacttgggaaataaatcactttggcccaagacaatggaagatgtaatctagcacggtaaatattaagtgtttatattatctatgttgtggactaacaactctatgttctgttgtagattgtagcgaaacttgtagacattgtgcatgtcttaaattttgagatcagaagagctttcttgaagaaccacggagatcaatctgtagcgccagtgaccaagcttcatcaaacattagggcctactggtcttgcattgcattatgccaatgtcattctgcagataaatacattggtattggcctcacctgcggctgtttcttacaaagctagggatgcactgtaccaggcactgcctncatgcatcaaatcaaagttgcgagagtgttgtcatagagagagaacgatgaacgtagcggaggtcagagctgagatggacagattactccagtggcttgtgccagttgcagaatccacaacatcgtactacaagaatggggcattcggtgaatggataaacatggtgatgccagaggatatagttgtcgaggaacc

SEQ ID NO: 457528 - DNA, 577 bp, Sorghum bicolor
  unsure (1)..(577): unsure at all n locations
cgtccagcgacatccgggggtacctggcggcgctggacatcatgcanagctactacccggggcgcctgtgccacgtgttcctcatccacgtnccctacgtgttcatggccgcctggaagatcgtctaccccttcatcgacgacaacaccaagaagaagttcgtgtttgtggcggataaggaccttgataggacgctccgggaggccattgatgactcccagctcgccgagatctatggcggcaagctcaaactcgtcgcgccgccggcaaattaaacggcaacaactgaaaacggatccatcccatgaactctgcaatgcagctgagcagagcagagagaatgcagcagcagagtacagtacgcgagctagacggacggacgctcgaatacgtacgggtcagagaaatatatatgtatgtaaatcgtagcagctaggagaattagcaattgcaagtgacgacatgtcatcttgtacaagacacgcggaatgaaagatgcatggtttctggatgctggnctctgtactgtaaccagccggtgatgagtggcaataagattattactacacttctctat

SEQ ID NO: 457529 - DNA, 647 bp, Sorghum bicolor
cgtccgcggacgcgtgggatttcagaacaacagcaatgtcaggctgcttttgaagtatggggatgcggggtcacatatgatttttgcagcatcagacatgttcattgttccttctatgtttgaaccatgtggcctcactcagatgatatctatgcgatatggttctgtgccaattgttcggagaactggtggtttgaatgacagtgtctttgatttcgatgatgaaacaatacccatggagctgcgaaatggtttcacctttttgaaggccgatgagcagggttttgatagtgcactggaaagagctttcaactactaccatagaaaacctgaagtttggaaacagttggtgcagaaagacatgaagatcgatttcagctgggatacttcagcttcccaatacgaagaaatctatcagagagcagcggctcgagccagggcaacagcgtaaatagcagagacagttccctactgcctctgtgaagtctcctagatgctgtgcttaaccgtttggtaaagaaatatggttgtatcagctctaaattaagcatatgctgaagaagcacggtgcttccctacttgggtatactaagggcgacttggcgctacgtgcagttcccaacgaagcaaaaagataagaggaaatt

SEQ ID NO: 457530 - DNA, 476 bp, Sorghum bicolor
cgtgcgcttatctaaggaaggcgattgtttttggctatggccctatcaggccatggatgtctattgcgcactgtttgatttgacacttggatctaaaaaaatttacaccaaatgaagttccaagggttaagataagcttagcatgcgtgtttgcattcatggcgattggatagcctttgatcatcctcaaatcaggactagctggatggtttaagttctggttcatgcctcggatggtttatcatttttggatgagcacttttacaatggtacatcacacagctcctcatataccattcaagtcatctcaagaatggaatgctgcacaagctcaattaaatggcacagttcattgtaactatcctcaatggatagagatcctttgccatgacataaatgtgcatgtcccacaccatatttctccaagaatcccaagttataaccttcgtgctgcttatgactccatcaaacagaac

SEQ ID NO: 457531 - DNA, 456 bp, Sorghum bicolor
  unsure (1)..(456): unsure at all n locations
cgtccgcccacgcgtccgaaatcaatgctttccagctcattgggatgtcctcctgccttgatctatctggatgttttgagaaagaggatgcttctnaaaggaagatcanatttgcatcaaattattccccagcttatttatttgagaagattgaaagcattgtcagaaaaatgggtttccaggtacataaaagcaacggcaagctaaaagtgatccaagattgcaagggactagcaaagtcaagagggcaagaattattattaatttctgctgaggtgtttgagatcaatgaatctctttatgttgtcgaactaaagaagtcatctggagactgctccctgtacagaaagctgtgtgagactctctcagaggacttggggacacgcaaaagccagcaatttttaaagcaagattctatccgacaagaaataggtagatacaatagtagcttttaac

SEQ ID NO: 457532 - DNA, 456 bp, Sorghum bicolor
cgtccgcccactcgtccgccctgacaggcttggtacatgaatccacttttcactattctgagcggtggggtccttccattgggagcagttttcattgaactcttcttcatcctcacctccatctggctgcaccagttctattacatctttggcttcctcttccttgtgtttgtgatccttatcatcacctgtgctgagatcacagttgtgctctgctatttccagctctgcagtgaggactacatgtggtggtggaggtcttaccttacctcaggatcctctgccctgtatctcttcctgtatgctgctttctacttcttcactaaactgcatattactaatctgctgtctagcatcttgtacttcggctacatgcttatcgcctcctatgccttctttgggctcacttgcacaattgggttctgtacctgcttctggttcactaagttgatttac

SEQ ID NO: 457533 - DNA, 394 bp, Sorghum bicolor
  unsure (1)..(394): unsure at all n locations
cgtccaggccgacatccccaagtggctctatttgctgtattcaatggccacacgccncaaaaaggcgggagagttctctgctgaggacattcccaagtttatagcccatgagttcaagaaggtaaaccctggagagatcgaatgatccgtcaagaggtgttacctgaaaatctactactatttcctcaatagggacaaatagcagtgcacgtgctatgtcacaaccgttctccaaaagggtggactggtcctctccaatgcttgagactgccttccggttctcatcctagcatgtaaagctgaggcactcacctctaaccacctgacctctcgggaggacgagaacgacaaaattgacaatttcggtggatttgtggtgaattaccttggaaca

SEQ ID NO: 457534 - DNA, 488 bp, Sorghum bicolor
cgtccgcgagaaatctaccgaggaagcccagacaacccatgagagacccaaaggtatcatgatggtgtgaggatgggttcttttggtctcatgctcaactctgtcgtccttggattcacctctgttgtgctagaaaagttatgtaggaagtggggagctggacttgtatggggtgtctccaatattataatgactttgtgcttcttggcaatgcttgtaataacatatgttgcacagaacatggattatccatccactggtgaacctccgactggcattatcgttgcctctttggtggtttttacaattttaggggcacccctggcagtgagtaacagactgctttttctttttcatcataatgatctctatccacttccagctctatcgaatattgtccatgtggtatattcaattcatttccttatttgcagatcacatacagtataccatatgcaatggctgctaatcgtgttgaaaatcttggt

SEQ ID NO: 457535 - DNA, 462 bp, Sorghum bicolor
  unsure (1)..(462): unsure at all n locations
ggcgtgcgctctcatctcgccttcgcgcagccccagctccgtacaccaccatccgccaccttcctcactggcgagccacgccgcagctacccggggaggaaacagatctgagaatgtgatcagttgtgatggcccgcctgtacgtcggcaacctggatccccgggtgaccgctcatgagctggaggaccagttccgcacgttcggggttcttctcagtgtttgggtggctcggaaaccacctggctttgcatttattgattttgatgataagagggatgctgaggatgcaatccgtgacctanatggcaagaatggatggagagttgagctatctcgtaatgccagcagtggtcgtggtggccgcgaccgatatggtggttctgagtccaagtgttacgagtgtggtgagactggccactttgctcgtgagtgccgtttgaggattggttcttgaggtctat

SEQ ID NO: 457536 - DNA, 267 bp, Sorghum bicolor
  unsure (1)..(267): unsure at all n locations
gcacgcgtccgcccacgcgttccaacttgtcctacaacctctaacccaggctcaactacanctttcactacggcttaaacgtcatccagttctccttattttactactattttaagctgaacttcctcaccaaccccgtcaccaaccacgtccagaacacccagcaccacaaccagttcttaatcttcttctgcataataacttcaaggacaattgataaccccatcataatcttaaacctattttcctcaactttcttaatcccct

SEQ ID NO: 457537 - DNA, 436 bp, Sorghum bicolor
cgtccggccactaggatcaccatccctgagataagaaaccatccttggttcttgaagaacctgggaggtgacctaatggatgacagcacaatgagcaaacagtacgaggagcccgagcaaccaatgcagagcatggatgagatcatgcagatcctggctgaggcgaccattccagcagctggttctcgtggactcaaccagttcctgaacgacggccttgacctcgacgatgacatggaggacctagactcaaatgccgatcttgacctggaaagcagtggggagatcgtgtatgctatgtgacagcatcgaatactcagcaacgaggcaatgtgtatcatcaaccgcgctcagatggctctgttgcgtcaaaagttaccaaaataatacgcaaggggtgtgcgctgctggcaagtgtattgtacttgcaggtatc

SEQ ID NO: 457538 - DNA, 575 bp, Sorghum bicolor
cgtccgattatcttggcttcacctccacctgttagttgctgatccaggaggaggagaccacaggcagggcgactgcgaagcccatcctgtacaacgcttggatcagctcctgctcccaccgtgttcgcatcgcgctaaacctcaaaggtgtggattacgagtataagtcggtaaatcccaggacagatccagattatgaaaaaatcaatccaatcaaatatattccagcattagtagatggggacatagtcgtttctgattctctcgctatctcattgtatttggaagataaatatcctgagcatcctctcctgcctaaagatctcaagaggaaagctcttaatcttcagattgcaaacattgtttgttcaagcattcaacctcttcaaggctatgccgttattggtctgcatgagggtaggatgagcccagatgagggccttcatattgttcaaacttatattgacaagggattcagagcgatcggaaagctcttggaaagatgtgagagtaaatatgctactggagatgatgtccaattgggagatgtgtttcttgaaccacagatacatgct

SEQ ID NO: 457539 - DNA, 432 bp, Sorghum bicolor
cgtccggggaagttgaagcaaaggtgcaagtaaaaatgttttacgggggatatgcttaccatgggaacgggtttgagcaaacgtaccgttgctatccagcatccttttttgataagccacacctggaaggtggcgataaagtaataatgccaccgtcagcccttgatcgtcttgcctccttgcacatcgagtaccctatgctatttgagctgcacaatgatgcaacccagcggatttcacactgtggtgttttggagtttgtggcagaagaaggcatgatcatcatgccctattggatgatgcaaaacatgcttcttcaagagggtgacactgtccatgtcaaaaatgcaactcttcccaagggcacatatgtgaaattgcaacctcacacaactgattttctggatatttcaaatccaaaagccatcttgg

SEQ ID NO: 457540 - DNA, 374 bp, Sorghum bicolor
cgtccgctcctgtctacgtggctcataaattagctctctacattcatcaattctttattatgggtttgttactctacaaatcgtgtccatcacactttatctcctactttcactactgccattcatcgcagtttgaacacaggcctcattattcttacctgaagagactatctatgatctctttataggggaaggataccagtttgactgtgtgtttgctggaccattttgaagtatcctcaggctgcaacccccggacaatctgataaaaattaacagttgctagaattctaacatccatttttgtttttgtacgaacacctttgtttcatgtttttcaaattaattgttttaattcccttttttctctataa

SEQ ID NO: 457541 - DNA, 414 bp, Sorghum bicolor
cgtgcggtaaataatagtttcaccatcgagtgtggagatgttacagatgccagctttcaagaatacaggctcaggagaggttccatagctggcattcttactcttgatacagtggcagactatcttccgagaaggggacccctgaagcagagaaggacaggtattgcatatatagcaaatgtggcagtgcgaaaggaggagcgtcggaaaggaattgctaaaatgttagtccaagaagcagaggcacgggcaaggagttggggatgccggtcaatggcattgcattgtgatgtaaacaacatagctgccctacgtctgtacaaaaatcaaggtttcaaatgcatccgtgtaccagaaggagctaaatggcctgaacccaagatagctaaaggagtgcaatacaacttcatgatg

SEQ ID NO: 457542 - DNA, 343 bp, Sorghum bicolor
cgtgcgggaattgaagagctggaccttattctcacagtgtatggaaactacaacttcccatgcccacgtttatgtggtggaactagaggcacacttcgctatctctctcttgcaagctgtcaatttcatcccacagtcagaattggctgcttgacaagcttaacaacactaaacctaacttttgttcatattgaggctgatgagctatggtgccttctttccagttctcctaacttggagcggttcgaactcaggcattgtgacagcatagtttttcttaagataccatgcctgcagcaactcaattacctggaggtggtatgtagctccaatcgtcttcgag

SEQ ID NO: 457543 - DNA, 341 bp, Sorghum bicolor
cgggcgacgccgcaaggatttctttggccatagtgtagaggaggactgtgtgatggcaaacaattctggttcgtgcagatagcaagaggtgagaagctcacactggtgagccatcatggatgcacgagttcactggtgtggccaagcatgcaagtgggcctgtcactgctgccaagacgatatacgaggatgaggaagggtacttaatcgtggtgagcatgcttttctctgatccacatagcgtcaaggtgtcctggaggaacacgctgacgcatggcatcgtgaagataacatgcgtgagcactgcccggatgccctacatcaagagacatgacaggatg

SEQ ID NO: 457544 - DNA, 577 bp, Sorghum bicolor
cgtgcgcattgtactactggcttgggacaaattatctgaccatgattcttgggcctgcaactctgggagtgggcgcctatctgtcttggctacgagtgtctcagcgccttcatacactaaaccaggtcactgtgggagctgttgtaggatctgccttcggtgctctatggtttgtgctctggcattggcttgttcaggaggcttttgcttcttctctgctggtcaggattgcagtcatccttggatcaacaacattttgtgttagctttgtcatctacattattcatcactggctcaaggatgagtaatgcatttcgtagctgcaatgggagatcgactgataagcacggtgcgtttggatgattgaatcttgtctgattcttatcagaattgattgaaatggtgccaaacgggttttgagccgagtgattcaggagtgaaacgattcctctttccttcaaaaattctaggaacggatcatacccatttggggatagaacatggtttcttgtctaactaccaaatggatgttttccaattaatcattttaagtaaaataaatttaaaatggggttgt

SEQ ID NO: 457545 - DNA, 373 bp, Sorghum bicolor
cgtccgcggacgcgtgggcggacgcgtgggcggacgcgtgggccggcttcatccacaccgggttctgagggacctctggcccaacaaggagtactactacaggatcgggcacgagctccacgacgggtccgtggtgtgggggaagccctactcgttccgcgcgccgccgtcgccggggcagaagtcgctgcagcggatcatcgtgttcggcgacatggggaaggcggagagggacgggtcgaacgagtacgcggcgtaccagccggggtcgctgaacacgacagacgcgctgatcagcgacctggacaactactacatcgtgttccacatcggcgacatgccgtacgccaacgggtacatctcgcagtgggac

SEQ ID NO: 457546 - DNA, 341 bp, Sorghum bicolor
cgtccgattgtatatgacgtgacagaccaagaaagcttcaataatgtgaagcaatggttaagtgaaagtgaccgttatgcaagtgacaatgttaacaagctccttgttgggaacaagagcgatctaactgccaacaaagttgttgcaactgagacagcaaaggtaagctatccagtttcatgaatagatcatgacatcgtcaacaatacttcatttttcaccacttccttgtgatttctttggatatctataaatgattaaaaacaccatccaggcgtttgctgatgagatgggcatcccattcatggagacgagtgccaaaaacgccaccaacgtggagc

SEQ ID NO: 457547 - DNA, 398 bp, Sorghum bicolor
cgtccgagtagactgtctggaaaactgctgaaggaggctgcaaattatgagataaagaaagagctgggtaagcatggtgggcgggtggctgcagttaacctggagtctagagctggtttgcttgcagctaggcagggtttggctcgtgcagcatcgagatatgttggactcaggagtgtcatgacatttcttggaccaataatgtgggggacgctcttggctgatattgtgattcaaatgctgggcacggattatgctaggatcgtccaggcaatctatgcatttgctcagattcgtctcactcggacaagttacatagaacctgatgaagaatgaccagagtccgatcgttactggactagcctaactggcattctgatctaaaatttattaccacc

SEQ ID NO: 457548 - DNA, 311 bp, Sorghum bicolor
  unsure (1)..(311): unsure at all n locations
ctacagcttacgctcccatggctagccaggtgatgaagagcanccttcaggtgacgttcaatttaaaggcttgtccccccctnccctcaccaccaccaggcgtccccggttcaccgtcaaggccatccagcccgagaaggcgacgtaccangttgttcattctatcaacggcgacccgttcatcggcagcctggagacgccggtgacctcgagcccgctggtggcgtggtacctctccaacctgccggcgtaccgcacggccgtgagcccgctgctgcggggcatcnaggtggggctggcgcacggctacc

SEQ ID NO: 457549 - DNA, 432 bp, Sorghum bicolor
  unsure (1)..(432): unsure at all n locations
cgtgcggggaaactaaaatcgcagttgcaaggaaattctcgtaccacgagctgtcctcggcgaccaacgacttgtccaaggacaggaagctcggcgcangccanttcggggaggtgtacagaggggagctccttggcccgcatcaagtggcggtgaagaggttgatgaggcagatggaggtgcggacccagaaggactacaagacggagattatgaccttgggccggatcagccaccggaacctcgtgaagctcgtcggctggtgccacgacgacggcgagctgctgctcgtgtacgagctagtgacgaacaggagcctcgacgagcacctncacgggtcagagcggctgctgacatggcctgagaggtacatgatcttgcgcggcatcggctccgccgtcgagtaccttcacagcagcgacgacaacccca

SEQ ID NO: 457550 - DNA, 321 bp, Sorghum bicolor
cgtggcgcccacgcgtccgcccacgcgtccgcccacgcgtccgaacgatgtcatgttctctctggatggcttcgaggctctgggaaacaatgctgggccatccaccagtccacgagtcagtgaaaggaagcttttctctgacgtaacacgcctgggttttgcatctgctcaagactcacctcccctaagactcggaactggggatgccaatggccaaagtgaaaactcgagagaccaagggccgttagcgacacctgcattatcatttgccagcatcatatcttccagtagagccgtggctgcagctgacaactcggagat

SEQ ID NO: 457551 - DNA, 345 bp, Sorghum bicolor
cgtccggtcctccaaagtctaccccaacagcctgaatgctcgtgacccttacggctaatcccatgccggcgggggctacggctacggtggcgactactgctgcttcaaaggtgtctcccgctcgccaggcctcacctatgaaagcaacaatccgccagctggggccttccatgatacagcagatgcagcagccttgcaacgagtgcaaggggactggagagagcatcaacgagaaggaccgctgcccaaggtgcaagggtgagaaggttgttcaagagaagaaggttcttgaggttcatgttgagaaggggatgcaacacaaccagaagatcaccttccctggtg

SEQ ID NO: 457552 - DNA, 289 bp, Sorghum bicolor
cgtccgatctggaattccacgaagctctcctagtcgaaagggtcagctaacagaggattactgttcagcggattgatgctattgattttaccatcaaacaggatgatggggctcagccacaaaacctcaaacgtgcagacattgtacttgccggtgtttcacgtacagggaagacaccattgtcaatgtatctagctcaaaagggatacaaggtagcgaatgtgccaattgtgatgggagtgaaacttccaaagtccctttttgagattaaccaggacaagatttttgg

SEQ ID NO: 457553 - DNA, 282 bp, Sorghum bicolor
cgtccgctgtatcggttatgttggcaccagatttgccgttatgtgctattggtgatgaaaggagactgatgcaaactattctgaacatatctggcaacgctgtaaagtttaccaaggagggacacatcacgcttgtagcttccattgtgaaggctgactctctgagagagttcagaaccccagaatttcatccaactgcaagtgatgaccatttctatttgaaagttcaggtaaaagatacaggctgtggaattagtcctcaggatctacctcatgtattta

SEQ ID NO: 457554 - DNA, 402 bp, Sorghum bicolor
ccgggccgggctcaccagctggcccagtgaaggcttaaagacatgtgccaggagaaggggccttgaacttgtgtggtctgcaccctaattattgctcagatgtggcaatggagcttctatattaagcttcgatgagaagaaggaaaggagatgtcaaggtcttcacagagaccgaggaaaacaaccagattccagggccaagggcttggaatcccatatttcctttgacttcaggtggacaattttagaaggcaatatttaaatctggaaggggtaaagaacaatcagatggtgttaattgtggaggttcagatcataatgccatctgatgcattccatttctggtttcttttgaacacaagtacaaaaaaccaacgggaggggcataacttcctgtgttcc

SEQ ID NO: 457555 - DNA, 106 bp, Sorghum bicolor
ccgggtccggacccaggcgtccgcggactcgtgggtcctgaatgacttttttctggttttgcgtgacgcatgcgaacacatggcaatggccgaatcacgaattaga

SEQ ID NO: 457556 - DNA, 104 bp, Sorghum bicolor
ggcgtccggcatagtgaaggcgtccggcagaagagcgaggggggaaagttacagggacagcagcttatcaaagggattattcttccttaagctgctaagcagag

SEQ ID NO: 457557 - DNA, 101 bp, Sorghum bicolor
cgtccgctagctccggcgcctccacttcgctggtttacgatacaatagtcgcatgttattaaatgctgctgctaataagaacatagtaggacctccttccg

SEQ ID NO: 457558 - DNA, 76 bp, Sorghum bicolor
cgtccgcggtactctgtgggcattaatgactgcgaggcggtatcagattttaacctcagatattctgatgaagcat

SEQ ID NO: 457559 - DNA, 457 bp, Sorghum bicolor
  unsure (1)..(457): unsure at all n locations
gggggaggggcggcgtacaaccctaacacagacgcctgcaacccgtgcgccgccgctgaccagagatctggtgcgccgccaccgccggcccacaccgccccgtccaaaaaagctcggattgcccccctgcggccctgcccccgccgtccctggtggagggatcgaccgaggccctgaccggcctgaggcctccgtcacctctgctcgccgccggccggggctgccgcctgccagatcgagaacatctcctgcgtcaatcgagggcacgacttcattcactgacccgtcggcaggggagcagctcgacctccgacgtccccatacggcctcgtcaggccagctccgtgcagcagatagctgcgatgcaagtaggacnagctgcatgaggcttatcggcnagagcttgcggccagagaccagggccatcggccccacatggaggcacatcanaagcaca

SEQ ID NO: 457560 - DNA, 388 bp, Sorghum bicolor
gggggaactaattgccgggtccacccatgcgtgcgtgcatagaagccagtcatagacgtgagggcgagttccagatggtatagcctgccctgaaagcgaaagccatctgtgtcggtgagcatggaggatgacacgatcaccctgcagcaccagggcggtgaggagcagcataacgccgtcagctatcaggtggaggtagaaggacaggggactgcttgacagcctgctagacaggaagaggcacgaggaccagcacaagaagcaggtggacgagctggccaccgacatggagaaggccaccgcggccgagcccgagacggatgaggaggagcacgaggcccgcggcgagacgacggagagccttctcgccatgctgcaccgcttcagc

SEQ ID NO: 457561 - DNA, 136 bp, Sorghum bicolor
cgttccgaaaaaaaaaaaaaaaaaaaaaaaaggggggaagggggaaaaaaaaaaaaaaaaaaaaaaaaaaaaaaaaaaaaaaaaaaaaaaaaaccccccccttccttttctaatatcgcaacgcggcccttttaaa

SEQ ID NO: 457562 - DNA, 277 bp, Sorghum bicolor
  unsure (1)..(277): unsure at all n locations
cgtccgaattcccggtcgaccagcgtccgttcaccaccgctcccgggctggggatggcgcgtgcctggcctcgccgcgcccggccgccgcgtcgcctgggcgcctgctcgcccggacagcccagcacctcgtcctgcgcggcgacaccgacagcgcccgggcgtcgctgcagcgccttcgtggccccgggggggggagggacccngagctcaaggacatcttccgagccgaggaggacgcccggcggaacaaccagggaacgtacgagaggatggtg

SEQ ID NO: 457563 - DNA, 261 bp, Sorghum bicolor
gtccgcattcctggtcgccccgcgtccgctaaagtcgattatgctaccgatctctttaacatgttatcaatggatggaacaacagagaaagagtcagagtcatcttcaaatgatgataatgcctgggatggattccagtctgcacaaccagtacctagctcagagaaaaaagattctgccaaaccggcagaacgcaagacccgggggggggggcgcaatacaagacctatctggagactcaccatctctctcaatatcctc

SEQ ID NO: 457564 - DNA, 249 bp, Sorghum bicolor
tcctgggtggacccacccgtccgctcacagacgcggcggcgccttgagcatgaggaggctgaagctagggcgagggcgcgagggagggacaggagcaccagccatggtgcacgtgagcttgtaccgcaactatggtgaaacattgaagaaaccaaggccgccttcggagaaggagccgcctgatgctgaactgaagctggtgggggagtatggcctgaggtgcaagcgtgaactatggagggtccagta

SEQ ID NO: 457565 - DNA, 398 bp, Sorghum bicolor
gcgtccgtgcggcggcgtctccatgcacaagcagcagcgtcgtggcgggaaggcgctgcggcgggccaagtcggagcccaaggggcccacgcccaggttctccgtcggcgggagggcctgcgcggcagtgcacgcggtaggcgacgtggagggcggcgactgcgacgagatggtcaggtgggaccgcctgttccaggacctcaagcccaactgacgccgccaccgtttgccacgcgatggaagtgctgctgggactattgggacgacgatcagtgttcagagtgctaataacggttgtgcttgtgtttcgtaagtgagtctagttgcttcgctgtcgatcttgtttgcgtgtaatgtacaggctattgtagtctatgcttggaactgtccatcggacg

SEQ ID NO: 457566 - DNA, 482 bp, Sorghum bicolor
cgtccgcggacgcgtgggcgacacattgggtggggatggaaatgtatggcttatatactgggaggccctttgctccatccatttacttggaaacatttggccatctcttttacatcacatactctatggtcctatttctgtgactcacaggaccaaggctgttcatttaccatattggacccgccgatacgcattttatgttttggtgacacttattctgccatgcttggctggtttgctgccatttgcatctctgtcagactggaaagagcttgcagttcaatatttgaagtccagattcagtggaagtaacattgaggattgattatttagaagattggttgtggttatcggtgtaagctcaaccccattttgtgaaggtgtaaaagggtttgccagtttagccactgttgttcaataagaccacatgaattggatttcagtgtattaaaggagggaagctatttttggttggcttcatt

SEQ ID NO: 457567 - DNA, 269 bp, Sorghum bicolor
  unsure (1)..(269): unsure at all n locations
cctgcctaccgtccgcatcccggtcgccacgcgtccgcgctacccactcgcgagcggaacggaattngttagagagcggaagcggcgccgaccacccagaccattcatatattggcgacgccggaggccaatgatggcacggacgctgctaccgctgtggggggggccgagccgccgctacctagactgcaccttcacaggccttctcaccggctgaaagactgaagtatgctaacactaagatggctgaggcgagggtgatcgcaaca

SEQ ID NO: 457568 - DNA, 475 bp, Sorghum bicolor
cgtccgatggaactaaactattttagcttcttttagtcaatgtgtttggaactttagctactaaagtgactaaagtttagctagctaaaatttagcaaggggatccaaacagggcctaaatgtaattgatcctctcagggatgatcataattattattgatttgatttgcaccattatttggagagcagacactccatttccaaatgccccaactctgttggcatcaccctaggagcatggttggctcaggctctaagcagaacattagttgagttggtcacgaatcatggactgtatttcaactaacttgtcatggtaatttttcaactcctccaatcctattccctcaaagtcgccattcatcatgcgcaccagttttggatcaaaattcttctcccgggccttcagctcctcacctcggagttttgaagcctctatctgtttcttcagctttgctttctttttcatgaaatg

SEQ ID NO: 457569 - DNA, 281 bp, Sorghum bicolor
cgtccgtcgccgtcctgcctcggccgctccctcgtcgtcgccgacttccccaacgccggcgggaggggcctcgcggcggcgcgcgacctgcggcgcggcgagctggtgttatgcgcgccccgcgccgcgctgctcacaagcgaccgcgtcacggccgacgaccccaggattttcgtctgcgtcagggcccacaggccccgcctctactatgagcagatactcatagcgtgcttattggctgaagtgttgaaagggagaaattctttctggtacccctacct

SEQ ID NO: 457570 - DNA, 111 bp, Sorghum bicolor
cgtccgaaaaattaaaaaaaaaaaataaaagaagaaggggggggaaaaaaaaaaaaaaaaaaaaaaaaaaaaaaaaaaaaaaaaaaaaaaaaccccccccgtcctttttaa

SEQ ID NO: 457571 - DNA, 468 bp, Sorghum bicolor
cgtccgccagctcctgccctccttttcctctgctctcctgccgaataaaatttcctggacccggggcgcgctctcctcgctcccaaaggaaggaaacctatctatcattccggcggccgatccatctatccttccggccagggagagcaaggaataatcaatcaatcgtccagcgccgcgcgcgggttgatcctttgcgtctccccggccctgctccgcggcgacgccttttgcggtgcttgcgttgcgtcgaggaagcgagcagaatctgcgacgagaaggaggagcacgagaggcatccatcgggtcgcgcgggcgtccgtcgcacggcaagacggcggcgttgaagatgcgggtgctggaggaggacctcttcccctccaccccaggcaaggtgaagatcgagcgggcgggcgccatgaaccggcagctccaccgctgcttcgcgtccaccagcaccatgttcct

SEQ ID NO: 457572 - DNA, 85 bp, Sorghum bicolor
cgtccgctggcacgcctgggtcgggccccggcggtccttcacagccgctgcccccgccaggctccacgactccgtcgtacccttt

SEQ ID NO: 457573 - DNA, 343 bp, Sorghum bicolor
  unsure (1)..(343): unsure at all n locations
cgtccgcttcaccaaccgcatcccgggctngggatggcncgtgtcgctgggcctcgccgccgtcccggccgccgtcgtcgtcctgggcgccctgctcgtcccggacacgcccagcagcctcgtcctgcgcggcgacaccgacagcgcccgggcgtcgctgcagcgcctccgtggccccgggggggggggggacncnnagctcaaggacatcntccgcgccgtgaaagacgcgcggcggaacgacaagggcgcgtacgagaggctggngcgcggcaaggggtacgggcactacctggtgatggtggnggccatcccgttcttcttcgaactcaccggcgtcatc

SEQ ID NO: 457574 - DNA, 540 bp, Sorghum bicolor
cgtccgctcgctcggtgcctgggtccctggcctccccgtccgccctccgcctccgtctccgtctccgcttccccaatccgccgacgccaccgttggtctccagttgtacagtgttaggcctttggctctaagctattctgtgattcaagaagtacggaaacatgagctacttccaagctacaatacacaagcctcatattatgctcactgcatacaaaccagtagatggtcttggaaggacctgtgagctactttatcaagattctctatgcccacatgctaccagatcttttaagctggtggagcaagtgtatccaaggcttgttcttgtttctgcttgccataaaaggcttggtcctgtatatgcttcgagtgggaaagaaaaccctaagattagcaatgatccattttcaatggaatcattgaacaaagcaatggcagaagcaaaaaggccaaggtcaattcaagacgtgctgatggagcaaatggctaagattggaggactaggctctggtggaaatggaggaaacaaaaccgtat

SEQ ID NO: 457575 - DNA, 188 bp, Sorghum bicolor
  unsure (1)..(188): unsure at all n locations
gtcccattccggtccccttgagatggtcatgatggcagtgaatgtgatggcctggcttattagatgcactcgtgagcacaatgtgcagcccattactgcttgactcttttggtatggctgagaccttatgctcacaattttgcanattggctggggacctatgacatccgagattagtccttttgagg

SEQ ID NO: 457576 - DNA, 303 bp, Sorghum bicolor
  unsure (1)..(303): unsure at all n locations
agcgtccgtacagctgcaaaattctgatcgaccgttttccgactttaccccccccccccccgcccttcaccgtcggaatccacccgcacgcgcgccgcgggagatggccacggccgccgcgaggccgcctacggctccgccgtcggctgcggcgggagatgtctccgaggtggagctctcggaggggggggggccggacctcggcagccggagcagcgggagcggnagcgggggcagcggccggagcgcggcggagtactccgggtgggtgtaccacctcngngngaactccatnnnncacga

SEQ ID NO: 457577 - DNA, 94 bp, Sorghum bicolor
cgtccgggcgccgaggaagctgaacatgacccttatgcgtgagccgtcagtcgctgcccggatggacggtgcagggtcacgtgaagtacgtctc

SEQ ID NO: 457578 - DNA, 129 bp, Sorghum bicolor
aatcccgggtcgcccagcgtacgcacttctattgagagacatacggtgggggggggcatgcaactgaatctgacatgacagaagctgccaggatctcagaatgcccatcactccatcagcagcctgcct

SEQ ID NO: 457579 - DNA, 90 bp, Sorghum bicolor
cccggtcgccacgcgtcgccacgctcgtgctggagctctctgctgagcatggcattcacgctgatggcagatgcctgtgacaagaccgtg

SEQ ID NO: 457580 - DNA, 451 bp, Sorghum bicolor
cgtccgctggtatctgcctgaacaccaccagatagaaactgaatctctctctgaatattcagccaaaaaagaaggagaagcaaccatgatcagtgccaagaggattgtttggatggcaaagaagtggcagagaatggctgccctggcgaggaagcggctcacggcgactccgcggaaagaagacgccgattgtccgtgcagcgcatcgacgtcggtggccgtcaagggccattgtgtcgtgtactcctccgacgggaggcggttcgaggtcccgctggcgtaccttggcacagcggtgttcagcgagctcctgagcatgtcgcgggaggagtttgggtttgccggcgccaatggcaggatcacgttgccctgtgacgccgcggtggtggattacatgatgcatttgcttaggcgagacgcctctgaagagattgcgagggcgttcttgagc

SEQ ID NO: 457581 - DNA, 215 bp, Sorghum bicolor
gcgtccggcgactttttactggtccagtagcctcgagagaggacggcccacccatggaatcaaccgccaaaacgctatgagctgaggagctgactcggtcgtgccgatgccgagcttgaggcactggacatcgacaggatggatccaccagatgcgactcctgacccagcgaaccagatggcgcgagacctgagtaagcacacaagagagatgga

SEQ ID NO: 457582 - DNA, 104 bp, Sorghum bicolor
ccttctatattcagctaggatgagcagactggatgagatgtctagttcttcacagagacagaggagaccagcctgatgcgaggcccaaggactgcagccccata

SEQ ID NO: 457583 - DNA, 83 bp, Sorghum bicolor
cccagcgtccggcagctggcgccaagattgtattgggggggggggtattctcaaggaagggagcctgctgcagaggagggacc

SEQ ID NO: 457584 - DNA, 110 bp, Sorghum bicolor
cccggtcgaccacgcgtccgtcctcggtaccaaactagccgggccgggggcgggctctactacgggaacgtaaggggctaacgtggcgcgggcctgatcgaggcccccgg

SEQ ID NO: 457585 - DNA, 191 bp, Sorghum bicolor
cgccgcaccagcagcgccgacgcccacaccgaccctaccgcgagctggtgccggcgctgctctcgactgctctcgtagccgccccggcaataggtcctacacacccagcggcggcatggcggaggagctggtgctggacacggagaaccgagactggaggctgatcgcgctatccgtgattatggacctga

SEQ ID NO: 457586 - DNA, 109 bp, Sorghum bicolor
gtcgaccacgcgtccgaatgcgtgtgcctgtgaacggattgtgcctgatctgggtatgattatatgtcaagagactatgacactgctgagccaagagggattgtattcg

SEQ ID NO: 457587 - DNA, 352 bp, Sorghum bicolor
cgtccgtgctctcctagcatagatggtagagtggctgggggcgctgaccgccatactctaattctcaacacaggaagtcgctttccgaagcacccccagaccgtgcgctcgttatacgaggatcagagcactcgagcatgtccatcgtacagctttctggtgccatagtggcagctgaggccttcacgagggggagccttgtacatcagcccgactgtgtacacctctgctcgacccggctctctggccgtgcactgcatgcgaatgttgccagctggcgtactaccgagagacgctcactcggaacccccgttagatcaggtgctcaggctgcttggcgactgggacgcgc

SEQ ID NO: 457588 - DNA, 384 bp, Sorghum bicolor
cgtccgccgaagggtccgatgaggatgaagatggcgaggaggaggagcacgaagaagaagaagaagaggaagaggaagaggacgagaaggccaaccacgtgatcccttcttccgccaccaagaacccgccgccgccgccgccgactgacgacgagttccgcatcctggaggtcctcgccgcgcaccgcctggagcacggcacgctgcctcaagcagacgtgctggccaacgctctcgccggtaagctcgacaacagtggctgcagcctctccgagctccagagtaaggtgaggagcttgcagacccggtacaccaaagcggtcaagaagggcgcgccgccgagcaagggtcacgaccaccgtctcttcgacctcctcaagaacg

SEQ ID NO: 457589 - DNA, 274 bp, Sorghum bicolor
cgtccgagcatacttgctttgtttaatttcacttgcaggcttctcggtgacaaccgtgttccacctcaccctcatcctaaccaacttccgccttgtagccccatattgtgtaccttgcagtggtgcccttgtccgtggcacgagtgcggccctattgttgactgcaaatttgaggtgagtttttgaactagaacctactttgctgttttgaatgtatcaattttctatattacggatgtgtttgtgggtatggaagtgggggaaggttggggag

SEQ ID NO: 457590 - DNA, 397 bp, Sorghum bicolor
  unsure (1)..(397): unsure at all n locations
cgtccgctcatgcgttctctcacgcgtgcggctgctgcaacctcgaactcgccagaaagggaaaccgtatctgctcccgtcctctcgtgttggtgccggcgactgctgatcaaccaaagcccagaccggataccggcacgtggagggcggacgacgctcatatctgaggcgctaggagcacgaacacgacatgcatgtaccatgagaagctaaacactgccagcagaggctgcncttgacgtgctccgccgggtacttgaggcagtgcttgcccacatctctgaaaggatcatcgagctcttcttgaacgatacagtaaagcggttcaatgccaatgcaggcactggtatagatactgatctcaaaatgtttgagacgtttgcagagggcatgtcta

SEQ ID NO: 457591 - DNA, 466 bp, Sorghum bicolor
cgtccgctcaagggtgctaagttgtctggtacaaacttgcaagacgcaaatcttcagagagcttacttgcgagaagttgatttgcgtgacactcaattgactggtgctaagctcggaggtgcaaatctacttggagctatcagatgatctacagtttgtcggtgtagcttcatactgtgtatactgtactgtacaatttcattggaggtaatgcctgaggcatgatcatctgtgcaatactggtctcagtcacgattgagaacacaaatattccctctggtccaaaataaatcaattcatagaatcaacccaagtcaaactatcttaagtttgaccaacattataggaaagggtaacagtatctgtgacaccaaataagtacattatgaaatagatttcatgatgtatgtattgatactaattaggtgtcataaatattggtgctttttttttggaattaataaac

SEQ ID NO: 457592 - DNA, 254 bp, Sorghum bicolor
  unsure (1)..(254): unsure at all n locations
gcgtccggacgtttctgaagccagctaggggggccggggggaacaaccaaataaaaatctccccagcagcccagggcccgccagtcgacggtctctctcgccggccttctcagaccacatcacccacaagcattgcgcttgacgcctagctataagtactcgccggacaatgctnccactccatgggggggccacctcatctcatctcatccatctcnnacctnanncaatctancaaaaanncccttctttcc

SEQ ID NO: 457593 - DNA, 436 bp, Sorghum bicolor
  unsure (1)..(436): unsure at all n locations
cgtccggggaaactttgttaatgaaccgtcgctcagaagtgtgctctcagaccctttgtctggggcttttcttgaagatgctatggttctctcatgtgggcactcgtttggtggcctcatgctaaagaaagttcttgaaacggcaaggtgcagcatttgcaacggagaagttgatgaggcctccttatttcctaaccttgctctaagagcagtggctacagtggtgaagatggaagacgataggaggctctttcataatgcagcccttcgaaagcgcaggaaagaagtgactgagcatatggatgctcaaaggcgaagcggaagtagcaaggacagtattgagctggggttagatgctgaaagccctaaagcgttcaagggggtgcagtacccgttcgtggcggntgagagagtcgngatcatgggaaacaaaagg

SEQ ID NO: 457594 - DNA, 385 bp, Sorghum bicolor
  unsure (1)..(385): unsure at all n locations
cgtccgcccacgcgtccggtaaacttcgcctggtgcaggtcaggcattctcgacacaacagggagctccatcatcccgcttagcaagcaggtggagcaattcgccgccgtgcagcgcaacatctcctcgcgcgtcggcaccggagccgccggcaccctgctgtcgcgttccctgttcctcgtgggggggcggcggcaacgacctgttcgccttcttctcgcgtaagaacagcacgccgtcggacgccgacaagcggcggttcgtcgccaacctcgtcgcgctgtaccagaaccacgtcaaggctctgtacgtgctcggggcgaggaagttcgcggngatcgacgtgccgccgatcggggggggggcctacccgnggagcctgcac

SEQ ID NO: 457595 - DNA, 164 bp, Sorghum bicolor
cgtccggtatttcttatgcagcataagcatgatagcagaggcaccactacaggcacacgtttgacaaatagccttcagctgcgaagctgctttaggctgctcctgcctagcctatggcaccacctatcgtcccgagagatccaccacagctgttgtatggtcca

SEQ ID NO: 457596 - DNA, 512 bp, Sorghum bicolor
cgtccgactgcgcgtgcctttggaacaggtttggccctgttctggatgtttacctgtcaagagactatgacactgcggagccaagagggatcggattcgtggagtttgatgatgcttatgatgcttctgaggcgcaatacctcatgaaccgtgagatgtttgttgagcgtgaaataactgttgtacttgctgctgatgctaggaaaaggcctgtggatgtgcatagacgaactgctccaagaggttattctggtcatgaatggcgtcgtccttatggccatggccggtctcgttctcgttcatactcgagttccaggtctacacgctcgcgtggtcgtggtagatgacagtcatactgacctgcctcggaaaggcgtgatgactactatgcttccacaccacagtcaaatgaagagaatccggtgtcatcacaacagcctatagaaaatgacatggataagaagaggaggtcctatactcccgaagatagaaatgatcgccgtggtgcggag

SEQ ID NO: 457597 - DNA, 160 bp, Sorghum bicolor
  unsure (1)..(160): unsure at all n locations
cgtccgctgtccttctctcccaaccctagccggcgcgggcngccaaactactcngntggcgcgtacatgacccacccttcctcgtcgtcgtcctccgctcccccgcccccgccgttgccgccgnccggggcggcggcgggggcggccgagcccacctccc

SEQ ID NO: 457598 - DNA, 338 bp, Sorghum bicolor
  unsure (1)..(338): unsure at all n locations
cgtccgcactcgtctactccccaccccacctggctctcggcgctgctcgccacgcgccacatggctcccgcgttcactagcctcctccccgccgcgacctccgccgccgcctcgcggctcccctctgccggcgccggagcggcatccaccttcgcgcgtctcccgcatcaccctacaanctgggggggggggctacnncacntctccacctacttctatttcacacannctcacaccattatattcctacanaaattnnttctcaatatntatctaacacancaantacaacananataatcaaacatntaattacttntttaaaaaaaaacacaaac

SEQ ID NO: 457599 - DNA, 145 bp, Sorghum bicolor
  unsure (1)..(145): unsure at all n locations
ccccgcgtccggaaatttcagatcatcttgttccttgtttttgttaacaacaaaacaatttnctgaaatatccagcacctccaaatatacccttggctcccatacaaaatggcattcatcatatgccagnacttgagcagcctat

SEQ ID NO: 457600 - DNA, 166 bp, Sorghum bicolor
cgtccgcatacgttcgctccaccgactggctgtgcgctgtgcaccaaccaactatccttaactacgaaactcccaacaacataaaaaaccacatataccttattaaactgaacaatctaaccggcaaaatcggagctaaacaacgactcatacgtacaacaaacca

SEQ ID NO: 457601 - DNA, 172 bp, Sorghum bicolor
  unsure (1)..(172): unsure at all n locations
cgtccgggctttttccaagatgcttcccctggtgcttggggccacctctctctttctgacctgcggtcttcttctgtctccccgctccnctcctctgnctctggtccttcngtgcggtgccctggttgccggggctcnggcttgnnngtccccctccgcccgctggggcctt

SEQ ID NO: 457602 - DNA, 175 bp, Sorghum bicolor
  unsure (1)..(175): unsure at all n locations
cgtccgacccattcgtccggatctctagtgctatagatttcctaattgtgtanataaaaattaaatttcagtaccttgaggaaattcccatctgcatgacagtgcacaaatatggatagctgatatatgggcacctgatgtgcaaactagaaatgccagatctgtattnntcaaa

SEQ ID NO: 457603 - DNA, 164 bp, Sorghum bicolor
cgtccgaccacgcttccgatccgcgtgcccgtgtcctcgggtacctaccccaccaccaaccctaagagccccgtgatcttctcctgccaccctcttatgaaaggcgccaggaaggcacccgtagaggctccaggaggaggaggaagacgaagaaggagccgcag

SEQ ID NO: 457604 - DNA, 475 bp, Sorghum bicolor
cgtccggagggttataaaagacctcgcccttgaagacatgtgaaccatcagtctgataaaaatgacagtgaagatggcacagtgacccggtctccggacagtcagctgaagagaaagcatgattctgttggaactgatgatattgaacccaacaggtctgctaagaggtcatcggtcagcccaggtcatccgaaaaattcacctcaatctgggagcactggcgatgagactagatgtaacaaccaaataaaaagggctcctagtgatgcaagtggtggcagtccggcttcacctcaagcatcagagagaagcccagataccattgtgtcttcccctatgtgtacgacaacaggagcagtgtgttctggtgatgcaattagtaagcatggtgttcctcttgttgagaactgcaccactccaactgtagcagtgtgcacaactttgaagcgtgtagctgagaaagttgtatcagagc

SEQ ID NO: 457605 - DNA, 125 bp, Sorghum bicolor
  unsure (1)..(125): unsure at all n locations
gcgtccgcggacttttgggtgcagccctctagggacagtagctagctagcagccgccgccatggaggccagcggcaagaagctccggccgntcctcctcaccctgctgctggngctctccaccgc

SEQ ID NO: 457606 - DNA, 202 bp, Sorghum bicolor
acgcgtccgaaaaaaaaaaaaaaaaaaaaaaaaaagagaaaagggaaaaaaaaaaaaaaaaaaaaaaaaaaaaaaaaaaaaaaaaaaaaaaaaaaaaaaaaaaaaaaagaaaaaaaaaagaaaaaaaaaaaaaaaaaaagaaaccaaaaaaaaacaagggggggcaccgaaaaaaacaacaaaaaaacccaagggggggggg

SEQ ID NO: 457607 - DNA, 189 bp, Sorghum bicolor
cgtccgcaggagaggaagacagagagagaagagagagatgcggtaacccaagaactgctcttatgcatgaagtagccataagcattactattagggtttcatgcagggcaaagcagctggtttctgccgcctgaacgccgccggaatctgcgaggtcttcccgagcagcgtcatcgcataggggggggg

SEQ ID NO: 457608 - DNA, 345 bp, Sorghum bicolor
cgtccgccgagcaggtgggggacgaagccaaagccaacaaggccgcgcggcgcgcgggcggccatgtggacgccatgcgcggacgcggcgtggacgtcgtgacgacacctgccgcccgccgccccccccggcccgcaccgccatggccccgccgccgccgcaatgcgcctcaaaacccctgtgcgcgcgttccgtgctccaggtaggggacatggccgaggaggaggcgccgccgacgccgccgccgcccaagctgctctacattgccgtcgccgacggcgggggccgccgtgcgttctggtacacgcgcaacgtgctgcagagtactctgtatcttatgggatg

SEQ ID NO: 457609 - DNA, 161 bp, Sorghum bicolor
  unsure (1)..(161): unsure at all n locations
cgtccgctgtcctcctctcccaaccctagcccgctccggcngccaaactgctcgggtggcgcgtacatgacccacccttcctcgtcgtcgtcctccgctcccccgcccccgccgctgccgccgcccggggcggcggcgggggcggccgagcccacctccct

SEQ ID NO: 457610 - DNA, 419 bp, Sorghum bicolor
  unsure (1)..(419): unsure at all n locations
cgtccgcactcggctactccccaccccacctggctctgtgtgctgctcgccacgcgccacatgactcccgcgttcactagcctcctccccgccgcgacctcctccgccgactccaggttcccctatgacgccagactaacgacatacacctatctcacagaatatattataacacacaaacagtgggggggggacgattacanctncaaaactagtgctcnctnatacantatcaaangattatcttggtccaaagattgtttctcactatggatctcacgcatcaagtacaacacagataatcaaacaactaattacttntttaaagaacaacacaaactttgacatgggagctttttttttgggggctctaaaaaggcctatgaacgttacatngcccatgntcatgagggagaaaa

SEQ ID NO: 457611 - DNA, 110 bp, Sorghum bicolor
cgtccggcgttttttaatttggaatggagggagtagctctaagatcattcaatgcgatacttgagtagctttttcagaccagccattattcatgtgttaggctgtacttt

SEQ ID NO: 457612 - DNA, 315 bp, Sorghum bicolor
  unsure (1)..(315): unsure at all n locations
gcgtccggaaaattcagacatcttgttcagtgtttatgtcaacaccacacaataccatgaaatatacaacacctacaaacattcccttggctccaatacaaactaaaatccaacaaataccaacactaacagataacaaaagaaaaagctctaaaggctagccttatcaaataaaangagcgggggggtggtcttnnatcaaatcccaaggctactaacccaatnntcatttatccaagctcatctcnaaaatctncaaatgctgnttcacattttggtgggaacactgatattcccaatgatggatttgtacct

SEQ ID NO: 457613 - DNA, 164 bp, Sorghum bicolor
cgtccgcatacgttcgctccaccgactaggctgacgggtgggcaccatcaactatccttaactacgaaactgccaacaagataaaaaaccacatataccttatgaaactgaacaatcaaaccggcacaatcgagctcaacaagagctaatacgtacaacaaacc

SEQ ID NO: 457614 - DNA, 174 bp, Sorghum bicolor
  unsure (1)..(174): unsure at all n locations
cgtccgattaatttaccgagcattttatctggttgtatgctcgaataaaaatgtgcangaaacatctgagttcgatctagttttcatgcatgttgccatggagaacacaagcagcaagttaggaaaattaggaatgaagacagatctcaatcggctggagaaattagttttttc

SEQ ID NO: 457615 - DNA, 88 bp, Sorghum bicolor
  unsure (1)..(88): unsure at all n locations
cgtccgcccactcgtccgccgccgcctccactgtctccgtctcccnaaacattccanctcccctcctccgcctcctncccnnncccca

SEQ ID NO: 457616 - DNA, 286 bp, Sorghum bicolor
  unsure (1)..(286): unsure at all n locations
cgtccgacccactcgtccggatactctagttgctagaagggttcctaattgtgtagataaaaattaaatttcagtaccttgaggaaattcccatctgcatgacagtgcacaaatatggatagctgatatatgggcacctgatgtgcaaactagaaatgccagatctgtattggtcaaagataggggggggtaaaattcattatnntaactnnnnaactatctnnaanccatttnnaantactcanttattnccanaatntttatataaaacaatcatatttcaatt

SEQ ID NO: 457617 - DNA, 147 bp, Sorghum bicolor
  unsure (1)..(147): unsure at all n locations
cgtccgccctattctgactccccctaccccctgttcctgtcgccttaaacccacncaatccancggaggagcccatctccgcccccggcgacgccgctcaaaccctagccgctccgccggctctgccaccggaagccaangccccca

SEQ ID NO: 457618 - DNA, 171 bp, Sorghum bicolor
cggtccgcattcccggtcgcccagcgtccgccactttcccatcccttgccgtgtcttcgttacctatacaccatcaacctaaatccccgtcatcttcttcgccaccctctatgaaagccgccataaaggctcccgtagaagctccaggaggaggaggaagacgaagaagga

SEQ ID NO: 457619 - DNA, 217 bp, Sorghum bicolor
cgtccgatgatgaatttgatttcggcgaaagctgcttctgcgatatagtttctgtcttagtagagttctttgtctcgtttagctgcttttgctgaaccttttatagcttttagttgcttttgtcgagcttttagttgtggttgttttgggccctctgttttgtaaactggaatccccagtgccggatcaaggtgttcgttacgctttcttataaaaa

SEQ ID NO: 457620 - DNA, 205 bp, Sorghum bicolor
  unsure (1)..(205): unsure at all n locations
acgcgtccgaaaaattaaaaaaaaaaaaaaaaaaaagaaaaggggaaaaaaaaaaaaaaaaaaaaaaaaaaaaaaaaaaaaaaaaaaaaaaaaaaaaaaaaaaaaaaaaaaaaaaaaaaaaaaaaaaaaaaaaaaaaaaaaaaaaaaaaaaaaaaaaaaaaaaaaaaaaaaaangggggtttttntttattgtggggtggtgggg

SEQ ID NO: 457621 - DNA, 129 bp, Sorghum bicolor
agtgtttttttataccctttgtctggggctttttttgaagatgctatggttctatgatgtgggcactcgttaggaggccgcatgctaaagaaagctcttgaaacggcaaggtgcatcatttgcaacgga

SEQ ID NO: 457622 - DNA, 226 bp, Sorghum bicolor
  unsure (1)..(226): unsure at all n locations
acgcgtccgaaaaaaaaaaaaaaaaaaaaaaaaaaagaaaaaaaagaaaaaaaaaaaaaaaaaaaaaaaaaaaaaaaaaaaaaaaaaaaaaaaaaaaaaaaaaaaaaataaaaaaaaaagaaaaaaaaaaaaaattcacatgaccgtcaatttacaacgggtttgactgaaaaaaccctaaaaaaaacccaagggggggggggganaaaaaaaaacttttttaaaa

SEQ ID NO: 457623 - DNA, 340 bp, Sorghum bicolor
  unsure (1)..(340): unsure at all n locations
cgtccgccgagcaggtgggggacgaagccaaagccaagaaggccgcgcggcgcgcgggcggccatgtggacgccatgcgcggacgcggcgtggacgtcgtgacgacacctgccgcccgtcggcctcatggggccgcactggcatggccccgccgcctacagaatgcgcattaaaaccactgtgggggggggggttactaaaagtagcgagacatgagcacatcagagaagggcttaacatagcttctaccgnaataggagcgggtatatagaaatcgaaaagcttagagaggctctatctaatgaactgtatggaaatgatgaagacattatcaatggca

SEQ ID NO: 457624 - DNA, 231 bp, Sorghum bicolor
  unsure (1)..(231): unsure at all n locations
acgcgtccgaaaaaaaaaaaaaaaaaaaaaaaaaagggaaagagagaaaaaaaaaaaaaaaaaaaaaaaaaaaaaaaaaaaaaaaaaaaaaaaaaaaaaaaaaaaaaaaaaaaaggggggaaaaataaaaaaaatggaggtttttttaaagggaaataaaatttaatagttttttaaaagggnaaaaaaattggggggggggggnnnnaaaaaaaaaaaaannggaanggg

SEQ ID NO: 457625 - DNA, 246 bp, Sorghum bicolor
  unsure (1)..(246): unsure at all n locations
cgtccgcggactcgtgggggactgatgggctaccttgggaataagggttcaatttcgattagcatgtgattgcaccaaacaagcttctgcttcgtctgcagccacctgacttcaggacagaaggaaggtgatgagctgcggaggaactccgatgtgctggaaatcctcataaagaccaggggggggggggtctatggncantatgagcattcaccanaaacaatcttanancatgatcnaatcatc

SEQ ID NO: 457626 - DNA, 406 bp, Sorghum bicolor
  unsure (1)..(406): unsure at all n locations
cgtccgcggactcgtgggaccaaaaaaaaaagaaaaaagggaaaaaaaaaaaaaaaaaaaaaaaaaaaaaaaaaaaaaaaaaaaaaaaaaaaaaaaaaaaaaaaaaaaaaaaaaaaaaaaaaaaaaaaaaaaaaaaaaaaaaaaaaaaaaaaaaaaggggggggccgnttaaaaaaaaaaaaantagggggggggggaataaaaaaaaaaaattttttaaaantnaaacaaaaaaaaaaaaaacgggccccttttaaaaaaacncnaaacggaaaaaacccgggggaaacaaaaaaaaatggcttggaaaaaaaaccccttttgccaaggggggaaaaaaaaaaaaaggccccaaccaaccccctttcaaaaaaatggccaaccnaaaagggaaaagggaaccccc

SEQ ID NO: 457627 - DNA, 91 bp, Sorghum bicolor
aaccaaaaatttcttcaaatgaaggggttatcatcgtcacattactcaatttgtcaatactcactaatacaattacattgaagaggttcat

SEQ ID NO: 457628 - DNA, 231 bp, Sorghum bicolor
  unsure (1)..(231): unsure at all n locations
acgcgtccgaaaaaaaaaaaaaaaaaaaaaaaaaaggaaaaaagaaaaaaaaaaaaaaaaaaaaaaaaaaaaaaaaaaaaaaaaaaaaaaaaaaaaaaaaaaaaaaaaaaaaaaggggggaaaaaaaaaaaaaatggaggtttatttaaagggaaataaaatttaatagttttttaaaagganaaaaaaagggggggggagggnnaaaaaataaaaaaaatnnnnaanngg

SEQ ID NO: 457629 - DNA, 247 bp, Sorghum bicolor
  unsure (1)..(247): unsure at all n locations
cgtccgcggacgcgtgggggactgatgggcgtaccttgggaataagggttcaatttcgattagcatgtcattgcaccaaacaagcttctgcttcgtctgcagccacctgacttcaggacagaaggaaggtgatgagctgcggaggaactccgatgtgctggaaatcctcataaagaccaggggggggggggtctatggncantatgagcattcaccanaaacaatcttanancatnatcnaatcatc

SEQ ID NO: 457630 - DNA, 440 bp, Sorghum bicolor
cgtccgcggacttgtgggaccaaaaaaaaaagagaggggggaaaaaaaaaaaaaaaaaaaaaaaaaaaaaaaaaaaaaaaaaaaaaaaaaaaaaaaaaaaaaaaaaaaaaaaaaaaaaaaaaaaaaaaaaaaaaaaaaaaaaaaaaaaaaaaaaaggggggggccgttttaaaaaaaaaaactttagggggggggggataaaaaaaaaaattttttttttatggcaacaaaaataaaattaatgggccgggttttaaaaaggggggaattgaaaaaaccttgggttaaccaaattaaatggctttgaaaaaaatcccttttttgcaagtggggtaaaaaaaaaaaaggcccgaacaaattgcttttcaaaaaagttgccaaccttaaagggaaatgggcccccccctttaaggggaatttaaacggggggggtggggggg

SEQ ID NO: 457631 - DNA, 81 bp, Sorghum bicolor
cgtacgaccgtagggggtgagaagttctctcgccctttcggcatacctcgtcatacaacccccgcgcttccaccactctgg

SEQ ID NO: 457632 - DNA, 114 bp, Sorghum bicolor
gcgtccgagcgagccgctcgcctcgcaatctccgccggcaccgaccatcaaaaaaggttttggcaccgtccccacccaaccgaccggaatttcctttccattccaatttccccg

SEQ ID NO: 457633 - DNA, 530 bp, Sorghum bicolor
cgtccgtccccctcgacgcttttccccatgacgcgcacccaaggcgattttgtcggtgcggcgacgatttggtccagcgaactcgcgctcctcgatgcagagtgctgccgaagatagtgatggcagttggagggtttagctcatcattccttcctggagggttctagattgctctgaaggcaatggttcctcggataaagacttctgttctcatgataaatctatcgatggggagaatgatgatgattttgatatgaactctaaagaaaacatagcttctttggatccacatttgtcagaggatgaggttgatgaagctgaactagtgaagacttgcaagcattttcatataggtgccagctactataaggtttgcattagacagagaaatgacaccctatttacttgtgaaggatctgattatgccatgtgtttggcaccatgaattgtagtggttggcctgctctccaccattgcagttgcggaagaagcatggaacgaaatataaagtaaatggtgatctagcagca

SEQ ID NO: 457634 - DNA, 435 bp, Sorghum bicolor
cccaaagttccttcccttccccgtctctttctcccccctttcaacttttttggcccttgcttttcttggccattccttggttcaatccgaaaggcttggaaccagggcaaattggaaggtggcagaaaaaacggaaggggctttccttctggctccgtgggaaaaggaacaggggaaaaccccaccccaccaaaaagaggctgcaggttcccgaggcccggccttttttggcgggggcaacatgaaaaagctgttcttcgtctccttcgtcctcctgctggccgttccagcagttaacggggaaaatggggcgtccattggcgtgaccattggcacggccatgtcgtcggtgccagcgccgacgcaaatcaccacgctactccgttcgcagaacatccgccaggtccgcctttacaacgccgacccagcgatgct

SEQ ID NO: 457635 - DNA, 364 bp, Sorghum bicolor
gcgtccggttgaggagtgcctctttggctctttttgcatggcttggcaagattacactagagacttatatttctcagatccatatttggcttaggtctaacatgccaaatggacagccaaaatggcttctttgtttcataccagattatcctatgcttaacttcatgcttactacggcgatctatcttcttctatcataccgtgtgtttgagatcacaagcgtcttgagggcggcctttatccccagtagggataatagccgcctataccaaaatttcattgctgggatcgccatctcagggtgcttgcatctgtgctcactcattctcctgaacatccctgttgtatagggatgaagataccc

SEQ ID NO: 457636 - DNA, 155 bp, Sorghum bicolor
cgtccgatcgagcatcggcgggggtcctgtccgaaaaaaaaacacgagcggagaacgccgcttccggtcctgttcgcggctcgtgatttcgccgtcggagagccgagggagagggagcgagatggttcccgtcgtagacacgatggattccatcc

SEQ ID NO: 457637 - DNA, 578 bp, Sorghum bicolor
gcgtccgatacactaatcgtttttattgggatttgaacctttttatgtcctttctttgagatacatattgtaaatttgtcacttgtcctactaatgttaatgttaaactgggcaatcgtatatatttatcattgctttttaaaaaaatgatctaacaatgtatcctgcaaatccaaattttagaatgtaaagcttgctaaagtagctttaaggcctggtgctgggaatatggtgaatgcaattctgcgtaaacttgtattgctaaaggagacagactctcttcctcttccaaagatagaaggcgatgatcgtgcccaagctcgtgctctttctataatttatcaccatcctataccccggtaacacctgaaccaggcttaaatcaagccagctcaccgacaagtgggcatccgcaggcttatcatggaaaccaaagacatgtatctgcaacttatgtcgctccgtgggctcagcctcagtctaagaccacaggaagtcaacaactgacacccactcaagcacagttattctacagctcatttgcttacccgccgccaccctgggctctacaggacaac

SEQ ID NO: 457638 - DNA, 195 bp, Sorghum bicolor
cgtccgcttgaagaagatgattcctttgacattgatattctcttagccgagggcgaaggggctataaagccgaagagaagaagaccaagaaggggagaagatttcaggtttcgtgaagcaatactgaaggccgatttctggcttctctttgcaatatgctttgttgggattggatctggatttactgttgttaat

SEQ ID NO: 457639 - DNA, 665 bp, Sorghum bicolor
  unsure (1)..(665): unsure at all n locations
cgtccgagcagcccacccgcacgcagcgccgcactcccgccgccgccgccgcactccccgcacgcgaccgcacgcgactgcgcccgacccctctgcctccgctccgactccgcgcgactgcgcccgacccgaccctagtctcgcccgcgtccgccggcatggcctcgcccacggtcgctgcctcctcgagccgggcgggccccaccgacatcctcaccgccgcgccctcgcccgcctccccgccgcggcggctcgcgtcggcgccgcccgccgtcgacgcgtccgggtccttctccccggactccgccgtcgacgcaccgcatttcctttttttttctttcctcttctgccctggtgcgtgtctgatgtggcgcggtgtttggttgtgcatagcccgctgctcgcgagcaggagcgaggagtacaggcttttgttccggctgccgcctgacgaggtgcanaatttgggacttgtcaagaggttcagaaacttcgtctttacaaaaacaggcgtctaatgattcaaacctctcagtcaataggtgatgccccatatggngaccatttcactgtagagggcatctgggatcttgaacaagatagcctagatgagaactgttgtgacctcaggatatatactaatggagctttctcaaagaaaacata

SEQ ID NO: 457640 - DNA, 381 bp, Sorghum bicolor
cgtccggcgaatattaaagcattttccttatagagatatatataaaaaattagaacaaaagggtttttccttttcgcgactccgtcgtccaccaccaacctcctccgatccggccgccgtagcgtagccgaattgtcccactccgggactcgctcggtcgacgagagggtgtttccggcgagggctctcggccgatctcctccgtgcggttgaggacatcccgcggtcgcaggggggctggggcgtgcatgatgggattttggttgatcccgatggagtcctacttccccggcggcaaggaccaccactcccacgatggcgggaggggtccagaaaaccacggggcggaaggagggatccagtctgatgacgacggccccg

SEQ ID NO: 457641 - DNA, 482 bp, Sorghum bicolor
cgtccgctctgctatttcttcacccgttcacccccgttcatccggcctccgttaaatctctctccctcccggcgacgactgggcgacagccgctgccgccctaccccagctctacgtcggacccttcgccggcgacgagcacccgccagatggcgagcacggggcggtcgatgctgctgtccctgctgctcttcgcagtgacgctgtcgctgctggagatgtacagagccaagttcgcctcgtcggagctcatgaccatcgccggtggattcgtctgctcccttctcttcctgctactcctcacctttattggaaactaccaagaagctagtggagatagaactgggtggggtgcagttgttgtagcacaacttgtagctcttattgtagctggcactgtccaccgtgtctgtatcacaacatgctacctgttttccgctggactcctttacgaggttgacaagctctctggcatgatcctt

SEQ ID NO: 457642 - DNA, 642 bp, Sorghum bicolor
cgtccggttatgccaaaatcaatgaagattggcaggataaagatacaacaagtgtacctaaaagtaaagtgcgaaagaaaaagttatcagacatgcttgggtctcagtggagcaaagatgagctcgagcgcttctatggtgcctacagaaaatatggaaaagattggagaaaggttgctggtgctatccgtgatagaacatctgacatggtgaaggctctttacaatatgaataaggcatatttatctcttccggagggaacagcaactgctgcgggattaattgcaatgatgaccgatcactacaatattctggatggaagtaacagtgatcgagaaagcaatgattcaccaaaagtatctaggaggctacagaagcgtggtcgtgcaaaacttcaatctgtgtctaagacatctgatacacattatactgatctgttgcaacctcagcctgcttcatcgagctatggatgcctttctttgttgaagaaaaaacgttctggagacctgtttgtaggcaacaggccacgtgctgttgggagaggactccaagagtacctgttgcaagcatgaccatcgagatgacaggggtgcatcaaatagacaagctaaacctgatgctaaccatggtgacgatgaagga

SEQ ID NO: 457643 - DNA, 243 bp, Sorghum bicolor
cgccccgcgtccgggactgtgggtcgactaggcgtgggggtgggttacacaagtatgcgatcatcccaaagcgaactgcgttgttacctatatacctccatgggcgtcgcactgttgatatgattacaggcctctatcaagacttgccggaacttgggggagatttttcgcagaggggggtgggagaacaccatcttctaccgcatcatcaaggattacattgggctacgtggtgatcctact

SEQ ID NO: 457644 - DNA, 213 bp, Sorghum bicolor
acccagccttccgaagaggtaagtgatgctggcatgacatcaacacttaatacatgcctgggatggatggacacccgaacatagtttgctttctgtggctttgagggggcataagggtcatatgaagagataccaaggaccgaactacattgctgggagataataataacggaaatgtttgatgagcctcagatggcgataactgatggacct

SEQ ID NO: 457645 - DNA, 259 bp, Sorghum bicolor
cgtccgaccactgccacgctagcgctggacgacggcttcgacgacgacggcgacagcaacgacggcggcgacggagacgacgacagtgatggcgatgatggcggtgactttgacaccgtgagcggtggccatggcggccacggccgccgttgcgtccgccgttgtgtccgccgttgcatcatcactggcaaaagaggagtagttggccttggccaccgcaagcgttgtgtccgtcgttgccgccgccgttgctaccccg

SEQ ID NO: 457646 - DNA, 105 bp, Sorghum bicolor
  unsure (1)..(105): unsure at all n locations
tcccggtcgacccagcgtccgntctcattatattccttgcagcgtagccacctctcccactcactctctcgcagctgctaagcgaagtcatgggcaaggactacg

SEQ ID NO: 457647 - DNA, 501 bp, Sorghum bicolor
cgtccggaatcacccaaagaagctggcaagatgagaccagagacgcctgagaaagtcaacgatctgccaggggtccaactagccacggacaatttgaacgggcaccatgaacaaatgcaagaaataaaactggattgataaagacaatgtcacccagtccaaatatcttcgccaccgcgtaatatcagtgtatttatgatctgatcaaacggcgcccagttggtggcagcactgagggtggcctaagttttgaaatactccggtttccacccctcccccttttccttttgtggtttcccgaattctttttgctaccacttctaggtatgtggtttcttctctccatttttatattttgagaagagaaaaggagcaggttatatggttgtccattggttgctgccttccaatgtaaatgcatcgggaggaattgtaagaaaaatgagatttatggccaattatgacatgtttattcttggaaataatcgtattatttaaaaa

SEQ ID NO: 457648 - DNA, 341 bp, Sorghum bicolor
cgtccgattttgaacccaaaccccctccttctcccctcgacctcctcgaaaccccactcctctcgtgtcgagcgagcctagggttagggtttcgtcactcccgcccccgattcgaaccaatccgcctcgccccccgccgcgccatggccgccggctccatcgtggtggacttcccctccatgggcgccgccttctgcttccccagcctcgagtcactcctccgccgacctcaccaacttccaccgcgtcttctcccgcgtcctcagcgcctacccggacctgccggtcgaggccgtctggtctcttctcacggctctccttacacgaccgccccgacgacc

SEQ ID NO: 457649 - DNA, 602 bp, Sorghum bicolor
cggacgcgtgggcacaaattcaagattcatgattttggagtgaaggtagcaaatgtttttgcaggattggcactacgtattaaagtcaggatattgaagaaggcactatctgttaccttgcagcagaccggttttttaagcccactgaagctagcagtaccagctggtctactttccaagaagtttatcttctcagttaccctcaccgaacactcatatacctctagcggctgcacagattgttccagttccagtaaccagttccatacaaccagcaagttcacttggtactccagagtacgcagcctgaaccacagcctgtatcctttgactgtggaactaaatcgacacctgctccagcagctgtcccagatgatacacctctaaaggatcttatcaccaagtcgccaacaggaacatcacacgctcataggaaactgtttcgagaaaacactctcactgaaaaggaaaccatagcggaacaaaatttgaacgcaaacggaatcataaggataacccacatggtccaattgatccactactgcaggcaaagaaaaaaaaaggagatacttgaatttagatgatctagaccaagagaacaa

SEQ ID NO: 457650 - DNA, 421 bp, Sorghum bicolor
cgtccgacccctcgccaccgcccaccgccgacgcgcgatggccgccgccgccatgcgggtggtgcgggacctggacctggagcggtacgcggggcggtggtacgagatcgcgtgcttcccgtccacgttccagcccaagacgggcaccaacacgcgcgccacctacacgctcaaccccgacgacggcaccgtgaaggtgctcaacgagacgtggaccgacggcggcgggcgccgcggccacatcgagggcacggccttgcgcgccgacccggccagcgacgaggccaagctcaaggtccgcttttacgtgccgcctttcctccccgtcttccccgttaccggggactactgtgtgctccacgttgacaccgactaccagtacgcgctcgtgggcagccctacaggaagtacctctggatcc

SEQ ID NO: 457651 - DNA, 378 bp, Sorghum bicolor
ccgaattaccgactcgtccgaccctcgtcacattcgcaccttgctcttcacgacacttgacgcacctaccatctccgtccatctgcggcgtcggcggcgaaggaagaacggaagcgacggccacgtgggcaggcggcgagcaggagaagcccacaatggagaagtgtaacagcaatgctcgatttgcacccttgagtgatactccatttgctctccgtggagctcttggtagtactagttcaaatcttgagcaaaccaggggctacgcatcttcccccctagcagctcagcggcccaagatatctgcacctggaagccgacccctgcacacaagtcgccccctgtcatctcctgttgcaaaccggccacttgtacccc

SEQ ID NO: 457652 - DNA, 178 bp, Sorghum bicolor
cgtccgcgccgcgcccgcgccgaggcgttcctcaacatcttcgagcgggaagggtgccggatggtggagatgtcgtgcgccgagcacgacgcgcacgccgccgagacccagttcctgacgcacaccgtcgggaggatgctcgccatgctggagctccgctccacgctcatcaacacca

SEQ ID NO: 457653 - DNA, 342 bp, Sorghum bicolor
  unsure (1)..(342): unsure at all n locations
cagccatataatcacactggaaggtctatagccactaaagagcaatgctgtagatagcgcacttgagggcactaagggaaatgtgagtgttgttccaactaataatcaaactgggagtctggcattggcagggcagaaagatgttggatctcccaggaacaacaacacagttgtagcatctccctctgtaaagaatcaggagcagaccgggagccaagttgctcccagcgggagcactggtacagcgaataatccgaagggggatgctgctcanggcagtgctggttcatcagagaaccattcgacccaagcgaactcctcaaaatctggaaataacagtga

SEQ ID NO: 457654 - DNA, 414 bp, Sorghum bicolor
cgtccggaagattgtggaaatagtagattgattcatcaaggacaatgggaagtgctggtacaccgctcagttgattatacagagatcaggttcagggagtagcacctcagatgaggactttgagcgtggtcaagaggaagtacaaaaatgcttaaatggattctctgatgtgcctgcagaagccgtatacactgatacaaaactttcggcaaacatcaatgaaaaaactttcatgaacagtcaaggagatggtaaaatggaatcgccaaaatgtctaaatggagcatctgaactgcctcaggaggctaccaattcaaaaggagaacttccacccaaccaaaatggcaattgctgcatgaaaagtggaatggacaatcatattgctaagggaggtgattctcctgaggccttttt

SEQ ID NO: 457655 - DNA, 270 bp, Sorghum bicolor
cgtccgcagaagccagaaccgagagcctacctccctctatcttacttggcagggtcgatccctccgtagatctgcctggacgacgagcgcggatatgcggatacacaagtgccatacctcgatcacatacagatcgcggtgtatcgaacagagagctcactctacataggtggcgcggggctataagtgtgcgagcaggcagaaccggcagctgatatacttccttagtcacactccgcacagatccggagcagagtgcatgggcggaca

SEQ ID NO: 457656 - DNA, 156 bp, Sorghum bicolor
gcgtcgagctttccactatccctccatgtctcagcgcactgatgtcgtatctctgagtatcctaagaaggtaaactgggcccataccgctggctctccctttttgatctacatcttcttcaggctctctttactggtacaatcgatacatcagcat

SEQ ID NO: 457657 - DNA, 382 bp, Sorghum bicolor
  unsure (1)..(382): unsure at all n locations
cgtccgaaactggaaagctctcaccttgattagcattttaacttgtttagcaaacatgatttattcagaagtggtaaatcatggtataattcttaatgcttttttattaacattggcaacaatatgggttctgtctgtgtgaatttttcaagagagtacttctgaagtagttccatgtgatattgttatctaccatctaccttaattattgtattacctgtcaccattagcatttttttggtcttttttgttttgaggacattttctctttgaacagatttatgtctttgtacaacatggcacattttttcacatncttgagtttgggttcttaatggactgtatttattttccttggccagcttgcaaaagaaggagaaaa

SEQ ID NO: 457658 - DNA, 359 bp, Sorghum bicolor
cgtccggtttagcttgcataggaactatgcttgttcaagcaaaaactcagtactagagattttactcaagctgcaaccaaaactccccaattattatttaaatgttttaggttgccatattaatttgttgcattttgtgtctgctctttgcataagtggtgatgacagattcccaatgcagcctgaaggttcatcattcgactcagaaaatggtgatgatagtattccaatgcagtcttttgatactgataagtgtccctatgttgagtctgattagtagaagaaatcaagattgcactattgactcatattagcaatattgtatccagaactactgatgataacaagttcagtgcaac

SEQ ID NO: 457659 - DNA, 421 bp, Sorghum bicolor
cgtccgcggacgcgtgggcggacgcgtggggtagaagaggaggagaggagagagaggaagaggacgaaccggagccactcagccgccacctcaccccgcatcggccgcctgaggtccgtccaaccgctcctgccgccgcccgttgctctcgccattgaagccgtcgccgcctcctccagcccgctcgcttgcctgccttcctgccggctgccttccggatgagaagcggcgcaacctgggcggtgcaagcgtggtcggcctgagccttcgtcggggttaacgccgagaagaggatcctggagtttaagcgcatgggttccttggaggcccggtatcggccggccggggcagctgaggacacagctaagagaaagacccagaaaagcaaaagtttcaaaaaggttgaaaaatttgatgtttt

SEQ ID NO: 457660 - DNA, 362 bp, Sorghum bicolor
  unsure (1)..(362): unsure at all n locations
cgacccacgcgtccgcgccctttttttttttttttttttttttttttttttttttttttttttttttttttttttttttttttttttttttttttttttttttttttttttttttttttttttttttttttttttttttttttttttttttaaaaaaaaaaaaaaaaggttttttttttttaaaaggggaaatatttttttttaccgggggtttaaaaaaaaaggggaaaaattttaaaaaaatttttttttttttggtaaaaaaaaattttttttttggttttttaaaaaaagaagatttttttttttttttgtgaaaaaaaggggaatttaaaaaaaaaaaaaaatncccttttttgttg

SEQ ID NO: 457661 - DNA, 243 bp, Sorghum bicolor
gcgtccgcaggactcatgtgggggcgcttctttttcaaaatccacacaggagcgaccctttctcggcagatcatgatggaactctttttttcagcgaccacacgggggcggcctttcccagcagaccagcaggaactagaagtcgcgctatctgagccagctacccttcacggggccacacccgccgactgacagtgccattctacggaacatctttccattggccaagcagttacactaatc

SEQ ID NO: 457662 - DNA, 342 bp, Sorghum bicolor
  unsure (1)..(342): unsure at all n locations
cgacccacgcgtcnncgctagtgctgtggcatcgcaacaggctagcattgttgctgctttcggaggcaatgacccctttatgcggatgggtgcatttgaaggactccagggttatcaatcttttgcctcttcagcagctctgccatcttttactccacaggggttgttaaatagaaatagcccaacatcatttgcgctccaagggatgtctgcttccaggccaattcagattgcaagcaattccacaataagtcattccattagcgatccaaataaatatcaccttagcttaccaggtactagtagccgacaaggaaatctggcacaangtttgactacttc

SEQ ID NO: 457663 - DNA, 208 bp, Sorghum bicolor
gggtcgacgcacgcgtccggacgagacgaggcctgagcgccccaaacccaaaccccagaaccccgacctagggttacgccatcgccatgggatctggggcctccgccgccgtgccacctcctcctcaatcagcgccgccccaggtgggcgcgccgccttatgggcccgggctcgccgggatcctcccgccgaggccgcaaggggagga

SEQ ID NO: 457664 - DNA, 324 bp, Sorghum bicolor
cgtccgggttcaagggactgaagaaggtagagagagaaactcgaaggggggagaggagggagatacagaagcaaaatgttgtttggagcccagtgtcagtgacaccatcttgtaatgcctgtgcttctacgggaaatggaggatcattctgtccatcccatgtctaagtctaaccatggctccttgtcaggaaatggttatgagatgaaacattcaggcaaaaaagtttgcgataaggattcatcatcagaatctgatcagtctcaccaagaagcatcggcagtgagtgagagcagtccagctgaacacacatcaactcaatca

SEQ ID NO: 457665 - DNA, 376 bp, Sorghum bicolor
  unsure (1)..(376): unsure at all n locations
cccctgcgctgtcggcctgccgttgacccgccgcggcgccgccttcctcgacccctgccgtgtgccgtcaatcagttcagttcctgagttcctggactaccttgagtccgccactgccgccggcgggcgagctccgcgcgcagccccgcctccaccgtcgcctcgcagctccgccgcggccggtcgattccgctgccgtatctccgccggcacctgcaccagcacccgtagacccgccatcccctgagtccgaaccccaaccctaaccccattccatccgtcgtctctggcagcggcacccgacaacgtcgcttgccaacgctcgcggctggcgcgcgatggagactgaatangcggagatagctgaggagtcact

SEQ ID NO: 457666 - DNA, 343 bp, Sorghum bicolor
gtccgtgatcccgttcgacccacgcgtccgcgtgctcctcccccgcccctcgtcccctcccacccaccgccaccgagtccgagagcgagagcgagatagagatccagatccacgtgcagatccatcgccgggggccgccatgaacccgacgcggcccgcgcaggcgtcgttccgtgaccgcaccaacgagttccgcgccgccgtcgagagcgcgcgccgccagtcgtcggcccccgcggcggcgagcagcagctctaccgggcccctcgatgggttgatggcggacacgtcggctcgctcggagttcaacaaccgcgcgttcaagatcgggctcgggatccac

SEQ ID NO: 457667 - DNA, 423 bp, Sorghum bicolor
cgtccggtcagagttccttgggctatctctttggcagtgacgaagctccaaaatcagctgagaagcctgcaccccaaaagccagctcctccatcttctgcagagaaactaaaagatatccctgctggtattcaaagtagtaaatcaaacaattacataagagctgaaggccagaactgtggaaatttccttacggtcagtatccattgacacttgtgaacatttgattatgctattttggagcaccaattgagtgctgtgcaggtggagcaaaaagggtttctatttgctcttgttcatagcatatgatccagaagtacttgtttaggttttgctgcaagaagcacccttcataaaatgattatgttgctatggtctacatttacatttattagaccctgatatttgacattatagcaagaat

SEQ ID NO: 457668 - DNA, 169 bp, Sorghum bicolor
cccgggcccacgcgtctcgctccacgcgtccgcggacgcgtgggaaaaaaaaaaaaaaaaaaaaaaaaaaaaaaaaaaaaaaaaaaaaaaaaaaaaaaaaaaaaaaaaggggatggggaggttaaaaagattaaaaaaaaatggatgttaattttaaaggaattaaatt

SEQ ID NO: 457669 - DNA, 54 bp, Sorghum bicolor
cggtcgacccaccgtccggaaaaatggtcacaaattgcatgagaaattactttc

SEQ ID NO: 457670 - DNA, 213 bp, Sorghum bicolor
gtcgatcgtcgaccacgcgtttttgagtgccaaattggcacaaataattagagatatacaacgactacgttctaaggagcgtaactgagcacaaccaccaaacacatcttatgtgggtcggcacatggccatctgaaaaaaaacaaaatggataggccaagccagaaaccgaacaatacaccttgcactgcatccagactcataacatacacc

SEQ ID NO: 457671 - DNA, 344 bp, Sorghum bicolor
cgtccgtgaacaggaaaaattgtttgggtcaaagtcgagccctgccctgtccttgaggaaggtggttggcgctcggaccaatggtggcggtgatgcagccaatggcacgccagtttcttggttgtcggccctccagagccgtggcggcaggaccgtgagccaggatgggaggagggatgctagcagaccagtggcccccgtgaactacgctgccgtcgccaaggaggatgtgcctcgcaggcgtcgacatactgctcaagtcaatctgtattatgaacttgcgttgggcgcattgaaaaaggtgcagcattcgtgcatttaacaagctatcaaacaaaggagca

SEQ ID NO: 457672 - DNA, 189 bp, Sorghum bicolor
cgtccggcaagaatctcgtgacgaactaggtcatcaacggcagtggtgtgatcggctgccacggacaagcggatcatgacgctgccggcgtcatgagcgctgactgacaggcaagtcttcgtcgggtacattttattgtggaacaacgacaccatggactatatttatgatggagtcttggctgcgtca

SEQ ID NO: 457673 - DNA, 356 bp, Sorghum bicolor
  unsure (1)..(356): unsure at all n locations
ttcccggtcgaccacgcgtccgcctcgttctcgtcttccctgtggtggcggcggtgattntcctaggatcagtgcctcatgtcccagatctgaaatggcttggatcccggatgggaagaagggcaaggtgttcctcngaggcgccccaagagcaaccgccgtggccgcggaggcggggcctaaggactcaccgtgctctgagcagcggcacagtgagcgcctcatgctcaaaggcgagggtggcggcaccggccacgacgacattccaaatggatggcgtctccgaagaggtggtgcggctttctctgtccctaagcagattccccttcacaaaagtggacgcgggggcttccaca

SEQ ID NO: 457674 - DNA, 287 bp, Sorghum bicolor
cgtccgacatgtatagccggtgcacggtgctgcagcggaacagatggtctggccgtacaccaacaagctgagaggacatgtgatgcatggcactaactgacaaccgaggcggtgcgctcactgactgaacgagcagagtgacttgccacggctgcaccaagtgatccataatccttgtgggcgaaccatatcaagcacgtggatcaaacaatggtcgcaacactcacgttagcccatcaagtaaagcgagtcggaccactggatatatatgcacctgaggatacatg

SEQ ID NO: 457675 - DNA, 193 bp, Sorghum bicolor
tctttctcaaatggttctgcctagacaactttatataatgatcacacttacgcctaccaattctgcttgggcttagtataaacacattttataacacaaacctgcatataccttcaacataattataacaatatatgctaaacctctgttgccaaatacctccctaaacagacataatagttatattacctct

SEQ ID NO: 457676 - DNA, 308 bp, Sorghum bicolor
cgtccgcgcggagagaggaggaggtccggacgggagagggaagaaagagagagagaggcgcgtgcgttcgtggtcggtgccggtgcgcgtggcttggtggtggccgtgccgtccgtccgtccgtccatcccgctctctcctcttccggcgccggcgacagcgggagggactccccggtgaggaatggctgggatgagggctccgctcggcgtggtggcggtggccgccctcgtcgtcgccatcttcatgcccgccgccggcgcggggcatgcaccggcgcccggtcccaccagtgacggcacatcaat

SEQ ID NO: 457677 - DNA, 325 bp, Sorghum bicolor
cgtccgcaatggctacaacctcgccgacatcatcgcacaacatgtgggattcgggaagagcccacctgcctacctctccctgacgccattgtcaaggcagcgcgacctgcttcgaggtcgagtcggcaccaactacgcctctggcggctccggcatcctcgacgtcacggggaacgggacgatcacactgcgtgaacaggtagcgttgttcgccaagaccaaggcgaggatcctccgggccggcctggtgagccgcgagaggctggacggtctgctgggccggtcactgttcgtcatcagcaccggcggcaacgacttcggtgcc

SEQ ID NO: 457678 - DNA, 202 bp, Sorghum bicolor
actatgtccaccgaaaccatccgaatcttatccaaagccaaaaaacctacaagaccatcatcgttgctggcagcacggccaagaggctgctgcgtggctttctccatggtctcacacatgacctagacgccggcaggtgtcaccacactgacactccacaacctgtgcctgtaccctacgtggccgctgatgaccccgaaca

SEQ ID NO: 457679 - DNA, 151 bp, Sorghum bicolor
  unsure (1)..(151): unsure at all n locations
ccacgcgtgcgcgcacacctaccctacccgccgcccgccgncgccgtcgaaggcgaagaccacctctcggtccggcgcgatggtcgccgcggaccgacgcgaccgcgggacgcgcctcctggtggcgctcctgctactggcgctggacgtc

SEQ ID NO: 457680 - DNA, 370 bp, Sorghum bicolor
cgtccggtaaccagcaatcgagtcgtcgatccacccagcgacctggaggggacgacgagagctggatcgatcgatgaagctcgtgtggtgccccgacacgggctccaaggcctacatcgacggcgtccgtgcaatcgcaaacgtcgactccgccgacgcctcgcccgagctcgccgagctcctcgccgccatggccggcggctggaacgcccggctcatcgtcgacgctccggactccgcctcatccacgtctaccaccaccagcctcgcgctcgccgcctgcgtgcgacgcacgggcggacgctacgccctgctcgacgttgatgacgacgcgcctgcgccttcaactgaagacgaggccaccaccaac

SEQ ID NO: 457681 - DNA, 261 bp, Sorghum bicolor
cgtccgcaaccaccacggccacggcaccaccctccctaaatcccgacccccaaaaccccccgtacgcgcccgccgcgccgcaatggcgcaccgccaccgcgccccgctgctccccatcctcctcctcatcctcctgctcgccacctcggccttcgcggcaacggcgcagcgtcgactcgcagcgacctgcgacaccgcggtcagcgcggggcccatcggggctggcgagcgcgcggtgctgcggctgggtctcagcgcgct

SEQ ID NO: 457682 - DNA, 417 bp, Sorghum bicolor
ttttaatgcgaatcatgtcttgttgctccagtgaaacttgtttacaatgtatttgagtccacaattgacgcgatttcatttctcattgatatcagaaatctttgcttcatgtatgtcagtgtcgtactgtcgtgccagcagcatcaatcaatcaccaatccaccaaactttcatggggaaacctgtttccgattgatttgattgatagataggtacatggatggatcacaagatggatggatggaaccatgtgcgtacttctatctatctttgcatgggttttgacatggacatttaaactagcagtcggatagagtatttacattacacattggctcagttcagcatgtaatggatatgttcatacatttgtcgtgacaaaccaacctcttaaacacattctttgttccgcttgtt

SEQ ID NO: 457683 - DNA, 290 bp, Sorghum bicolor
cgtccgacacagtccacagagcactaccacttcactcagcaacagatgagacatcacgatccaccagcatcaatggatgcacttgccatcagagcgtcgcggtgcaaactttcccttttggtattacgagctttccctatctcagttctttcggatgctacatcagatctaccgtaaaatctacttcgttagtgtaaccatacctgttatccagtattttttcttaattttgtaaacaatttccatatatttttttcgcatagttctccaatattttcttttaaactttt

SEQ ID NO: 457684 - DNA, 248 bp, Sorghum bicolor
ccggtcgaccacgcgtcctgtcgccaccttcgcggtggtcgggttcgcggccgggctcgccgggacagccatctccaacgggcttatcgcgatgcggaagcgcgtggacccggcgttcgagacgcccaacaaggctccgcccacgctgctcaacgccgccacctgggcgctccacatgggtgtcagcagcaacctgcggtaccagacgctgaatggggtcgagtacctgctcggcaaggtcgcaccgg

SEQ ID NO: 457685 - DNA, 408 bp, Sorghum bicolor
cgtccgtgtccccagccgtcctgctgctgctcctatgccaccgccttgccaccacttgctccgtggccaccgcgtaggatgcgccatagctggccgcgtgggatctccgcgtgcgctgactcgctctggcaccggactccttctgaaccctagctgcggtgtcgccgccgcctccgactacaaggtcggcatcgacgacgatgacttcgaggctcttgcgcacaggatgcagccaagctgacgtccggcggcaactgcggagcgcggcgcatgggcggcccctgcctcgcacgcctactacccttcggctggaggagcacgtgaggtcacgtgtgctggagccggcgacgaggggaaccatcaacgtgctccgttcctgcgtccgcgcggggaccgtgcgccgggtcg

SEQ ID NO: 457686 - DNA, 110 bp, Sorghum bicolor
cgtccggggagcatccctccgttcaacacctccatgaacgtgcactcgagtggttccagagtgaagcagagcatctgcccatcggacccatcactgcggcgctcttgcaa

SEQ ID NO: 457687 - DNA, 196 bp, Sorghum bicolor
cgtccgcccgcctatcgttcgtccacaccacaatcatgctggccgacctcacgcgcagaggagttggagggcacggccattgggatggagaacgatccacttgactatcgctatatatcaagtcccttttcatattcaaatagtttgaactcaattactacagcttcttttggaaagcgtactggttactttataa

SEQ ID NO: 457688 - DNA, 580 bp, Sorghum bicolor
  unsure (1)..(580): unsure at all n locations
cgtccgttgaggaatctttntgctcatatcttcttggagaggaaactggcaccacagtgtttgaaaagcttcagcagcttcaaagtactggagagttcaaattcgaagaattatgggttagataaaaagaagggcagcagtgacagggttactgtcaaccagtcactggaactgtggctaaaggatgtggccctttctcgtttcgcagatacgaaagattgtcctccatctttgaccaacttttttggagctcctaagcgcgtccttaacacatccaagcagaacttcagcagagcagaccccaagattgagtccaaacagccatctgggggaggctgttaagcaacctgcacctgccaacttggggctccaatcatcaatggataggcaagtaaatggttcagggacagcatctgttcccctgaagcgcaatcctggatcccatctcagaacattggaattatggggacttagtggagatgttataggaaagcttgcctatagtgcacttcttgggtttgttgtatttagcacattaaaattgggtcaaggttcagtttgggcatgtgagatacacgaa

SEQ ID NO: 457689 - DNA, 416 bp, Sorghum bicolor
  unsure (1)..(416): unsure at all n locations
aagtctggctggcactgagttcctgaatgatgtcttaaatgtatataattgaaactatatattcctctatattatgcagacgtgcctcggttttacatggctatacttatttcgtttgtgtataattttctgtaggaccgtaattgtttcaggtgtgttcacctttgtcattgctgcagaactggccagtcccctgattcttgtttttttctgacaagtaattccaacaactaccaaaaggtgaacacatatttcagctactacgtcgataactttgttatgttgcattagctctcaaattcagtttatatatccaaatgtctcacaactcattaggttcagcctatttttttaacttacagataattaattacttangctatcctattttttaacttacagataattaaatactc

SEQ ID NO: 457690 - DNA, 461 bp, Sorghum bicolor
cgtccgacttctcctccgtcctcgccgcatcagctcctccagcctcatcacaacaggctggtaccggcggcggcggcggaaatgtgacggagccggcggcgtggacgccacggctgaggaagacgttcctggacggcggcggcatcgagcactggcgcgggcggcggctggtggggcggttccaggtgtgcgcggtatgcacctgctgcgggggccagcacgggatgtgcatcccggcgccctgctgctacgccatcaactgcaacatccccaaccgccccttcggcgtctgctccttcaccccgcgcacctgcaactgcttcaactgccatctctagcctagcctagcctagcctagccgccatggatgcagcaaaggaaccaaggtgtggccaactgctgctggagtgctggatccatccatggttttgattggttctctttttgaggtgagttcggtt

SEQ ID NO: 457691 - DNA, 358 bp, Sorghum bicolor
cggtcgacccacgcgtccgcactcatggctttctctttgcctgaccagtgaggacctctcctcccatgcttcactcgccgccccgtcgtcatccacacacacacacctcaaccggccaccatcggcgacggcaatgtccgtacgcttcttgctccgttccgcggcattcctggccatcttggcggcagcgacgccgacgccgtccgccgacgtgcctcagccggttccggagcccgaggtgaagccgagcgacacggacgcgctcaccatcttccggcacggcgcggacgcgcacggcatcctgtcgtccaactggagcacgggcgacgcgtgcacgggccactggcttcgggtgggc

SEQ ID NO: 457692 - DNA, 183 bp, Sorghum bicolor
cgtccgcgaacctctcctgtccatggcggcagcctcgccggcgccggctccccaccaccaccaccaccaccaccagcagccgtcgtcgtcgtgctagtcgcctgctagtgctagatgcatgggggccgcctgcccccgccgcgcggcgccggcgtggcggtcgtcgtgcctggcgctgtgcct

SEQ ID NO: 457693 - DNA, 158 bp, Sorghum bicolor
cgactccgggtcgcccacgcgtccggggctgcagctaacctacctatagagctctgcccgcgcgacccgtcgctttccgtggaccggtagctgcgcaaggaacgcgtaggatgcggcatactgcgccgcgactagcagcagtaaacacaaaaaggggc

SEQ ID NO: 457694 - DNA, 400 bp, Sorghum bicolor
  unsure (1)..(400): unsure at all n locations
acccacgcgtgacgcnacatccaaagcgcccggcgcagcttgaggctcgacgccgcacgcgatgagatgtcgcatctgctgctagcagcgtccgccacacggctcgaggtgtgcatcctgggctagcgctcctccgtcggcagagcgccacacgagctgcgtcacacccctacgtcagacctccggactcatcgcgaccttagacatcctccatactatgcgcgccgtcaccactcttctatatctcgccgccgcagcagcgccaggtcaccatctacgtggacactctccttgaatggaaccagaggatgaacctcaccgtcgtcaccgacaaggccgaggttatgacgcgccacgtggcggactccctcgccatgctgcccccactggagcgcgcgta

SEQ ID NO: 457695 - DNA, 269 bp, Sorghum bicolor
cgtccgtggagaacggcgacgaaaccctcgcctcccccaccgccgccgagaaggccgcgctcaacggcggcgtcgcggaggaggagcaagtggcgccatcacccaccccgcatagtcctacgccgccgtcgccgccgagaaccccgctccaaacggcggcgtcgcgaatgaggaggaggaggaggaggaggaggaagagggggtcgccggcgcccacaccgacgtcaggttctacgctgccgtcgccgtccgcgctgagatcgaggacc

SEQ ID NO: 457696 - DNA, 250 bp, Sorghum bicolor
cgtccggcttgtgagctttgctgaattccaccagataggtatggaagagaaccaacacttacaagactagagcctaacagagatggcgtatgggtggaggcacaatgcttaataaataatggttctggtataccctgatggaagactgaaaacttgcccttgagcttgttgaaaatggctgaagatgttgaaggaagctatatgcttgatggtgagaaaaataagctgagaaccacaattaagcttaaaa

SEQ ID NO: 457697 - DNA, 463 bp, Sorghum bicolor
cgtacgatcaaatccacgagacgagaacaaaacctgcttccgacccagcacgagacacgactcctacattccaaatacaaatccatccattgcccctttgcgtgtggtgcgaggcccaccgatcccatccgatccgatccatttcacgtctcgtctaccagagggatcacgacacaccctccgacagagccggaagagagagagagagagatggacgcgttctactcgacctcctcgtcgacgccgtgctctgggccgtacggtgcggcggcgtacggcaacagcatctgctgctactactcgctgaagaactttcgccagatcagccccgccgtccagacccacctgaagctcgtctacctgaccctctgcatagcgctggcctcgtcggcgctaggcgcttacctgcacgtcatctggaacatcggcgggatgctgaccatgctacgctgcgtcggcagta

SEQ ID NO: 457698 - DNA, 453 bp, Sorghum bicolor
ccacctcgccgtcgccgtcgccgtcgccgcaggccgcagcctgttcccggttcccgcctcgccgtctaccgcgtcccgcagcaacggagccgcggcacctcggattcgcctcagcttccgcaatcctcgccgtcctcctgctccgccgcccctcccgtgtactggcgctggagctgcagatccaccgcgacctggcgaccgattcctcctcgcgctgaagaattggcgaccttggaggcttggactccgcccccggcggcgcggagggggtcaactgtggtagcaaccaccgcgaggctgcaagcctccggtaagggagggaaattgacttcttggaagccggaagccggtcccgggccgcgatggcgtcgatcggcggcggcgcgtcgtcggctgccgggaagaacgagtcctacgtgcgcgccgacaagatcgacctcgagagcctggaca

SEQ ID NO: 457699 - DNA, 199 bp, Sorghum bicolor
  unsure (1)..(199): unsure at all n locations
cgtccgcacccnccaccccacacggcccgacacgtccgtgctggctcgatcgtacttgcacgcctcaccgcacaccaccacccacagccggccagggccagcagccccccaacccatgacaatggcacctgagccctcagccggcggagcggcaccgccggtcgctagtagggtgtgggagtgggaagggaaggtggcg

SEQ ID NO: 457700 - DNA, 330 bp, Sorghum bicolor
  unsure (1)..(330): unsure at all n locations
cgtccggcagcgctggcaccggcggcggtgctggcatgggcaccggcggngcaggcgctggcaccggcggtggcatgggcgctgggacaggcgcaggcgcaggcacaggcctgcaccggacagcacgcatgggcaccggacggactgacggactgcaccgcaccggacggccggatacaccgggctagcacgcgcgacgcgtacgccgaggggagacatcaaagcgcagcgcggctgtgagtgtgcgctgctgcacgcgcgcgcgacttctcgtgagggcgcggaggcatggtgcgcgactacgtgggacctcgagtctcgctctgtgtt

SEQ ID NO: 457701 - DNA, 401 bp, Sorghum bicolor
cgtccggttgatagtaaagcagaccaagaagcatatcagtactcctgctccccacgattcctattcggtcctttccgttagcagttctgggaagtatgttgcgtattgtatggccagatatcccttattttgctgtatacaaagcaagtgatcggtcagttgttgattcaggcacagggaagctttttgcctgggacacctgtcgagacagatatgctttagtagagagtgcattggccccaagaatgccacttgttgtgaaaggtggttcttctaaaaaggcaaaagaagcagcagcagctgcagctcaagcagcagctgcggcagctagtgctgcttctgccgccacaggtgcagtgcgtatcttattagatgattgaacagcacatgttttgcaaaga

SEQ ID NO: 457702 - DNA, 72 bp, Sorghum bicolor
cgtccgctcgattattctgttcgctctcgcccaagtcatcgtctggtcgtcgcccgcagacgcccggggggc

SEQ ID NO: 457703 - DNA, 314 bp, Sorghum bicolor
  unsure (1)..(314): unsure at all n locations
aagctcccaaagccacttccagttccggactccgagcctaaaaagaagagagggggccgtcgtcttcgaaaaatgaaagaaagatatgcgcagactgatatgatgaagcttgcaaaccgaatgcagtttgngattccagaggaaagctcactaggtgatggcttgggggaaggttatggcatgctnggacaggcangggagtggcaagctacgtgtctcagctggacaaagcaaacttgctgctaaggtggccaaaaaattcaaggagaagagctatggtagcagtggtgcaacttcaggattgacatccagtt

SEQ ID NO: 457704 - DNA, 296 bp, Sorghum bicolor
  unsure (1)..(296): unsure at all n locations
cgtccgcccacgcgtccgagaatcttgccgtttttatgataaatttaattgatgagcttcatattgaggttttantnnataatgctcggagaggctacaacatggaaagaatttgccctggaagcgtcttgctgtagagattacactgatcttgggaagatgctcctcaaatttcaaaatatgattcttcctgactacataagttgtgaatggctacaaaatttttttgagatgtggaaccaaaagtgtatgaatgcacatgatgctgagacttttgaaatgctttgtgaggaact

SEQ ID NO: 457705 - DNA, 313 bp, Sorghum bicolor
cgtccgattcaaccaagtcggcatatatcagacccaattttagctcatttgttactgagttaaatttggatgaaagttgaaacacggaacttcagatgaagtgcaaaacttcatgtggttgctctttcagtgaagtcttcacagcagacaatctgcttgccaggggatgaatggcaatcatggcatgcaaactcaacttggtacttaactgcctgtttgtaacagatttggtatgcagtggcaacttggtcaggtatagattctcttgagccacaaaatgcttcacaaaatttgagaaactggtgacacaagc

SEQ ID NO: 457706 - DNA, 251 bp, Sorghum bicolor
cctctcacaagtcacagcgcacttcattttgttgcaacaaccaatcgtcaatcacaacgaattcttttgcacagtgactacaatacaggtaaccaaaatcaacaagaaaaagcaaaaaaaaaagagagctacaaacaggctaatccgtggcgtccactaggaaaacaaaggcatctcctcatctccagcacactgcagcagccacagctctggctactctgaactcaactcacaggcatcatacatgaact

SEQ ID NO: 457707 - DNA, 252 bp, Sorghum bicolor
cgtgcgtttggaaccagatttgactagtctctctgaaggagacagggaagcctcgagatatattctcgaagcagcaatagttattgatggcggattctatgaacaagtatcgaatagtcacaaaatgcttacagactggctgaaagcacattctgaatcctcatcattcgataaattgaatgtgcgtatatccattaatagatccctggtctgctgacagataagttttatactgaattgtggaatactaca

SEQ ID NO: 457708 - DNA, 402 bp, Sorghum bicolor
tccggattcccggtcgaccacgcgtggcgcccgcttaataagttgcttactgagcttgtttttgtggaggacttgatggaagctttggaggaagccaaagcaattggagcgtgagcttggcgatatatatgattacgttgcaccatgctttcctcctagatatgaaattttccagctcatggtaaacctgtatactgaaagattcattcagatgcttcgacttctcagtgatagagcaaacgatattcaaaatataaatatcctgaaggtgactggttgggttgtgcaatatcaagaaaatttgattggtcttggtgtggatgaatcacttgcccaagtttgttctgaaagtggtgcattggatcctctcatgaacatgtatgttgagcgtttgcaggcaac

SEQ ID NO: 457709 - DNA, 51 bp, Sorghum bicolor
tcgatccgtcgaccacgcgtccgaatcagctggctcatctaagcgaatctg

SEQ ID NO: 457710 - DNA, 134 bp, Sorghum bicolor
gcgtccgcgctgctctccctccctccctctctctctctcgaactggcagcgctgcagcgcgccggcggcctcctccccctttgcctccttaccgtgtacctcctccccctctgcagggtttaaggtttaagggc

SEQ ID NO: 457711 - DNA, 287 bp, Sorghum bicolor
cgtccgaagtaagaagtatccttttgatacaattgatgctgtaattgctaatttcaagtcaaggggtttgttgaatgatggtttttatgctgggtattttctcaatcccggggctatatcaacatggggtccaggcgaataaacggcacttcccaaagggtggccgagcaaagtgatagcacagaggtgtagatgcatgctgaagagacgtgctatactcagtatgtgtagtcacaggtgagtgctgaatcccctgaggttcagtatgtaatcttggtggaactctc

SEQ ID NO: 457712 - DNA, 314 bp, Sorghum bicolor
attcccggtcgaccacgcgtccggcgaggctctctgattcgttagtgcattgcgtgaggaggtcggagtctgaggcagccgaaaactcatggtctcgagtttgctcggagcggaggcgatcactagacgaagggaggaaaaggcttgctctccgccaagaccactgacgcctattcctccgagaaggataactcgaacaacaccctcatgtcacgctcctccatcacccgccttcagttccctgctccacgtatccaccatgaggtcaagcatatgactcaggctaatggacaattttgctccacttcaaatgt

SEQ ID NO: 457713 - DNA, 180 bp, Sorghum bicolor
  unsure (1)..(180): unsure at all n locations
cgtccgcccacgcgtccggagacggcctccttcctctcggtggcgctggccctggcggccctcgtccccgtctcgctgctcctcctgaaccggctcctctacggcaagctngccccggggccgnagnggcggnccgtggtggacaacctgttcgacgtgcggacggtgcggagccggtgc

SEQ ID NO: 457714 - DNA, 182 bp, Sorghum bicolor
cgtccgtgttttttttcccctggtgaatacacagaagctaagaagcaaaatgaagagggtgctgatgatatggatggttttgatgctgatgagagaagatgatgacgaagttgactctgataaggagatgggtcttgatgatgaagacggcgatgaatgtagcaggcttcaactgcagaaat

SEQ ID NO: 457715 - DNA, 398 bp, Sorghum bicolor
  unsure (1)..(398): unsure at all n locations
gccacgcgtccgtaagacatatctttctgagaaattcccaaattggcaggagatagctagccatgccattgtcgaccttcaagtttcgcagacttatacaaggatggagccatgccgtgagaagaggtgtctttgaagcagaggaaaagtgcttgtccatctgagaagaataggagagcggcaaaacacaagtgcaggagggatggaccacctcgatctgtactgcccaaatttggttctagcctgaactngaactgcaggctatataattaagaattctggacctgctgaaatagttccatggcttctcttcaggaccttttgtcagccgttatgtctctatcgatgacagcatcgccactatctgagaacatggagccatcataatgtcgtaatct

SEQ ID NO: 457716 - DNA, 348 bp, Sorghum bicolor
ccgtcccgatcccggtcgaccacgcgtccgcggacgcgtgggtgaaggagggatcgtcgtcggtgggaggggcgttcgctgggggcagcgatccgaggcagccgtcgacggcgaggccgtacgcaccgccgaagctgtcaccccaggacctgcccatcgactatgctggcttactcgccatcgtcttcggcgtcatcggagtcatgctcacctacaaggtgtgctcgtggatcgcgatcatcttcttagcacagtctttgacaaacatgaataacttccagaatgatctgaaacagctctccatggccttcatgctcgctgttatcggtcttgcgacgaactattttg

SEQ ID NO: 457717 - DNA, 325 bp, Sorghum bicolor
  unsure (1)..(325): unsure at all n locations
cgcgtccgcccacgcgttcgatcggagtgaagaaggcatcggcgaatttgtggctggcggtggtggactcgatagcgttcctgctgctgccgccgcggatataaaagggaaaatccccccctccgtcttctccacctcgcgcaaccaactaaccaaccacctagctcgattcgccatcgacctcgatccagcccagccagtcgccgtcgacgccgcagcagcagcagccatgtccaaggtcgtcaccctcgaggacgtcgtcaagcacaacaccaaggaggatagcttgctcatcatcngcggcanggtatatgatgtgacgaag

SEQ ID NO: 457718 - DNA, 249 bp, Sorghum bicolor
  unsure (1)..(249): unsure at all n locations
cgtgcgtatcgatgtccaaactgaatgtatggtagaatagatggttttatgctactcttaaaattttttgcttacctatgctatgctgtcaggtgaacatagacgaaaggataaacacttangctgcatcattccatagtcagttgtgcaaagtggtagacaccatgttggttaactattgactaaccncaccgtattgtgaactgtgaaacctattaagttgccaacactcttcctattttccatgag

SEQ ID NO: 457719 - DNA, 161 bp, Sorghum bicolor
accgcggtgcgccaaaggatcagatccccaactgccgaactgcgaaggagaaggagattggggaggaggccgtggcttcgggcacgcaaatcatcacccgcaaggatgaacgcgacccactcggtgagcattgtggccgagaacgtcaccaatccgagacc

SEQ ID NO: 457720 - DNA, 258 bp, Sorghum bicolor
cgtccgccagcatggtgacagtggtgattttgaagatcagcacgaggattcccctgatgatgccaaagaagaggaagaatatgaaagcattgagagaaaatcttagagaaagtgactttcctgctgattctgacagtgagaacccaagagtgagtcatgaatttggaaattcagatgacccacggtcagaaaatggtgatgctgattttccaagtgaatccgcaattggtggtactaagttcactgcttttacaggaa

SEQ ID NO: 457721 - DNA, 205 bp, Sorghum bicolor
cgtgcggtcaacgcatcctggtcccgacctggacggacaggacgaggacgagcacagcaagcgtaggcagaggcagagcagccgcccgagcgggattctatccagatccgctgctgcttgggtaacggcggcgaggggagtttgcagcgacaccgccgatatcgcggcatcagatccgatggtgcgtcaccggagcagagaaagt

SEQ ID NO: 457722 - DNA, 149 bp, Sorghum bicolor
cgtccgagcggaccaggcgtcgcgtgacgcgtcgcggctgctgtacctggactcgctggcggcgcgtggcaaagcccggcgtacgcgccgacggttgggcggaattttgaaccccactactggggggccgctggacgccccaaaattgt

SEQ ID NO: 457723 - DNA, 82 bp, Sorghum bicolor
accgtccgtcccgcgcaatccctactatgcgagggccgggcgctggagttgggtcggggccactcgccgatccgggggaccc

SEQ ID NO: 457724 - DNA, 421 bp, Sorghum bicolor
cgtccgacgggtgttaagttaaagcctggaaatgcaggtttacttgggtgggccatgagttctgttacacaaaagggtaaaccttctgaccacgcccgaatatctactgcaaatgccagtaattctcaagcatcaacaacttcgactgccgctccagacactcaggcttccacactagcgtatgcaccatccacatccaactcccttgatcaagctgcaccagcatcagcaaggtcttcagtagatgggtggcgtgagcttgatgatggtaatatccatgaggagaatagtagtgataaagatggatgggatgatgtagacccgtttgaggacaagccatccccatctcttgtatccaacatacaagctgctcaaaaacgtccagtggtacaaccaaaagcaagccgtgcaaactcatcta

SEQ ID NO: 457725 - DNA, 227 bp, Sorghum bicolor
gtcgaccacgcgtccgatctcctccgcgagcttgcgcctaaaccctagctcgcttcccgatggcgccgaagaagcgcaaggccgatcccgccgagtccgggggcggcgcggaggcagccgcaggcaaccaccgccaggagccggcgtcctcggagcccaagccccgcggcaccatctacttccccatcaccgacgacccgcccgagtccactgctcccgacgaggac

SEQ ID NO: 457726 - DNA, 438 bp, Sorghum bicolor
cgtccggtcaaataagaaatatctgatttgtccatgcaatatgatccaaagaatgcaccaaacattctccatatttatttatttctgcaaagcaacaaacctcaagaacaatttgtccatgcaataggatccaaaagaacactgtaatatttgagcttggattcatttttttctggacccactgataaataggaattttgtacatcagctaaaagaaaacaagtaatcttagtgataaactgatctgaacaccagatgaaagtcttcttggaaatagataaccatatttgctttgcaatttttgttcaccacaactacctgagatttcattggcctgcagtttgtgaagctaccacgatcacctactggtgatgatattctaaagaagtatttggagcaccggacaaagaaggatggcaagataaatgactcctatgc

SEQ ID NO: 457727 - DNA, 405 bp, Sorghum bicolor
  unsure (1)..(405): unsure at all n locations
gtccggttaagagctaccactgttcagctaaatgcttctctgatgcatggcagcaccacaaagttttgcatgaacgagccagtagtgccctaaatgaaaatggggctgaagaagaggagttatttggcagatttggcagcggtggttctggggttctaagtactgctggatctggttctttgtcaaattttggacaaagccctggtgttaacaatggacctgtgcctttgtatccctcaggcactgataaaaattctggagaaacttggtggaagttggacgcttacgaacatatacaccaactgctgatgatattgggcatgcactaaaaattgagtgtggtgctgtggactcagaaaaaaggtctncaattggacctnctacctcaattatgacatcacgtgt

SEQ ID NO: 457728 - DNA, 115 bp, Sorghum bicolor
cgtccgcactagtatttgctagctaaagctaaaaatgttgacagtgaataaaacctagagtgaacttatgtttgttatcaaaggagttcctgttaagatattatggatgaaacta

SEQ ID NO: 457729 - DNA, 442 bp, Sorghum bicolor
cgtccggtgcagatgctgatgctaatgctgatggttctgtgaagattgtggttgaaatcaaggagggaggaaaagatgataaaaagtcagagatgggtgcgactgaagtggtggatgtgttagttgatgaagatgctgcgaaacagacgaagaagcgcaaggttgatgaagatgctgtgaaacagacaaagaagcgcaagggtgatgctgagactggcaccaacggtgccaagaggatgaagagcagtgctgctgtggaagaaggtgctgtgtgtggcactcctgtgaaacggaccaggaagagtggtgatatggatgctgaaggcaacggcagtcctgctgtgagcagtggccgcagggtgacccgtagcagcagtgtgaatgccactggagctgatgatagtccggcgaggaggaccaaaagccgtgctggagctgatgc

SEQ ID NO: 457730 - DNA, 278 bp, Sorghum bicolor
  unsure (1)..(278): unsure at all n locations
cgtccggccagcaccacgacttccgtgctcgtcgccttcctcgggctagggttcggcgcgagatctgattccgggcgccggagagcgagatggaggtgagggagatggcgatggctgcggcggctgcggcggcgtcggtgggcggnggaggaggaggaggaggagggttctagctgccgccgcccaatcccaacctgccctacagggaggactgctggagcgacagctagacggcggcgctcgtcgccgactgtggcagccgctacgtctagctcaac

SEQ ID NO: 457731 - DNA, 390 bp, Sorghum bicolor
cgtccgcccagccaattgataaccataacgattcggtagatcaaactcaactgtcccattcttcaagccctaccaagagtacagatgaaacttcatgagaagacgaagaagataatgataaagagaacatggacccaagcactcagaataatggtgtacatactcgtgaacacctccaacgagccattggaggagactcatgtccaggtgatgccatcataaatgattttctagatgatgaagctgaggaagaggatgatagtgacaatgacatgatgagatttaaggacaatgaagaagatgatggaagtgatgaaaacgaggtattcaatgatctaatagcagctggctatgaggaaaaagaagcagataatgagaagcgtaatgaac

SEQ ID NO: 457732 - DNA, 212 bp, Sorghum bicolor
  unsure (1)..(212): unsure at all n locations
gctcggcgtctctacctgtgtgggcttacgcggcccatcttcgtgcagagcagacacgggtagactggactgacaagccaaggcaagcgcgactcgaccgccagacagcctccaccatcgcgcgcgtcgccgagcccagaaccccagccacccaaaggccccgcgtacccggcgccggggcaccagcaaccgcccaagagcccctnctaccc

SEQ ID NO: 457733 - DNA, 192 bp, Sorghum bicolor
cgtccgcactccggcctcttccacggccgcctccgccagtccgcttccgccgccgccacctcgccgccgaccaccatagcatcaaatactggagagctcgcgcccctcgcgcatggttcttggcttcttgctttgtgctcgacgttcactggaactaatcgactataagcgtggtgaccactgacgagatga

SEQ ID NO: 457734 - DNA, 377 bp, Sorghum bicolor
  unsure (1)..(377): unsure at all n locations
ggtcgaccacgcgtccgggattcctggtttgcataagatacaataataagttctgtcagtattactgatgtatgggagcccattgaggaaggccttgtaccgttgagtactgagtttcacagcactggttttttggttgatatattgttggatcattcatttgctttttattgatttattatgtcgtatgattgcagattggagatgactcgtcatgtntcaatgatatcnaattccttgtcacctaagggagctaacaagaattctcccggtatcaagctcctctgcatttagatcttaagccacanagataccagcaacctcagcaatatcaacagcaccagccaagacaaaatccaattcaaacagattcatat

SEQ ID NO: 457735 - DNA, 419 bp, Sorghum bicolor
  unsure (1)..(419): unsure at all n locations
cgtccggcggatccagttggctccatcctcgatggcagcagatctgggctcaggggcagcggatccggttggcctacaccggctgctccgcgacgaggcctcccaaggcaaaaaagctctatgaattggctattcgtctcgaatttggatttcttgaagttgcaacctacctgatctgcttgttgctaaaggacggcattgatgccttggtttattggagttgcactggccctagctgatctgcgtattgctaaacgatgacattaatgcctgctgctctacatcacacgtttcgcattgaaaaacttattgttgtattagtataaactagactatttggtgaattatttagctgcatgcataatttgattctgaacacagtangaaacatgactttagcttgaggcacatgacacctg

SEQ ID NO: 457736 - DNA, 196 bp, Sorghum bicolor
atcgtacacctcgcagctattgcaccctgcagctgaacacccgacgagggtaccagacggccggcagacccacctcaggaagccgggcgatcagacacgggagcaacagtaccgagagagagaatctactgtcgcaagagagactgagactgtgcattacagcgcgttgagaggcagtctggcgcacacttacatg

SEQ ID NO: 457737 - DNA, 473 bp, Sorghum bicolor
  unsure (1)..(473): unsure at all n locations
gcgtccggtccgaaccgcaaccgccgtcaccgccttccctcttccaaatcctccttctgcgctcgcagtcctgctgccactttccccccattgctgtggggccatcatccccccgcggccctctgctctgctctctcctgccattccacctgctgcccgctgctgtgcgtcgctcgctcaccaccaccagtcgccggcaccccgtgcggcgctcgctgccatcccgcggaggaggaggagcacgcgtgtccgagccttccgttccgcgtcgcatggactcgtgctgtcgccagccgcctacaaccgggtgcctgcctaaccggccgatttccttcctagcgtagctccattccactgcacanatagcgcgccactttcccaattccncgtcgcgtgcccgccgccttccgatcctggccactctgttcagcctgtggcgtccggcagggcggaggtgatcggtgatggagtgg

SEQ ID NO: 457738 - DNA, 234 bp, Sorghum bicolor
gcaatggcttctcaccagggtcaggtcatacctgaaagcggggtagcgtacgaggcgacaagccgtcgtatcaggacgtcaagttgccctcaccgccggcaggtctggtaagatctttaccggctctgccaccgaccactaacctgggcgggaggatctggggtctgtccttgattttggcacaagctgcggagtgggaaggtcccgaaagatactgagtcaactgggatcatg

SEQ ID NO: 457739 - DNA, 70 bp, Sorghum bicolor
cgtccgaggaagcaagcaatgcaatggccttagatggcataatgtttgagggagcaccagtcaaagttag

SEQ ID NO: 457740 - DNA, 212 bp, Sorghum bicolor
cgtccgccaacgcgccgcttcttccatgaaggacccgttccagagcggccgttaaagaccatcactctccgacgcaatactcggggctctcctgggatgaatcctgctcctcgggcacaacttactaccccgatgactactacggctgcactcctcatcacttgaagctatgctcatcaactacaccgtaggcatcaagtattcgtcgcacc

SEQ ID NO: 457741 - DNA, 142 bp, Sorghum bicolor
cgtccgcctccccacgacccaaccgccgcctccaacgcttccagaatattccatccaccaaaatggcgtcgctgccgccgggggccggtctgagtgactatgagcgccaccgcttcatcctccaagcgccccaagaaggagc

SEQ ID NO: 457742 - DNA, 288 bp, Sorghum bicolor
cgacccacgcgtccgcacaaactgaggaacatcagcacatttgagatggactgggcttgggcagctaatcggttaattgagaaggatgagtcagaaactccagacgacgctggtttaaattatttaccgcggaagaggctaatcttgacaacccagttgattcagcaacttctccctgctataccagcaaccattctgagagcacaagctgtgtctgcttacgaaagtgcgacatacactctatcaatgctgacactaagggatgcgtgcagcatggcatcatcatca

SEQ ID NO: 457743 - DNA, 163 bp, Sorghum bicolor
cgtccgcgcctatctccgtgactcaaaagctatctcccattccacaccgacgacctctgtccaccctttcaacaacaccatgagggactacatcgcgatccacattagccaacccggtatccatgtccgaaacgcgtcactaacagctgtactgcctggagca

SEQ ID NO: 457744 - DNA, 262 bp, Sorghum bicolor
  unsure (1)..(262): unsure at all n locations
cgtccggctagatgctgaagctagccagaaagagaaacttgaagaagaaatagatgttttgaggagtcagttattgcanatgagtatggaagcgtgatgagacaaggaggagtcttgataaaggagatgggccaggaaaaatatttcctggtttagattcgttggtgtctcagactcgaggttcgcaacccagagagcagagcaatggaccaaagcaaccaattgccaaactctttgaacaagttgggttaaaaaagatatt

SEQ ID NO: 457745 - DNA, 176 bp, Sorghum bicolor
cgtccgactatatactcaatctctacaaaaatagacactacctcatgaactatatgtcttgagcagtcagtcatcaaccatgagtgtgctaggtaattacacatcaaccagtcttgctcaacgaatataccacaagcaaaatatatcatgaatctaatacagacccatctcactac

SEQ ID NO: 457746 - DNA, 466 bp, Sorghum bicolor
gtcgaccacgcgtccggagacgcctcgctgaagctggtgcttatgcattggaaaaattaaatgtcacgagtcacagtctgtcctaatatcaaaacagaacgtggggtggatattgtgggtaaatatatgtaaggatcgatatacctcaatctaactacttaataagataattcttatactgtgtggactggctgacatgtgctttgcgctcattggtgcaccaagtgcttgatggaacagtgctcccagacccactgcagctgctgcgccctctgtgcactagcatacgcccagccactctactacaggctcagattcaacatcatggcggacaggctcacctgagcgcagcaacaccacggtcagaggcacgtgcctgtacatgtccaacacctaccactacggcgcctaccacttgacagtcattctcttggtcaaccccaacaaggtcgaaaggattctgctc

SEQ ID NO: 457747 - DNA, 241 bp, Sorghum bicolor
cgtccggtgcggaacttcatctcacactcacacatctttctagtataaatggagatatagccgcggacatctttgtactaaaaatagtccacgagaaccatatccgataaaatccactaagtcgagccaccaacactttcacaactcccacttccatgtgcttctatcaacataacaatctaactctaatcttctatctaaacaataatataccgtttcatacaatccatattatccctac

SEQ ID NO: 457748 - DNA, 449 bp, Sorghum bicolor
cgtcgcgaactcccatcctactatctatattcttccacacattacattttccattcctaatgattcttacaccacatcttaagggactaatttagcttccttatatctaatcttttatttcaaacataatcatatgacctttctacactatatttataccctcataacgaactttcctacttatcattaacatttcatcatcaacctaacatatctttacactatcattcgaattgaatcagacagaacctttcaaccttatatatttcttaaaacacatattcaacaactatacatattcttaataaaatattctcttactcactatttacaatactttataacacctcctaaaaattcaatcctgtccataattcacctctatatttactatgtgacgaactatttaatacacagtattttaataacatatcttattttatagatat

SEQ ID NO: 457749 - DNA, 92 bp, Sorghum bicolor
  unsure (1)..(92): unsure at all n locations
cgtccggcggnggaagctggaagaaggtgctcangttccttcagtccgtcgagcaatcctcaggcacggtcgagacctcatcggcaccatgc

SEQ ID NO: 457750 - DNA, 380 bp, Sorghum bicolor
  unsure (1)..(380): unsure at all n locations
cgtccggcagcagctagcgccctgcgtgagaacagcgcgcggctgcaagcaagtgcaagtctctgcaacatgccgtattattagctcttattgggcagattatgttgaacaataccgtanggcacagcggctacagcaagagaactccagactgtccaacgagaagcgtgaactggagaggcaactggccgagaagacgagggctgctcaggtgtcctcggcccaggtcttcacactgggccacaaggtgcgagagctggagcgccagaacaccagactgtccggtgatctggccaagcaaagggacgacaccaggaagggtggcctgctgttcatgagtgccgccgataggtaccaagaggaagccaagaagcagatta

SEQ ID NO: 457751 - DNA, 257 bp, Sorghum bicolor
cgtgcggagctaccatcggatatagttcatctgagccggttattgcatctgattattccaaatggcacaatgttgccaaacgggatcaatgaggggaaatccgtgcgtactctgcactgcttcgatttatgtaactcaccaaacagtatcaagggtctaggggaactgaccaatttgaccagtcttgaaataatatttagttattctagacaaatggctattgatgagattatggagaaagggcaggaaagttctgc

SEQ ID NO: 457752 - DNA, 365 bp, Sorghum bicolor
cgtgcgcgactgaagtactacgtactagcgtccacgcctctggcctgctgcactccatctccatcccacctcatgaatcccagcgagccatcgcattaattcccataagcactgtactgtgcctgcgcctaccgacgagcattgctgctgcctcggccagtcggccggcatggcggcagcgccggtggaggtgggcgcgcagggcacggtgggctcgctggtgctccgggaggtcgagtacttccggcggatggaggtcgccggcggccacggcaagaagagcagcagcaaggtcgttggagccagcggcggcagcggcagcggcagcccgtggagcgacagcggcaagaagccgaagccgacga

SEQ ID NO: 457753 - DNA, 376 bp, Sorghum bicolor
  unsure (1)..(376): unsure at all n locations
cgtccgaaagatctttggtttgatctatgtgattatatagttgcaactgtagtatttacaagttttagatatttatttgactgacacagtgtaggcattaagtgaactgctgtatttttaataaaaaaataatgttatctcattttgatataatcagagaacgcacacctgcacttgcttaatccagttacatctattttagtactcaatactcgttcacaaagaagcaggtgttgtgtattagtctgttcccgtaacaaatccaactacacatccctgttcaaagcagcagcagtaacttctccagcaagtggaagcactatagcaggaagcaacacgtcaaagtcaagcaccagctcangcaaaggcagggggc

SEQ ID NO: 457754 - DNA, 348 bp, Sorghum bicolor
  unsure (1)..(348): unsure at all n locations
cgtgcgggaggaggtgcangacgagctgaagaagctgcgggagcagctggcgtccgctgaggccgccaanaatgacccgcaggtcgcgctcgaggaggccaagaagcgcgtcgggaccaaaggaggaagccccgcctccaccaccaccaccacctctcctctctctcccccttcggcgggggtcgaaagcgcgaagaagaccgaggagctgaaggtaactcaaccggcggcggtcgaggaggagagcagcatcaacgcgccggcgaccgatgtgttcgaggtcgtccgggccgagtcgggggacaaggagaaccagagcgcggctgangactgcgaggttgtgagctg

SEQ ID NO: 457755 - DNA, 275 bp, Sorghum bicolor
  unsure (1)..(275): unsure at all n locations
actaaaactgatactcactctgtgcacctgacgacgagacccactacactagacacaataattaatactaggcacaagcagctcatcatacacacatgatgactccggcggtgctgttcctgtggtcctgatgtagagcagcngcagcagcgaggacgcggcgtgcggcagctgccccacaccaccatcatatcctgctacaccgtcgaccagcagacggcggcacgcactgccctccggcgacgacaaatacggaaagagccccaaaaacgcgc

SEQ ID NO: 457756 - DNA, 476 bp, Sorghum bicolor
  unsure (1)..(476): unsure at all n locations
gacccacgcgtgcgagcttatataactagtccaaggcatcccatgcaatataaacctcatctctttcaatcctcatggctnttcccaattcgagcccacagcatactattttataattgacttccncacctttttaattcatngtcacctcactgtttttgttctcctcatcagacattattatcacatatctaccttcggtcatctaggagagcctttatactaccattttcctctactccttatacccaataaatttcatttttccttattattattaacatctcatacagtaaacttatcctaaacatcttgactatcactactattaattttctttaaactactattccatcttacaaatcttattaatatctacctcctatctcaataatacctgtaactctacaatattcttcatatcttaaccttactacttatttttcaatacatatttaatttattttcttcttcta

SEQ ID NO: 457757 - DNA, 379 bp, Sorghum bicolor
cgtccgcccacgcgtccgcaagaacaaactcaggaggttaaggatgatgaagcccccaaagaagtatctggaagagaaaaatcatcagatgtggtgcccgagaagcaaatgtcaaactcatagtgagcacacagttgaatcaagtgcagctagtactaggaaacggaataagcgggaatggaaaggaattggtcgggagggtaatgaaaaatttccacttcgaaatgtactaactgatattcttcacggggaggagaaaagatcgcaaaagtccaatgaaatacgacaccctccatcaaaacaaccagaacggcagaagcgtgacagggatgatgagccacagcaaacaaagagagcgtctcatcacgccccatgcttg

SEQ ID NO: 457758 - DNA, 157 bp, Sorghum bicolor
cgtccgcccacgcgtccggccttgtatgccaactgttgccagagcaacccttggaagtttgctgatcctatcacacataatctcgttgacatgagtatcatcggacagtcctatggtatttcagaacacttctcacagatactgaatcatgtcatct

SEQ ID NO: 457759 - DNA, 403 bp, Sorghum bicolor
cgtccgccgatccaaccgccgccgcccgtgcccgctcctcgacgccatcgacctcctcgacggcccttccccgcccttcttcggcaagtcccgggcccgatccacatccgtgtcctcgtcgccgccgccgccggcggtttctccgccgtctcccccttcccctcccgcatctccgcccaggaagaggcggcgggacgatgccggggatgaggaaggtgtgagcgacgtggtgggggctctgagggccatcggggagggtttcctgcgggcagaggagaggaggatggaggccgcccgggagactcagaggatgcggatggagatggcgcttcggcaccttgatgcacagaggaggctcatggacgcgcttgtcggccgcatcgtcgatgccttggactgaatg

SEQ ID NO: 457760 - DNA, 393 bp, Sorghum bicolor
cgtgcgcgacctcttcctcctcctcgccggtcccctgcctcaccgttcgcttcggtctgtcaggcttcaagtcctctgaccgggaccgggagtgctgcgaggacatagcggctgctctctccttcgtcctgctgcgctgccaagcgtgccttcccagatctcgcccagcggagacaaggtcatgtctgtcatcagtatcacacgtggatgttgaactcccagtggccagtcccatagtggcagtagggataaagtggatcttggttgcagatcacggtcaatatgaaagctttgagagcagaacctgttggtgaaggtgagacagaagtatctagtgtgcacgttgagtcccaagtgctctctaaaaatagctccctcaagagtgttggcatc

SEQ ID NO: 457761 - DNA, 429 bp, Sorghum bicolor
cgtccgttcaatgctgcaatgttggagatcttgtcacgtcttgaacagaaaggggagtcagtctttgcaaagaaagagtatgcacgagctgtcattttggtggccagtcagaaaacgttgccagtgttggttgctgtggttgagcagcttggaggagcgttcggggagtctggatttctggtcatcccttgtgttgctgcacacattaaccagatcattattgattctatcatagtaaattggtggcgccagaaggatcaacaatttacttctgcaaagtaacttgagaattcaatttcggtgtgtaacacagggaatcagtcagtcaggagctcttaatgtttatctcatgacgccaaagcaaaatgagatctacatgttcagttgtttggaacgaaagcagtcatatcgagattattttacacagaa

SEQ ID NO: 457762 - DNA, 390 bp, Sorghum bicolor
cgtccgattcaagacattttctgtattcaagtcctgctcagcctcttggaccagaagaccttacatggaggatgattgctggtaaggtggtggagatcaaggggcagattcggcgttctcaacgtttggtcagagagtcaaggagcgtatgtacatgtgaatgcagagttgggaacaccacgaggatgctttgaccaatattttcatttgtcttgagacttttgtagcataggcattttttgttaccaatggggcgagcttcgagcttggcaaaatttgccaagttatttgtgaatgcaagtatgcaaccgtagtcatgtacccaatgtatcagttgagctgcaaagagttgtgatactgtattctgagaaatcttaacatggcagagat

SEQ ID NO: 457763 - DNA, 367 bp, Sorghum bicolor
  unsure (1)..(367): unsure at all n locations
cgtccgcagagacttctgacagtggatcggtggcaagtggtcctgcaggccgtggacctcagtcagcatcccatagcactcgggcccctggtgggcanctgtgaggccacttccagctctgaaggataacgtaaagagggtcatgttctactgctgaggctaggctggggcgcttatggtaccctcacttgtaaatatgtttggagatcgtaataatctggcagctgctactttgggtgctgtactgttaccatttactgtactggtctacgtttcttcctcgagcaccatgtatgcactcatgctattgtgtccacggatcatgtatgcacgctgtaacatagtaataaccctcggttgtgtgtgt

SEQ ID NO: 457764 - DNA, 455 bp, Sorghum bicolor
  unsure (1)..(455): unsure at all n locations
cgtgcgagacaaacccgcgcctgctctccgcctctctcccgagtcccgacctgctctttcgccccccgccccacttcctgccaaaaccctaacggctcnacctcgaggatggcgtcnccgccgccgccnccccctcccgccgcagcctctgccccacccgccgcggcgtccggatcgccgccgccggcgcaagtggtgggcaacgccttcgtgcatcagtactacaacatcctgcaccagtcgccggagctcgtctaccgcttctaccaggaggccagccgcctcgggcgccccgccggcaccggcgccgacggcatggacacggtcaccaccatggacgcgattaacgagaagatcgtctcaatgggcatcgaccgggcggagatcaaggcggtggacgcacaggaatctctcntgtggcgcgtcactgtgctcgtcatgggccaccttacggg

SEQ ID NO: 457765 - DNA, 75 bp, Sorghum bicolor
ccgacccacgcgtgcgacctgtgtctgtctcgctaccctcgcgctcccagacgactattgggccgccgacgccct

SEQ ID NO: 457766 - DNA, 392 bp, Sorghum bicolor
  unsure (1)..(392): unsure at all n locations
tatatctctttttgatgcgacatgaagcaagtaatttgcagtacagtgatgaacgtagtaacatgagtaacaatgtgttanggatcgcaaggctcggtgttagatctccaaatggaatccctggatttccctaccattgctcaggctgtggggaatctcaaagattccaaaaggtcttgcaaggtcaagaagtgcctcgtcctttccgaggaggatgtttggctgatggccatataagaactgctggcatgtatcaacctaaatggcctgcaccacaagggtgtgattttccacagccagcaaaacccgtacttgtgttgcaagcatacctcccatcatctgtgctgatgtttacacaaactgggtctaagataacttcattggaatatgag

SEQ ID NO: 457767 - DNA, 425 bp, Sorghum bicolor
  unsure (1)..(425): unsure at all n locations
cgtgcgtgtgcacttttaaatttccacgtaacatatttttgttattcaacgtgtatgaggcacagagtatgaaacttggatatatctattatggagtagcacatacatattgcctactanctaatggatagttcattggcacttgcttagttatgaattatttctctcaaaaagccaactaccttgctacttcccttctgaaattctatggttggtgcctactgaaaaatgtttttagtgctggatgtcttcactggcagatgggattgtcaaagcttgttcctaatattgatgttgcctccttgcccccattctcgatgccattcctcagaatgcattgtgctgctattatgaaatgctttatgtgtgcttactatcatcctttgctatcaatactcccttgatctgtctttaatggcgtttta

SEQ ID NO: 457768 - DNA, 344 bp, Sorghum bicolor
ttttaatactggattaccacagttccatttttgccaggaagaaaactggttctgtcgtggaaagaatcacaaagttccataaaaactaaaatgtaaaacccagcgcaacattgccaatctttgatcgcttactgaagttcatctacgtcgacagcaatttcaactccagtgtagatacataccatgatatagtcttagattggaccatgcatgatccctatgtctttctttatcacgaaaagcgtatgctgaaaccattgcagtttggtgacatcatactaccaaactataaagttgatccggacaccatctgtatacccatcttcatgagtgcatatgcatct

SEQ ID NO: 457769 - DNA, 477 bp, Sorghum bicolor
  unsure (1)..(477): unsure at all n locations
tccaccgtccccgcccgcgcgtgcaagccgccgccggagcgccgccgtaagaagcagccgccgacgaggcggaggcgacggcccggtgccgcaccggtggggccgggaccacgcggcgcggccgatccagatccggcgcactcctccgcgctgctgccctttcccagcggcggcagcggcttcgcctcgcggggcacggttgcgccagacgaggaagagggggagacgccgcgagctcggctgaatcggaggaagtggcagaggcaacaaatgattcgttctcctactcattaagagagtgccagaagcagcggcggcttaagtcagagaggtctgcactggtgcggccaccggcctcgcatgagctcaatagtgcncgaggtattgagctgctagtgctctncgccgggtgcttgatttgggggtaacccnggaggaatgagcaagagctcaacgacatcattccgggagcagatc

SEQ ID NO: 457770 - DNA, 60 bp, Sorghum bicolor
tcgaacccgaaaggaaccctaaccctagcggcctccgggagaggcagctaggagagctcg

SEQ ID NO: 457771 - DNA, 123 bp, Sorghum bicolor
cgtccggcaccgcatagacaggcgtcttcttactcgcctatctccgcgactcaaagcttctcccctttctcccatttcccaccgccgccggcgttccaccctttcgacgactccatgagggag

SEQ ID NO: 457772 - DNA, 449 bp, Sorghum bicolor
  unsure (1)..(449): unsure at all n locations
cgtccggattcatcttggttgagatcttgctcaatgtttagagtaaattgtgaatgcacaatgactttagagtaaaatgtgaatgcacaatattcagagaaataaacaatgcagtgtccttcgtaggttcattttggtgttttattaggttttaaatttaaacttccaggttgctaaattttctcattggtaacataaggaaaatggtgtactagttcaagatttgttgtatcaaattttctcatagctgtcatctcttttctattattaagtactgcatcaatttttctacagtcagtcattgttatctggtatattttgatcacgagataggagcctgcacatatatacttggtgatttagtactaaagctcattgcaaatttattatcaaaacattntctgtgaaaaatgcacatactctatttcttcacatctggagaagtgact

SEQ ID NO: 457773 - DNA, 443 bp, Sorghum bicolor
cgtccggattcaggagctgcagacatgtcaatgaaatctagtctatggtctcagctggaaggactcacagatattctactggaggcatatataggccttttaactgcccaatttgaacgtgggcaggaacatggtgtgctagtccaagaatattgtgaacgaagagatgaacttctcagatccctctacaaccttgctaaacaaatagtggaggtcaaataccaggagtcaaaagatggtacggacaatctggatctgaaagaatctatatttagaaaggttatttctcctattttagcaacagccaaacgacatgaagggtaccagacactgtggcagatttgctatgatctagatgattcagatctcctccgcagcctaatgcatgatagtgttgggcctcatgtgcggatcagtttctttgtctttaaagagtagtcaac

SEQ ID NO: 457774 - DNA, 518 bp, Sorghum bicolor
cgtccgcccacgcgtccgcccacgcgtccgcccacgcgtccgcccacgcgtccgccttctttgaaggggtctctacgttgcacctctaggatgcataaaagggatcacctgccggaaggatggtgtacgatactattgcaatttttgcttgtacttcttcggattgtattgttgttatttgggagatgacaattcagcccaccgccacttgtaagattttcttccttgtggattgacattattactattaggagccaaaatttttgcggtgctggtttcactattcaaactcaaattatttttattttatgattttgacggttcttggaaatatggactgcatttgtacctaactttgctcatctcaggagagaaccactcggatatggaaaatgacttcacaagctgcttcttctggcttgctctattagccaatgaaaatgtttgatctcaacactattggaccatatacttcatattttaaagtgtgtttacccttgccatgaaaatgttctata

SEQ ID NO: 457775 - DNA, 413 bp, Sorghum bicolor
cgtccgagctgctggaagggaagtgcatgtggtttctagggatggccggctgctggatcctagcatacgttcgctgcaactgatacgcgaccgttgcaatgcattcgataccgaggcatggtatatgctgccacctgtgctcaggatggtggtggagggtgccgaaaaaacagacctaactgaggtttcaattgctataggcgctttagcacatcagatggaagcaggagagcacgaggtcaggcatggtgatagattaacatctctagagagatttatggatgcatcgtacacaacacatcctgtctgactgctcgacacattatgataccagatatcatgacaaccagcatagactttcaagggaagaaagcgaggctcatggcagtgggcaccatgacctccaggggtaa

SEQ ID NO: 457776 - DNA, 267 bp, Sorghum bicolor
cgtccggcaaagagcccaacaagggttttagaggacaacggaccccgtcgatggcggcgacggctggcggcgcgcggcgagccctcgcggcgctgcgctccggctcccagtctactatctctgcaacgctatcccgccaggcggcggctcgctctccggagctggcggcggcgtccctggcgcgcgccttttggcggggccttgcgaactcgagggtgcccggtgcggcgctcggcggcgtgcaagggtcgcttatgcccatgcaca

SEQ ID NO: 457777 - DNA, 85 bp, Sorghum bicolor
cgtccgagctactgctgacagggaaaaattaaattggcatgccatgcttagcgagaagttcctcggttacatatcgtcattaaat

SEQ ID NO: 457778 - DNA, 483 bp, Sorghum bicolor
cgtccgaagaaagctaaaaccatatgtgaatgtttagttgcatctgagagcacagacctaaaatttgaggaatctttttgctcatatcttcttggagaggaaactggcaccacagtgtttgaaaagcttcagcagcttcaaagtactggaagttcaaattcgaagaattatgggttagataaaaagaagggcagcagtgacagggttactgtcaaccagtcactggaactgtggctaaaggatgtggccctttctcgtttcgcagatacgaaagattgtcctccatctttgaccaacttttttggagctcctaagcgcgtccttaacacatccaagcagaaactgggatccccaagatcagtccttttgagctctcagccatcttctagtgcctcagcatgcaacagaacttcagcagagcagaccccaagattggtccaaacagccatcttgggggaggtgtaagcaacttgacctgccaac

SEQ ID NO: 457779 - DNA, 301 bp, Sorghum bicolor
cgtccggcttgttgtggagatctatgaagcatatctcaaccggcaagtcaacactgctgctgggaaggacacagattgtagcagccggaagtgataattatgaacataacttgtgcagtagtagtattctaactatgtgtttgtgcattcatcatattctcatgctgtttagatgcaaactgtttttttttggatggtaatcaattagatgatgttgcttgaaacagggttgaccagctgttgaaaattaaacgggatataatggcatcttcatgtccgaccatgtgcccaattggtttat

SEQ ID NO: 457780 - DNA, 429 bp, Sorghum bicolor
cgtccgaaaatttcagtcatggcaagaataaaaacacttagcccattttagtactttcatcttgctgaaaatactctttctgttgcccacctttatctgctatagccctgcaattgcctaatacatctgcattttttagtgttttcatcattgtcaatagatttcggttggaaccattgtatttttacatggtcatgattctactgctttaatacttttatcttggtggaattactctctctgcttcacaccttggtggtgcaacgtttttctgccaacctgcagggttcaagttgttcaactcctttttggaggatattgcttggttggagagtgtcaagagggagctccaggacgtagttagatgctaattgaccttttgctattggtattgtactattgcttcctaattccttttaaaaaatgatg

SEQ ID NO: 457781 - DNA, 375 bp, Sorghum bicolor
  unsure (1)..(375): unsure at all n locations
cgtccgggcctcgctgggtcttcacctccgctccgggtctctacgaccgcggcggcgcggccagcaggagcagcggcagcagagccacggcgcatcgtcgcggcggaggctggagcttacccagccggagcccctgggctacaccgcctttggactggctctcacccgccccagaccgcagccgttgtgccacgtcgtggcggcgcgcagccgcctccgcccagccaactcgtgagcccggccgacagcgtgaaattaatgagggctagcttcattgaaatgnggggagcgatgtgagagaaaaaactagcgttcaggtaaaaacattgataattgctgcggagcatgagatgatggcaaacgaacagcacgaca

SEQ ID NO: 457782 - DNA, 512 bp, Sorghum bicolor
cgtccggccaaagatgctgaaactggcgaggaggcagaggaggcccctactgaagatgctacaaaggagactgatgtggagatgaagcgcgctgaagaggcgaaggaagcttctgctgaaactgaagatactgagaagtctgcagacaaggctgatgatgctcctgctccagcaccaatggaagaagctcctgctccagcaccaatggaagaagataagaaagaaactgagaagccagctgaatctgttgtagctcttcctgcaccaacggaggataagaaaggagatgccaagccagctgagcatgaagctgtggctccagctccagtaagcaacccaactgagaactcagctcctgctcctgctgagcctgctgttgttcctgctccagcacctgaaaccaaatcagatgccgagcctgttgctgttgatgctccggcacctgaaaccaaatcagatgccgatcttgctgctgcactgctccagacctgaagccaaaccagatgctgagc

SEQ ID NO: 457783 - DNA, 451 bp, Sorghum bicolor
cgtccgccgcgtccgcgacggcacggcgttcgccgcgttcccggcctcctcatcgaccgccgcggctgcgctcgccgtcgacgtgcatcccccaccgcaggcaccgtgcatccctgacgatttcctggacgaggacatcccagtggtcatggagcccgacgagatagtcccggtgattgaggaagaccccgtcgtcccgatggacatttccggcgaggtggaagccgaaggcaatgcggcccagggaggtaaggccatcaaggatcgcatcgatctcgagtcggcgcagaccaagaaggcttcgcccaaagacctgaaggagatcgccgggagcttctgggtcgccgcctccgtgttcagcaagaagtggcagaagtggcggcgcaagcagaagctcaagaaggaggctgccgtgagcaaggccgcggcagcggcaatgccccctccggag

SEQ ID NO: 457784 - DNA, 238 bp, Sorghum bicolor
  unsure (1)..(238): unsure at all n locations
gaaaccagaagacacagagaagccagccaacgaggccgaggaggcaaacggaccaacacaaagggaagaaaacacagcacaagcaccaagggaagaagacaagaaggaaacgcaaaagacagcagggagccgaagaaccacgccgagcacaaacgagaagaaacaaaggacangcgaagacagccgaacacgaaaccgacaggacaagnccaggaaggaaccgaagagagaacgcaga

SEQ ID NO: 457785 - DNA, 542 bp, Sorghum bicolor
  unsure (1)..(542): unsure at all n locations
cgtccggcttttcactttcatatccatggaattctccttttatattatttagttaacttgttgcagatctgtgaaattaagaagctagttcaaaagggaagattgttgattgtctattggttttctcttttaatgtgtaggcatttgtggtttcatgtaagtggagcagcggaggtcaattaatctgcaaggaattttgaactgctcttatattgtagtgtaaattttactgtattctgaattttgtcttgcttcgtgtttcatagggtctaaaactggaagcttgaacaagctttcctcccatattttttttgttaattgcagtttggtcatctggtgactatcttaaagaaatgaatgggcaaccgatctatgcaagagatatctgaatgtactatacactaatttttgccgctgaagcttaccctctcattcttaaagaaattgagtttgctttgcttgatcctacagtggagctgtaatgactcgatttaaaattaatagaagagatgcactagagcctaggcanatcaagatttttt

SEQ ID NO: 457786 - DNA, 447 bp, Sorghum bicolor
cgtccggttcccaatctcgtgtccgcctctcctctttccctcgctcggtcgctcccttccttccctctcatggccgccgccgccgcgcgcttcggcgacccggcggagtccacgcgcctgcgcatcggcgacgagatcacgtggtccgagatcaacggcgtgtacgaccgcgacgactcgctcaaggagaacaccaaccccaagtccctcctcaagaaccaccaccccggcgccggcccccacgccaacaacaacggcacctcgcagcggttctcgggcaacctcaagccgacggcggcgcccatcatcggcctctcggggaagctcggccaggggcgcgggggcggggccggcatgggcatgggcatggccacccgcccgccatgttccccaagaataaggccaagacgggcggcgggcgcgcgttcagagccgcgtcccggagcc

SEQ ID NO: 457787 - DNA, 355 bp, Sorghum bicolor
cgtccgatcagtttctgaaaaaagatctgcagcttctgaagaaaaacttgtgtgcccactgcttcccaagaaaagtacttcagcctcagaagtaaatgtatcagtttctaaaaaaagatctgcagcttctgaagaaaaacttttccctcctgatacaagtgtttcaaacaatgaggatgaggtttctcctgttttttcattagaaactagagatatgattcctgaacttgatgacctggagtttgaagccaagtctgcaaaggattctgcctggtatgacattgccatgttcttggcacataggacgaacaaggcgggggaagtaaaagtccgggtgagaatccagggtttgggg

SEQ ID NO: 457788 - DNA, 481 bp, Sorghum bicolor
cgtccgatacatattgctcttgatgcataatatctttttcgaaaggaaacagagctgatggggcttcttccaggagtattttctcaacaatttccaattgcactgaggttattggcgatgcattgttgggaaacatcatatttatgatcattttactcctgggagtgcgatttattctcaaattatctttcgatgttataaggtatagggatgttctgttcgctgtcatcatttcaagctacttcaagctgttccttttcacaatgatggtttgggagtttccatcatctgttatattcattgttgaaatgtttgttctctcatcaaatgttgtagccctgagagttgtttcgcagtttccaaaagcccacttgtttccggtctgcttagtagcgcatgcagcaaaatacttaacccagcgatggatccttggaacgccatgaaccctgaactcgtccagaactccagatcattctggagc

SEQ ID NO: 457789 - DNA, 439 bp, Sorghum bicolor
  unsure (1)..(439): unsure at all n locations
cgtccgacagagatgaagattcagatgaagctgctgacaaacaggaaggtgactatcgatctggcaaagaaaaggcagggaagaagttatcagaggtaaaagaatcttcaggcaaaaagaaggcaaacacagggagtggccacaaatcaggtcctccaaagaaaattatcaaaagtccagtaaaaaaagtgtcatccaaggttcatgaggaaaaaggaagccccaatgatagtgcaaaggttttttctaggaagaaaaaacccacagcagaaaaggagatcaaagaaaaaaagtcatcaggcaaaaaaaaggtggcaaagggtaaaggagaatcnagctgaacagttcttcccagncaaggacgatctgaggaagaccattactgaaatcctcaaagaaagttgacttcaacacggcaacnttcagtgacattcttaag

SEQ ID NO: 457790 - DNA, 407 bp, Sorghum bicolor
  unsure (1)..(407): unsure at all n locations
cgtccgcgatgattgagctgaatctccccgtaatcaattagagtagctgcattggcgggggagaaagcgcgagaagcgcagcagcaatggcggagcaggcgagcgccggaaggtactggtgccacatgtgcgccgcggtcgtgagccccgcggagggcgaggcggagatgaagtgcccgctctgccacagcggcttcctcgaggagatggagaccgcccgcggcgcgaccgtggccgcggtcgcgactgacgacggcgacggtgacggcacggtggctcaggtgtaccccggcggcgccgaccgcccgagctccatctgggcgcacgctatcctcagcacggtcgacaagtccgtccgccgccgccgcaaccggcggcaagcagaggccgncgggcacgtctacgac

SEQ ID NO: 457791 - DNA, 96 bp, Sorghum bicolor
cgtccgcgagattgagctgaatctcccgtataatagagcgctgcattggcggggagaagccagagccacgcatgcggacagcgagcccgaggactg

SEQ ID NO: 457792 - DNA, 482 bp, Sorghum bicolor
cgtccgtgagttcccatttttgggtggtgtaggtctagtgtgttagtatcttttactcgtatcaggagttcacatatttagtatcagatagtttttttaaaagtttttcttgagccatctattaattgccaacattcattttatactaccacttttgcagatataaaaaaaattgtaggttgcagatgtgcttattttgttcaatatgaatgctatttttgtattgcagaactgtttattttagatctaatgaatttatttatcaattatcctgcgtggtattttcaattattattggtgacataggtctatcagtattgttatcttcaaaatgatatttctttgaggtaatatgcatatttaagatctatatatctttatgaaattgttatactgcacaaatgttcagatttgtagctgatttaaagtggcactttttaacagtacattagctcctctaagttgagtgtagacctgctgca

SEQ ID NO: 457793 - DNA, 527 bp, Sorghum bicolor
  unsure (1)..(527): unsure at all n locations
cgtccgcgtctcctccgaactgcgcaccggcttcgcccccgccgtcgactctttcatcggcttcttccacgccgtcgactggaaggagccttggctaatcagcatactaactttccatgccattctgctactggttaccatcatctcgaggaggaatgtcaatttccagctcatcttgtcagctctaacattctctggtgtattccttgctgagagattaaatacattcttggggcaaaactggaagagcttctccacccaaaattattttgatccccaaggcctcttcatttcagtcatctggtctggccccctcctattgataacaatccttattttggtgaacactcttgtgacactctgcatgctaattgtaaggtggaaaagggcagagctcaggcatcgtgctcggcaggctcgtaacaagcaggactgatcttgacctgcatctatgtaattnggtggctagtaggaaagtcggctttcttgtggcaattggtctaaccgagaatcatgtcctggaacgc

SEQ ID NO: 457794 - DNA, 503 bp, Sorghum bicolor
cgtgcgcccacgcgtgcgcccactcgttcgagctgctacctgcaatactctgtatccttgatgtttgctacatggcatgaaacagcccgcgggtgtggtctcattacaccggatctgcccatacgtcatgcgctgcaatgcctattgcgcgatgctgcgttttgtgacaaagtgaatataggagcttgaagtgttcatctgagacatggaaaaagtgacctgtcgggcatatctacttcaatgcaagcagttattttcaaaagaaactcttaattggtgtaacttaacttcgtgggaacaacccatatttctctttatggtgaactacacatatctgctatatgcttctctatgctcatcaacaagcatgctgatgtgatattttcctgaagttactatatttcagtctatgccaaacatctacatggttaatatcttagctgagttcaaacgacatctgttgctgccctagttagttattttagtatattgtgttctatctg

SEQ ID NO: 457795 - DNA, 245 bp, Sorghum bicolor
  unsure (1)..(245): unsure at all n locations
cgtccggatttgttgagcccagttgagaaggttggcatcctgaacagtgctacttgcaaagacaatactggaagaggccaagctcgntagaccccaagacaccaaagaatctgtggtcttaaatgttgatcaggctacactgggaaatataagtggtaggattaggaaagaagtacttcagtcttgtgtaaagaaatcttggagaatagaagctcagagttactgagtatctgcagacaggtctg

SEQ ID NO: 457796 - DNA, 243 bp, Sorghum bicolor
gcgtccggaaaaaaaaaaaaaaaaaaaagaaaattgccataaataaacagtactacttgctaaaaacatttataaaaaaatgcccagctctcttaaagggtgaggctccattagagtgtgttggtccttaaaatgttgatcatgcttacacttaaactaaaacttagagtgccttaaaatactggggcggtcgttttattaatacacatttcttcttcctgaaataacatgctatatatttta

SEQ ID NO: 457797 - DNA, 345 bp, Sorghum bicolor
cgtccgatcaatctatcgatggggagaatgatgatgatcgtgatatgaactctaaagaaaacatagcttctttggatccacatttgtcagaggatgaggttgatgaagctgaactagtgaagacttgcaagcattttcatataggtgccagctactataaggtttgcattagacagagaaatgacaccctatctacttgagaaggatctgattatgcatgtaagcttacacgtacgggaagatgcatggaaggaaatataaagtaaatggtgatctagcagcatgttggggccatttggaggtctgcaagtactagagtgaggaactagggtggatccaaatatg

SEQ ID NO: 457798 - DNA, 448 bp, Sorghum bicolor
cctctacgcgcctcgcgcttttctgtgcgccctgtctctgcggaggcttgctggcctctctctctctctgtttttgcttgctgggcgggatttggccctggatctgtgcaccggacgccggatctgggcggcgagttggtgcgctgtaatgcctcttgcgcgatgctgtgttttgtgcagcagtgaatttgggagcttgaggtgttcatctgagacatggaaaaagtgacctgtcgggcatatctccttcaatgcaagcagttcttttcaaaagaaactcttgattggtgtgtcttagctcgtgggaacacccatctctcctctctggtgaactacacatagctgctatatgcttctctatgctcatcaacaagcaggctgatgtgatattttccctgagttactataattcagtctatgccagacatctacatggtaatatctttcg

SEQ ID NO: 457799 - DNA, 317 bp, Sorghum bicolor
  unsure (1)..(317): unsure at all n locations
cgtccggtcaccaccctctctcaaattaaggcatttttaagccatcgatcaccagccaaccagcactcactcactagctccatccaactcgtacacgacctctccatccatcctctcgtccttccaacaactagcagcattagcagctcatcttcatcgaccgtccaaagcatcacggcggcagagatgaggcgctgcggcatcatcatctcctccccgctcgcggctgctgccgtgatcctcctcctcgtcgccggctgcttccactgcgccgccgcggctcgcctnctgccttcttcagtcccagttccagctat

SEQ ID NO: 457800 - DNA, 462 bp, Sorghum bicolor
cgtccgcggacgcgtgggctagcttgctagatttcggaaaaaaaaaaacgaaagtgtccccaactcgaaccgccgagaagcccgcccgccgccgccgagagatggctgccgagtacgacgagcgctaccagggcaacggcgacacagccacggccgagggcggccacgcgcaggccgagtacgccgccccagccgctgccgtggcgcctgccgccgggggttcgccgcccgccgacagtaagcccgctgggttctcagaccacgccgacggccgctcgtcccagccccagcacgagacacaatcacatgacagtggttcctccaaatctcgagaaagggaccgcgaacgtgataagagcaaggacagggagcgtgatagggaccgtggccgagaaaaggagagggaccgggataagggacgtgaaagaggtgacagggacagaagagcgtgtcgccaccaca

SEQ ID NO: 457801 - DNA, 365 bp, Sorghum bicolor
  unsure (1)..(365): unsure at all n locations
cgtccgctggcctcggccgctcaaatcccccactccgcagtccccgacgaccgacgggccacggcagagccaccagaccagcagccccagccatcgagcaatcgagctgctccatggcctcaccaacccgagcaccggcgcctccgccggcggtagagcccatcgcgccttcttctccttcttcagaacacccgccgtcaatggtcagccgaatcgacggagaaggaatggtttcatccaggggaggagaaggatgatgggtggccggcctcgtcgatctgacagggaggatagtgtgcggcggacagtctatgtctctgacattgatcagcatgtaactgaacagaaanctggctgagtttttt

SEQ ID NO: 457802 - DNA, 317 bp, Sorghum bicolor
ctcacttcctacgtcaaacacacaacagatctactccaccgcgtatgtctgtgtccatgtgcccactcgagctgactacatagcttcgcgagcggcgcgcgcgcgcgcgcgtgcgcacgacctgaggccagctcgctggctgcaggtcggtcgcggacgcggtcgggtgcaccgtaccaccctggagctgtcccggcaagggcgccaagcgcggttttctgacgaggcgcccccgccatctcccgctgccgctggcgggaagggaaaagaggtggctgaagaggaggacgactacaaggagggtgcagcgacgccgc

SEQ ID NO: 457803 - DNA, 442 bp, Sorghum bicolor
cgtccgactaagagcgttgattactattctctttaaatcatttgttgttgttctatatacctactacatttgtatgctattcctgctactaattgtcaccaaatgggctcccttttgctatagcagttgtatggcttcactctatgtccttattgcctgctagatgaacaggtatttcattctacaatttaagtagtgcatctctgttacttgtcttcaatgtttaaatttcacggtctatgtgggtaacaggtcacaaggtaatggctgtattgtggttaatttacatgatttagtaggtgcactaaataacttcttctatgctattagtgtcgcaagatattgtcatctgcctgcgattccacaataatgcttctgtcactacccacagttccctgtttccactgatattaagtaggaaggcttctatatatctcaaact

SEQ ID NO: 457804 - DNA, 430 bp, Sorghum bicolor
  unsure (1)..(430): unsure at all n locations
cgtnccggggaaagggagaaattctgtctggtacccctacctgtctcagctacccagctactacactatcttggctacctttgacgattttgaagtcgaagctcttcaagtataactcggttgatgatgccatttgggttgcacagaaggctaaaagtgccataaaatcagactgggaagatgtgacaccactcatgaaagaattggaatttaaacctaagcttttgatgtttaaatcctggctctgggcatttgcaacggtatcttctcgcacattgcatattgcatgggatgaagctggttgcttatgccctgtgggtgatttgttcaattatgctgctcctgatgatgatactgcattggaggcagaggatgcagctgaactaacgaattaccagcaggaaaaatgagatgatcaattcaatctgag

SEQ ID NO: 457805 - DNA, 518 bp, Sorghum bicolor
cgttcggacgggggagggtcaagttcgcagccaccggagttctcgtatggttctaagagacagcagggcacggaagtttcagctgaaaagcaacggctggctgcttcactttttggttcggcagcagctaaagctgataggaaagcacaagcttctagaaagacagcaaaggacagtccctcaactgagaaagtagctaccactaatgtgactgcccagcctgttaaggagcaagtaatccctgctgcaccaccgcctgatctgctggatctgggtgatgagccagtttcatcaaatcctccattggctgatcctttctcacagttagaggggcttcttggaccagcatcggctgctccggtgctttctggaactccggctaccggcgcttccaaagcgccagatcttatgtcaatcttctcagatgatgtaccaactggagtggctagtggatccaccgatcccactctaggtgatgttaattcgacgagctcccacaaaggagcaactgcagtggc

SEQ ID NO: 457806 - DNA, 361 bp, Sorghum bicolor
cgtccgagaaaagctgagcacacacgcatgccgaaacataagagcacatccaagatgcgggagcccaaggtgcgacggcagaacatgctaccgtggagccggcggccaagaccagcacgaccacctgatccgggatatgcgagacgacgaggacggtactgactggcagcgcgtaccgcacgcattacaccgtgccatgcgccgagtactgccaaggctggaagagctccgcttacacaaccaggcttcgcctacggacgcacgcacgcgagcaccaacgatgacgttgtctactatacgcataacgtggacccgaccgccgccggtgaccacatcctacccaaatgcgacgacaggaccg

SEQ ID NO: 457807 - DNA, 428 bp, Sorghum bicolor
  unsure (1)..(428): unsure at all n locations
cgtccgattgggggcaagcagatgactatggtctgggccatcgaccggagcaagcttctcaaagagctaccagaatccgcctctgtgatccaaatgcaacctccgccaactccacaggtggctcccaccgatactgatactaacagcgccatcataccaaggcctccgccactgcagcagccggatatgtggggtcacccaatgccaccgatgttcccacgccccaggggcatgccaatgccgagaatgccgccagggttgatgccgctgcagcgaccattcatggcaccaggggcagttatcccaaatgggtggggtcctgggccgagttccgcacagctgaagctgaggacagaggaggatatcttaaggaccttgaactgctgctaaacaagaagacatatagagaggagcagaatacanagact

SEQ ID NO: 457808 - DNA, 476 bp, Sorghum bicolor
cgtccgatatagttgtatgtcaacttcgggtcgtttttcgattatgatagcttttattggaaaaaaggcaaaaacttcatttattttcttttctgtggggaaaaatggttttgttggttacccttgcatatggctgctttgttgtagatttaattaaacctttttggtgacagaacaaggtatcagtaacacctatgaatctgtgctctagctgtagcttaattttgttaacacttttttttctaatcactggaaaatatatgaaatatatccgactcattttcagtttctgtagaaaagagaacatggcattgaatgttctgtaccaccattaatgctgtttgttatttgtaatgccacatgaataatcatgaatgctcactgtacacattcctacctgccacgataggtagaggcatatgctttcagctgcagagcacagacgaaatggcacaattgcagcgtacgtgacagat

SEQ ID NO: 457809 - DNA, 229 bp, Sorghum bicolor
cgtccgaaagggaggaggacggaggaaagcttgctctgctctcagagagggagagaagagagaagcagggcaggggcagcccatggcctctgctccagccgctatataagaccgacccgggcgacgcctctgcttccccgtagtccgtccccccacccgtcctggtctcactcatgcttcggtccacgcacccaccaagccccaccagcggcagcggcagctccgcggc

SEQ ID NO: 457810 - DNA, 417 bp, Sorghum bicolor
cgtccgccaagcttgaggggaggagagccgagcgcagaaccctaattgcctctaccgattgctaatcagtggcgctcaggctcggtcccagggatcggatcttccgagtgtgacggaggggcagtcccaggcacggcggcggcgtcggcggctccccctcccgcctctcgccagtcgcctcgagccctcacctccgtcctccgcgcaccggccggcgaccctgcctcagacctcaataggcaacggaggtacaatgccaagagcaaatgagatgttgagggcagattcaagaatgatggtggtctttggtgccttgacgtcgaaaccagagcagctgacatttgaagactccctcagatttgtcaagaaagtgaaggcccgtgattacatgctgtacttgtcattatttgacattct

SEQ ID NO: 457811 - DNA, 376 bp, Sorghum bicolor
cgtccgctttgctttccatcttcgtgactgtactcagctcagtggtgatagggtgctgctaatacatgtaacagatagattttgtagctacaatgcagagtttttattactatgtttctattgccaatcccgtagtctatttaatagcacatactactaccaagaacttcacctagaatggaattgctgctttttttgggtattctctccatatctacatttctcgggaactttcatgctatttctcctttttacattattacaatccagaggttacattattcttttgtttgttcccaggtatccgaatagacaactatttctccatttctatttctgcttttcatgttcacatgtgtccaccatggcttctgac

SEQ ID NO: 457812 - DNA, 403 bp, Sorghum bicolor
cgtccgcagcagccgcacaacttgctccaccgttgggggcgctccctttgtgccgccgccaccttcctccactgctcgggccaaatcgagagctctcggctgggggccacgcgagctccggcaggatccgtcgccggcggcatccttgctagtcgcgcttctcctcgggtcccacctctgccgcgaacactgcccctgctgcgcctgccgtacccgcccagtctcgtccgtcgccattgctgttgatgctgcggcggtggatctcgcacagtcgcacatggggtaaggaggtagtagagccggatctcgcacacaggcggaggacacacagacggatctggcttccctcttggtaatctcgtgtccttcctcgggtctgtagttatgtcagccacttatttat

SEQ ID NO: 457813 - DNA, 369 bp, Sorghum bicolor
cgtccgctagattcaaccaaccagtagttagcgagcagcagcagcagcagcagcaacaggcatggaagcagaagtttatgggctcacaatcgatgtcttttgggggcttggtttcgcttaactcacccactagcaaagatggttctgctgacaacaaaattggccgtgatgtgcagaaccagtccctttttagccctcaagttgactcttcctccctgctgtacaatatggtacctaatttgacctcaaatgttgcggataataatatatcagtgattccttctggatcaacatatctgcagagtccaatgtatgggtgtctggatgactcttctggtttattgcaaaatacaggaaagaatgatccgg

SEQ ID NO: 457814 - DNA, 541 bp, Sorghum bicolor
  unsure (1)..(541): unsure at all n locations
cgtccggcttgaaacagtcctgtctgagatatctaagaagactctgataagggggcagaactataattccagaaatgcagtctcctatgctttgttggataaggacaaacaatctgcattcctgtcatcgtttgacaagtctggatataggtcatctgacaaactgctcatcgcctacaagcctcgccgggggaggttcgcggtgtacgacggcgaggtgacattggaagaagctgaaaggttcgtgggatctgttttgaacggagacgttcaactgtcaccgaccaaacaaaagcctgtccttaggtagacgactattgcaagttttgcaagagttntagatctaacatttattatctttattacggtttgtacatagctgaacgaaaagagtaaaantgtgtataacgttacttgacaagtttgtcgtcggaaaccagaatactgacttatctctcctcaacttgncatgaatgggcgaggctcagtctgtgagatgtgatacatacggccattctatctaaccatggtactgcttgtt

SEQ ID NO: 457815 - DNA, 253 bp, Sorghum bicolor
cgtccgctttattctgcccttgaatggtcattcaatgatgtcttctacactttctctcggttgtatcatattacaaacaatcaatacttttcaagttagtgtgaaatgcaatgtcagttattcagttaacctagcaaagatagaaataactaccagcagtgttgatggtactgtccaggcaggcattcacataggtagataggtgatgctctattctattctgaattatatctagctcttacgaaccgaacct

SEQ ID NO: 457816 - DNA, 448 bp, Sorghum bicolor
  unsure (1)..(448): unsure at all n locations
cgtccgccaccaccagcagctaccgacgacgaccgagcacagccaggcagcgcaggcgcaggcgcaggcgcagctcgtcggattcaattcgttcttgagccaagttgcaaaccgcggccgttgcccacgagcgccggccgcaccggagaagctacctaaggagaagcaatggaggtcgccgcagcatcagcagcagcgagcttcggcttgaaggccgccgacgacgttgacaacctcagggccacggagctcaggctcggcctgccaggcacggaggaggagccccagcaggtccacaaggcgacggcggcggcggcggcggtggagctgccgctgctgccggccgcgacgacgccgncggcgccgtctacgcctaggggcaagaagcgcgacgtcgtcggaagcgggaacgaggacgcgcccaagaagcgcgacggaaacgccgacg

SEQ ID NO: 457817 - DNA, 72 bp, Sorghum bicolor
cgtccgaatcgccactccgctaccttcactcgctcactcagaatgcggcgccatggcgaggtatgcgtgatc

SEQ ID NO: 457818 - DNA, 418 bp, Sorghum bicolor
  unsure (1)..(418): unsure at all n locations
cgtccgtcaaccgccaatactggaaatggaacagttctactaaatgataaagtggctgcactattacaggatgtcattaggaaatatttggtacctgttgagtgcttgccttttcatgaaatcatctgcttcaagaatgttgacatcctccaatctgcgctgattggaaatccaagaagaatgattcaacttgatcttctgaagtcacagagccatctgaaatgttcttgttgcagcaggagtggtgctgctgtgtcaggatcgttgcatgacacatcaatcatgtgtaacctagcccaagaatatggtgtgtgattaaccttcatgaatggacacggccttgaaggcattatcaagagcacanattcaaaaggcaaaccggaaatcctacagttctccctcgaagaagaaatcaaaa

SEQ ID NO: 457819 - DNA, 309 bp, Sorghum bicolor
cgtccggtagaaggccaacttaagagagaaataatggctgagcctgagcggtttgtagagcctgatccagaacttcctttagctcttcttgatcaaaaggaggctggaaaaaagttgcttctcattactaattcagatttccattatacaaacaaaatgatgaatcatgcattcaatcgctttcttcctaatgatgtgggatggaggatctttttgaaatggttatagtctccgcaaggaagccagagtttttccagctttcacatccattatatgaggttgtaacagatgatgggctgatgcgcccct

SEQ ID NO: 457820 - DNA, 113 bp, Sorghum bicolor
cacggtcaccctctctgacttgaccgtgcaacatgccgtcatcgcgtggcgctcgcactcagaccgggcttgcaacgccgcatgactggaagagaccccgagcgcacgtgttc

SEQ ID NO: 457821 - DNA, 386 bp, Sorghum bicolor
cgtgcgtgtacatctgtaacgcgcactactggacgacgcaggtcatccgcacaaaaacgtactgatctcactctccattcgaggccgggggtgggtaggtacacttggacggatgcccctggccgtacaacctcatcgacagctacgcccaaaaggtcccgcgagacaaatagacatcattggtaaaataaatccggtactcgagaaatgagatgtacatttctttgctgtctgtgcaccatagccatctattggtgtggtaacgcactcaccgaactttgtacatactactgcgtggaaacttaccggattccatctcatcacattgaatacaccgatcgcagatcatccttaccaactccggctaccatactctcactccataa

SEQ ID NO: 457822 - DNA, 461 bp, Sorghum bicolor
  unsure (1)..(461): unsure at all n locations
cgtccggggagcgacgcggggagcgcggcggcgaggtggtgatgctggccgcagcagcgagggagaaggaggaggaggcgcgggagcagctgcgtcaggcggtggcggagaaggcggcggcggacgaggcccgcgcgcaggcgaagcggcacgcggagctggccgagcaggagctggcgagcgccaagcggatgcggcggcaggcgcaggtggagctgagccgcgcccacgcgctccgggagcacgccgtgcgccaggtgaacgcgacgctcctncagatcacctgcctcggctgccgccacaagttccgcgcgcgggcgccgcagctgatgatggacgccgccgtggcgggcccncgggtggcctgcagctacatgtcctccgtcgtgacagcagagggcggcgacgccgaggtcgtcgacgacgagccgccgcccctcgacggcgcggacgccatgcta

SEQ ID NO: 457823 - DNA, 416 bp, Sorghum bicolor
  unsure (1)..(416): unsure at all n locations
cgtccgcacccgcgtgcnnacaactactcgtcctcacccccaccctagtcgccgcccgcccccagatctagatctgagccttccgttaccagatgatggccgacgacccgccgcggcgtccgccgtcggcgctagccaggaagagcgcgccggcgcagccgtggtcgcacgtcgagaccatgcacctcatcgacgcgtacgaggagcgctggacggcgctgcgccgcggccagctcaaggcgcaccagtggggagaggtgcggccgaggtcntccccgctgcccgcacaccggggtcgtcgccagcgaggacggcaccagtgcgcacagctcagagctcgcagcttccgacgaggcccgccctacctcgttggctactcgcgatgatgctgacgggccctgcgctaccgcggtgtc

SEQ ID NO: 457824 - DNA, 327 bp, Sorghum bicolor
  unsure (1)..(327): unsure at all n locations
cgtccgcagcggtccagccccaccgtgtccgccacgcccatccccaagtcccaagtccaagtggagcagagcccgccgtaccaatcgcctccgcagatcggcgacccacccggaggcggaggaggaggcggcgatggcgtcgtcgcaggcgaacctcgacaagatgcagctccgccagagctaccgcaacgtctggcacaccgacatgaccaacgccatccaggccgacttcccctactgctgcctcgcgctgtggtgtggaccttgttgtcgacatgcttcganaaggctcttacaatgcatgtaagaatgttgtgtctgctacat

SEQ ID NO: 457825 - DNA, 408 bp, Sorghum bicolor
cgtccggctacggcatcgcgcctagccccaccctctacgccgatcacgtcaaaatcctcggcctagcttcatcaccaagagggccaatgcctttctccagtccatccagtttcaggaccacatgctccgcggcctcctccacgcggatagtccccttgtcgtctacatcctcagcgcccccatcaacttccttcacaggcatgatagctcacagcccatcaccaaagagtacggcccgcttgaggaacggatgaagaagctcatggctaagatcgctgagcagctcgagaaggagttccatgccctcaagtggaggcttcatgattacaacagaagagcagttgtcgctgcatgttgcatcaaaaagccatagaccaaaagatagagttaagacttagggagatcaac

SEQ ID NO: 457826 - DNA, 318 bp, Sorghum bicolor
cgtccgcccacgcgtccggccggcacgcttcagatggcggcgctgcttacccgagccggcgcccgcctcaagcgatccggctccggcttccacctccgctccgtcctcgcggggcacggactcttctcatctgaagccgcgacgaccgctgctcctgcggcctccgtggacgaccgcgcggtcgctgtcgcggccacgggcgaggaggatggggacgacctgcgcagccgcatcttccggctgggcctggcgaagcggagcgcgacagcggcgctcgacaagtggtccggtgaggacgcgccgcacccgcggggagct

SEQ ID NO: 457827 - DNA, 467 bp, Sorghum bicolor
cgtccgcaacaaacggctcctaaatacagacaggcttggcagacctgaaagcttatcagtggaagcgtcaccgactgttgggagtgattctgcatctgacattggtgatactgagcaatcaaggaagcaaaccgcgcagcattcgccttcttcagcagccaagccaggtcatgaggcggtcgggagcatcagccacagggctcctcaaagaaggcaatcgattgccaaggagggccaagatgggtcctcgtcatcatcctctcattcgaagtggaatcttgcgcagaaacaatattcaaatagcccattgataagagggcttcatggatccagcagactagaggaattcggtggaagcataccaccagcagcgtcaacggcattagtaaaactgacaaaccggctcaacttcctgaaagaacggagggcgctgctggcaagcgagatgcaaaagcttgaattgggtc

SEQ ID NO: 457828 - DNA, 406 bp, Sorghum bicolor
ctgaaccaaagaaaaagctttacgatttgaagatccagttgattgaggagatgggatggacccatgtctcaacctacgaaaagcagtggatgcaagtccgctttcccccaagtctgccaccgttttgatcgtgaactcatatgtttacaaccattctatcatcctgggttcagtagtggtcattttcattgttgggtgcgtcagttcattatttcgatggtcatttgcttacacttcagttttctcgtataaataataatataaaaaagtcaactaggcaagctactggatttgtgcgttattttttttttttcttttgtcatctttcgatcgcaattgactcatttatgtttgtgagagagcatacattatattatgggacgagtaaaaaatgattacgccttat

SEQ ID NO: 457829 - DNA, 415 bp, Sorghum bicolor
cgtccgattcttggtgtcaagttgcatcttttacctttgaatatacactttggagatttgggattgactactgatccgatgggcagttgtagtctgcttgatgctttccagtctgatcaagcttctgtatctaactcagagaaaagcttggccccatttgcttgtgaagatttgttggttacttgtaacttcggccatgaaaaggagaaaggtattaaaatcattaacctggaattcaaatgtgggtatgctattgccaacattgatgaaaggatgtttcacaagaagcacatgattccagaatataacactgtctctttgaacactggagattctatcagagataattcagcaatcaaacaaacatcaaaaagcaaatccattctaccgctttaaagaaacaaattctcgtatt

SEQ ID NO: 457830 - DNA, 395 bp, Sorghum bicolor
  unsure (1)..(395): unsure at all n locations
cgtccggcggcgaggttctgcaaggggaggctgccgatgcgctcctgccgccgggtgccgatgccggtgcgggcaccatgtgggagtgggacgcggtgctctgcccgtgctccactgcacctggcgccgtggaggagtgctgggacgtgcagcaccagctctccgtgtccccgccgccgccggccgtgccctccgccgtcgcagcgtcgtcgtccgggcgcggcaaggccggcgccgcgtcggcgcggagacggcggcgacggccgaaggcggtgaagaacacggaggagatggagagccagcggcgcaaccacattgccgtggagcgcaaccggcggcggcagatgaacgagtacctctccgtgctccgttccgccatgccgncctnctacgcg

SEQ ID NO: 457831 - DNA, 382 bp, Sorghum bicolor
  unsure (1)..(382): unsure at all n locations
cgtccgtgcaaatgcaacaaagaatgaatgcaaagaaaattacatttaggagcatcctagttatcttactgattacccaagtgactcctgctttccttactttcagcacccagttattgtgaaaaaagacacatcattgtaaataagaggaaataagcacccaaatttgagttgaagaggacttgaactaaggttcttggagtgtacacctatacctnccaccaactgacctcctaccatttagtctgaaagaattggattatttccactaatttccagttctcttttgtatctgcaactatttagggcattatagtcttttgtgctgactaccttccctgtttcttttaactataaactgggttgtgattttgcatgcatg

SEQ ID NO: 457832 - DNA, 401 bp, Sorghum bicolor
  unsure (1)..(401): unsure at all n locations
cgtccggtgcgccgtccaggggaggtgctccgtgcaccaggtgcccagcggtgactgccggaacgtgcaggagatgaagatcatctactgcaacccgcacgtgtgatctatctatcctccattgttatgcatgctagctgcgactggtgatgtcgtcgtcgtcgtatgcgtgcagattgttgttgctcagatcgatgtgagccactgcacggcgttagtgtcaggtgtgtcgtcgtcgtgctcgtctaggatctcatgtgtttggaggcactagacagaggttcaagatgtgcgtgtctctttgttcgggttcactgtcaccgagttcaataaatgagtagctttgttttaaaaaacatnnnnnacacttgcgtatacactgacaaagaaaaaagctaagg

SEQ ID NO: 457833 - DNA, 242 bp, Sorghum bicolor
ctcgcgcgcaatacgcgtcactcgcgcgcaatggcgcgcgcgcctgtcagcctggggacatgccgctcgcgatccgtgggactctcgcgcgtcgctgcatgggtcgcacacttgctgaagcgcagctaccggtggcagcggcacaactcgggagtctggccggcggcgggccgatcccggtctgcggggaccacggccgcaggcagcttggaacatgtgccgtgcggacgcatgttcgcgcc

SEQ ID NO: 457834 - DNA, 384 bp, Sorghum bicolor
  unsure (1)..(384): unsure at all n locations
cgtccgggagtcttaccatcgcgcgctgtgataggatcaccagtctggacttcgtgcgtgtgcctaccctgcgttccttccgctactatggctgcccctccaacttgcccttctccattccacgcgatgccgtgctttctgatctttatattcagctatactcatatgatccagtaccgatgaaagagtggaatatcgataagttgaggaaatctctcccggaggaattatccagcctcggtgttctcaccatctgttacaaagccctcacgggtgcatctgtcttgccagccgatggagccagtgcccagttgaccaatttcaacttacacagtttgaaagagctacaccntacgcatgttagaaatgaaagctgtcaaccta

SEQ ID NO: 457835 - DNA, 489 bp, Sorghum bicolor
  unsure (1)..(489): unsure at all n locations
cgtccgccacttcttggccagctgagcaattctcttggtgctgatcatggttacttgtttctttcttggctggaaactggagaagtggagagctctgaattgagattgtgatggtgtgctgaggccacttgacctgaatatatagtgcagtcgaactcagagtggaatggtgagtgcgatgttgcaagacgcgtctgcgagtacgatttggatgagactctgatgggggccgactgtgtgggctgaatgctcgtggtgtgctttcggtgcttggactgcacagaatccgtgctggcgcaccatgccgagcgngtgtctcgngaagtggcacgagggccccatgtttgttggggctaacgtggagcatgagggccagatttgttcagctgctgctgctgggccatcagatcattaccagatcagcttggatttaaagtttcaacaaaacgaagacaggggagcatggactgcatgcatgnctttgtcaga

SEQ ID NO: 457836 - DNA, 135 bp, Sorghum bicolor
cgtccggcaggcgcattgattcgatggatagcttttcaaatgcagcgcgcaaggggcgtgtcttctctgttgatctttgaactatgagaacaatgagattttgttttactgagctgttgccgtgccttgacaaaa

SEQ ID NO: 457837 - DNA, 246 bp, Sorghum bicolor
cgtccggtactgcacgcatagaatccacattcgagcaaacatggtactggtgaggagcgcatatgacagtaacgtgtgcatcgaccagggagaggctgacaccaactctgctgctcaggtgaatatgcccaccatgtgtttattctatctaccgtgctgaaattgggcttatgctgatctgctgcgagacgaaaacagtgttcatatattgtaaagtactgatgacaaacaggcccaattggtctt

SEQ ID NO: 457838 - DNA, 524 bp, Sorghum bicolor
  unsure (1)..(524): unsure at all n locations
cgtccgcccacgcgtccggactcatcgaccgcgcccgccggcaggctccccccgtcgccatgggtctcctctcaaacagtgcatgcgcggttattttctcccccttcttttgtgagaactttttttcccttgtgttgttgggataggattgggaaggagagcctcaaggtgggagatcacatctactcctggagggccgcgtgggtctacgcgcatcacggaatatatatgggtgatgataaggtgatccattttacaagaggaagtggccaggaggttggaacaggaactgtcgttgatattcttcttgtgagttctgccccaaaacgaagcaacacgccttgcccggtatgcaccaacgaaaccagtgataccagcacagagacaaacggcgtggtatcctcttgcctcagctgcttcctagctgggggtgctcttttaccgtttgagtatgcagtcaacccagcgctcttncttgccaaagcgcgaagagggaacgtgcactctgcgtgctctgatcctga

SEQ ID NO: 457839 - DNA, 318 bp, Sorghum bicolor
  unsure (1)..(318): unsure at all n locations
cgtccgcctccctgttccctccgctcgatccaaaccctaggcttggcgtgtgctactccactccagaacccgcccgaacctccgctcttctcgcccgagtggcgagtgccacaccgcggtggcaatggattcgacggggaagaccacggagcctccccagctatcgccgcaagcggcatccgcggcccagatcttcgcggtgctaggcaacgacgacatcctccgcgagatcctcctccgcctcgacttccccacctgcctcgtccgcgccgcggccgtctccaagcgctggctcaggcacgcctncgaccccgcatt

SEQ ID NO: 457840 - DNA, 459 bp, Sorghum bicolor
tccgaatcccggtcgacccacgcgtccgacgccaggggcgacagatgcgacggcgccgacgccggccgcgagcggctcgccgcgggcgccctcctcctcctctgcctcttcgtctgcctgctcctcctcctactctttcagtcctcctcctccgtcgttcctcatgtgctcctgtgctacaggaaaccctaggtgcttctgctcgaggaccccagctgcgcgtgccctcttcctttgcgccggcggctcagctccgcagctggatgtggcggttgctggcccctccacctagggttttgcagcggcggcggcgacgccgagtcatcccctcctcgcttctctctctgtgcgcacaggctcagccaccagatgtgatttgttaatgtatattgattgttagcctgctcttaggcaaccacagaacaagagcgatccaagaaatccttacaatttttggag

SEQ ID NO: 457841 - DNA, 401 bp, Sorghum bicolor
gattcccggtctctccaacgtaggtctgctcagcctgcggtacatctaatttgcacctggcaccatactctattatattatatggatatggattattagtaatcgaaagtgaacttctgcccaattctgcccactctgatgggaagtttcatgctgcagagttcataaatctagtaatttactgcttttcttcgaatattttaacgctaaattatgactactataagtaacatctgacaccattcaggttatcaaaactatatcctactgcactgaccagttactataataataataatgagttatggtaattctccctccagatgttcgcaaaaaaaaaaacttcttagtggcagctagctaatgatgttattctcacacatgtctaacgagaaatcttt

SEQ ID NO: 457842 - DNA, 67 bp, Sorghum bicolor
  unsure (1)..(67): unsure at all n locations
cgtccgcccacgcgtcctcacaaacatataacattcacatatcaccatacgtcgtcctctcttaana

SEQ ID NO: 457843 - DNA, 419 bp, Sorghum bicolor
tctccctgctgacccgacggtctctcctctcccgagctcgctcctcaccgcgccgccgccgtccttctccccagcaccgacaccgccatggaatagcgcaacttggcgctggcggtggcctccgtaagccttcctctgttgccgcctcctcccaccagtctatgtggcctcaatgaaaccctagcgtcgcgaggcaactctggcggcgcaaccctctggcctcttcctcatcagcggcaacggcgacggtgatgctcaacggctggatctaccggtatctcacgctcttcttctcccccgtagtctcgtggctcctcccccaagatcctctctcgatggccagtgtgcgggctgcgctagattgcggctctcctccagtcctcttcctctcaaatcccggcgggcagcggaacggtgtg

SEQ ID NO: 457844 - DNA, 237 bp, Sorghum bicolor
  unsure (1)..(237): unsure at all n locations
atccgggtcgaccacgcgtccgggctggaccgcggcgtggcagctcctgatgcggcagctagcgccgtccgacccgtcgacgggcgccttcacccgtacccctgcccgcttccccgccgtcgcgggggagcccagctcccggctccacctctacgtgggcctcccctgcccctgggcgcaccgcaccctcgtcgtccgcgcgcttctggtctcgagcccgnctcccggctcgtagcc

SEQ ID NO: 457845 - DNA, 300 bp, Sorghum bicolor
cagtgtcaacagtatgcatatgctttaatagctggctaattctcgcaagaagatccgcacgtaccactacaagcgcgctgtggaggagcgccttgcaactatgctggctatgtcaatggaaccattgcaacatcgctatcctcaggtcttcaacccatgtgtccaggaccacatcaattccccccactcacggcggttccaactgtggcaaaccatgggtcttattctccatcacctgcaccgggacctggagacgctggtggtgccatcccaggaggttccggcgtttcaccttcaaat

SEQ ID NO: 457846 - DNA, 286 bp, Sorghum bicolor
cgtccgggctgcatcacgttatagtatgcactgctccaatcagcatagctaaatctcgactaatgttaccacacaaccaaccactcctgggtgtggtggctcgtcgtgcaagtggagcccatctaccgacttcacctttacatgagccttacctgcaggtgagctcaccttactctcaggatcacagcgcttgtcgttattgagggcggactcatgtggttcatagcagagcacagagacgactgcacgtgctccttaactcgcggatgcacctgccgactatact

SEQ ID NO: 457847 - DNA, 98 bp, Sorghum bicolor
  unsure (1)..(98): unsure at all n locations
ccctgnggcagataacataacccgtaaaaatacagacagtccagattagaacagtacaaaaaatatgagaatgtacctaactctggagaagaagctat

SEQ ID NO: 457848 - DNA, 180 bp, Sorghum bicolor
cgtccgccctaacctctgcgccagacttaagactaccatcttgccgatagcggcatcagtcggcgagatggtgctgtacctgctgcatgagtgatgctacgagtaccgtctattacacgcgtacggaatccatgagaaccgccagagcgtatcagccggacgctactgacagctggacct

SEQ ID NO: 457849 - DNA, 419 bp, Sorghum bicolor
  unsure (1)..(419): unsure at all n locations
cgtccggctgctgcgcctttgttcccatgcgccgancangntgctcctctcacttgctcacgccatcaagaatcttcccccccccccctcttcctcctcgctcctcctgcctggcctctctctcccctctcctccctcctgtgagtgagtgagctgtagccgagcggctagcggagcgagtaatggcatggggagcttgcactgctgcgctcctgctgctgctcctcctcgccgccgccgccgccaccgcagcagcaggtggtaatggcggcggcgtgcattgccttcaccttgaggaggacgggagccggcaccggcaccagcaccacctcagcaagagagccttgcggcaggggaggcagaggcacccgcaccacctgaggtcaagagcccggggtggcgccacggtgctcgagctc

SEQ ID NO: 457850 - DNA, 183 bp, Sorghum bicolor
cggccgcgggccgagacgtcgtcgtcgccggctagtggcggcggcggtggctgtggcggtgccgggttcggcatggcggcagcaggcggtgcctccacgtcccagcagcagcgtcagctgcacgccgccgccgccgcggcagcgttgtcacggacggcgtccagcgcgagcccatcaagcggt

SEQ ID NO: 457851 - DNA, 474 bp, Sorghum bicolor
  unsure (1)..(474): unsure at all n locations
cgtccgagctcgataggtgcgctggcgaataccatcgatcccccnncttcggccgacgacgaggacgaggaggaggaggagcgctacgtgctcgtcggcatgcagaccagcggcggcgacaagatcaggttagtcgccgtagccgaccagcgctacgtggctatcaccggctntgccaaggggttcagctactgccccaactggttcttccgagagggcaagcgccaccgcctcgtcgtcacggcggcgttggccaacgacgggggcagcagccacgcagaggtcgtcgcctccaacctgcttcgtgggctgaagactaattaacggcggcagcggaaaggcttagtgagttattagtgatctgctcatgctattagctaaggcggcagtgccagactgccagtctcactgatctcccgcgagaataacaagctaatgacgggtaattagctagcagtagtatggattaattat

SEQ ID NO: 457852 - DNA, 439 bp, Sorghum bicolor
  unsure (1)..(439): unsure at all n locations
cggccgaatcccggtcgcccaccgtcgccaccgtcaaacctccggaaagctannattattgaaactggtgatgggattgttgctgaaaacaattcttctcgcaatgagcaaggctattcaattttcgtcaagaatttgccttaccatgccaatattgaaatggttgaggaggaatctaagaaatgtggtactataaagccaggtggtgtccaagtccggcacaataaggtcgatcgctatgtttatggttatgaggagtacgagtcccggcagtctatgcaagcaggaattgaggcatcttcggttcatatggaggacaaagtagtcggcattgaggctaagagagccaattcacgaggtggccgtttccaatctcgcatgggagcataccatggcgataacttcatagggcgacggagcggctatgtggacaatgcca

SEQ ID NO: 457853 - DNA, 161 bp, Sorghum bicolor
  unsure (1)..(161): unsure at all n locations
cgtccgcctttcccctccccctcctncgncntnnntnnnnttttcgacttcctctcgacccgcgcccagcgccatctcggcgaggctccaaccgcaccaaaccggcggcagcgaaagtgcnggnnggctganngtctgtaggagggcggcgnnngcggcgg

SEQ ID NO: 457854 - DNA, 460 bp, Sorghum bicolor
  unsure (1)..(460): unsure at all n locations
cggcatcccggtcgcccacctccggtttctaggtagctgccatcattcacatttncccatctagcagaccaaggaaggcttgcggcatgatcaacaagatcaacaagcttttgaataactaattattaattatcagatcaaaaccacatagagagagtaatccaggggcatgaacagctcttgatgcgtctagtagcagttaatattttgtgttctgatcctgaaaaatgctctgatcctgaaaaattgttagatgaatgtgctgatcctaatattgtgttctgtatctatgaaagttaatattttggttggtaataaaaggaatgttcatcatctatcatctattaaataataaacactactatatatgatttgaattatgtcaatctaatttagcacatgtaacttccatagcctattcactgaaagatattttgacaagcctctgttttttacagga

SEQ ID NO: 457855 - DNA, 245 bp, Sorghum bicolor
  unsure (1)..(245): unsure at all n locations
accggccggatcccgtcgccccgctccgcctgatagataattaatttgaannnnnttatgtaatgctgtagccggtgtcctaaagtcacttatcagtcagtccctaacgcgagttgtgatggttgcctgatgagatcttcaccttctaggctagttaaaaataccatttctctagtactattatgaatcatgaatttacttggatacttcgggtttaattcaggaatttgatcgtattctgtttt

SEQ ID NO: 457856 - DNA, 521 bp, Sorghum bicolor
  unsure (1)..(521): unsure at all n locations
cgtccgccaagtttgatggccacgaggcccctgagcagcttctccgcgtcccagatctccgggcaccgccgtctggttcctcccggccgccgccctcctcctcctcgtgctcctccgctggtcgcccatgggctcctaccctcccgtctcccctcgcggctccggctcggtcccggcccagcgcgccgagctttactcgaagatggcgcgtgacctcgacgagcgcggcgcggcgttcctcaagggcggcgagacgncgcagtcgctcacgctctcggacctcttcgacaccgcagctgacggtgccgtcgtgcccaggctcaaggccgccgacccgccagtgcgcgcgaatgtgctctatatggaccccaagttcgctgctgtgatctcgaaggctgtcaaggacgtatntcttccttattttgatcaagctatctggttccaaaatacgagcatgtaccacttcagcatgtttcacgcctcccatcacttggagcccattgtagcaaccgaggatgaga

SEQ ID NO: 457857 - DNA, 92 bp, Sorghum bicolor
ccgcatcccgggcgccccgcgccgaggaggagaggagaggagggggaggaggagagcgcgtataggcgagggggggggggatgccaccagac

SEQ ID NO: 457858 - DNA, 82 bp, Sorghum bicolor
  unsure (1)..(82): unsure at all n locations
cgtccgtcgacatctcgctgcgcaggcgctgnnnnattctcgcccgtgcgggcctggatcgcctactcagcagcgccgaaat

SEQ ID NO: 457859 - DNA, 447 bp, Sorghum bicolor
cgtccggatcccggtcgcccacctccgtgtatatgcagaatgatatgaaagcgttaactaatacggcgattttattatcgacggacttaaataaacgaaagggttgtccatatcttgatagcaatgaaaatattggaagtccaagtgactgtaccataatagaaaacccaaagatggctcatcaagcatctatgaaaaagagaaaacattctaaggaagtcgaatgctcagtggttcaaacggacacccaacatatacagacacacaacaaatcctcacaagtccatgtcctccaagaagatgatgagttttgggcatttgaggtcatgaaagttatgccaatgagtaatgaagagatgactgaattactattactatgtgactatgtcatggcaattcaggatgaagcgattttgaagtaagctacttgcttattttaattacttt

SEQ ID NO: 457860 - DNA, 111 bp, Sorghum bicolor
atgaggaatatgcacggcatgcaaggttatacactggcatccatgcccttaaacctaaaaataagtccaagactggagctatatctgagtcgaccacgcttgaatgtcgac

SEQ ID NO: 457861 - DNA, 386 bp, Sorghum bicolor
  unsure (1)..(386): unsure at all n locations
cgtccggcgggcgccggtgccggcggngaccaccccttncnntnnttagcctcgacgccgccgccgagcccaagccggaccgtgaccccgtgcagctcgccggcctcttcccgccggtgttcgctggcgccggcggcgtgcagcaaccgcaccttcgcggcccaccgcctccgcagatgttccaggcgcagccgaagccgggcgagggaggcatggcgccgcagccgccagccccacggcccaaggtgcgcgcgcggcgggggcaggccaccgatccccacagtatcgcggagaggctaaggagagagagaattgcagaaaggatgagggcattgcaagaattggtccccaacacaaacaagacagatagggcagctatgctagat

SEQ ID NO: 457862 - DNA, 108 bp, Sorghum bicolor
  unsure (1)..(108): unsure at all n locations
cgtccgtaaaaaaaaaaaaaaaaaaaaaaaaattaataatatactctatatatnntttagaaaaaaaaaaaaaaaaaaaaaaaaaaaaaaaaaggggaaaggggaagg

SEQ ID NO: 457863 - DNA, 451 bp, Sorghum bicolor
  unsure (1)..(451): unsure at all n locations
ccggccgaattcccggtcgcccacgcgtccgcaacgtgctgctatatgatcagagccnnngnntattccgtcggattcatctgttgccttggtgccaccggaaaatgtgggcactggtgatttctacccagagtctcaggtggcggcaacctatgcggtgttgcttgctgtggccttgatgctgcaattgttacccataggtggcagtgaaacgcagaactagatggctagttcacagcctgttgccatggtctttggcatggccggccgggcaacctattttctactagagttgctccatccttgtgttcccgcgctccatccattgggtatatcttatatttttttccgtgtcacatgaatgctatattatttgtagctcaacaaatacaattttctcccctttctgatgtatgaagttttccggagtgaatggtatcatcccctttct

SEQ ID NO: 457864 - DNA, 472 bp, Sorghum bicolor
  unsure (1)..(472): unsure at all n locations
cgtccgctgacgtcagcgtggagaacatggatcatgcttctagctcgtccttggaagtgaaatctgacgtcaggatggaaaacatggatcaagctcctagctcgttgaaatctgacaccagcatggagaacatggatcatgctcccagctggtgtagcttgggagaaaacggttattttgatgctgaccctgagtggttgatacacgcggaaagtgccatgcagcagtatgaggaacaaagcaggggatcacagtcacaagcaacttcccaagtgtttgatctgtatagcggggtcacgtcagctgtctagaagaggtacgtgtttattcgacgtggaaggaagagaaagatgctaactactctcagttccaaatntaacgatttacaatttgaatgatgagagtagttaatagatggctgtgagcgtgagagacccccccctccctctatagacaatgtttttnttttcta

SEQ ID NO: 457865 - DNA, 414 bp, Sorghum bicolor
  unsure (1)..(414): unsure at all n locations
cgtccgcccacgcgtccgccacgcgncgaataagctcccnnncccaataagaataaaggtataagtttggtaatgcttactacatgcagtgtctattgattgtattgttttggtccatacacataccaatctgattatttctgattattgctatcctagtgcagctttgagttcatttgcgctggttaatttaagactgcaagttttttccttctatacattatacgaaaattggtttcagttaaaaggcttgtgacctgtgatcatacattagtaattttgagatgacatatacatgagttttcataccttgcttgactgccaatgattagtttttcgagatgacatacatgagtttgcatactttgcttgaccgccatagccctaataagctattttctgtctatgttctgc

SEQ ID NO: 457866 - DNA, 80 bp, Sorghum bicolor
cgtccgcacagctgggcacactacttgcgagggactatagggttgatgatctgctctcaaggacatctcttaccacgatg

SEQ ID NO: 457867 - DNA, 227 bp, Sorghum bicolor
  unsure (1)..(227): unsure at all n locations
cgtccgtcggcatctcgctgaccccgccanannnnaatactcgcccgtgcgggcctggatcgcctactcgccgcgccgaaatgcgaccgcatctcctccgcttcctcttgctcctcctcctcgccgccgcctgcctcccgccgccggccgcgtgccggcacacccccacgcccccgccggcgccgcggcagcagcagcacaacgacagtggcaccaacgtgcccacc

SEQ ID NO: 457868 - DNA, 485 bp, Sorghum bicolor
  unsure (1)..(485): unsure at all n locations
cgtccgcatttttgggaacatgtaccgtngaaactncntaccactcacatctgcgacaaaaactgtaaccagaggatcctctatgacaaccataactcgctctgccgagtgagtggacagttttttccgctctctccattggagcagcaagcagtgaggggtatccgcaggaagcatgaagtggacagcaatgaaggctgttcctttaagcgcaggcgtggtgcacagctgcatccttcccccttcgagaggtcctactctgctgtgtctccaatcccgagccaggttggagatggcatggacctgagctagagttaatgagacttccttttcttcggccagccacctaattccgttctatctaccccctttcccttcgattacaggatggaactataagagcttccttctttgtagacttatatgaagggatatgagactccttagatgcaccgaataaatgtctatgtagtatctattctggt

SEQ ID NO: 457869 - DNA, 405 bp, Sorghum bicolor
  unsure (1)..(405): unsure at all n locations
cgtccggaagcttatcgagcagctggagcggaggcgtgcgcngnggnatccgccctggtgctcaccaaagtccctcgtgaagcccactgtccttgcaagctctctgggacccttggcaactcgaactcaagagtcacagcacgcgcgtgctcgcctcacttcacttggcccggctgtctccacgccacgctccccacatnccctttcccctcctctccactctccagtaggtagagtggcaagaaggatggtggcgacgatggcgagctcgctgctgctccggccgcgcgcggtcctgccacaccatccttctagttctagctccagccgccggccattgccagccccgcgtgtacagctgcaaccgatcatccagcagaaaccgggcctcgcggcgagaagcga

SEQ ID NO: 457870 - DNA, 429 bp, Sorghum bicolor
  unsure (1)..(429): unsure at all n locations
cgtccgcatatatttagcttaaattaccccctatctgttgctatcatgggctcatgctgcacaaccaccacagtacacattatataaatgatgggaaggggaagatacaatgtttacttccttatgattgttgcccaaatttctctactgtaaacactacacagcagaagatttgcttggcttcaggcggatttgatgaaccatagaacattgcgacataggccgaggctgcacaatactgctggtcgtcggacaagcaccgcgaggtcaagataccggtctgaggagcttgtggctgctgctgctgagtctgtgtctgcactaactctgcaagaaccagatgttacatcctcagaggatttgattgaagtngtgtcatcagaggaacttatcactgtcagtccacaaacacttgcggcgcataacact

SEQ ID NO: 457871 - DNA, 484 bp, Sorghum bicolor
cgtccgtcaaaagctagcagaatctcccaatcccaagtgctctcatccctggctatcagatctaggctcaagctctggtgtgcactacatctgagctccacaaagatctgatctgcccagtacttggcattggaaactatactgaagaaaactttatttgtccgagttccaggaactgaaggtataccaactagaaagacaatcgctttagtgcttgactctggcccactgcacctgggagctaggtgtcctcaattggcttcaaatgatatgaagaattctctgcgcgcctgtgtagtgcaatgctttgatctttgtcacataggagtatggaatttcagattccagaagaacagacgtttggggtctggtggtcaatcaacatgatgggccagctcggtatcttgtcagtcacaattcacgtgacgctcgtctgtgtctatgcaatttcggtgtggtatatcaaaatagaacatgaagcaat

SEQ ID NO: 457872 - DNA, 130 bp, Sorghum bicolor
cgtccgcatgccttgaggctggtggcaccgttccagccccgacagcatccttgctcgctccattgatgagtcattcggcagcatttctttctccaaagtatctgttggggaccattctatgccgttcaac

SEQ ID NO: 457873 - DNA, 579 bp, Sorghum bicolor
  unsure (1)..(579): unsure at all n locations
ccggtcgccacgcgtccattccagcaggttaattgcttccttctggctnnnnattgcacatggattctgattgtacaagaatgctaggacagaaacttgcctcccagatagcagtaacttggatgccatgctttactgcttgtacaaagggcctcctagctagcagtaacgtggatgacaagctcttctggttgtacaaaggttgctactgcccaattgctccctctatgatttatgcatttcatatcctgtttggtggtttcacagctgctacaaatatagatccacagatatttatctggcccattagtgacattttcatttttgggaaataaagacatcagatggccatgcattcatctggcctaattaatgctatgttcaccccatacaaactcacggtgaggcgcctaatattacctagaagcttaccattttcactttcggcagcttagggcatgatatggtcagacataattatctgctttattagtgccattttcgtatttatccagcaaggtttacctcttatgtatatggcttttagcatntggatacactcccaatagttagcactct

SEQ ID NO: 457874 - DNA, 550 bp, Sorghum bicolor
cgtccgcccagctttagttgcttttctttggtagatttcatatttcctttccattaaaaaatgttgatccattgatgttttcccagttatttaagaaagcacaaatcagtacttgatcgagttcataggaaaacttgttttgtccactatggactactgcagaattggatgttctagtgagtaacttttgtcgcttatttggtttgattatcttcatctagcattctaaattctctttcaatccaattttatgttttccttttttacaggcaacaaccctaatgtggatggatgctttcaattgattaccacaaacataggtcaccccatggcctacctctaataaactattggaattctgatatcctccattacatgtgctataaaagattgatttggaattatttatggattctctactaataatcatggtttcaaaggggactaggcgtccagacaagagcttggtgtgcgcctagatgcctaattatacttggcctttttttgttttgattcgggtttttgcaagtcactaaccatggttccagac

SEQ ID NO: 457875 - DNA, 294 bp, Sorghum bicolor
  unsure (1)..(294): unsure at all n locations
cgtccgctgtatcgtgtgcgtgtgaatattcatttgttcgagctttcagacnngaccgtacagacaagctacgctcgctcgatggtgaagacaggttgtagagaggtagaggaggctcggacagacatgtgaatggtgaatctcttttgcagagccgaggtggctttccatctccttcgctcgccccaatgctccatgctgcctaattgcctactagtagtacacagctagagcttgctgcatgactagtgtcctnctactcctctctcctgtcatgttaggctcacacggcag

SEQ ID NO: 457876 - DNA, 190 bp, Sorghum bicolor
  unsure (1)..(190): unsure at all n locations
cgtccgcccacgcgtccgcgcctcccctccccgcctgaccttgacacgngacggacctgcggctggcacgtcggcagccccctccgcctctgcttccgcttccatctacgcctacttcctccctatctctgcctctccccacgcgacggcgcaaccaactggataggacgaggcaccaaccggcgaacgg

SEQ ID NO: 457877 - DNA, 179 bp, Sorghum bicolor
cgtccgatataaatgagaattttgttgtactggcataatgaattgcttttgatattaatgtttctagaatcacaaatatcacaaacatctttaataacatttgtaatgattgtttgtcatttagaataattttggtcatattggaaatgacatttgtggttgaaagagaaaacttatga

SEQ ID NO: 457878 - DNA, 456 bp, Sorghum bicolor
  unsure (1)..(456): unsure at all n locations
tccggccgaattcggtcgcccacctccgagagtggctgcaaataaccagaacannaaattggaactgcccgcattactatagagaaattacgacaacgagaacactttatggtagctgaaatagagttgttaaaggctgagaattcaaactacaaaactatcatccttaatcttgaagctgatgtgaagaaccttaccagacaacagaatcttcagcttcgaataaatcaccatgtcaaaacaaaggaagagaatatcctgctgaaaaggcagaatgaagagctaagtgcaaagctgaaacagctggggggcatccttacccgtacaaaggaagagcttgcccgctacaaggtttcagatggaaaagatccacacgaacagatagaagaggaagagcttctgaggaagaaattagatgagagcgaacaagatagaagtcagctggtagaaaatcta

SEQ ID NO: 457879 - DNA, 372 bp, Sorghum bicolor
  unsure (1)..(372): unsure at all n locations
cgtccggtgctcgtcactggccacctcaccggtcgtgatggagtgcgccgcgagttctcgcagtccttcttcctcgcgccgcangagaagggctacttcgtgctcaacgacatcttccgcttcgtcggggacatccctgcccctaccgccgttgaggcgcaaccggaggcggatgctgtagtcccgcctgtggctgctccacttgccaacggcacagctactcctgctgtggagcctgccattcctgatgatcatgatgctgtgccacagcaggaaaatcatgttgtggaccgagcaccgcgctaacctgaggaggatgaggctgaggtttacaatccggcaccagaggaagtantggatgaggaacaacct

SEQ ID NO: 457880 - DNA, 381 bp, Sorghum bicolor
  unsure (1)..(381): unsure at all n locations
cgtccgtgagaaatcaatgggtgtgcgtctgtgcgaccagctctagctctcactcattgcgaggtggggatggcctagaggttgccaatacagaattaggagtgttgaagaaaactgaatttcagatctccattctatctcctgtcaaccttcgtggctccatcattgcaaactgcggatcaggtgattggtgtaggcagaggctttccactccccagcctccttccccaggcccgtcaagatccaacggtgcccatagcaataacgctgccagatccggtgtggcatgttcagatgccctgctcttaaattacatggttntccctcagtatgatgtctgctttccaattgatttagtcataaatgatgtttttcagttct

SEQ ID NO: 457881 - DNA, 393 bp, Sorghum bicolor
tgcgacccacgcatgcgcgcagtgctaggccgggtgcgcctcctgctgctactcgccaactccacagtgttcaaggcaacgccgctgccgccgcggagttctggcttcgcctcgcccacgccggcaccaccaagcgccacgtgggggatggcacctgcctcttctaattcaccaccaccaccaccacccccaccttcttcttctcttgtgacgacggcggcggcggctctcgccctactcgacagcagcaaccaaggccggatctgccgtgggaggaagagaaggacggggcgtctggaggtcggctatagaggccgcgagaaggaggcagcccatagggcgcaaacggccagcgaccaagccaggcaaccagccggcagcccccaagccaca

SEQ ID NO: 457882 - DNA, 273 bp, Sorghum bicolor
cggtcgacccacgcgtccgcccacgcgtccgatctagcaagcccgatccgtttatgagagcgctgcgacctataccaaatgcataggatatatgaccagcgactacgcgcgtgacagactcatctcagctttgcgagagattagacgcaccaccttacatggtataggatctgtgagtcgatagctgacatgtaggtgggcaaggctctaacgagagactgggcccctaatcagacacagaggcagaggatggctagacggagatggtagcac

SEQ ID NO: 457883 - DNA, 262 bp, Sorghum bicolor
cgtccgcctgactctaatcacgcctccagcggtgcttctgccatccgatgctgacttgggtctcgagtcctcagactactgtcatactgcacctaggtatcaggtggaagctagagcacggatcatcttcttggaggaggcagaggcccatcttcatcgaagtgcgtcgcggctgctgctgccccaagggcaaggaggaggtcatgagccaacacggagcatgagcaaggagcacagcggcttgctcagctggcccgagagc

SEQ ID NO: 457884 - DNA, 303 bp, Sorghum bicolor
cgtccgagttacacatcatcacgaggggccgtagcatcctcggcgaatctcagccatggcggagcactctatagctccagtcacccaggcgcgctgcccagcgcaccctcctcgcctccggccgccgcaaccggccgccgctgccggagtcgacgccaactccttcagctgcagatatcaccgccgcctccttggccccctcctccgcgcgccgatggccgccgtggacccgccgccgcgcggggaggccgcgcccgtgctgaagcggagcaccagcatcgaccggatccccgaggacgcgcg

SEQ ID NO: 457885 - DNA, 338 bp, Sorghum bicolor
cgtccgctcactggttcacatcactgtcatacacactcgaagactcactcgacatagcacgcggaaggccacaccaaaggcccaagcacaagagcgagcgcgacagccagccatgcagcgagccatgacgcaaacgacgacgcacgaggcgacagaggaggtgacaaacgacgtcaccaccgccgccaacacgaaggcgaaccggcaggcgaaacacccgacgaaacaaccggcggaggtcaaggccggcgtcaagaccaagcccaacaccaaggctgcccccgtgggtgctcccgtgttccctgccgccttagtagccgccgtagcagcagatgccg

SEQ ID NO: 457886 - DNA, 360 bp, Sorghum bicolor
cgtccgaaggaatggtttatacctcaaggttcaagttactctcgtagggtttcgagctaagcagcatggttttgctcgctctattaggcctgttaccaatttcaatgaagtggtgctgcacttcattgagtctatgtatgtgcatttggtaaatgtctggccaaaggtgattagagcaaatggcaaatttttgtgtcagttccattttgatgatttatgaaagcacaaactgttatttcatttccattttgaagacgcaaggtcaattccctcgcactgttcaagcaaatgcgtctactcacgagatgcaagctcaagtcgctcacacagttcaaacaaatgcacctgcttatatgccct

SEQ ID NO: 457887 - DNA, 476 bp, Sorghum bicolor
cgtccgggcggaggccggcagcggcgggactgccggcgacggcggcggcggaggcgggaacgtggatcgggtgctcttcaagaacctcgtcgagatggtgccgctcgtcgagtcgctcatggaccggagggtcaacccggcctactcgcgccgcgcttcgctggtctacacgccggcgccgcccaagaaggcgagtgatttgaaaagtgtcaaattgccacagagcgtatccgccaaaaagcggagagaccctggtgatgcagccaagaagagtgccccagattctaatggtgacagcggctcagttgtgccgttttctctgtccggagctgaaaataagcccaaggatgaggttgccatgctgcgcgagcagattgatgacctgcaaaagaaactgctcgagaaggaggaggcgctgaggtccgcggagagctccgtggctgagatgaatgcggcgatgaaccatcgatgactca

SEQ ID NO: 457888 - DNA, 479 bp, Sorghum bicolor
cgtccgaggtgctcaatggtcttctcattagaagtgatagagcagaagctgcatcaattccagtaggaataattcctgcagggtctgacaactcacttgtctggactgttttgggagttagagatcctatttctgcatcattattaattgttaaggggtcttcacagctctagacatcttggctgttgagtggattcaatctgggcaaatacattttggctcaactgtttcatactatggttttcttagtgatgtcctggaactttctgagaaatatcagaagaaatttggtcctcttcgatattttgtggctggaatactgaaatttttgtgtttgcctagctacttctatgaactagaatatcttcctgtgtcaaaggagatggctgtgaatggaaaaggtacagatcaagacaagacccacttgtccaatgtctatactgatgtaatgcacagtagatcaaagagagaaggaatac

SEQ ID NO: 457889 - DNA, 410 bp, Sorghum bicolor
  unsure (1)..(410): unsure at all n locations
cgtccgcccacgcgtccggaagcctcatcagtattctgatacagacaaagcttgctctggacatagctctgcatctgattccctggtacaagattgtggtattccagatcaacaggacttcactagctgggctacagactgcctaaaagatgatggagatgtcacacaaaatctaagcttgagcatctcttcgccacccctaactgataccaacctgaaccggagtcagagtcacagacagtttccaggcaccctctntggttggtcaaatgaccctcactattcattttaccctagtggcttgttacatgcacatcataaggctgaaaaccaggatggaactaccagagttacatggctacntggggacacaatgtgttttccatgggacagcttcaggcatgagggat

SEQ ID NO: 457890 - DNA, 549 bp, Sorghum bicolor
cgtccgcggacgcgtgggtcgggcgcctcggggatgagcagcagagcaggggaagagattggaggagcagggaggtcgccgcgctcccttctattctcgcgcgcctcggtttcgtggccgcgcgcgcgcctggccgcgcgggaaattctcccgctctccgatttggcgcgctcgcgctcgcgcccgcctatgcgccgcccagcgccgactccacgccgcctagcgccgcccagcgcctggaagcgcgactatggccatagtcgaggcgacgggcttcgcctagcgcctaatcgtgcctaatcgccgcctagtcgacgcctagccgaaccttgcaagggagaggtcaaagaccaatccttacccccaccagaatgttacaaagggagggtcgagagatcaatcccaaaaccccacgcagcaccaaaacctacacaataataaacatgataaagttgttaaataggtccgacaaaaatgaatataatggaatcttttcattgtagctgtcaagcattgtcagacaatttctaggacattatcgatttggga

SEQ ID NO: 457891 - DNA, 172 bp, Sorghum bicolor
tcgatgagtttacacaaaagtattcctctattgcaccctcctttgcctctacattttcaggttcaggctctggactcatctattcctcaattatccacatctctccttccattacaccttatacgctgtacattctgaacctctgcttaacagaacacgaacctgatgatct

SEQ ID NO: 457892 - DNA, 178 bp, Sorghum bicolor
cgtccgcaagcaaatccactagtgtgcttacttgttttagctgcccggttttcccacgagcatccatccttttgcttggtgattcctacggaggagtacatatatctattgtatgtattatatactttttgagtagtagtaacaatatacggagtacgtcctgaaatttggcttaaaa

SEQ ID NO: 457893 - DNA, 171 bp, Sorghum bicolor
cgtccggagtatatgaataaagcctcccatgaggacgaagttgtagcatgcatttgtaggtgctagctgctacttgctgtacacctattctttttttttttttttgctttgcgtcattttttatgtaatgctgattacatgattttagtgcagtttagtttgttccctctt

SEQ ID NO: 457894 - DNA, 436 bp, Sorghum bicolor
cgtccgaagcacaaggacaaatgtgccaaaaaccaactgaatcgtgaaaaagttcagtttcagcagcgtactggatctcggtgttacattgcacaagcctatgtcgtgaagcaagaaaaatacaaagacattgagctcactgctgttgatctattcaaggagttgcattgcagcaaaactaaaggttttagtgaacctgtgaagaaagctatagatgatatgcatgcccaggaagcccttccttcaccatcagtagaagatgggcagcaagctaagacttcaatagaagttgtttccaaagtgctgccgaagtcaaatacattccttcgcaatgttggaattcagcagcctgctgccaagacaaccaatgtggtgaaagaactacaagctgaattggatgcaaagaagctagagtctataggacttcagcaggagc

SEQ ID NO: 457895 - DNA, 559 bp, Sorghum bicolor
  unsure (1)..(559): unsure at all n locations
cgtccgcccacactcgccctcacccacccggccacccgacctgcctgcaaaagtgccaactgccacccactgccgcgccgccgcgccatggcttccccgtgcccctcctcgcccctccacccgcaccagcaccagcaccagcacccgccgcctccgaatcctcaccaccaattccaatccccaccaccttcgatgccaccgccgccgtcagcggcgctgcctaaggcgttcgacctggaggttactgtcgtctccgggaagcacctgaagaatgtcaactggcgccgcggcgacctccgtgcctacgccgtggtctacctcgacccctcccgccgcgccgccacccgccccgacgatggcggcgggtgcaaaccaacctggaacgagcgcctcgtnctcccgcttncgccccacctctccccgcacgacccctccatcctcctgtcccctgacgttttccactctaagccctccgattcgcccaagcccctcgtcggatccgnccgctctcctctccgcgacctcctctaccccgcgaaccctaaccctagccacgatc

SEQ ID NO: 457896 - DNA, 475 bp, Sorghum bicolor
  unsure (1)..(475): unsure at all n locations
ccgcgtacggctaacctgtcttttgcaggtctactattgttcactcagctccaattccagtcaaggaacaaccccgtatcggcccatctagggagaggccttcatctgatgagtcctacagaaatcctcgggagacagaaaaatattctggcaatctcccgagaacgtcacaggctccacaaagagtgccaacagcgagaccaggaagggttgttggtccagtaatgccttaccaaaatggagacaccaaagacccctatgacacacgaaggttggcaatgaactcaggatatcctccccaacaacaaatcccacaaacatttggttattatcagacacatggcaaaccagcttgctccgagccatcacanggctgaaggtacacgctgcatcagcaggcctatgcctgtgcaaaccgtacagctgcattctatgttgctctggacatgagagcacccncttttcatcatctatc

SEQ ID NO: 457897 - DNA, 350 bp, Sorghum bicolor
cgtccgccctctatttcgcagtttatctctcaggttgtccttccggttctctttctctttacgtcactgtctacggcacagtccagcccgagtcagacacaaaggcaccgacgagcgtgcaggaggtcatgcacgaggcgtgccgtgagccggggcatcagccggagcatcagttggaggatgtgtacctgcgcgtagacatggggtacaccaaggcgtacgtgaaggaggcgacacaggaggtcacagctgccgagaacgttgaggaaggcgacccgtgacggcactcctcgtcgcggtacacgtagttgtgctcctacaactgctactacaactactacacaagctac

SEQ ID NO: 457898 - DNA, 409 bp, Sorghum bicolor
gcgtccgaaaaaaaaaaaaaaaaaaaaaaaaaaaaaaaaaaaaaaaaaaaaaaaaaaaaaaaaagaaaaaaattaaaaaaaaggccggcctttctaggggaagcgagctaacttacacgtgcttgctaacgtctaacctattatataatgtaaaattaaaggcgccccccttttaaaggttcaaacattcctttcccctgggaaaaccataatttttttctatttaatccccttaaatcaaatccccggcccgccatttaacaccattgccctggggaacccccgggtccccccttcctaaagcggttaaaacaaaaccccttttcccaatctccctttaaaagaaaatgccccccccaatgcccttttccaacccctttcaaaccctatattataatcggcccccccc

SEQ ID NO: 457899 - DNA, 445 bp, Sorghum bicolor
cgtccgctcatccagcttcgttgtctacaagcttgccttctgctgcaagcacaacaacagctaatcctacttcacacaatgctccatccatgattcagatgccaccaccatttcaagggaatttgcccccttaccaatctggcaccagcttacagtcatggaactcgtcacctatgccatcatcagcgaatggcactggccttacaatgccaccaatgtactggccaggatattacacaccaccaactgggtttcctcatctgcagccgccaccctttcttaggccaccacacagtttggctgttccacaggccctgcagcttcctatacaatatcctggacttggatctttacccactggatttccaagtatgccagagcttccttcttttcttcaacctggtaatagtaatagtttaagtcaaacttcaggtgtacctacatc

SEQ ID NO: 457900 - DNA, 99 bp, Sorghum bicolor
cgtccgaaaaaaaaaaaaaaaaaaaaaaaaaaaaaaaaaaacaaaaaaaaaaaaaaaaaaaaataaaaaaaaaaaaaaaaaaaaaaaaagaggaaggag

SEQ ID NO: 457901 - DNA, 428 bp, Sorghum bicolor
cgtccgcccacgcgtccgcattgcaccacacaaagattgggagagatcacagttcattttgaatcatgagggactacagcaggctgatgcttctgaccagcctccatcacaatcccctgggcatttggacaggggcagaaagcctgtcagaataaacattgcagatattgtttcagtgtcagcatgtgctgatttgactttaccaagtggtgctggcctctgtatagaaactattcatggtcctacattcttggttgccgatagttgggaggctcttgacggttggctagacgccattcgccttgtctacactatttttgcaagaggaaagagcgatgtacttgccggtattattactggttaaatggcttgctgcaaatgcaaaactgtcaccggagaggcgcaaagttttggagattctgcagcaa

SEQ ID NO: 457902 - DNA, 424 bp, Sorghum bicolor
agtgcagagacgcgtgatcatgcgtattgacggctaagtctacctggcgggcatggtagatgttcaagcttcttgtagcacccgatttggcattcagaaggtcataatttggtaatacctgccaaactgatgtgatcttacagaatagctcttttatagtttcagaaaaatattacaatgtgcatgcttgctaacactgtttcttgttgttgtctttaccatgtgcaaaccagaccccatcatccctggcatgatgacataacttatctccaccaatgcaaaccagagtggtcatctctattgatggctaagtctacctggcgggcatggtagatgtccaagcttcttatagcacccccatttggcattcagaaggtcataatttggtaatacctgccaaactgatgtgatcttacagtcatat

SEQ ID NO: 457903 - DNA, 250 bp, Sorghum bicolor
gaatgaccagggcgtccgagacatacatgtgtgctcgaccattcacattccttgtttgatgcgccctttggaatctcaggcaaccaggcctcaacagtaatgtctggccaaggatcatcggttcaacaatctcctctagctgcccctacggctggatttccatctcaagctactgcaaatccgcaaggaatcagtggtattcaaggagcagcctcttctactgacagtaaattcagtggcaggaaagaac

SEQ ID NO: 457904 - DNA, 458 bp, Sorghum bicolor
cgtccgctttttttttttttttgaaatctgtggatgacttatgtattaattaagacaaaacgtccatctgcagtagaaacacaaataacaagaaagggcatctagagaacaacgatgcaagcaagcattgtactcgaactctgttaactaaggcctatggcttgctgctattcacaatgttagacgatgacaacgacggctctgccatgatcagttagatacagtacaactggccggacggaggggcgacggccggcgatctcacttgtcggagatcggcgggccaccgtagtggacgctgtgcatcttgagctctgtcggcatgtcgatctccttcagccatgctagacggccttggccatgctccacgtccaagccgttgaggtcatcaaccggtgtcatctacgcccgtcgaaatgggtgtgtatggtatatcgggtagtacgtgcagtccctgt

SEQ ID NO: 457905 - DNA, 171 bp, Sorghum bicolor
gggaagacccaggcgtacgcactgcgtgcgcgggaagatcgtgtccaacgtggacctaggagcatctacgacgtacatactcacgacagcgctaccaatgtaggaagctcgatgggcgtacaggtaatgtatgagcgtatgatgctcaacaaggccacctgccaacacact

SEQ ID NO: 457906 - DNA, 317 bp, Sorghum bicolor
cgtccgaacttatttatagggttttcggtcatgccttttgtgatgtatagctgaagtgttttccctgtttgctttggttcccagatcccaagagttttcccctccttgttgagagctgctgatgttagagagaacgagaacctgtatggattgagttgaacaatcttagtcctgtttgggcaatctgggctgcgttttgactgatggttgtgtgccattcatgattattgtgcttgaagcagtagtattcttttccaaaaaaaaaaaaaaaaaaaaaaaaaaaaaaaaaaaaaaaaaaaaaaaaaaaaaaataaaaa

SEQ ID NO: 457907 - DNA, 451 bp, Sorghum bicolor
cgtccgaagccccccacactggctggcggctggctggcgactggcggctggccgctgcactgagcagtaaccaccacagtcctcctcctgccgtccagccacgccgagcgtctcgcctctcaaagattcgattccttcctccggtcctcccacatggccggcgaactgcgccaccgccgcgtaccgtcgtcggacggggacggggacggggacgaggacgagggcgtcgtcgcctcctctcaaagactccattccgcctcttcctccgccgccgatggcaacggtaagggaaaggccggcacttcgtccggcggcggcgagggggcggagccgcggagggagaaacgggacgcgcctggggtggctgagtggggccgcggctggatggccgcgtgggggagttctttcagcgcatgcgcagcacctcgcacccgtcagctgccccgtcgac

SEQ ID NO: 457908 - DNA, 457 bp, Sorghum bicolor
cgtccgaccacgcgtgcgatcttctgagatcctctatggcaatggtttcgatgcgctgtttgttaggtggtcaaaccggtctggcgccacaactatcaatgggcagaccgaggtagctatagacatcgatggctttccaccccatacattcagtccaagtgctttaggatctttgcttgagcgccactgcagcatacaagcttatagattcagcatgactaggggcctatgccgcgtcgatgcatacacactcagcaagtactctatcccaaagtccggtgaaatcggcttacaatatacaggcccacacggggtgaccaatgtggcgttgactgtcacaatgacaacgtacaactattccgaggctccggcatttgtagagaatgaattccatgccgatccagttactcttggctcagctgattctgacgcatactttgacacatatgagcctggc

SEQ ID NO: 457909 - DNA, 482 bp, Sorghum bicolor
cgtccgggaagctgacagtttaagggccacctacattcgtaggctaacttctgtacttatccagcatgttccagctttctggagattagctttatctgttttcagtggaaaatttgccaaggcagcttctggtaatgtagtttctgattctgacatgaatgcaaagccggctgcaaataagaacgatgacaaaagtggagaagtaaagtacacaaaccacactctcgatgaagttgctagtatggttcgggctactatatcggcttttgacactaaggttcagagcaccttccgtgattttgaggaatgcaacattctttgtccatacatgagtgacactataaaagaaatcgctaaggcctgtcagactcttgaagggaaggattcgctccaacctccgtaaaaatgttgcgcacccttcattttgaaatgacaaagctttacattctaacggcttgtcatggatgcgggcaacaacttag

SEQ ID NO: 457910 - DNA, 486 bp, Sorghum bicolor
  unsure (1)..(486): unsure at all n locations
cgtccgctgtgagtaggattgaaattagtttgctaatcaattacctcctgttctaggataccaaatggtcaaagtgcatccacacataagaatctggagattcaaagtagaatgcaatgcaagtaacttgcaaactttgtctagcaaatttctttcctaattttctgttactcattgctcttagctaattttcaacttatcatgtctaaataacaatcatagcctgaccatattcatatgccttctagattgcaattgtgaaaagcatttttgttttcaatgtggtattgttcataggtgtggtgacaaaatgcctaatttcgttgatagtgacaagagtattttccagataaatgtcctaccggcgcacaagcaagcgtgctcaattaagctgccgtgtcgcactatgagcatgcccaagggaggcagcgancagtgtggtgcaccgaaatggagtggtgcttggcgaaagatgagaatgagaaa

SEQ ID NO: 457911 - DNA, 440 bp, Sorghum bicolor
cgtccgatgcaacctcatgggtgggcagaaaaagggaaatccaagggcaatctccaaaattgtaaaagaacggactggtgaaattgacaagaagaggtcacttattacacctgtactgcgaatagtcacctcttttacatcacttgtggactcggctgattttcttgaggtgaagaacaagattgtacgagagatagtggacttcacaaagcagcatcagtcggtttttaatagcattttaagggagaacatgactggagctaatttgctcacattggagcagcttaaccaatgggtttctattctcagcaaggtttgggcgtatgaggaaaatgaggaatgcagctatattcaagatctattttccttgatgcattctctttttagccctcgattttgggtctctaaattttatgcaatcaccaaacattattgagaat

SEQ ID NO: 457912 - DNA, 508 bp, Sorghum bicolor
cgtccgggaagaaaggcacttaagtggggtctggccaatggatgatcctgcgcagtttatccgtgcagggaccagtccaaatcagagacatggtcgtttcgatctcctggagaatcttcagagatcgtcatcgtttgatcaccatgaacatcttgaccgcagcttatccttacatgaacgtttgcataggggaggtcaaggtattcactccctagagcggtctggttctttgcctggtggtggtcctggaccaaacccagatgtcataaatgccctagcacgccatcatggacttggtcagttggaaacacatggtgatatataccctttaggccaaatgcctatgcttccttcaggggttcatcctcagcaacataggcttcaggaacagcttcctggttctcacataggaaggcttgaaaggcactggtcggatgccaatggacagttgcaaaacagtctaatggaatcttcacgcatcaaccagttgcagattgaagcggagaag

SEQ ID NO: 457913 - DNA, 441 bp, Sorghum bicolor
  unsure (1)..(441): unsure at all n locations
ngctccgtccgcccctctccatctccctctgcctctctctttgcccacagcttcccgcaccctccggttccgcccctcttcaccggctcctcttgcctctcgcgactcgctactcgctaggctctagcccctggtctggtcctcccgctgtgcctgtgcgttcacagcggaagcgcacaggcgcgagcagtaaggggccgctggaccgaggaggccgctggctgctctgccgcgctgcagcaaggctgcaaagctggcggcttctgtccaccgggcgtcgccataaacagtggagattcccatccccattttcccaattatggatacccagcgtcgaccgggggagcactgctgaggccgctcgcccgcctgccattgctcccgtcgagggtcatagcttatcctacatattgtagctcggcaacctgttcaagaaaatga

SEQ ID NO: 457914 - DNA, 410 bp, Sorghum bicolor
cgtccggcaggctgtaaatgaagagcatcagcaggaaaaatgtgatcaagaaaaagaaatatatcttctaagatcacaaatatctgaacaaggacttgtgaactatcaccaattagaagaaattcacagaataaatcttttgttggatgaatcaattcagacatttctgcagaaggaggttctggaacagaactatgtttctttacaaaaggcaatgggagaagagattcatcggctggagtcacaattagaccagtcaaaggtacattttgctcatttattgagtcagattcaggacaaggaacagtctattgcaaagctgaaaaatgaagagttcaatgttttgtcaagactgatgtcagaagttctgaaggcaaatggtattcacgtgaacttcgaatggatcaata

SEQ ID NO: 457915 - DNA, 350 bp, Sorghum bicolor
cgtccgagggccaccacaccagtgcggatcaaattgatccaggccgagtctctcgaggtcattgagggtctcatgctatctgagcagagggtttcgttcccgggtggccagcttttcaaggtgcacaccctgaaggcgaccctgaaaatgcaagtgttgcagcagtggaaacacttgttcgacgtggtagcacatctacctgtccttaggagcttggaattgacaagagacgacgacttctgcgctgatgaggaggtggagctgcccatgccggcctgcttcggggactccctccggcacctgcgtctgaacggctacagagccagcggtgcataagtggctctggtgac

SEQ ID NO: 457916 - DNA, 167 bp, Sorghum bicolor
  unsure (1)..(167): unsure at all n locations
accacaggactaaatgctcaaaatcatcaggaaacattgaagaacttgaggagagactctggtngaggaatggtttgaacattatgtaaccgaagtcatttgagcatggatgaactccggatgatgcatgttgtgaaatggaggaaagtctaccaacataacagatt

SEQ ID NO: 457917 - DNA, 133 bp, Sorghum bicolor
cgtccgaccagatacataactaccgtaacagcgcatacccttgctcctattccggttcttctcgggctcccgaccgtggcagagcgaaagagagggcgacagcggacgttgaggacatgtggttcgtctgcgg

SEQ ID NO: 457918 - DNA, 389 bp, Sorghum bicolor
ttccgcgaacgcttcgagcccggacgagccctataagcccgcgaagcccaagcccacccgcgaagcgtatcgcgacactggacatccacatatctctcaccgtcttctttccgatgccgcctgcaatgaccttcgacgtactcaccgtgcggtatgaggtccaccacgcacacccgcaccaccaccagacactggggctggctgcccgcgttccgctgatgcccatgctagttctccaaccctgactctatgcaccaccatcgtgctgagactaacactatactgacaggctcgccaacagcgtggttcataattgaagtagaggaaccacccatgtctgaatgatgatcaactcctaaagcttaaaacgttgcaaaggatactccaag

SEQ ID NO: 457919 - DNA, 480 bp, Sorghum bicolor
  unsure (1)..(480): unsure at all n locations
cggacgcgtgggccctccgcccctcgctccgtgcccgtgcctccccgcacgatccccacattccttcgccggctccgcgctctgctcttgttgtgatcgttagtacaggtgcgatggcgatgaggtcggccgtggcccgcctgattcgctcctcctctgcctcgccctcccgtctcagctcgtcgtcaatcttgctgaaaagtggcaatgcattcttcagcaatgctacacccagtgatcagaagcacattgaggagtcttttaatgccacacccagtgatcggaagcacattgaggaaccttttgaggtgaaggaggcagaacctgtgaatgcgtcaaaatcttctccagagaagctactggttctaggganggagtgggtttgttggatcgcatgtttgcaaagaggctntggacaaagggattagttgtctctagtcttaagagatctggaaagccatccttaaatgaaccttgggc

SEQ ID NO: 457920 - DNA, 478 bp, Sorghum bicolor
ccggtcgaccacgcgtccgcatacatggagagggcagatttgttctcatttttctaaggtttggttccttttcagtttgacattttgtttgcctgatgggtggcaaagcatttgatgttgcttttgagtgacacttcagagttcagtcacaccctatagttttatcaagtgaaactattccattttagggcctgttcggttaaccattcccagcctggaacggtccggaatatttccaaccaagtataaaatatcgaatgattctaggtccggaacagtttcaggccattctggagaaacgaatggtttcaggcccagaaacgaacagacccttaagatagcactcatctgtactaccataagcaggagaatgcaatagtgaaatgtgcatgcaggggaaaaagtcaataaactaccttctctttttctgcatccctatccagcattgtaccacagaatttacatatggacatatgat

SEQ ID NO: 457921 - DNA, 442 bp, Sorghum bicolor
  unsure (1)..(442): unsure at all n locations
cgtacgggcgacgctcgcgcggtggcatccaccactaccaccagccccactggccgctggggcagccgctcggcctcctactgcccgcccgctcgctcgacggcggatcccgcgccgagccgcgaccgtggtctccccgcgcgcgttcggcggcgacttcgatggcttcgtacggcgcgcgtggcggagcgccaacgcggnggccgagcgcctcgccttcgaggcacggaggccgcgaagcggctggacggcaggttctcgatctcccggaggctcgcggaggcctcccgtgccgcccgcgcccgcgccgttggatcgacgccgagctcggcatcggncgggggggcgctcttttccgtcgacttcttccgaactggccaggtatcgggaggagacaatgacttcatggaactcccatncggagagcatagctacaatattt

SEQ ID NO: 457922 - DNA, 304 bp, Sorghum bicolor
tcgacccacgcgtccgcagaggcgtgagctgacgcctggagaccatcatggctgctgacaggacggtcaagaccatgatcgtcggctagctccttgctctgagggcgactctcgacgcgcggctgacggccaccacgctcacacttcacaacctgagcccgaaccgtgcgtggccgctgttgaccctgaacactgggttactggtcatctacgagaacacggcccgacttgacggtggcagtcgcaggctcgtctccttgcgcttaccagacagcttctgtgccggccgcttgatggctctcac

SEQ ID NO: 457923 - DNA, 392 bp, Sorghum bicolor
  unsure (1)..(392): unsure at all n locations
gaccaggcgtgcggatgcgttcgaacctggctcattgctagccacaccaccagccggttacttggttcttcgtacgtacctggtggtactgcaaattagtccgcagaggcacgagaaaattctgtacctagctagctccctcgtcgcctcgctccaccgtacctagctgcatgggcagcggcggcgaaggcagcgacggcggcgccgcgagctttcgggaggctcatgacttcagcaacgtcgcgtccttctctgagctgccgttcctgcgctccgccccggcccgtgaaagctccaacaactccggcatccgcatcttcggtaatgacgtcccacattcaccgccggagagaaaggctaaagaggccaccgncaccacgcccgctactacc

SEQ ID NO: 457924 - DNA, 416 bp, Sorghum bicolor
cgtccgcagaatcgaaactttttttcaagcaagcaacaagctggcgaccctctgcagctagcgatcttatgatatctgtatcatctgaactgtctctacgaaatccaagtctgggtgctcgagttcctcaactgcccgttcaggtattaacactcgaagctactaatatgacatcagaaaaccttacgttaactgtcattactcctgaagcatctggttcttcttcagttgtatccttaaactcagatccagccaccccaaatggttctttcgatggtgttaatcagtcagaaaaaagatctggattgggaaaacatggaatcggctttcaaagattgaattctgtcctagctggatctccacaagaaggtgacaatggaggaaatagaatgagtaatgcttcagactgtactcat

SEQ ID NO: 457925 - DNA, 508 bp, Sorghum bicolor
  unsure (1)..(508): unsure at all n locations
cgtccggtctcgtcttcctccctccgtcccttcctcccccaacagaggcacagagcagagaatggggagcggcgagaagaccgtcaccgcttatggcgagtacacctatgctgagctggagagggagccctactggccaagtgagaagctgaggatttcgattactggtgctggtggtttcattggatcccacattgctcgccgtctgaagagcgagggccattacatcattgcctctgactggaagaagaatgagcacatgaccgaggacatgttctgccatgagttccaccttgttgacctcagggtcatggacaactgtctgaaggtcacccaaggtgtcgaccatgtctttaatcttgctgctgatatgggtggcaatgggttcatccagtccaatcacttctggatcatgtacaacaacaccatgatcagtttcaacatgctggaggcttgacgtatcaatggtgtgaaaggtcttctacgccttangtgcatgcattaccct

SEQ ID NO: 457926 - DNA, 458 bp, Sorghum bicolor
  unsure (1)..(458): unsure at all n locations
cgtccgcctgctccatcccagctcagccctctgctctgcttctcctccgtgctccggcgcctagcagcctgctcctgcccccgccgccgccgccgacgccgtgcagggacagccggagcaggagcagcgccgcccgcctttaccgtcactcaccatggccgacaaggagaactccgccgccgctgctgttgccgccgccccgccgcgcctcacccgcgccgcagccaagcgcgccgccgccgtcacggccgtggccgtcgccgccaagcgcaagcgcgtcgcgctcacccagctgcccacgcaccccaacgccgtgcacgacgactactacgacgacggcgacgacgacgacaagcccgtcaggaagcagcagcacctcctcgtccccgcctctgacgaggaggaggcggaggatccgcagctctgcaagccctacgcctncgacatctactcctacc

SEQ ID NO: 457927 - DNA, 449 bp, Sorghum bicolor
cgtccgaaagctaggagcagtactattccacgaagacctgattcgtctttaaaatcatctgttcagggttccaccccggtgaggcgtatgaagcttgttgatagtccttccaccaacccaaaaatcatggaacgtaattttggacagagagacatttcatcagcatctcgtgcagcgagagctaataattctgcaactactaagaaaagcaatcttacagaatcagctttagtgaaagatatttacactacatctcaggctgttcctgcacctgttgttgtgcccagagacattttagaggacaaaacagtaagcaatgttcgtagagggactggagacacagctgcagccccagatgattttcggaccccttttcacaaaagaaaaccctcacttagtggcagtgctgcggatagtgatagctcatcagtatacactgaacctgatgt

SEQ ID NO: 457928 - DNA, 421 bp, Sorghum bicolor
cgtccgaatcactgtcttgcaattctacttcacctcctatttcctcagagcaaggggaggaaagttatttacacattgaacctctgtcgcctagtaaagccctccgtatagcaatgctcaagaggcgttttgctggaacaatcgtgaaggcacaacaaaatgcacttctggatcatggtaaggaaatagaccttgcaaagttgcagttggaaaaagagaggctggaaaaaaggcagcaagaagagaaagcaagaattgaggcccaggtaaaggctgctgaagctgctgcacaattaaaactagaggaagagatgaggaggaagcgcgagcaggaaagaaaggctgcacggctggcactgcacatgatgaagaagactgttgatattgacaacagcgactttctgaaagacctggagaactt

SEQ ID NO: 457929 - DNA, 255 bp, Sorghum bicolor
cgcgtccgactccgtgcactgcgcctgcgcgctgcaccctcaccgagccgggcgcgtcatcctctccaaccacgcctactgatcgcattgtggagcactggacctgtggtgctgggatgtgtgcgtaggccgctgaaccgcgcgcgacggggctgttgtgtgaggtgcttttgtggtgtgttgtttgggcgtgtactagggtctctactctctagggagctgtattgaattgaaccgtgttgaagcaactgggtt

SEQ ID NO: 457930 - DNA, 438 bp, Sorghum bicolor
  unsure (1)..(438): unsure at all n locations
cgtccggaaattgagctatatgaggaaattaagtttgagccaaatgtgatgtgtgaacatattgacaagaaacttactttccgttctagtcagcttgaagatggagacatcatctgtttccaaaaggctcctgttccagatggtgatacacaagtgcgctatccagatgttccttcattcttggagtatgtgcacaataggcaggttgtgcactttcggtctctggacaaaccaaaggaggatgatttttctttggaattgtcaaagcttcatacttatgatgatgttgttgagagagttgcacatcaacttgngttggatgatccctcaaagattcggcttacatctcacaattgttactctcagcaacctaaaccacagcccattagatataggggagtagaacatctactggatatgcttgttcattataatcag

SEQ ID NO: 457931 - DNA, 458 bp, Sorghum bicolor
  unsure (1)..(458): unsure at all n locations
cgtccgcccactgcgtccgaaagctgcatggacagtggagtggtcgatgttaacatatccgtgaactaagtgatgcatagagtgaacgatagcatgaagcctcccatgacggaacgctcgcagtcatctatacagatccatatgcacatccataggtgctacacatggtatatgtgatatcatatgtgcgacagctattttgggaggcacagcttatggcacaacttatgacatgaatgtatatgagaagatagatggatgaagagccttatagtgttaacgatgcggtacaggctgcngtgcatactgaagttcattaagatgtgcatgcggctaccgatgcaaattcctatcgtatgtatatgcattatcatatctaagatcggacattgacgccgacaatggcctgaactatctgctgaacttgatacagctgttataaaattcgttacatagct

SEQ ID NO: 457932 - DNA, 363 bp, Sorghum bicolor
cgtccgcgaattttgttattagtccccaaaaggtctcttcggcggcggcggcggcggtggcggtggcgatgtctctccccccggacggcggcggtggcaccggcgacgactggttcctcgactgcggcatcctcgacgacctcccggccgcggcctgcggggccttcccgtgggacgcgtccccgtcgtcttccaaccccagtgtggaagtgggcagctatgtgaacacaaatgatgtcttcaaggagcccaatgatgtcttcaaggagcctggcagcaataaacgtttaaggtcaggatccaatgatgtgccaacatctaaagcttctagggaaaaaatgaggaggaacaaactgaatgata

SEQ ID NO: 457933 - DNA, 393 bp, Sorghum bicolor
cgtccgcccacgcgtccggatgtttccccattctgctgctactaactcaacttctaggtttatgccatcgaacaatcaaagctttgctcccaggccaggtttaagtcctgcacagccctcaagtccgacgcaggtgcaggcacagcccactcctcctgcacctcccccgactgtgcagacagctgatacgacaaaagtgtctgctgagctgagacctgttattggtacactaaccagactatttgatgagacatccaaagctctgggaggatcacaagctactcaagcaaaaaagcgtgaaattgaggacaattcaaggaaaataggggcattgttttcaaaactaaatagtggcgacatatcttcaaatgtttcatctaaactcattcaatt

SEQ ID NO: 457934 - DNA, 255 bp, Sorghum bicolor
cgtccgcgctggacactctatagagtcgagaaagagaaagaggaagtgaagtgggataaggagagggggtgctcgtatgatcgttcgtcagtggcaatgtgcgttgaggaacggtggaggtggagcctttacaggcgctgacgtactggtggctgatggcactgcatatctgttggtcgcttgctggtgcgccatatagtgcggcgacgtaggatagactaaatggtgcaatgaccgcatggactgctactgata

SEQ ID NO: 457935 - DNA, 412 bp, Sorghum bicolor
cgtccggaccgatgtggaagcgcacagtctggagatgcgtagtatccatatataactcaaaaaagacttcacacgttttttaggggccagagcaatgctcagtgattgttaatgatgcaaatattgatgcaccactgccaaacgctgtacctgtagtcacaggtgaccacagcaatgaaactgttatagcaacggtaacatccactatgaacaccaaatctgagcttgtcagccccactacaagcaaacatgaccactgcaagtgtgaacaacatgtatcaaggacaagccagcataatgatgaagctgctgtgacgccttcagagcaccactagttgataatatgcctaactcaactgaaggaaaatgacctgaaccatacgctgatacagccgttaaagctactccagct

SEQ ID NO: 457936 - DNA, 458 bp, Sorghum bicolor
cgtccgtgaccattttgagcagactgatacaatatacagatatccagggattcatcttcgaggccctccaccactcagccttttctgtgcatttaaagattatcctgttggtgtcacaaaaggccgtcattggtttggtagtttgtatcaactctatgatgaatctgaaatcagtttgaacaatgcccagaccattgattggtcagaacattgtcactgcaaggcaacagacttgctgcaatttattgatattaaaatcgctggctatcgccacacccagcctggacatgccaaaatctttggcttctttgcagcccgggataagattgaacctttacgcaactatgtctacagacgtggggttgacaattatgaagctgtttctgtgaaccaaaagacgggtatggcgcgcttgtcattgactagccctgctcgaggtatatgcattacaagccatg

SEQ ID NO: 457937 - DNA, 396 bp, Sorghum bicolor
cgtccggctcactctcgcaccccgcacccgcacaggcaccgccgtacctgcggccctccgccctctctgtctgcgatgactgggtggactaccgccgccgccctaccccaggtggtgaggcctttgcctacctcttcgccggcgatgagcgcccaccaggttcaaactgtaaatggtggagatgaaatatataatgaagaccaacgggcaatatacaagttattatctgaaagaatcaaatctgaaaatgtccctgaaaataaggatggatcagatgacgatgatgatgacgatgatgaagatgaggatgaagagggtggtgatgacgacgatgatgctgaagaggatttctccggagaagaagattggggtgacgacgatgatgaagatgatgat

SEQ ID NO: 457938 - DNA, 482 bp, Sorghum bicolor
cgtccgatcctcttcgcacgcaacgacggcggcggcatcttccacagcgctgagatcccctttggcaaggcggcatcacggcggcacacactcgagtaacctcacaagaagcgggaggacggggaaggttcacaccaagctcggcagcttcaccatctctcgcaaagccaggacctctctggcattggtgacgatatctctttctgatgtctctacacgcttcctggccaggctttgtgcagcagcctgcaggctgggacgcgccgtgcatgctgctcctctccttcatatccacatggaagagaattggtggataaaacaatattggagaagtgcttgaccaaggaacatcatttcaccaaggcgatttctttgcttatttgctgatcgcggcatggtggatagacaatgttagctgtttgaattagtgtagttttaaattgattcatcgtcaatttggaaagtttttatataaacatatt

SEQ ID NO: 457939 - DNA, 464 bp, Sorghum bicolor
cgtccggtattatcttacagctacatttattcactcatgaattgcctaactccttgccttctttggatttgaccaccttattttttattgaccaagatgattgtagtttatcactgaattgctttgccacataatggttctgtcaaattgtcaaataacaacacaaattgtcaaagctagtcagaacattgttttattcatagtgattttcatttagttctatattgcttctactcttttattcagaatttttttgctaataatattcaaaaaatgcttgtgatattcttgagctgcctatacttgagtatgttataatcatacattgtggtatcatcaggttgtcatccatttgtggtcatcgaaagctaaagagttagctcttagctatgataaacaatgttgttcaggatcaatagacaatgatttattctcttaattatgtttaaatagaatttagcata

SEQ ID NO: 457940 - DNA, 450 bp, Sorghum bicolor
cgtccggggaaggccaaggctagagatgcacctctagaaccaaaagcagaaccccaagtggaagaaagcagtagtaaaggcggttcacaaactcctgatgctccttttgggaaattttatcaaaagagcgctgaaaaccaagaacaaaatagtaaacagaggcacagccctgttgcacaacagtttggaaacttctggggacaaccagggagttcctctggtccagtggtagacggatctattgaaccagtgagccatcagccccagctttccagttatcaagatggaaggatgccaaataacagtggaaacaattctgaggagcagaagccagtctcgagtaaccgcaagctttctgaagagatgaactttcagaagaagcatcagacagctagtgaccagcctgatgcattcagtaagagctctgattgggggcaaaaaatgcaccta

SEQ ID NO: 457941 - DNA, 483 bp, Sorghum bicolor
ctcgaatgttctctagatttcccaactaccgcatttttcgtttgtttagattagaagagtctactttgcagattagcagattatatatcgagtgccttgtcatcatgccatggttcctgctacaacagctcttctgagtcagctatgacagtgtgcttagaccaaattgcagacaggattttgcattttgattctgggttggttggaaacactggagtttgaagtcttcggttggaccagagtgttgttcaagtccccggtagaatctaattgctaggtgcaggccctgttcggctggctgaaaaaaaggccattgccaatgttgatgctgatttgttgtgagagaaaaacattgttccggttgctatgtgctgcaaaggacgtccaagccctctagtttattcgaggggcaaatggtcgtacgctcattgtctttcttttggctattctgtatgcgtattagatctgataaatcgactccaa

SEQ ID NO: 457942 - DNA, 516 bp, Sorghum bicolor
cgtccgcccagaagaatcctgaccaatcttcaactcaagaaaccactccagatgacgaccattggtctgatcctgttgaatctagctttgatgatgatgttggaatgcctcacccagctgatatagaggatcctgttggagattattctgatgatgaggatccatggaaacctttgaatccacatgaacctggcaacctaaagattcggccttaccgaagagtgaaaggttctccacgggtggttattggcactttgaaaaagaaaactgtcatatttttatttcctatggcaaagatggatggcgtcatcatacctgaacatgctaaatcttttgaagcacagcagtctcagcaggaggaacattatggttcccaatcaccccctcgttttgaaaagtttttgagatcatttgaatttggagaagaaaatcccaatgtgtttggcgatttgaaagatgacgatggatcaaatactggccttaattttgataatgatgatccagacatgccaaatg

SEQ ID NO: 457943 - DNA, 319 bp, Sorghum bicolor
cgtccgccgactgagagcaagcgggggatacgactatacgagaggcgacttccactgccgtcgcacagtcgccgtcggaggccgcgcgcgccgccatcttgccacgcttgcgcgtctcgctgtcttacacgcagctcgtcggaagcactagggttgccttgcgttctgggattcgcttttactcagacaaagtcctcaaatacagacgattaactaccaacagcgcgatgaaatcatatagactatcagtgctgagtgacactgaggtttgtggtgtcaacggtagtcacctgatctattaggaagccatatttggcac

SEQ ID NO: 457944 - DNA, 495 bp, Sorghum bicolor
cgtccgggcacaaagacttaaaggatgtaatccaggaagaacttcagattaatatcaaggtagaagatatctcacagtacaactcagattacattatcatgctagactcatccagtacaaagaccatcctccttgacagaggatttctcaaggttggttccttcatacttccactgatcccatgggacagaagttatggttcaacaattctccctcttcagacccatcttacagatgctcacaacctaaatccccattcactcatagcatccaacagtcaacacctaaccatttatatatatgggcttccacctcatctctgttgtgagttcatagtacgccagctccttaagaaaatatgcattgtccacaaaatagcatttacgccagcaaacctgacatattcagtggatgcttacggatcagatatgtctataccggagatcacacatataggtgtcaaaaaagaaacacataatggtagtattatcagca

SEQ ID NO: 457945 - DNA, 533 bp, Sorghum bicolor
  unsure (1)..(533): unsure at all n locations
cgtccgcctaaataatgcggcattcatggctgggttagtcttttaatgcattcggctgtagttcaaattctaattatgcagtaacatctggttcagagaatcctagtgtccattccatgggctatttggtggtgcctcccagctttagttgcttttctttggtagatttcatatttccttttcccattaaaaaatgttgatccattgatgttttcccagttatttaagaaagcacaaatcagtacttgatcgagttcataggaaaacttgttttgtccactatggactactgcagaattggatgttctagcaacaaccctaatgtggatggatgctttcaattgattaccacaaacataggtcaccccatggcctacctctaataaactattggaattctgatatcctccattacatgtgctataaaagattgatttggaattatttatggattctctactaataatcatggtttcaaaggggactaggcgtncagacaaggagcttggtgtgcgcctagatgcctaattata

SEQ ID NO: 457946 - DNA, 329 bp, Sorghum bicolor
cgtccgcatcatcgtacacacaaccgccgccgcgcctcccgttcgggcccggtcccttcccctcccctccctcgtcgcggaagaacggaaatggcgtcgtcgacggcctcgctggcccccgcggcagcgctgctgctggagcggctgggcctgcgcgtggcgcccaccgacgccgcagacgaccaggcgccgccgatgcccgcgctgccgctcccgggcctcctcccgctgcgctgcgccgtgcagcactacgagtggggccgacgcggcgccgactccctcgtcgcccggctcgccggcgaggcctcggcgtccgacggacgcggaga

SEQ ID NO: 457947 - DNA, 328 bp, Sorghum bicolor
cctttatgtatgatggtgtacctcttctagctatgttggatgagtatgttatgctcaggcaggaaagggaagaagagaagaaaagaatgcgggaacaaaagcgctacattgagcagcaactgaacactgatcatgaagggccatttggatcacgagtgagtccaaaccggcctgccagttcgaagaaggccattggcccaaagttgaatggcagcgtctcaaatggcactcctccaaacagaaggctctcaatcagtggccaacagaacggcggtggccatggtgtcaggtctggagggaagatagcaagaaagacacggtgaagaca

SEQ ID NO: 457948 - DNA, 249 bp, Sorghum bicolor
cgcgtccgggcgacggcctccacctacgcgccaggcggcggcgcgggggcgctcgcgccgggaaagggcagggtccgcggccccgctgggctcggcttcctcagcccatccaaggtcggcggcctcccccgccctctcgccctcgccaagcggagtcccgtcgcggccaggctgcggtgcgcggcgtcgtcgtcctcccccgcggccccagcggcgcggcccagcacggcgcctcgcttcatccagcac

SEQ ID NO: 457949 - DNA, 517 bp, Sorghum bicolor
  unsure (1)..(517): unsure at all n locations
cgtccgaaggaacaatattgtgatgcatttctaacagcacactttgaggtccctggagaaatgttctctttggcaatggaagcaaagcggagagcaatgggagttgttggatccactcagaacatcttggatttcattaaggaccatctgatgagagctctggacagaaatgtagatgaccatcttcagtttgtgttaggaacagaatcagggatgatcacttcaattgttgctgctgttcaggagttatttgatttgtattcttctcaagagagagcaaacattgaagtagaaatgtgtttccggtttcctcggatgcgatttctaagacatcgaatgttctcatcatgttggttcttcaatggctactaatttagataatcttactattgttcctggtgtgagttctggcgaaggctgctccattcatggtggttgtgcctcgtgtccctacatgaagatgaataccctgnggtcgctacttaaatattgccatcagcttcctgataaaaacaac

SEQ ID NO: 457950 - DNA, 384 bp, Sorghum bicolor
cgacccacgcgtccgctcagaagtttggcccaaattagacatgacagcatttgaaactgctgtctttctttctcgaatacgatggagagctgaagatcatttcgttaagcagggaaaagaaccaagtaggcaagtacaaccccaacaccacacactaaaacagcatttgaaactaccatctgaagctgagctattggaaaatgatactatatggtcctaacatgagagatcctatgaggaaatgtaggcaggcttcaaacttggaccacagatcttaagggagtgaagatatgatttcttagtacccagagacgttattatttggggacaaggataaacttggacccatatcactagaggctaggaaataatattatttagttg

SEQ ID NO: 457951 - DNA, 437 bp, Sorghum bicolor
  unsure (1)..(437): unsure at all n locations
cgtccggaaagagggtagctgttgtggtgggagggagcgtggctggactagcgtgcgctcatgccgtggctggcgcgggatgggagctggttgtgctggagaaggcggcggcgccggcagccgggagcggcacgggcgccggactgggcctcgacgcgcagtctatggagatcctctcacgctggatcccggggtggggaatcgacgcggccacgctgccgctcgccgtcgatctgagcaacggacagcgagacgaaggcggcgcggacgctggcgagggacgaggacttcatttccgcgcggcgcactggggcgacctgcaccggcggctgcacaggagctgccgcccgcggtgaccgtgctgtggggccaccagttcctgtcgttcgaggcgccggacgacacgccgcgnggtcgtcgcgacggcnccgcgtgct

SEQ ID NO: 457952 - DNA, 429 bp, Sorghum bicolor
  unsure (1)..(429): unsure at all n locations
tctgggcctggctgatcattaattatttcggctttgtcggtttcagatagcaaggtttctttccattgtaaagtgtacaggtgtccctgccttggaagctgtggacgacagtgcttaatcttacttggagctagctaactgtagtcaccttaatgtcaggtagattaggtaattaattgttcgtgtgtcattttaggccctaccttctgaagatgggattggttgcagtctagtagaatgtagaagataggtggaggtggtggtgggattgtttgtaacccagaaactgggcccagcccgccgtatatctctggcattagagtcagtcgggattatatttattattgtatgtatataaacagtgctgcatgtactagtgcttttataacatgtaaggtgttgcatgacgaannaaaaaatattaaatta

SEQ ID NO: 457953 - DNA, 287 bp, Sorghum bicolor
cgacaacagcgaacatctattgccaagcgtcaaatcttataatattaaaacacattaaaattgcacgtacataattaagttcacacaggaccggaccggagtacttccattatgctagcagcgtatgccctctctcccttgaccccttcttaaccactaaacaacaatacacaaaccaaagttcaaacgtaccttaacaacgtaataacacttggtgcatgcatgcatcatcagttagatgcatgcaaatcgatcgatcgatcctataccatcatacattataagca

SEQ ID NO: 457954 - DNA, 269 bp, Sorghum bicolor
cgtccggagcgctatttcagcctatgctgttgaccatagtctcgagagctcaccagaaaatggaattgcttcaaaccctcagctgaaatcaaaagagggagaacaaggcagtttgaacgggactgtgcatattgtggatgatttgagcagcctaagcattcggtaatgcatgaacaagtagctggatggttacaactggaacaaaacatattttagaactggagccagtacccaattaaccaactcctacacagacagggggaccaaag

SEQ ID NO: 457955 - DNA, 352 bp, Sorghum bicolor
tcttgcctgaatatagttcatttcctctgtctgactcttctttgttaatcggccttgctagctagctatctatctagctatctatctagctcggccaagtaataaccgccaaccgggcgtcgtcgcgcgaagtagagcgcacgcagcaacaatggcggacgccggggaggggcggcgggtgtgcggcatgccggagaaggcgcagctgcacgtggcgatgctggcgctgcagttcggctacgcggggttccacgtggtgtcgcggctggcgctcaacatgggcatcagcaagctcgtttccccgtctaccgcaacatcatcgcgctctgcctcctcgtcccttcgcctactt

SEQ ID NO: 457956 - DNA, 331 bp, Sorghum bicolor
cgtccgaagcaagcgacccgaccacaggcgcttgctagccatggcgaccctcgccgcgctgctcctccttgtcgtcgtttccaatgccgccgcgctgagcgccaaggccgtggagtaccacagcttcgtagccaccccgctctcgccccacgcgtacaccgatgctccgtccgccgacgcggacgaggatctcttcggcggcagccttgccgtcgcagacgagggcgccgcagacgcgtcggccgtgcacttccgcgtggtccaccgtgacgccttcggggcaaccgcacgggggccgacctgttaaggaaccgcttgagcgggacaagcg

SEQ ID NO: 457957 - DNA, 472 bp, Sorghum bicolor
cgtccggcaggggaacattaataatctttcttattaatttgatagtatgttagtatcactaacctgtaccgacccaaaattgcaacatcgtatcactggggtcacataggtaactgacttctaattttacttcttttcgacgtatcaacatcgaatcaggctcgctcaactaaccaaattagccccaactataagctacaacagaatgatgtgaagatcatactcaaacacatcacttttggattattactataagcttacaaacttaatttatcatggtctttttttttgttcctgtgcctgatagtgatagctgttgtggtgatatgatattctttacaggagaatgcatcatccatgtttggtatcatgggcctgctgtacaagcttgaagtatcagatttgtcactgcgttataagccttgctgggcctgctgctttatcagagcaggagggagtccacatgctcact

SEQ ID NO: 457958 - DNA, 536 bp, Sorghum bicolor
cgtccggctaaatgtgatccctattgataccaacctgaagcctaactcgtcacagccacatgagaccacacctccaatcaagaggctgctgcatgcttggcatgatatccttgagaagctccctgttgatgcaacgaaaagggccatacacacatttgcggaagtggtgcacacaatcctagttcaccaggatgaagaactgaagttgaggatgaaaatttaagagactaggagggactttgagaagaagagaaggcagttcgatgattgggcacagaaaaattgggacagaggacaagtattcctgatggcgacaatcccgcaccccgtgctgatccgctgctgaaaggaaagccgtggtggataagttggagaatgcactgaaggacctggaagatagttataagacccaatgcaaggtagtaagggataaatccctcaatcttctccggtcaaacctgccggagctgttccgcgttgtgtcggaattctccctccagtctgcgggttatttcaagggcttatggtcgatcgcg

SEQ ID NO: 457959 - DNA, 480 bp, Sorghum bicolor
cgtccgcccacgcgtccgcaagcaccgaactctgctcctccctgcttccgtcacgcgagagcactccactcccacgcgaaccctagcagtggttttccctgggggggccgctaagcagcttggtcccaagctgtagaagcaactccgatcccagccgcggcgcatcagctccggtttctggagccggattggggatccgcgcgatgtcttggtccgcgcccgacgacatcctcctctccacctccctcgccggcttcttggacaagaaacttattgtcctgctaagagatggacgaaacttcttggcaccctctgctcatttgatcagtttgcaaagttgttcttcagggtgcttgtgaacgagtgattgtaggggaacaatattgtgatgttcctcttggtctgatgttatccgaggagagaatgtgttttaatcggagaaatgatcgcgaaaaggatgaactcctgctacatgacatg

SEQ ID NO: 457960 - DNA, 486 bp, Sorghum bicolor
cgtccgatacctgataatcttagtaaggtattagtgttttgcgacaatctagcacaaagttcatctccggaaggccgcagtagttctccatggaaaccccttattaagagatatggaaacgccaatcgtccaacggtccggctgaacatccctaccgttgtcagtggcaacactgcaatgtactcgacacaaatataccaaaaggattgcaatggtgtcattccaaagcttgcttccagaaagatagatgcagcgaatctggaatccatgcttcaagggaaaaaggtggatgcgttctttcactggaaatatatggctaccagcaaaatgctggtattcgatggttgctaagaggctagacgttcacttctgaagggaccatgccaagttctatcctcctatcactataaaacaggctcttgtccccactttagccaccttagcctctatcaatagtagcaagtcgtgtgttagtgtgtacaacat

SEQ ID NO: 457961 - DNA, 88 bp, Sorghum bicolor
gtacccgtccgtatcccggtcgacccacgcgtccgatgagtttcagtatgaatgtgttgttgcctagtactatggtgaaacaagaacg

SEQ ID NO: 457962 - DNA, 517 bp, Sorghum bicolor
  unsure (1)..(517): unsure at all n locations
cgtccggtccctgngggcattgccaaagacgccactgctgttcttgatgaagcaatctgttacttgcagtatctgaagctgaaggtcaagacgctgggagccgtctccctctagctcctggacaattgtgatttagttctcaaagccgcttgcttctgctgttctacatatacgaagtatcacattggtaataaggtgaagatgccaaagatagctcaggttggtgcttcaggacgcgccagaggtgaataacggaagaagaaaaggttcaatgctgctttcttggctcccttgtacccacatggctctaatgatatttgtgggcaaatgatggcacgcagcattgcagtagtacttcatctgaagcaaaggcgtgcgagttttccttccaatgtggttgtggcggagcaccacggagcgacgctgcgctcctggccacctatgctgctctccagtaagctagcctaccaccatccttgtgtctgagagctccagatcttctcataccagcagctta

SEQ ID NO: 457963 - DNA, 477 bp, Sorghum bicolor
cgtccggatcgtcagtcagctcaaagggggtgatctgttgtttggatagttggatccaccagggcatggcattagacatccatcagccaatccatccccttaaccaccctttacgtactcagcgtcttgggtggcggcggcttggctgtaaaggatattattctgtacagcattaggttggattcagcacaccatctgttttattgttcttcctgccggcacaggacctcattggcagcttgacttccagtagatgttagtggtctctattttttttcttagctgtgacatgcgcgtttttgtgagtgactttatatttggtgattttttatcttattttgtaatttgtagatgttgcaggaaataggtctgcacaaaatgttgtgtccatcagcagtaccattcttttttttttaccttactttcatttcttttgtgaatctagaagacgtgaagctgataatgtcatgcaaatgc

SEQ ID NO: 457964 - DNA, 397 bp, Sorghum bicolor
ctggcttcagtcgcttgtgccccatcttagccgtaggcagtaaaaatcgccggcggcgttgctgagtgctgcatccaagccctaaccactgaaaatcgccgggtccgtcgcttgggggtgcaatgccatagtcagattgggagaagcgcaggacactactctgactgttgtgcctcggctggattatgagaaagagcttgctgccctttcagacccagttacttcagagagtttttctgaaattgaggaaattactcggactgttgtgcctgggatccattctgaaaaagcgttgcttgcctatctgacgacctcgcttcagatagttgttgtgatgcttatgccttgattgattttgcaaattaagatcaaaggcctccatgcctggatccgttcg

SEQ ID NO: 457965 - DNA, 473 bp, Sorghum bicolor
cgtccgcccacgcgtccggttcctgccatctgttactaaactcaagactccagaggcaattcatagatattctgagccatgtgatgctagggcttcttccagcctaaactcttcaccaacatattcgactgaaacatcagtaagcaaggaagcaaagaaacacctgtctaacagatggaagaagacccatcagtgtcagcatcaagaaactgatagtgacagcttcagcacgcttggggatatgctttctctctctgatcagaatgcatcaaaggttgctacccataaaagacatccaggacatgtccaaaggcaggagtgcagagtgatagatgcaaagctcatgtggcatcagcagcaatgatggttggagagacacagctactagtgaattgacaaggtccaagtctcttacatcatgcttcatccgcggagttcacaagtcaaacaacaggaaaagaactggcagtgta

SEQ ID NO: 457966 - DNA, 522 bp, Sorghum bicolor
  unsure (1)..(522): unsure at all n locations
cgtccggctaatgacccatacataaggaatgcatagttcattaaaaagttatggttagaattctcgtaaatattattagtaaaaattcttgtaaatattgttagtattgtcgtaaacacaattctcataaatacttcaatatattcattgtacagaatatagaacaaattatatagaaaccgatttcattttatggtaactgtgtttcgttaaccaaattagtatcaaaatttattatcataaattacatagatcaatcttccaaaaacaatgtttccttatggtaactttctctggtaaccaaattgctgagtgaaagatcaccagctcgctactacagtaatacttctattcataggccaaaattattgtaaaccttgttcaaattaaaagatgcaaaaggcgaaccatgatttacctgnatgtggtgcaaaacaatngatggtttttggcatcgatattcaccctgaagttgctgacatgacaatncggaatgtgcttttctctctcagtcatgctcta

SEQ ID NO: 457967 - DNA, 274 bp, Sorghum bicolor
cgtccgaccacgcgtgcgatcagctccgactcaaaagttgatggcaacatattggcaccatccaaaatttcgtcagttgtgaatgaaggttacaggagcacagtaggttgtggtcaggctaagaaagatgctgatattcagcacgagaatatgcccagctgttcaagtgagcatgcaatggttactacaaaatttgtgaaagattcagcgaaccttgcgactacggatgcattagaactaccaactgaagggatgactccaaagtttggagcta

SEQ ID NO: 457968 - DNA, 451 bp, Sorghum bicolor
  unsure (1)..(451): unsure at all n locations
cgtccgcgctcgccctgctgcttctgttctcagcttgctacaccggcccctcctccgccgcggactgcgaccccgcggaccgcgccgcgctgctgcgggtgaaggcgcagctcggcgacccggccgggctctcctcgtggctgccgtccaccaactgctgcgcgtgggaccccgccgtgttctgcgacgcggcgggccgcgtcacggggctggcgctctactccctccccgacgtctcggcgcgcgtcccgccggcgctcggcgacctcgccgcgctcctcctccaggtcactccgtgcctggcctggcgggccccgtcccggcctccttcgcaacctcacgcgcctnctggacctcgacatcaacggcacctccatctcgggccctgtcccgggctgcctcctcgccgggcgccgcaacctgaggacgctcgtcatcgccaacagcaagc

SEQ ID NO: 457969 - DNA, 552 bp, Sorghum bicolor
  unsure (1)..(552): unsure at all n locations
cgtccgcccacgcgtccgctcgtagcatgtcaatgtgtgttgagtttgtgaacttttggtttgtggttttgtctattggtgtttttaattctctggatagaaaattgcagactaagcccatataaattgcaacaaactaaaggtataattttagtacaaaatatatgcaataacaattttttgctgggtaagttgtttttcattaaattctgttgattttctgaatccacaacacacttaatagtacatatgcataatggcaagttttatgacatgctccagtagtacacacctatcaattttgagttgtagtagggtggctgtgaattttgtggcgtggcgtgtattggtgttggggtgtgtgtgcgtgtgagtgtgtgtttgcgctctctctctctttccctctagaaactctttatcagtatgtgattgcagcatttaatcttctctatccaacctaatagtagatatgcttaatggcatgattcatgacacgctctagtagttcacgcctacaccacttngagtggctgtacatatgttcaagctact

SEQ ID NO: 457970 - DNA, 412 bp, Sorghum bicolor
  unsure (1)..(412): unsure at all n locations
cgtccgcccacgcgtccgccgcgtcccacgtgcctgcagcaccgacggtgcccgtcccggagcacgagtctgcagatgaggcgcggcagactgcgacccctgcggcgtcgcgctcgtcgtcgtcctcgtccaccgcctcctccgcctcgtccgcgtcctcctcgtcctcccgcggatcccgccgatggggtgggttcctcaaggacctgctccaccggagcaagtcggacggcggcaagaccacacaccacgcccagcattcccaccacgctgctgctccagcttcgccaacgcgcagtccaagacgagcactcgtccgtctccgtcacccgcggggcgaaggggactaggggtgggacgccggggcaccgcggngnnggcgcgcgcggcggcaggaggtcggcgcacgagc

SEQ ID NO: 457971 - DNA, 167 bp, Sorghum bicolor
cgtccgaaagaaataaaatctaaatctaacgcccctaaatgatgactgatatctgctcctgcagcgcacacaaatttcctcagcagatccaagagctgcaaatgctaacgactacacggggcgggcgctttaaaggatcaaaacttcctccctctgactggcacaag

SEQ ID NO: 457972 - DNA, 406 bp, Sorghum bicolor
  unsure (1)..(406): unsure at all n locations
cgtccgggagatctggcaacggtatcaagatacagagcacatgaaggatgctcttatctctttatgagatgaaaggaaggcaaggatgactgtggaatctttacgggactttatggagatctgaataggttaaagttggaggacaaacaccttagcgactaggtgtccagtccaggacataaataagaggcttcaagaatataacacaagcttgcggcaatacaatatatagctatctccaagcagatgcaacaaaggatgctgaaacaataacaaagctgcaaaaggtgaagaatactatcgagtgaatgaatggtccgaaggatcatgctaattcactaaaaatacaactagacattgcanagtggggagggggtctgtggcagcaaaagctgcttgccaactg

SEQ ID NO: 457973 - DNA, 380 bp, Sorghum bicolor
  unsure (1)..(380): unsure at all n locations
cgtccgcgaggagcgaggagcagccgcagctctcacacagtctcgcactctgccactctccctgtctgagctctgttctgctctgcctctatccatggcctcgccctcgcggatcttgatcttgctcccgctgctcttcctcctgctgggctcgcattgctctaccggggcggcggcgaggcggcagctgctgcgagccggggacccgagctcgcaggtcaagttcgacttctctccgttcctcatcgagtacaagaacgggcgcgtgaagcggctgatgggcaccaacgtggtggcggcgtnctcggacgcgctcacgagcgtcacctccccggacgtgaccatcgacccgtcccacggcgtcgcggggcggctctacc

SEQ ID NO: 457974 - DNA, 89 bp, Sorghum bicolor
tccgtccgattcggtcgaccacgtcgacatcgacttgacgacattttggaaagaccacatacctatggaaagaagaagcgggactttta

SEQ ID NO: 457975 - DNA, 488 bp, Sorghum bicolor
cgtccggtaatatcaggactggtcatgcgggaatggtgcttaagggaggtttgcttaaattcagagataatcagatttgttacagacccaacaatggagacaacaaaacttggcatggaagcccggtataactgctgtgtggcaattaacaaggccctatcatcatcccatcttctgcatgaagcaagtctttctggactcattgggaagttgaatgatgccgtgaaacggggcccttacctttctgaaaggaagcgtgtggaggcacggccggttgttgatactgcagagaggttttaagctagccagaggttttaagctagccttgagccttcacccaaagtaaacgatgactctcacagcgtagttaggaggtaactgggcgtgccctgcgtctcatgctgttggcttatgaatatcagacatacatatggtgtacttggatgatggggaggacaatgtgtacttgagctcataccgtttcttct

SEQ ID NO: 457976 - DNA, 449 bp, Sorghum bicolor
cgtccgcacccaagaagaagaacgcgcggggagcggccacgtttccagagaagaagacgaacaccaccctcgatcgtcgaacagactccgaggtgcttcgatcttttgatggcgacgctccccgtcaagccgctggacggcgccgacggctacctgcggtggaaagagtcgatgctcctgcgcctccacagcgtcggcgtcgcccacgtcctctccgacgaccctcctgctccggccgaggcggctggtgcggcggcggcggcggcggcggcggccaagaagtgggcgcgcgacgacgcggtgtgccgcggccacatcctctacgcgctctccgaccgcatcttcccggactacgtgcggcacggcaccggcagggcggtgtggcaggccgtggcgcgcaccttacacgtcgacaagcccagacgttcgtactcgaggcagtacgagcg

SEQ ID NO: 457977 - DNA, 290 bp, Sorghum bicolor
cgtccgttcagttcgccgggttgtctcttgctggctcgctcatgcattcagtgggccgttcgaaagattgacctatttgtgaatccgcgctggttttcacactggcggggctttggatggtggtaatggttgttggtactggctttggatggtgggcattggttggtacttgttagagatataggaaggacatggacattgcattttgtactgtaggtattacctttccttggtggtagccagcgtaaagggcagagttggatcgattccctgggagattgagacttgtc

SEQ ID NO: 457978 - DNA, 432 bp, Sorghum bicolor
cgtccggtccgccctttttttttttttttttttaatcaaaggacaaaggattgcgagtttggcagtaaagttttacagggtatgtacaacaaacgaagcatttgcatcttagctgttatgtgcttaatgtgtacctgaagcaagggagaaaagaaatatgctactactttacaaaaatgtccattcagaccatcatcctagcacttctaccataatgttattatcttgtttgagagctatcaaacctacattggaattggaacaaaagaatcttcaaatgttgctcttcaaatgagcaagtgtgttgtgcttctcaagaatttatgggctacgcaaaggcccgttttgcacgtctccaggtgaagtggactgataaatgtatttcttgcagcatcgacctaggatttgttccggtatgcttttcccgattca

SEQ ID NO: 457979 - DNA, 158 bp, Sorghum bicolor
  unsure (1)..(158): unsure at all n locations
cgtccgctttctcctcccgtccgcgcgctctcgcttcctctccgccaccaccgacaccgccacctccacctcctgccaccaccttgcgcggtggggggcaacggcgaggtgagggctaggcggngcgatgctggcgtggaaggagaaggtggcggacc

SEQ ID NO: 457980 - DNA, 330 bp, Sorghum bicolor
cgtccgacggacgccaccctcccggaggctcctctcctctcctctcttctccccacctcttcttcctcctcgccttgccgtgttcactcgttcatccatccatccagtccccagctcacgagcgcaagttattgcgcgccgcgtttagcctcggcgtgggggcttctgttttgcctgtgtggcgctggggggcagcaggtgcggtgccgcgtgctcacgactcacgagagagggaggctctgctactctgctcttgagctgctgctgctctggagatagaggaatagaaggcggccggggcaggggaggtgaggcacgggcatggggatg

SEQ ID NO: 457981 - DNA, 99 bp, Sorghum bicolor
atcccggtcgacccacgcgtccgcatcttccacaccgagccggcaccccatacgacgtcgacggtctgctctgtgcacgagagcatgccatgcgcttct

SEQ ID NO: 457982 - DNA, 76 bp, Sorghum bicolor
cgtccgaaaaaaaaaaaaaaaaaaaaaaaaaaaaaaaaaaaaaaaaaaaaaaaaatataaaaaaaaaaataaaagg

SEQ ID NO: 457983 - DNA, 528 bp, Sorghum bicolor
cgtccgcccgatccttcgcaccatgcctccgccagtccgccgtcacgaagcatcctacaatgaagctccatgaaaatctagatctacttcttcctccaacccctccctctccctctcctcacaagaactcccaataacggcagctatcgaccacactttgattgcgtcgggtcacctgcgctccccatcgcactgccggtgtgctcagccaacatatgggcgacgaatctcatacttaaaaccctagccagtttagctaaacataatcggtgctaatggagatcccagaaattaatgaagaaatatactggcagtatgcagtcatctcgaggccaaaaaaggttttcagaacagaacctaaacaggtggccaaagaaattgtaaatgcaataagaagtcagctaggattgtacatcatcgcctctgacataacatatagacgacctaatttcatcatctatctcaacaattctcatctacaaagacaagtagtggccgcatcacctatacgtacaaggaattttcaga

SEQ ID NO: 457984 - DNA, 379 bp, Sorghum bicolor
cgtccgcggacgcgtgggctcgacttcgctcaaaactggatttggccaatcgctcaagaacacaagatcccgtgcgccatgttcctcatcttcacagcaggcttcttggccttcgccggctcgaagcagcagaacgaggcgcagccacgcacgacgacggaggacttcatggtccagccgccgtggataccgttcccgaccaccatgtccttccgccgccacgaggcggagtggatcgccgccgcgtaccggcccaacgcctccggcgtgtccgacgtggaccgcttctggcaggtgcatcacccgagctgccgcctcatcgtcatccgcagctgccccgaggcggaagccgcgtctgttccccgctcctaacaagaca

SEQ ID NO: 457985 - DNA, 393 bp, Sorghum bicolor
  unsure (1)..(393): unsure at all n locations
cgtccgnggacgcgtgggctcgtgcagggaattcagaaactatccatgccactgttgtttctgtcagtcacaacaacagtaagtgagctgtcttccaagcgcgacgatgaaccagataacaatacagaacattccgagacgccttctgaaacaaatgaagtggcatcaacttctggtacaagcgatgctgctgatggcacanaggaaatcgtgcaagagaactggcttgtgttacttttcagggagcttgagaagcaaggcatcactttgcccgagaggtttactgaagatgagttacgcagattttatgtcgctgcaaatggtgacttttcaagtttactctcatcggttaagaagacaattcngtggagggaaacatttcacatacttaca

SEQ ID NO: 457986 - DNA, 227 bp, Sorghum bicolor
cgtccggtgggaagtgacggtgactgtgtcagtgtgtgtgtgtgtgttgccagtaaacgagacttgtgattaccatacatgtggaactgcagtatgatacgggtgtctcagtctcactagatacgtgtgtacttgtactctcttgtagtcagagtcaggatgttccagagatgctgtcctgcatcctccaaataaaacttgttgtcttggacaaatttggttaaaaa

SEQ ID NO: 457987 - DNA, 537 bp, Sorghum bicolor
cgtccggaaacaatgaccgaattcctggaatgttcatgctaaaagttggtgcattcatacccttactctgttttgtagatactacaagatttttaaagctttgactggtttccaattcagtaggtgaagtttctaatttttaattatgcttttccttcagtgtaactgtaatatcatatcgatgactgcaggttgtctgataagtttagttagatatgctagctggagctgtagtatatttctacaattaacactcctgtgatataggacagcatggcaacactatccttccaccaggttccataagcagatggatgagcatccacaacggtcggcgctgttattacgtctatggagtatggtatgtggtagtggttatgtcaagcgagcctcagctggataactcatgctcgcattttcctttggctggttggacttttgacagcaactaacaaaattttatgcaggatgtctcttttgtcatcaacgattgacagaatgaagtgtttgtgtattctggtgtagtgttacctgagt

SEQ ID NO: 457988 - DNA, 393 bp, Sorghum bicolor
cgtccgctctacttattggctattacagtggtcttgcttcattgttgttgcctcgctcttagatcatattatgcagcgaaattcaccgcgtctttttctatcggacctcacggttggtccagtgagaagtgcagtttgtgtgcgtgttatgcgaaggtggattcatgatggaaacgaacccggcggtgctgtccgctatatagcttttgttttggccgatgaaaagggagaatccatatatgctcaagttttgccttctcaagtccaaaaacttggtgatcttcttcagatgggtagcacatatattgttgcgaaatttaatgtcagagcatcaaaaacaagctacatacctttcgagaaaaaacttatgattgaattcacaggattcactac

SEQ ID NO: 457989 - DNA, 346 bp, Sorghum bicolor
cggacgcgtgggggaggcacctcggtcggcggtcaagacagctgcgtcaccggcgcggcgcctggccgcggcgcgcgtagcaagcggtcccgcgcgaccgccgcggcagccgcggcgtggcactccctcgtgccgcgcccgccgtcgcagtcgtcgccgtcgtcgtcctgctcgtcctcggacttcccgtcgtcgaacaagccgggcggtgcacggggcggcaactgcagccgcggcaagaagagcccggcgagccccggcggttgtcccgctggggtcgaggtggacttggagggcggtattcgtcagtgcacgcactgtgcgtaagaaaagaccccagattggc

SEQ ID NO: 457990 - DNA, 497 bp, Sorghum bicolor
cgtccgtaaaaactcgatgcataatcatgtgaacattactggagagactgtcccctctacacttgattcagttgtaccttcaatagcaccatcaggtggcatgccaatgaaattcacagaagcaccactaactgcttcaaagaagaaccctgttagtcgtccatcaaagcctgttgggccgcctccaggatttaatcatgtaaccccgaagcgtcaagatgattctattctggttgaaaaactacagagcccacaggtcgatgattacagctggctagatggctatcagccatcgattgatgatgttaacaatttaagagctgtttatcctggtgtcggtgatactatcacttcatttgccactccattccccttccctgggaaacaacagatctctgagatacatgcacaaggggccaatgagaagacatggcaagatttccacctttttgagcctccaaagcagaatatgtgccaaaattactaccaaagaaatc

SEQ ID NO: 457991 - DNA, 531 bp, Sorghum bicolor
cgtccgcggacgcgtgggcggacgcgtgggtgaggatgaaattgaagcagctcgaatggcagcgatcaacaaggaaattaagcgtgtgttgactgaagtccttttgaaggttactgatgatctttttgatgagatcgcaacaaaagttctgaatgaagatgactcagctgaatccaatgaacccgctggtgtttttggctcaaaggagcctggtcttggaggatcaagaaccaagacctcggctaaagttgttctccctgctaagtcaaccaatagcactgatcataaagatagtactgggttaagctcccctaaaggtgctcttctcggcctggctagttatgattcagatgatgacgatgacgatgacaacgatgctgaggctgatggcaaggataagataccaatatcaaatttatcttctaacgctaatgctggtgctgtaaatactgaagttttaggtgataaaagcactcttggtaaaaaaaatgggaatagtaatgaacagaattcttcacttgaagtgctcca

SEQ ID NO: 457992 - DNA, 488 bp, Sorghum bicolor
cgtccgcccacgcgtccgcgacccgaccaggcagccgcactctgttcgccggcggcagtcgctggcggcaacgggcggatggcatggcacaaggctactggtagtttgtagtaggaaacaatccgattcctctccccggccgcccccagcccccagccccctaacgcctgacctgaggaatcctgtccgcgtcgccgtctccagctctccgcctccagccctccatacagcacactgccgccccgcgccccctgacggccgagtgcccaacggagggaggaatcgaggaaggcagccggcgcacctgggaaggccaaggcttggcctgagagaatgcaagacccaagggatgatgatttctcagcaccaaagctgcataagaagaaggttgtgtaccggccactgccatcaggccagctcaagggtgaacctgaactgctgcggagagagtttccacagtcatcaggcatggtccaaaagccacccaa

SEQ ID NO: 457993 - DNA, 448 bp, Sorghum bicolor
cgtccgcacacacgctcaccctgcacgccgccgccgcccgcgtgccgccgccgccgcaccccgtccgccaccgccgtcgaccaaatccgccgcagtcagcctacaccgcacccacccccggccctggctcgcccctccccagccccgtgcgccgccgccgcctcgctgcatcctgcacggtcgctgcaggagtcctctctctctccagagggaggaggagggacccgaagagcagaggaaacaccaagcagcagggcgcgacgcgacagggggtagggagcccaggaggtctcgcaagtcccgaggcgttcgtcggagttccccagccgcaattcgtcccgagtaggacctgtcggaggggactcggagcaccttggcacggcgccacctcgccactgcaccgtctcgcagcacacgtggcctggtgcccatccgcagcacggccacc

SEQ ID NO: 457994 - DNA, 359 bp, Sorghum bicolor
cgtccggcgatggcctacacctacgcgccaggcggcggcgcgggggcgctcgcgccgggaaagggcagggtccgcggccccgcgtgggctcggcttcctcagcccatccaaggtcggcggcctcccccgccctctcgccctcgccaagcggagtcccgtcgcggccaggctgcggtgcgcggcgtcgtcgtcctcccccgcggccccggcggcgcgggctcgaacggatccatgcttcactcatagcatacagacggaggctttctggctctaccgctctctatatcttgggtgcgaccacgtccatgactcggtatatatgcacacgcccatgcgctacaacccgctcgagcccaata

SEQ ID NO: 457995 - DNA, 362 bp, Sorghum bicolor
gcgtcaggcgacgcgtccgtccacgcgtccgaaccgcagcccgcaggcaaaggaaagggaaggagtagagctagcaagacacacacacacacacggtcgtcgtcgtcgatggcgcggtggtcggcggcggtgctggtgctggtgctggcggcgggcatcatgggcatggcgtcggtggcggtcggcgacatgaacgcggacaagacggagtgcgcggaccagctggtgggcttgcgccggcctgagtacgtcagggcaggccggcgccgcgccgactgctgggggctgcggaggtctcggaagagccaagtgctgtcgtctcgtaaggcaagacaccccacctggcataagataacgcaccc

SEQ ID NO: 457996 - DNA, 439 bp, Sorghum bicolor
cgtccggtctcccatgacgccgcgccgcgtgggcggtggaagcttccgtcgtcgtctcgtccggagggacctaacggggggccccggcggacccgggcctaggagagtaggagtacttaacaccctttcccacctggtgccgtcatcagtcagtcagcttcccttccccgagcacacagcacacccaccgggacgggagtcgggagggggaaggggagggatcgcctgtctatcaaggaaggaagtgcgcttctgcctgcgtgctctggcgatgccgtccgggtggaggggcatcctgggtttcgactacggcatcgtgcaggcgccgctcggccccgacatctccggcccggatctcgtcgccgtcgtcgccaacgccggcgccatcggcctcctccgccttcccgactggccggcgccggatcacgttagagagctg

SEQ ID NO: 457997 - DNA, 284 bp, Sorghum bicolor
  unsure (1)..(284): unsure at all n locations
cgtccggtttatgatgacagtgctgccacctgtactgtcttatgagcatacagcggcatggagaccatagagtttgtatagtaacagcatcataatgttctaggaaaatgcaactcaggactnatgttataggatgatgtgcgaatagggtactccagaatggtcgatcgatgatcctcgagcttgataggatgtgacgcaacggataagggtggcgaggatgagcaacttgtaatgtgaatattatagaatgaatatgtcgaggatgtgactggaaactttac

SEQ ID NO: 457998 - DNA, 447 bp, Sorghum bicolor
cgtccgggcacgcgcgcggacagctcccgccatgggccgcgcaatggacgccgcacccgacgctgctcctggatctgctttttgatttctttcctgacttgttccgcgctgctccgaggcatctgccgcaacagctgcacactcaacagtccactgcaaggcctgtgtccagacgtccctgtggatgtccatctaccgatgcagctatcgctgtggggacatggcggcccacagtgtagggcaccgtcgcgagcacccgcgcctgcgcgctcggcttggccacggtgcggtccacggtgtgctccgccgttgtctgcaccttccgcttctccagcgtcttctggagcaagtgctgcgggaagataccctattacatgcgctgttccctgggatagtggccaataggattgtgcgacatatttgtagttatatgcctcacgacatggt

SEQ ID NO: 457999 - DNA, 499 bp, Sorghum bicolor
cgtccggtaatgaggtccctgcttctgagattactggggtggaatataatcaagatgtctctggttttcctcgaccaacagaggatgaaaatgcggtgggatataatcaagatgcctctggttatcctcgaccaacagagaatgaaaatgcggtggaatttaatcaagattcctctggttttcctcgaccaacggaggatgaaaatgctgtgtctgctatgggagataattctggcttccaagaaaacaacatgggttctcttatggatctggatatggtgaatgactatgaacttaaggaatgcaatgattttgggagtgcaattcatggtgttgatacagattttctgaactatgatgatgatgtggacttcgacgacgccaatgatgatgagccaaaccctagtgaatttcagtctcttgacaacagtggttggtcttctcgcaccaggggtgttgcaagatatctcaagactttattcgatgaagactcgggtct

SEQ ID NO: 458000 - DNA, 308 bp, Sorghum bicolor
cgtccggcttgaggtgaacaacacacccacatgcgaaataatatgaaagatttgctgttcctgtccattgaggagctcgaatgggactgatgttgcattgattgtagtttccttgtcattcgctatgcacaattattggccctgatgctgccatttcttttctggtgcaagaattgattgcccaagtgtgcagttgactcttctcgcaaatctgcagggcagcaaatcggtatgatcagagcctggtttgtaagttggtctcgttgtcgctgccctatgtcaatacgaattctgccatggttcccccc

SEQ ID NO: 458001 - DNA, 533 bp, Sorghum bicolor
cgtccgttctcgcccccctgccgttcggccccccttggtccctccaatgccgccacccatggcgctgctgccgctctcctccaccgccgcgtccgccgcactcccgcacttccgcccctgcccgcccgccgcgctgcttctgcgcctaccctccgcccgcgcccgcgcggtctccaccggctacgcggcgtccttctacggcggctcgcgaatgtccgcggccggcggcgcggacgaggaggaggtcggcgacgagtcggggttcggcccggggctcggtctcggcggcggcgggccttcggatgtcggccgcggaggccgcgctggcgctagaggagcgcgagatgccgccctgccctcccggcctgcgccagtacgagaccatggtcgtcctccgccccgacatgtccgaggaggagcgcctcgccttgatgcagcgctacgaggagctgctggtcgccggcggcgccatgtacggtgaggcttcaacccgggtgtcatcccgctggcatacagcatcaggaagaggaaca

SEQ ID NO: 458002 - DNA, 547 bp, Sorghum bicolor
  unsure (1)..(547): unsure at all n locations
cgtccgattccgtcccccctgcccagatccaattctccctcctcctctcaacccctcagatccctgtcgctattggccgtggctgcggttttgaaggcgcagttgagggtgagcatcgactgttgctgctgggttcggcaccggcgaggtcgacacaccaaggtcggccgtcctacctgccaccaagcccaccaccgtgtcttctgccaacactactggcagatctagtatgcgttcggctcaggtcacggccaggagctcctctttaactgcagcaagatgcctctcgatggatgtcgcctcctagcggtctgcaacccggcctcctacacgtgatgttgtgtgtgtgcaaatgccaggcgttttccatcaaagcgctctgctccagctacactcatgatcgctcacaaaggctcgaacgagtagaaagagagctccttcatggctctaaagttgaatattttgttgttcctccagtgatggagctgatggccatgaagttcaagttctgaatgagaagggattgngggctgatggtcaagtgaga

SEQ ID NO: 458003 - DNA, 422 bp, Sorghum bicolor
cgtccggtggccaagatcttagaggtaaaagcagctatgcatgcccaatacgacttatgggagaaagaacaggaaaagcttcggctctccaaacaaggaggtgacaacaatggcggcgactttagtggcaacaaaagggagagtaaaacagtttatacatatgagactatcaataaacctacaggacgttacagaggatggatggacttgataccatatgaaccggaccttgagtttgggacagaatttgagctgaagcacataaactggcaagttgagaagtccactctggagcttgctcgatgtgtggttggccttgaatgttttacaggagacacagagattttctcttgctctggcacaataggtgagtatgaggatgatactgcttatgtagttacatctgcaagtttgataacatg

SEQ ID NO: 458004 - DNA, 324 bp, Sorghum bicolor
cgtccgtagagccagaaattaggtagcatgtgaatggttgttcattctttcagttgcgggttaccaccaaatgtccatatttccattagctttggttgtatagttctaggaaccggaagttaactagtcttagaagttctgtaccgttttgcagcaccgattcctgattttggagtgtaaagtttgtataatacctagtgttatcggttatgcaccagttatgtgctgagtgccatgttttttgcagtttgctgctgtatcacaacgagaggacattttacaacagttgtattgtgatgttctgtagtgatacatagtgcctaa

SEQ ID NO: 458005 - DNA, 273 bp, Sorghum bicolor
cgttcgagccagagcccagaaacacgacagtcgacaccaccaccacagcgcgcacacgcaccgagccgtgcgcacacgcacctcgcggcgggagcgatggggagcagcgggggcagcagcgagcacttcctgcggcagctgagctcgagcgacggcggcggcagcgcgccgcaccagctggtgcagcgggagtgggagtgcgcggcggcggaccggcagaggcgcggtcgcgggctggtcaggacaagaagcacagggccgggcaccgcggtc

SEQ ID NO: 458006 - DNA, 537 bp, Sorghum bicolor
  unsure (1)..(537): unsure at all n locations
cgtccgcttctttatcctcagctgaaaatagtgaaaaatttggaaataccaagtatggaactgttcttttcacggatattaatttgataagtgggatggagcaaaccagctttttgttccaacaagcttcagcggttgggttctctcactctcgaatcctccgtacagttgttcagcatgcttgctcgcgattcccttctcttgttccatgcaataacgcttggaccgctttgtccagaaaactacaaccatcgaaacaaataggagcaatccacaaaggtacatcaagacagaangtttttgtgatcttcggaggggacacttcagagcggcaagtatcacttatgagtggtaccaatgtctggcttaatctccaaggttttgatgatcttgacgtgacaccatgtttgctcgctcctgcaaatggatatttctcatcccatgatcaagttttcagtgacacttcaagagaagtctggacgttgccatattcattagtgttacgacataccactgtagaagttcatgctgcatgtg

SEQ ID NO: 458007 - DNA, 242 bp, Sorghum bicolor
cgtccgcccacgcgtccgcggacgcgtgggcgaagtcagagcgcaccatgaagaagccatccacgctcctccggtccttctcctcgcgccgatccacgcggctcgcgctcgctccctcgccggcggtggctccatggccgccggtccgatcgtcctacgaccgctggctcgcctcagagctcgaccagctccgagccgatctggtcgaccctgcaccagcgcgatggtcggcgacgctagct

SEQ ID NO: 458008 - DNA, 121 bp, Sorghum bicolor
tccggtcgccacgcgtccgtttgatagacgacccccaggcatactcgtttgatatgcaaataaacccattgtggacaaacattgactgagtgatcaagacgccaggactgagccatagacc

SEQ ID NO: 458009 - DNA, 467 bp, Sorghum bicolor
  unsure (1)..(467): unsure at all n locations
cgtccgtgctttcacagtaaatggacacgtgaggactttaactctgaaatgctataactggcagcttattttggattttgttttaccttctgtaattttcaaacttgatattgttgttctaggatttgcgttgttagtgtgctattcagttcactccaaattctataaggtgcttagcataatggcccaatataaacaaataatcctatttcattctgctaaaattacaccttgttttatactatcttcatgccatttaattgcatgtcctttatcctatattttctactgctataaatatagttggtaaagcagaacaactaaggtagttgtttgtagtgcatccatacacatagttcttggtctctgttattatgctcttggcaagaactcaaataccngaagttgattcaaatttctttaagaattaattcagtctcactacagttaccatgttctggagatgt

SEQ ID NO: 458010 - DNA, 242 bp, Sorghum bicolor
cggcgcgggcagggtccatttctacacccgcccttctaccccggagctgctggtgctcctgctccctcgctcggagttcgtgtagggttgccctcgagagctctgcggttgccgcggccagcaagggcgtccgtggagaagcgagagcagcaagtgacgatggaagagaaagccggccaagcggcgttcggatgggcggtgcagggacgccaccggcgttctcttcccctacaaattcttca

SEQ ID NO: 458011 - DNA, 415 bp, Sorghum bicolor
cgtccgagcgagcctacctgcaaacatatacatgcatgaagctagaatacttaatgtatgagctagcaaatggcacaacacatgaatatcccgacatgatgctcataggcaaggaatatgcatgagacgttcgacgaagtcactacacaatgatagcacgcctgactgatccactagctgtcgctatgtatagcacgtaacaagacgcaaagtgtgtgtttcaggtactcaaaaacagatgcacgctgaggccagatagaatgtcaaggaggtcagtggtgctaagcatgtgatgtttaaagcgtatgtggctaatgcactacgactgacgagagatgatgtagagcatggtgaagggtataatggaccagccgatgccaattacactgaaggaccggctggtaccactggtgat

SEQ ID NO: 458012 - DNA, 510 bp, Sorghum bicolor
  unsure (1)..(510): unsure at all n locations
cgtccgaaggaggaggcacaggcagcctactacagccgccggggagtgggagacgccgccgccggcagcagcaatgccaatggcaatggcaatgccaatgccgtggcaccagcagcctactcgtcgcagagcgtggaggagatcatgaggatcgttcaggaggcgcagacgctgcccaagcccgcgaggcccgtctccggctacggctgggacgccgcctccgacgacgacgacgaccagtacgaggaagaagcagagcccgaggaagaagacgactacgacaggacggtgcggcaggtacacgccagcggggagttcgacatgagcaggctccaaatctgacatggcacacacctctctctctctctcagntcctctcttggcaattgccaacaacccaccaccacagcttaagcttagcagtcagttttgtgttgtgaaaaaattgcgcacctgtaaccccgcaacgctcccctggtttcaattcagattcagatgcatttntcagtc

SEQ ID NO: 458013 - DNA, 392 bp, Sorghum bicolor
  unsure (1)..(392): unsure at all n locations
cgtccgctctcactccccgcgcccaattcggagctccaaccgtccaattcgctcgcctgcctacctgcgatctctccatggcgactgcagcaaccaccaggaggccgagcggcccagtcctctcggccgcgcactaccgctccgcttcgtgcacgcgcgtgtcgctccccggcgccggcgcccgcgcgcgggcaccgnccaggcagtccgtcagcgtctcgtcgtcgtcgtcgtcgaggagccggcggacctgcatgtgctcgccgaccaaccacacgggctcgttccgctgcagccggcacaaggagcgcgtcaagccggcgtcggcgggctcccacggcgtccacgggcacggacacggcaagccgagcttcccggctttccctggcggg

SEQ ID NO: 458014 - DNA, 390 bp, Sorghum bicolor
cgtccgcgagcacctagcagcagcagcagcagcagctagcagcaatggagtccaccaagctctccgcgctgctggtgctcgccatgctcgcgctctcctcgtccccgctcgctctcgcgtgggagaaggcggagccggagtgccactcgtgcgagtccggctcgccaccctcgaccggcgtccccctgccccctatcagtataccgtcagtccccttgccgcctgtcagcataccgtcggtgcccctgccgcctgtcagtataccgtcggtccccatcccgaagctccccgtcccgcccgtcaccttaccccctgtcagcgggctggcgccggtcagcctcccgcccattccgatcatcggaggaagcccgacgaagaagggacaccgga

SEQ ID NO: 458015 - DNA, 486 bp, Sorghum bicolor
cgtccgcaacattgcagctccaatctctatctctatccacgtggcaccatggcaccaagaatgtactgcgacaacgcctcagtccacattctgtacacttgaatctacaagatcgtcgccgtgcacaaggtcaaagaaacaagatgccagcataccagtaccccaatctcacaataattgaagaaggacaacttcaacgggacgaaagagatgtgtttcaggctgcggtcatcttcgaagtgccaccttcggcgatgcatattataggacacgaagaaatcaacaacgcaatacatcaacaacttcgggtcgacataaatgtacaagacatatcaaagtttggctctaattacttcataaagactaactgtcaacagacaactgccccgatgctacagcacacctttctcaaagttggctcacacacactaacacttgaaccatggaacccatattacaacgccatcatattttcttgtgagacac

SEQ ID NO: 458016 - DNA, 408 bp, Sorghum bicolor
cgtccggacctcgctgatggatgtatctaagaagtatggaactgattaccggatcttacatgccatcaccactgtttattcttggtatggccaatggggattcaaactcaacacagggagcttcggaatcacatcaaaagaatacttaaaagctgtagacaacctttcctcaactccattatcacacttgttccctcacttccgatatcctaggaaccagctacaagataccatttaattctaccaatctctgtcaaagcaccctctcaccacaattcgtgaactgttcctctatgtgctgtggcttgccactagcaagggtataaatatgcactatggatcaatgcataaggagcattcacatacccatatgcaagagacatggcctgatgaggaaataaaacgtgc

SEQ ID NO: 458017 - DNA, 470 bp, Sorghum bicolor
cgtccgtgttagcacaaaactttctatgtgtataatatgtgtttttatgaaccaaagctcacatgcatgtttgtatgcttactatgaggtcttcctcatagaagtctgtcagatttaattgaatgtatgactatatgtataattttccatttggatcaatgccaaattctttgattgaaatattatcgcttttatttaagccatgactgcttagaatccacgttgtcaggctttcacaaaacttaaacatggtagttaagtgattgcctttgtgtttaatatgaatcaactatagtctgaataatatactattgtacttttagtcattttggttgtgattcattgatttcgagcttcttgatctaattttttggcatccagggttcaagatgtattcttgccaacaatataaagtgtgaagctaaaatataggggatgggaaagacactctgagaacggttgctaaagca

SEQ ID NO: 458018 - DNA, 256 bp, Sorghum bicolor
cgtccgcctcggtcgagttcttccacctagctggcacctactagctagctagcgccgcgccatgagtcccatcatcacgatgctgctcatctatcggcgtgggcatcggtgccgacatgatctggtagggcataaggggagagcccacagggtgacgtcgagactgtgaacggacaaagctgacagaccgtggggcccggccgcgcgcgactggcggtctgcgagcgggtgtgtgtgcgtgggcgggcccctgtac

SEQ ID NO: 458019 - DNA, 390 bp, Sorghum bicolor
cgtccgcaggttacacctgatagccaacaagtgaagactacaagaacatgtgcgtctgagactaatcagaagcgcaagcgtagctcctttaggtcccccctgtcgtgtgtaagtgagatgtcgaagaaggatattattgaggcaaacagaaaatctaagtctacaaaaacttcccaggtcacacctgataggcgagaagtgaagactacaagaacacgtgcatctgagagactgagactaatcagaagcgcaagcatagctccttcaagtctcccctgtcgtgtgtaagtaagatgtcgaagaaggatattaataaggcaaacagaaaatctgagtctacaagaacttcctaggtcacacctgaggtggacactgtctggttgcttgggt

SEQ ID NO: 458020 - DNA, 411 bp, Sorghum bicolor
cgtccggcagggcgcggagtttgtgtcctttgacgctgccaagggagagtggaagttcagggtgaagcacttcagcgcctatgggctttggtgatatacagtaatcctgattcctcaggagtgagggatggacgatggagtgtcttgtagttaaagtagcgtttttttttggttggtttgctttggagtagtggtagttattaagttgcccgctttacgcttttgtaaaatgtcatgctggggttctgtcaccttttgtgcaaaagatttgagttgttgctgtaaaatgcttgcaaactgagctatgctgctgaaaactgcagcagcagcagcagaatccgccataacagtaaggcgtgtgctacctataattaactatgactgcccatgcgctggtaagcacgggtccac

SEQ ID NO: 458021 - DNA, 549 bp, Sorghum bicolor
  unsure (1)..(549): unsure at all n locations
cgtccgcggtgggatccaggggtgtgtcgccggtgccatggtactaccacccctccacgacgccccctccgccgccgccgccggccgcgcactacgcccacggcgcgcaccagcagtaccacggcgtgctcccattctaccccgccgccaccacctacgggtactccccaaattacgtcgcggacctgagctacaatgcgaagttaggccaagcggcagctggcggcacggccgggtcgtacctacagccacaggggcacttcgcgtacccggcggcagcgcagggcggcatgcatgtggcggcgcccaacggcatgatgccggtgtacccgttctaccactaccagtaccaccacgcctcgcagggtctgggcgtccccgccgcgcacttcttccccccggtctccgccgccgccgtcaccaccgtcccggccatcgtctccaagcccaccgtcatggccgctcctnccaaagtggagcaggtgacgggctgcagctgaaggcacgaggcggtgatgatgatggcgacgatgagcgggcggcgcaatg

SEQ ID NO: 458022 - DNA, 527 bp, Sorghum bicolor
cgtccggaaaaggtcttggctgaacttccagctccagtcctaaatggtacaacgcttacagtcgaggattttcaccaggaactaaaatgcagtatcaacatcaaacacagggatgagttcgatgaagaaaaggagcctgacggaatggttcttgctgggtggtctggcccagttgataagcaaattaccagtaatggtgagaatagatcagttccatcttcatcgaatacagaagatgttgatggtactgccgaggatatatcagcgaagcctggaatgaagcgtaagctgaacgaaatattagaggcaaaggaaaattttgatgctcttgaaaatccttcggatgttggttcaagcagcgctcaagttgttgaagatgatgacgacgacgagcttgttatgtttgatgaagacccaaggcaaagcaggaagaagagattgcaatagcaaacgataacagctcttgactcccggcatcatggctaacacattgttcaatcataacatctttgataacttatctatgc

SEQ ID NO: 458023 - DNA, 145 bp, Sorghum bicolor
cgtccgcggacgcgtgggcggcggcagcgcatcaacgcccacctcgccacgctccgcaccctcctccctgcggcgtcacggatggacaaggcggctctgctcggggaggtcgtgcggcacgtgcgggagctgtcgggcgaggcgg

SEQ ID NO: 458024 - DNA, 565 bp, Sorghum bicolor
cgtccgaaaaggctcgcgaaccctagccaagatcacatcggatcgggtacgttccccatccttccttgggcggcggcgtgttcatggcctcaggcggcggcggcggcgtgtctgtggcgccgggcggcagcggcttggggtacgacgtcggagaggtctggggggacttggaacctttcttcttcgacgaggcggaggcggtggccgatcatgagaggcgaatgcggagagaacaggaggaggcgcagaaggcggcgcagcgcctccaggacgcgatcgccaggaagagcgccaacaaggccgcgctggctaagatctcagactacgatccgaagcaggatggcaaatacttcaaccgatttcacttcgccgacttctccaaattcgacctcgacgaggagtcgccccttggaccaatgagatacaccaatataatctacaataagggtgatgagcactggaagagcgctgcagtgaacattctgtccgtgaagatagcatcattggatgcggttttcccaatgatgtgtatggcactgtaattttcagagacagcattgattac

SEQ ID NO: 458025 - DNA, 241 bp, Sorghum bicolor
  unsure (1)..(241): unsure at all n locations
acacaggtgatgccaccccacccctacaacaacagctgggtgccgctgtttcgtcctctcggcccgtgctcgccgtcgttcaaggctgcggcggcggcggcggcgaggacgaagccgtcgctggccgacgtgctccggcaggaccggctccgcgtccaccacatccataagaagggtggtccggcttcctcccgcggtggcgcgcgccgagcaaggggctccttcaagggagcnccgtgtc

SEQ ID NO: 458026 - DNA, 275 bp, Sorghum bicolor
  unsure (1)..(275): unsure at all n locations
cgtccgaaaaaaaaaaaaaaaaaaaaaaaataaaaaaaaaaaaaaaaaaaaaaaaaaaaaaaaaaaaaaaaaaaaaaaaaaaaaaaaaaaaaatataaataaaaaaaaaaaaaaaaaaaaaatattattatattaatattaaaaaaaaaaaaataaaaaaaaataatataaatgtggtttgtattttataaaatatataattttatnaattttttgtgtgttttaaattttttttttatataggatattataatataaattaagggggggttttt

SEQ ID NO: 458027 - DNA, 570 bp, Sorghum bicolor
  unsure (1)..(570): unsure at all n locations
cgtccgggaaaggaggggcagtgatgagctggagcaagaggatttggcgaaaaaacttatcatcaaagttgtgccgtctcaactggagcagcccctgggccagatcaaggctctggttgctccacattgtactccctgcacacctgttcttattgattctggggaaggaaggagcaaaaggttcagccgattcacgtctatcaaccctcggaaaatcctcctcttattcgcaacgctgtcgagtgtggggacgacaatactgatctacttcacactggcaatcaacagcaaagcggaggcgtagtcgtttgcagacaccaccaccatttgcttcggcggcagcagcagtacattccgagcttgagtttttctcgatttgtttgtggggggaagaagaggaccagatcagatgcagccagtttcaggtgtctccgtgtctgtatccgtgactgagtgagagacactgctaactgcttgaggnggtgctcgcgcgttgtacttgtaatttgtattgccttcagttcacccncctcaccttccaaattcccgtcttccttgcgtgtatgtata

SEQ ID NO: 458028 - DNA, 463 bp, Sorghum bicolor
  unsure (1)..(463): unsure at all n locations
cgtccggttgatcccaaacccgctagcacccaggacaccaccgccgactccagcgaccgcgacgatgacggcggcggcggcggcggtggaaacgcgcgttcatggcccgcgacggagcgcgtctcctcgtacctatggagccagaactcggtccacgccctctgcgagaagttcggcgtcaacacgaaggcgttcaccccgattcccgccggcgaccgacgcgcgtgctcgcctccacccggtggctccatctgcttgtacgcggacgcgctggaggccgggatgcgcgtcccgttcgaccccttcttctgcgaggtgctctcgcactttggcgtcgccccgagccagctgtcgcccaactgctggcgcatcttggccgccttnctggcgctcttccggcgccgccggcgtgcaaggcggccgcgggtcccgtgttcctgcacttcttcgcgcttggcgtgct

SEQ ID NO: 458029 - DNA, 552 bp, Sorghum bicolor
  unsure (1)..(552): unsure at all n locations
cgtccggatgacactgaggatggtgaacctccccaaaagaagcagaaggaagcaccttcagctacaaaggatggaagcagcagtgaggatgaggatggaagtactgaggaaagttctgatgatgagcctacaaaagctgaacaaaagaaggcacctaaagcatcagcaagcagtggatctgaggatgaatcttctgaagatgatagtgatgaagacagtgacgagcctgctaatactccaaagaaggaagctcctgtgcgtgcctctgaaaagcaaactgctaccaaagaacctaaaacacctatgggctcccaaaacgaagcaacggaggaggtcaagacactttttatggcaaacgtcccctggagagctgaatttgaagatgtgaaagaattttttgcggatgctggtgtagttgttgatgttcgttttcctacacatgaggacggccatcgtaaaggattttgctatgttgaatttgtttcagctgaggctgctgaaaaggcatttaaagagaagcaatcaacagangtgcaaggtcgtgaagtaaga

SEQ ID NO: 458030 - DNA, 454 bp, Sorghum bicolor
cgtccgcctaaacctctcctctccatcggagtctcgccgccgcgccatggcggcggaaccgccagagcccgcatcctcgcaggatgcccagctcgcggcctcctcctccgccgctgtagacggcgttggcgaccccaacccgtgctgcgcaaagctgtggaagaagtaccagaaattggagacgagccggacggcgctgcgggaggcggtgaagctcctgcaggccgagaacgagaagctgcagaaggagaactcggagctcagcaaaggttcagactctgcagtatactacgaggacatgtatattaacttcaatattgccaaggagatcgtcttccaaatagcgggtatgcaaccagcaaatgtacgagttaggccaaaagacatgtgctgagaaaaagtttgatgcaagcaggaatttaaaagctgaagtccaaacctgaatatatatttt

SEQ ID NO: 458031 - DNA, 550 bp, Sorghum bicolor
cgtccgcgacccacgcgtccgcccacgcgtccggtgtacgataccacttgaatgaatgggggagtaatccggtgcaaaatcagaaggaattgttcaaccgtaggcactgctcattgagaataatagttgagcaagcatttggggcactgaaaaggagattcaaagttcttgacgatgcctctacattttttccttatgaaactcaagttgatattgttgttgcttgctgcattattcataattgggtgattgaagatgggagtgatgaattcaatgtcccaagtgacaacgatgaggacacccagcataccacatatgctgggacagcaagtgagaatgcctgccattatgctagcttttaaggaaggcttggctgaccaaatgtgggcagatcgtctaagccatggaaactagtgttggtcaatgtaaattgtgttgtatttcatttgtttggaccatgtaatctttgtatttgacggctgaaattgtatttgaggacatattgttacaaataaatgattggttcttgttgcattatatttgaggcagc

SEQ ID NO: 458032 - DNA, 507 bp, Sorghum bicolor
cgtccgtacatgtgatgtgctagtaaccgacgaagcatggaggttagtaaagagttggctcttcgatgatgagaatgatattgctggtttgggagactatccaggccttgcagcagattgggttgtcggtaaggagattaatggcaaagggtggcctgaaatgctgcgcttggaggtggatgaaatcagcaaggagatatgcgaggaagtcctgggcgagttggtcggggaggcattttcacagcttgcggatcattgaagctgctttattttccctgcttgtggcgtccacctgttgcttttatttccaatccggtggagtccggccatggggctgatcttcaccctccagagctgttcttgtgtgtatattaccctcataactgttctgcacgctgctcaaaatgttccccactggctctatctgttcatctcttccgcattgatacattcacagtaataacatttatgaatacagctgctgcatttcaaattgttcttggccac

SEQ ID NO: 458033 - DNA, 418 bp, Sorghum bicolor
  unsure (1)..(418): unsure at all n locations
cgtccgggtgagcacaccgggtgtaggggccatggatttatggatagctctccatccggatcctgactcaaaaccacaaatatatgatgctatcctcaatgggatggaggtgttcaagttacagcttatcaatggtagccttgcagggctcaatcctatcccaagtgttgccccggccaatgatgggacaactaagaagaagtcaactgttgggcctatcgtcggtggagtggttggaggtttggtggttcttgcacttgggtattgctgcttgtctatgatctgcaagcgtangaggaatgctgggaaggatgcatgcctgagtgatggacattctggttggctacccctgtgttcttatggcaaatcacacactttcagtttggccaagttacacactactggtagctatgcttca

SEQ ID NO: 458034 - DNA, 490 bp, Sorghum bicolor
cgtccgacccgacccgccgtcttccccctttaccgtccttccccggcgaccgaagccgccaccccggcctcgccatggactctctccttgccagctacgcctcttccgacgacgacgccgacgaggcaccgcctgctcctcctcctgcccgtacccccgcccccgccgtctcctccggtggcggcgcaggcggactattctcctcgctcccgcagcccaagtccgcgccggccccgctcttctcctccctcccggcgcccaaatccacccccgcgccgctcttctcctctctgtcggcgcccaaatccgcccctgcacccgcccccgcccctaccttctcttccatcccggcgcccaagtcttccggaggaaaccctaagcgcgtcgtccagtaccgcccgcagccgatccggcagcccacaggcgacagctccgacgacgacgaggacgaagccaagaagcgccgcgccagcaacaacgaggcgcgcct

SEQ ID NO: 458035 - DNA, 252 bp, Sorghum bicolor
cgtccgcctcgccttgcctcgccgccagcgcaactccagcccggcccgggatctctctcatcacatccccccctctctctccgctcccccgcctcggggcctgcctcggatgctcccggcctcgcacccgctgctctacgcctgcgtcttccgcgacacccacctcgtcgccgagctcccccactcccactcccagaccaccgtcgtcgaccccgtagtcgctcccgacgtccccgtcctcgttcctgacta

SEQ ID NO: 458036 - DNA, 436 bp, Sorghum bicolor
cgtccggtaggctctttgtaaaggcttcaggaagaccacaggacattctgccgaagttaaggatgctggcaggtttttcacaagatgatgatattgaactgtatgaggaaattaagtttgagcccaatgtgatgtgtgaatacattgataacaggcttctgtttcgatcttgtcagcttgaagatggggacataatttgttttcaaaaatcttcaaagccagatagtgctgaccgatatcgatttcctgacgtcccatcctttttgacgtatatacgtaaccgacaggtggtccacttccgttcactggagaagcccaaggaggatgatttttgcctcgagatgtcaaagatattcacatatgatcaagtcgtggaaaaagtagctgaaaaacttggcgtggatgacccatcgaaaattcggcttacatcacataa

SEQ ID NO: 458037 - DNA, 546 bp, Sorghum bicolor
cgtccgctgtgactgagactcaagaactagaaaaatgtagaaaaatgtttgaagaaaaggatgaaggacatgatgtaccaagtccgtgtggatgttgttaaggagtactacagggaaataaaacacagagaaatcaaggatgcaatagcgtgccatattgacctcgagtatgagcagtacaagcaagcaaagctcaagtggttgaatgatgaggtgtggttgctcctttgtgcttattggtgctcagatgtgtacaaggtaaaacgtaagagagggcaagcatctcgctcaagtagtgaagatattgctcaaaaccgaggagggtctagaccattcagagacacaagtattggaaaagtttggatagcaatggtagatgtggtccaatcattagccgcaaagcccaacaacgcatggacgactatctttgtgctgttaagaggatagaatgtgcaaacgaagaggatagagatggtgtagaccatgaagtggatgggcatgaggtcgagcaagagcaatatttgaatgggaaggcactatatgatg

SEQ ID NO: 458038 - DNA, 350 bp, Sorghum bicolor
cgtccgggagcagccaatgatcaaggacaaagacctttgttcgagcttgggttccgaaggatctgagaataaatagcctgattcctgtaacctgctttacttttgtagtgtctgctgaatggtatgctagctattttggtcacctagctcttgatccctgggtgattggagtaatggctgtaaactcctgctttacttttgtagtgtctgcgcttgttaatgctggtgctatgtaagctgaatggtatgttagctaaaaaaaaaaaaaaaaaaaaaaaaaataaaaaattattaaaaaaaaaaataaataatataaaaaaaaaataaatatatttgtaaaaatttaaagg

SEQ ID NO: 458039 - DNA, 509 bp, Sorghum bicolor
cgtccggtgcgctggactaggtctgccagccactagccgcggtagatctgccgctgcccctcccatcccgtacgctggcttaaacactcctgatttagccaccgccccttccgttgcgatggatctgccctacccgccgggcaagtggcggtggaggtcaacgatggtggtgggatcttgatttcggcatgaagtaatgggatggggatttggattggggcactaagaaactggtttggctgatgggggatttggattggggcactaagaaactggtttggcttgatgggatcttggtattggggaactcaattttgatggtatgatgttcaatccgccatggattagggatcgtgtgtgtatggtggtaagggagggcgttgcttttgaataccgcatcatcatgtgattttatttgcgatggtgtatggggagggcgttgcttttgaacagtacatctttatgtgattttatttggtacctggttagtacttcagattatttttcac

SEQ ID NO: 458040 - DNA, 453 bp, Sorghum bicolor
cgtccgggcctcttcttcgccggcgacgagcaaccaccagggcacgggcctcaggatgcaatcgttggtccggaatgtctgccgagccggaagccgtggagcggcggcgaggctcctggagcttgccgctgctcccgtagccgcggctcatccgggggcggcgcagccatcctcggcgtaaacaccttggcagcttacgttgctcgccgatcgggtagacaatcgacgggcaagccgtatctgtgtgctcggttggcactgcaaggtcttgtgacagggttgcgacggggagcctgagtgtttgatgacattcacttttgcgtgcaccccgcataagtaagggccgcagaccgcgcatatatgatatcgacaagagagcgtaggccgtcgggaggagttctgtgtcagctgatgatgataatagatgcagtctgagacaacgccggtgcatga

SEQ ID NO: 458041 - DNA, 163 bp, Sorghum bicolor
cgtccggcacccgataccctacctcacttcagcacgtcccgatttgacggcgcgtcgcttcgacccggctagtgttacacccggacagatccgacggtcgttcgctgctgcagcgggcgctggactggcttggcgtcaattcggactgagggagggagggagg

SEQ ID NO: 458042 - DNA, 76 bp, Sorghum bicolor
cgtccggtgcaaatctctggcaaagaggagctgcgacagaaaaatcttttcagtgtcagtgattgcaaaatgtatt

SEQ ID NO: 458043 - DNA, 68 bp, Sorghum bicolor
gactgcttggtttggctggtgtggaatcttgggaagtgggacagtctgccactgctagagtcttgctc

SEQ ID NO: 458044 - DNA, 555 bp, Sorghum bicolor
cgtccgcccacgcgttcgcccacgcgtccgcccacgcgtccgcccacgcgttcgcccacgcgtccgcccacgcgtccgggggtttggtatttggatgtgtgttcactgcatccctgggttacacagcagctgttaacttgattgagctttcaatgcagtatactccccgtgttgtttattactaccaggagctgattgttactgcggctgcctctgttcttctgtacatcacagcttcatactaccgataaacacacaccgtgagcaattattgcctggcttagacgactgtgagatgttaggacatgcctggagtttcagttggacaccgacttgcggactggcggcggtgccttgtgcgtcaagggatagccgagaatccacagattttgtagcatactttcaccagcatctgtcagttttgaggcagagagttcttagtgcaggatcttatgtgaccagtttacggttcagtagcaaacgcagatggctgatgagaaacatttcacgtgaatatttcaacagcagtgttgtgtatgaatttgttttattaga

SEQ ID NO: 458045 - DNA, 371 bp, Sorghum bicolor
  unsure (1)..(371): unsure at all n locations
cgtccgctctctcccaatccgctaatcgctctttgctgctcccaatccgctaattctctcttgaaagggcagagaagggcgagatgacggtggagaaggtggacgcggcgctggcggacttcgacgcccacttcgaccgcctcttcgcttccccggacgccgcctccgacggcaaggtgaagctgctgctcttcctggccgaccgcgagcctgactcctccctcacctggtgccccgactgcaacgtggcggagccggtgatctacgagcggctggaggcagcactgcagggcaagggcgcggtgcttctgcgcgcctacgtcggngacaagcccacgtggcgctgcccggcgcacccgtggtgggtggtc

SEQ ID NO: 458046 - DNA, 64 bp, Sorghum bicolor
cgtccgcaatggaacaaggtctaattcatttcaattcacaggattcggtgcttaggagccatgc

SEQ ID NO: 458047 - DNA, 265 bp, Sorghum bicolor
cgtccgatctaccatatcatgaaatcgctagacatagtttacaaggctatgaatttctggccattcacctgtgaggtactaggcatgatctgctactcactgcgaccagtttatggaaataacataattgtgaccatgcctcaactctccaagttgctaagacaagtgatgattataatgtctctgtagactataaaaactatgaatggattactacaaatggtaacctattgggttggggtcatgacaagtcgttagctctgag

SEQ ID NO: 458048 - DNA, 381 bp, Sorghum bicolor
  unsure (1)..(381): unsure at all n locations
cgtccggatcacacgagctccgcttactcgacgacccactgcactcgcctccgatcgatcgatccggcgatcacactagtcgagtcgactcgactcgagctgagcgcgcgccccctatccatcaatggcgggcaaagtggcgtacccgcttgtgttacgtcgccacgggcgcggtccgctcggtcggacttaaacgagcggactgttgcaaggtgtgacccaaagtgtgcttacagaaaaatggcctctgtccattgtgtgtcactcagtttattgcaatattagcatgtttgtacatgngnntttatggtgccttttgtgccaacatagcatacctgaacattacacaatcatctggttattcaagtgactatttagcta

SEQ ID NO: 458049 - DNA, 505 bp, Sorghum bicolor
  unsure (1)..(505): unsure at all n locations
cgtccggcttatgggactggcgccgctgcctctgtccctgcccctgcaggacatgacacaagactttggactgagcagggcgaagagtttggcggtgatgaggaaactggaatggaaactgaagatgaaaccgaagaggaaggaaatgatcatgaggagggcgatgatgatgatgatgatgacgacgacgatgaggtggacatcgagtgattcatttgtttgcttctttcttcaggtaatgctgaaggggaagagaaaagcttatcatgtatttcgtagtatcattacgtcgtcgttgtgattctgcacacgtagaactttatgcttgtgggtgtgcttgaggacttgttttaagattcctataagacttattttgttttagtgtgcaaccatgtaacgcaatggttgatgctcttaatctcattgtgtgctgtaagatggtcttatgagacatggaagaagaggccacccgtttgcatgcatgggaaaatgcangtcatgccac

SEQ ID NO: 458050 - DNA, 480 bp, Sorghum bicolor
cgtccgcaaccaccaaggccccctccatcttccctaacactcagcactccagagagcgacgatgtgggtcatcatctggtcgcacgccagattgggcgtcgaggcacgtctctgtcgggcggcgtgtacgagaacgtgctcttcttccccgtggcgcagatgctcaaggaccggtaccccggcgtgctattcgacgtggtggcgtcggccaagggcaagcaggtgtacgagatgtgcatgaacgtcacgtacgccaatgtctacgaccccgacgacgactggccggagcccaccgagtacacgcacatgctcggcgtcctgaagggagacacggtagatctggtggtggcgcgcgtctccggccgggatatcgccatctgccatcacctgcaatcatgcaatgaaaacaagtgggggcactactctcaggctctaaggcatgattgacaaattcaagctgaccatgtgaaacgaagtttg

SEQ ID NO: 458051 - DNA, 286 bp, Sorghum bicolor
  unsure (1)..(286): unsure at all n locations
tgagggnnagttcgcggccccattaatggccagcggcacccgctgcgtgccagnncgaggcggcggcgctggccatgcgccgggtcatggagcgccacggcgacggcgccaccatgcagcaaggctagacggcgcgtcgtggatagactgcgccggcctgctgacattggagctgcgtggtgcagctcatggaattgcgccgatctttgtgcgcgatggaaatgcgagtatatgtagtcgtgtgggtaacgggacagtcacctaaataacatgttcaagctgctgc

SEQ ID NO: 458052 - DNA, 503 bp, Sorghum bicolor
cgtccgcagcaatgtcttctagatccagtgcgtgtcagaacaccagtagagcaccttgtaaattagctgctcaagcttctcataaatatcttaaagttgtgaagggttcagatgccaaaccccatggaatttacgttaataaaggatcaagtgcttctcttgttgcttctagaaacagtactgcaactgggaagtcgcctgcaaagatcttggtggtgcccagttcatctcaagctagtgcaaaaacttccaggactgctcaggttacatcgaaaagaacagcagtacctaccagtgtaaacaatgtgtcacagaataaaaggaagcacacactcgtggcattggatgaaaaatccccaaagagagaatatgtgcgcagatctgcaccttcaagtgcaagaagcagctccgagaatctccctcgtgctgcaaaggcacctaagatttcaaatgtgacaaatccgggtccaagactgaagtgtgcagaattcaagtcatcaagt

SEQ ID NO: 458053 - DNA, 351 bp, Sorghum bicolor
cgtccgagaaaacaaatttatctcattgttgataaaagtaatttcttgaaactgttaatatgcaaagccatttaagttatttctagaagtttgatgaatttggctaactttgactttgcatgataatagtgttaaattattaactagcatatatgactcatccatggatccataatactaatttatagttaaatgtgagacttttgaaagctttgctgcaaagtttgcttacagaaaaatggcctctgtccattgtgtgtcactcagtttattgcaatattagcatgttggtacatgtgtttttatggtgccttttgtgccaacaaagcatacctgaacattacacaatca

SEQ ID NO: 458054 - DNA, 493 bp, Sorghum bicolor
cgtccgatcggatctcccgaggaatccatgataagggccattccctgacaaggaaactgaattcagatgggaaggttgacaccacacagacactgcacaacctgaatgaagatgaactagctggatttgaggaatcatggaaggggaatgctggacattacttgcctggctggaaccaaaatgctggtgtacctaatagtgataattctggtaaccgtagctccaatggacgtgaccggcggtcggcctggggctgggcgcttcctggcacggagcaaggccgtgatccaaggcgcaatggaaagccaaagtcacgggtcatcccaatctcctgaagagagtacacacgctttagcatggacggagtagatagataaataaacagctggtttgtggaagctgcaactctgcaaggttcaggtccaagttcgtttcaaggaaacaacctaaggtccaagtaaccagagtcctgacgaaggtccgaacgtgcccg

SEQ ID NO: 458055 - DNA, 463 bp, Sorghum bicolor
cgtccggagccagtgaaccctatatcagaactgaccctgaggtttgtgaagaatgtattggagaaagagagagctgtgcattggtggagaaacttaattatcagaatgaagacatccatgtttattttgtccgtgggaaagaagcaccaaagtctattaaagaagcatgtagtaaagctgctgttgtagcagatcgtcggacttcaaagcgttcccggagagcaagctctggaaattcaattagtttgaaagtctctggttctacatccatctatcagttgaaactcatgatatgggaatctttagggattgttaaggagaaccagaaacttcacaaaggctctgatgaaattgaagatgaccttgctactcttgctgataagggtgtttttcctggggatattctttgggtcagagactctgaaatctatgagaatcgtgacatagcagatgaaatttcaga

SEQ ID NO: 458056 - DNA, 437 bp, Sorghum bicolor
cgtccgctattgttgacaccattttttgggcgcgtgtccaggatggcaagacagggtggcagtatgatatgggttgctggtaaggatggttgccgatgagggaagagttgaatgtgactaagtcctcagacagtaacatggtaccgatgaccgagtaaaagggtctgccgatgactatgacaaggggattgccgatgacgcgaaggaggagtccggaagttgccagttgtcatgtggagaagttccggtttgtcacgaagggtggttttattatttccttatgttattcgtatcgttttatgtacgggttccgtgtaatttggaattcgaattctaatcgtgtctggtcgtagctctttgagcagggtataaatataagccctaagaccttgtaatcatatatcaagaaatcaatcaaacacacgtttttactcaaa

SEQ ID NO: 458057 - DNA, 490 bp, Sorghum bicolor
  unsure (1)..(490): unsure at all n locations
cgtccgatgaaaatacagccttcaaaattggtgagattggcttacgacctaatacacaaccactatcatgtgttgaggagaacatgattttccagtcatgctacaaagaagtcacagcagtcaaatcatcaaaattacatggccatggatatttgtctaagtatcgaactcgtaaagaacttatgaaagagaaccttgaagttcatgcacgtgttgaaactgctactagagggaagagcattgcttttgaagcacaggttgagaacctcaaagaacagattgcgcacgacgctatagagagggagagggtgagagaagaaatgaggaagatgcaagaggagctggaagaaggaaaaaacaaataagagaaatgaaccaagactntcttaaaatgatggcacaacacaaagaaggaactctgattgaaaatacaccacaaaacaatgagaatacacangctgcaccaaccatacaagacggcgatgagact

SEQ ID NO: 458058 - DNA, 128 bp, Sorghum bicolor
cgtccgaaacaaatgaagttgaatgcatcaaggaccaacacaatttgaatcctagaaaagaatgcagggggccggtccgttagtgagcgtgttctcaagcgtcactttactgcgggcttgcggacagg

SEQ ID NO: 458059 - DNA, 228 bp, Sorghum bicolor
  unsure (1)..(228): unsure at all n locations
gcacgaacactgattagagttcagaggtgggaccaccatggcggcgctgctagcccggtatacattcgtttccgaagatacatttccataccacagcattgtnnagacggtcgtgtcgtctatgcatgggcacctacgtacctacatgaacgcggtgattcccaagctgttcaaagaggatgaggagaaagaacagcttgcaaaagatgtctcaaaagattggaatgc

SEQ ID NO: 458060 - DNA, 109 bp, Sorghum bicolor
agcgtgcgaattaaattaactttttctggttttgtggtgtgagtgtgagagagaagaacatggttttcgccccggggcattaataaaaatgttggcatgcgtggtggat

SEQ ID NO: 458061 - DNA, 375 bp, Sorghum bicolor
cgtccgctggaactggaacaaggcaagcaggaccatcgccatcccacttgcgttcttgccttgccttctgcccgcgagattcctcagccgccccgcccttataagccacggcaaccgcgagccccggacgcaaccgcagcagggcgttgggacttgggtgagtgagtgagtgagactgggggagcagcagcagcagtgccgcactgaactccccttcttttccttgtggttcggcgccgcgcggcggagaggcacagcacagcagcaagcaatgccgcgccggcagagggcgcgcagcagcgaggagctcaaggcggaggacttcgtcgactcggtcctcaacttcggcggcggcggcgtgggcgacgaggatga

SEQ ID NO: 458062 - DNA, 562 bp, Sorghum bicolor
  unsure (1)..(562): unsure at all n locations
cgtccgtggagagaagttcatgaccgaatgcaatattcactaattaataggacatgaaatgcaccaaacactcatgtttgggcatttgaaccacagatttcatgggttttgcttaaatgatgaggttgtcgtgaaaataaacagaattgctcctggcctgcagtttctatgatgactcaaacacaccccagttgaggcagtgctcaaataccaaaaggagaaggttgaaatgctttctgcacaaactgacaaaagtagccataacaatgtccgaagttatgattttttttaccaagacgtaatatagattatttcacactgttcattacggtttgatgattttttccatatgcagcttggcactgcaaaaatgcagttacttgctgctcattgttggtataaaatctttggtgctattctttttgctcactgtgcaagagcaatactgagggagnccaatgttgagtgcggcacagcatgtacagtacaggaaccagcttatgatgcttgtatttattagcagcaaggcttgcatttggtactggtagatgttgatagccca

SEQ ID NO: 458063 - DNA, 496 bp, Sorghum bicolor
  unsure (1)..(496): unsure at all n locations
cgtccgcacttctccagtactataaactacaggcgcgcgcgggcgcagcccgctgcgctgctagctcaccccgcgttctacttgcactgctcgatccaaagcgtccagtccaagtctccaatcgatccaatccacgcagagagtctcatcaatcgattgcgccacaccacaagcacagtcagcttatttgcttccatggcggcggaggctaagacggagcctgcagctccagccgcggcggcgggtttgggcctggcttcaggggagcagccgccgcagcagcagcagcagccgaagaagaagactgtgtgtgtggtcgcggtggacgacagcgaccacagctactacgcgctggagtggacggtgcggcacgtgacgggcgccggcggcatggcgggcggcgccgccgacctcgtcatcgttcacgccaagccctcgtcgtcctccgtcgtcagcttcngcngccctggagccgtcgaggcgatcaggtacgtgg

SEQ ID NO: 458064 - DNA, 438 bp, Sorghum bicolor
  unsure (1)..(438): unsure at all n locations
cgtccgggttttgcgatggagatattgttgactttacaggtcatggttgaaaacatggaacctgagaaggttatactttacccacagctcttttggggctgtgttgcactgatgcataccgactttgtacacatttactgccaggtgcttgagttgttctgtagggtaattgatcgattgacattccgtgaccgaacaacagaaaatgtgttactctcaagcatgccacgtgatgagtttgacatcaatgggtatgcaagtgacctccacaggctggagtctagaactacttcggagagattgttatctgtgactgataccgngaaggtccctgcttttgaaggggtgcagccgctggtgctgaaagggctcatgtccactgntagccatggatctgcaatngaggtgctatctaggatcacgatacctacgtgtgac

SEQ ID NO: 458065 - DNA, 413 bp, Sorghum bicolor
cgtccggaggacataaattttgatgatgaccttttgcctcttggttctaatgatcaaatatcttctggaattttgggtactgaaaaagattcttttgcacctgtgctggatgttcctggccgagataaagaagaatcctcagttgggacttctggatttatagaacagaaggacaccagcagtgttgcagatatgcttcctgatcttaatttgaatcattttgcttctacggcttcaactcactcaagccattctgttagttgagtctcttgaggattctgttgctgatgccagaagcaataagaatgatctgttaccttctctagagttggttacaaaaatgatagaggatgttgagcttcttgaagaaaaggctaaagtagccaagcatgaagcatctgttgctgggacag

SEQ ID NO: 458066 - DNA, 96 bp, Sorghum bicolor
cgtccgaattgagattgctacaatggatctgtggtctgtcaatctgttgcaatatagtgcattcttgaacgatgtgttgatctaaacaggaaaggt

SEQ ID NO: 458067 - DNA, 370 bp, Sorghum bicolor
cgtccggctccatgcactcgttcggaaatatggatgattgagaaaggttcactggaagatgatatattccacgagcccatcttttcctgcctatctgaggagctaaacgaattacacaatcggacatatgaggctattgtacgccctgctgttcagagcatggaactacaaggtcaattcgacatgcctgaaaccattccggaaagcaatattgctgggtttggtgctgctaccattaatgacccacttcacataccagatgggattcaatcagatgccttgctgtcaggtgcaaatgatgcatgtggcgctacacctacttttggttgcaaattcctcctgacaaccaggttaacggtgcatctaatga

SEQ ID NO: 458068 - DNA, 286 bp, Sorghum bicolor
  unsure (1)..(286): unsure at all n locations
cgtccgcggaaacccccttttttattcctcatccactcgccgcacgacgaagaggagagcggctcccgttccccaccacctactcggcgtctcggcccggagcagcaggttctcgaagcgagccgcgaaacattctcgcgccaattgtgggggccatgggcgccaacggccacccgccgccggcgagcaccgccgcacagaacgggtcccactccggcggcggcngaggaagaagaagggtgaaggggagggagagcctaacccctagcaacgggcgggcacgggc

SEQ ID NO: 458069 - DNA, 480 bp, Sorghum bicolor
  unsure (1)..(480): unsure at all n locations
cgtccgcccacgcgtccgctccctcgcttcaaatcgattcggcgctagcgagcgccgagcagcaacgccaaggcggcggcagcagcatccagcaacagcagccgctacctccctttgtctagttgtcttcctcctccggtccactcctgcttgctagagtgcctagcctcatgaggaccccaaggagcctccttcccctcctcctcctcctgctgtccgccgccgcgctgctcaccgtcgccgattcgcaggagcgcaagaactacgtggttcatctcgagccaagggacgacgccggcggcgacagcgccggttcgctggaggagtggcaccggtccttcttgccggaggccacgctggactcggcggcggatgacggcccgaggatcatccactcgtacagccacgtgctgacggnngttcgccgccgcctaaccgacgcggaggcggaggcgctgaggagcaaggaggggtgtctgc

SEQ ID NO: 458070 - DNA, 399 bp, Sorghum bicolor
cgtccgcgtcaacacaactgcaactttacgatctaacttgtcaaaatgttgctcatctgtgtcaagaatctggtgtgaatacttgttcaataagcactggattagacaaccatgggacattaaatattcagcagcaatcagccaaccagacaagctccatggttgagcatatgcctgagaatggactccagtcagatccagttaccaatgggtgtagacaattgcttatgtctagtaatcgcacctctccacctgttcgagttaccaagcagcaaattgccacctctccacctgtccaagttatcgagcagcaaaatgcctctaattcatccttattaactccacatgaaagacaacaatatggtccccagacttgtcaaactgttgctcatcaggatc

SEQ ID NO: 458071 - DNA, 57 bp, Sorghum bicolor
ttattggactatgaccagcaactggctggattgagagactgccagttgctgtatgga

SEQ ID NO: 458072 - DNA, 337 bp, Sorghum bicolor
cgtccggggtgggctaccgccgccgccgccgccgctgccgcccgacgccaggtgccgaggccttttctgtctcgtcaccgtcgaggcggagacgatcactcactaggttttaggtccgcagggcgcacgccgtagctgcactgcccgagcgggtgcggtgaccctgtgcagcggcagtggcagaagtggctgtcgcaggccagcatcttggctcccggtggccgcgtgggtcagcagcagtctgcaggccgcacgcacaccgcagccaggctgccaagcaggcggctctgtgttgcctgtttgggtgatttgccttctgtccttgcagttgccgatt

SEQ ID NO: 458073 - DNA, 367 bp, Sorghum bicolor
  unsure (1)..(367): unsure at all n locations
attcggcgccagccacatccgccgccggcgatgcctccgtccgccgacgccgccgggccggcttcctttgcctcggcgcccccgctcgcacccctcatcgccgcgcagctcaactacctcctctcgcactccaagcttcccatcagggtggggcagatctggtccggctgccgcaacggcagccccgccgatcggttacgctcgccatccntctgctcgactacgtcactggattcggacaagcctgctccaggggccagcggggtcgccgaggcagggtcagcgtgtcgtacctgggtgaatgcatagagctgtgccgtggatgcggcccgaggctcttgctcgacagagctcagaatgcatgata

SEQ ID NO: 458074 - DNA, 397 bp, Sorghum bicolor
  unsure (1)..(397): unsure at all n locations
cgtccgctagagcggcggcggcgatggctcccaagcgctcggctccacctccgcccccggttgcctcctccgaggagaccgcctctggttcgggctccgaggaggaggaggaggaggacgaggaggagatcgcccactcacctnctccggccgctcacaagagcattgctccgccgccgcagaaggaccaggaatccgaagcgtccgatgaggatgaagatggcgaggaggaggaggaggaagaagaagaagaagaagaagacgagaaggccaaccgcgtgatcccttcttcggccaccaagaacccgccttcgtcgncgtcggctcgcgaggaatccgagaccttcgacgaagaaaggaggaggaggcggacgacgagatgcccgagacgaagctc

SEQ ID NO: 458075 - DNA, 484 bp, Sorghum bicolor
cgtccggcgtctcctgatgccacccaaatcaaaaagcggcggctgtggcggctgtggagccagtagccgtcgaggacctcttcacctcgctccaccgccacatcgaggccaatgctttcgaacaggccgtcaagttctcaagacggcgccgggggatgaggatgtggtgcgatgcaaagcggtgtgatgcatcaacgccgacgggatcggtaagttcctcgtcaagatccgcgccgccgagcgcctcccgatcgacctcggctactacgtacaagggcattccttcctgatggtcaagaaattacagtgaagaggttctcacatagttcatggcaaggaatacaagatctgaaaagtgaggatcaagtgcatgtgttggattgaattttcgtgtgttgcagcacaaatgtctgtgttcagattttggcagtggaatcgcagaatgtttctttatgtaaacctaagcatgatctggagatcaaga

SEQ ID NO: 458076 - DNA, 511 bp, Sorghum bicolor
cgtccgcaggatcaaacatgaagagcaacatagaagctgtttggatggggaactctcctcctttgctaaggctcgcaattgtggatttggcactaccaaaaactcctaatgataactctctgtcattgtttcctgacccccttgttccagagagattttattgtgcgcatggtggggggcttgacatggtcacactgcacttcctacctttttcataccccgaaatgtcttcgacaccaccctctgtgcatcctgtcctcactacaggcaacagcgaaacaagttctccttttctttctggatttgttatcatagctgatgcatatggtcatgtacagttagttggcatcacatgcttgggtgagtgctttgtggtggagatgaagggttggaaggaaccgacacctcttcagctagacatagaaagcaaaagcaccaaggatgtggagccttctgcaactggaatgatcagcaaagagcttattgtggtccagacccacccatacttcca

SEQ ID NO: 458077 - DNA, 532 bp, Sorghum bicolor
cgtccggctccattgcctgctaatgatggatgggctttcttggacatgcaacatggatcgttgacatctgtttcaaatgtgcaaggtcaggtgcctgctgcatccccttcccctccatctgatggtattggtaaaggaattggtcaatcaacattaccaacttcgccaccaaatgtgattgggtcacaaagttctccagctatgatggataactggagtttaaatgctgaggaagtgaagatccctgtccccaaagaaaattctcagtcttggaatgcttttggtgaatctactcagagcacatcaaataatctgttcacatttaatactatgcctcaagtagaagctcatcaattctctatgccaagtggtccatatgttgaagccagaactccacaggattagctaggggtgagcctgaaaggccaactcctggggatatgttttctggcttcaatgtttcacatgttgaggtggttggaccatcgtttccttcatcactccagccccatttgggtggcatggtctctca

SEQ ID NO: 458078 - DNA, 271 bp, Sorghum bicolor
cgtccgcgagaagcagggcggttggtgctggtgccggtgccaaccaaggaggaccaggcggcggcctcatggctgagctccccgcggccactgccgcccaatcgccgaggcatccttcgtccgcctcttctgctgctgccgctcctgtgttcccttccccgaggccgttcgtggcgatggcgctgccgccccaggccgggctgctgctggacgggtccttcgagggcccctcgtcagcggtgagccccacctccattctcgagaccaagca

SEQ ID NO: 458079 - DNA, 524 bp, Sorghum bicolor
cgtccgatttgagggtacaaagtaattttactcaaatgactacaatgatgatttagagtaaattttttgaaagactctttgagatgctcttagttaacaagataagcttagtttgaaatttatctatttgtgttttatatgagatggaatgtgctacaaagcatgcagtatgtgctatcggcctctgaaacctagcatctgatcaaggtgcctcgatgtctgctactgtggctctggcataataaggcatgttggtgagtacactgtgcacaaatctctatgaaaagggttcaatttcatggttgcccttggagcttgtggctctagaaacactacaagaactgcacgttcaatggtggtggggcaccatgggtttaggttgttctgtgagagttgatcgatgaggctaatctctggcatctaacatacacgatggggctcagcccctcaatactctttggttgggatagatcacaatgcttgtttgagtttggtcatcgatctttttcagttctgttgcacat

SEQ ID NO: 458080 - DNA, 529 bp, Sorghum bicolor
cgtccgccaaaataaaccagctgaacagattcatcactacacagaggtggttcttggaatcctagttagtataagataattaaccatatacttagaaaatctctcaaaattaaaatgggatatttgatgaattagatgttcacgagcataacttcaatataacctctatttgcaagattggatatgaacatatacttgctctctgctaaacctgtggcttgccgtcaaatggggttaacatttgacatttgatatatcaaaatattatatagcgttgactgcccagtccatgaaccaaatctgcacggaactagccccctgtcaacctccacaatcaaagagtattatcttgtttgcttggatactgacttgtaggcaaccaggtggagacacatcgatccatggagattctttgggggcatgcctcttccttccaaagttactagtaaaagattactcactggagaagcaaacattggtgatcttgcctgcgtgtgaagcttgctcagcaggcaccagacaagatact

SEQ ID NO: 458081 - DNA, 528 bp, Sorghum bicolor
cgtccggtgcaagacaatcaagttctactcatgatgataaagataatagtgacagttcagctgaaggtttcaggaacaagagacagaagtatgctgctcaaagcgcttcggatatacttggaagtgaagatgcaactcaaggttcaaagcatactgaaataaaagctatggtcagggatatactgttcaaggacattattgacaaggagcatgatgctgaaatggcttacgtggatgaagtgattaatggcatttgtaatgctactgacagtgtgattggtagtggtgatgcttctaccaaaggcggacgaggcctcaagccgagtggtagtggagtggagggtgagtcaagcaatgcccctgggaacaacactgatgacacaggggcaacttagtgcacgccggaataggcaaatcaggatcatgcaaaccctcgctctgattgctccatcaggatcaccattcggcaggaattgagttgttgcagccatgcaccaaaaagtctaattcacttatgagaaccataag

SEQ ID NO: 458082 - DNA, 290 bp, Sorghum bicolor
  unsure (1)..(290): unsure at all n locations
cgtccgagctagcgagctcactctcactcccctgctccgcgtgagcgacgcccccagtgcctgcgaccgaggcgggggtggccaggcgaccgaccaaccatggcagcaacaacagctgcagcagcaatgcgcgccgtcgccgtctccgcagccgcgctgctcgtcgtggcgtcgtccttggccggcgtcgcgtcggcggcgacgctggcgctgtacaaccggtgcggngagacggtgtggccaggcattcagccaagcgccgggaaggagatcctagcgcgcggcggtct

SEQ ID NO: 458083 - DNA, 65 bp, Sorghum bicolor
ttgctaaatccctcagctggccaaatttaaaacagtcccgtaccaatcccctttcccaacatgtg

SEQ ID NO: 458084 - DNA, 466 bp, Sorghum bicolor
cgtccggccccggggaccgggaccccctcgtcgacaccgtcgcaccccaccaccccctcctcgggaacgccgtcgtcctcgcattgctcgccgccgccttctcagggcgggagccccggcaccggcaccggcgggcaccatccgggcggcggcaagctgccgttcccaccggtgtacggcgtgtcgtacgcgtcgccgccgccgccggggaagccgtactactaaaccaccttgaccgcgctcgcccgcgctgcctcgccgtcgccggagtataatacttttcacccgccagtataatacttctccatgcatccatgtagtattttttttcttggattcttttttttttgtttctttgatgatgcgtatttgatcaaattgaatcaaagagttgctaaaaatataatatattttttttattttttttaatttcattttattttattttaatttttttttttttttt

SEQ ID NO: 458085 - DNA, 522 bp, Sorghum bicolor
  unsure (1)..(522): unsure at all n locations
cgtccgagcccacaaaaaagaaaataataaaaaaggttgtgaaagttgttcggaaaaaaacaactggaccttcagctgataaatcttctgaggacaagaatgctgtagcagaatctgcaaacaaaactgcagaagggggtcagagtcaacaaaagaatgaggatggtggaaaagaacaagagggagctggcataagtcaacagcctgaagcaaagaaaactggaaaaaagaaaataattcgaaggattgttaaaaggaaagtttctggttcaggttctcagttgactgcccctgctacacctgctgaaactagtaagcaagaaactgttcagccagataaaaatgttgagagctcaaccgatgttggaagtcctcagactaagctgcaagaagggtcaaaaattccatctggagaagatatctcaaatcagaagaaagaagagaagccagaggaaaacgaacacccnatgaatgatcgcagttcaaatgaggataagggcaatcacaaggaagctatggaac

SEQ ID NO: 458086 - DNA, 304 bp, Sorghum bicolor
cgtccgatcccgctctcgctctcgctctcgccgccaccacccgcacaccccacacgcgcgctccgcggcccagtgcccagcgcggacagcgaccaatggcgagggcgcgcgcgcgggggcgtctcctcctcctggcgttcctcgccgtcgcagcggcggcccgacacgacgcgcccgcgccccgggcgtcgtcgtccatctccgcggcgcccgagtactcgcgccttccgaaccggtaccacggtcgccacgcctccggtcccgcgcttccgtcggttctgtttgagctgtttccggacatata

SEQ ID NO: 458087 - DNA, 420 bp, Sorghum bicolor
cgtccggtcacccacgccagctgaggccaatcgctgaacagcaagttacttgacatcatggtgtgcagggtcattgacaaaatgaattggagtaactcatgcatgatgccaatctccaaatagcaaggtacccaggtccacaacatgttgaacactagggtgcgatgacctcaagctggagcctatgtcatttggcctgcatgaattgctggtcgcattgatagacctgctaattagatgagatgtgcctcatgctgcaatgagcctcgaagatgaactcattgcctcaagaccattagtgcttaaatttctactccatattttggggttgtacaatgatgtaagggaaatacaattcgaacagatgaaccctttttggtttcatgcccttatacaagttccttcttcaagtctagctac

SEQ ID NO: 458088 - DNA, 338 bp, Sorghum bicolor
cgtccgcatcgcgccggcgccataagtagctagctgccgcgcgccatagatagatcctcctactccacaagcatccctctcgaagtcgcccacttcgatttctcccagacttgacactcctcgtcccaaacccaattccaactccccaaagcagcaccctttccgatccttttctttcccagcaagtagctagccagagcgccgccgtcgccatggccaccaagcccggtgtttccgccgcagtcctgcccctcgtcctgctcctcgccctgtcggcaacggcggtcgcccacaacggccgccaccccgacgacgacatcaacaactacaacaacccc

SEQ ID NO: 458089 - DNA, 358 bp, Sorghum bicolor
cgtccggacccacgcgtccggaagaagccagctaaggacaagaaggctgagaaaggcgaggctgcggcgaaacccagcaaggacgaggctagcaaggaggccgaggtggtcaccgagtccaaggagacgaagaagggctcctctgagccggcgaagcaagacgccgccgaggaggcgggcgcggaggagccagcggcggttgtggcggtggcggcaagaaaggcaagaagaataagaagaacaagcccaaggacggcggcgagggggaggaggcccaggccccggccgcccctgccacggcgccggcgcccgataagaaaccgcctcagcagcctgtcgtcggtgccagcgccgtcgc

SEQ ID NO: 458090 - DNA, 526 bp, Sorghum bicolor
  unsure (1)..(526): unsure at all n locations
cgtccgaacccctattgggtctgaaggaagttgtgcctttattgaatcaatgttcatagggcccattgagaaaacctcaagtcctgacgaaatatccaaatgcagcagtagcatgatagagatcgaacataatgtcaatgaaaaaggaactcctgttcaatttgaaacccaaatggatcaagtggagccagtgaggagcagtgtacgcagcaaaagtcgcaacattgttgtacgtgccaatgaatcagaacattgtttctccaaacaggaaggtagaatgcctagtaacactgaggtcccagagcctttgttgcctatgaaggacaaaattctggagctggattatcattctccaccagagatcaactcgcaactatgcattcctgataccactcagaaatggcttggcctatccaagtcgctttccagtgcagttattagacagagaaggcatcattgggatgttgtaatgctgaaggaccccatgaagagattatggcctattatntaccatgacaacccaata

SEQ ID NO: 458091 - DNA, 531 bp, Sorghum bicolor
cgtccgtctgttcctgtgtttggagaatcctgcgtttcaaatgaggcctaaaatgctgacgtcaaatgggattactcaaatcagcctagactatcgtctcaagaaaagaaaagaaaatactccgtaccttttttttctgaaaaaaaaggagcaggagcactgccgctgccagcctgcgactgcgagtatgcgacttctgaggccaagccgcacctaccccggcgccccgctactgcaaacctgctccatgcctccatctgcgactcgcgagctcacatccttccacactacctaccctcctctctccaccacactgacctactcacacacaccaaacacccccaacaccccgtccaccattcacctccaccgccaacaaattcttctcagctttctcacctcgcgtcgccaacaccaatacgcacgtaggagctaaggaacctcaagcttcagtcgaccatggctcagcagcaaacaaatcctgaggaggtggtcctcggacaggaggccgggggcgcgagggtgatcact

SEQ ID NO: 458092 - DNA, 533 bp, Sorghum bicolor
  unsure (1)..(533): unsure at all n locations
cgtccgcccacgcgtccgctcccgtccgccgcgtcgtccccaaacggcgccgcgctctgccactgcgtcgagacctcgctcgtggacgcccagcgccgcgccatggacgtcgtcgtgcgcaacgtcagcctccggggcctcatcgaggtcgaggagcgcgcctcctacaggccccacccggaccggcccgacgactggacgcagttcaggcaggagaccacgatccggtgccgcccgctcgcggccctcgccgccgtcgccgagaaggtcgagacccggtgcgccgagaggttcctgcagaatagcgccaaggggagggaggtcgtcgagcggatctgccggtacctcgaggccgagtccgccggtgccgcgccctccgtaatctgatccgccctgatctggtttgcgcatccttacttgatccgaacggatccaaagggttcctcgatctgtgctgtctgcgcacggagaaatcgaacccccgctgctagggcgatgtnttactctgttcatttcttgtgatgatgaatgat

SEQ ID NO: 458093 - DNA, 411 bp, Sorghum bicolor
  unsure (1)..(411): unsure at all n locations
cgtccgcgagcatgatggggggaaccaataagccacccttcttcccagccgtatatcaggccaccgtcgccatgctggcttccatgaagcccgccgatgccgtcctcctccaaccgccggaaatcgccaccttcaggctgcgggtctccgagtcccatcgtggctcgctgtcctccaccccnctcgtcgcgtgcgccgacaagggcctgctcgtcatctacggtggccgctacttcggcccgggctcgtccttgtgcggatgctacctcgtctacgacgccgtcgccttcgccgatcgcctctccacggtgcccccggcccccgacgcgggctgccacatcaacgggatcgggtcgngagccgttgtcctgcgcttgcaccaacctgggcccttcttctnnncgcgctacc

SEQ ID NO: 458094 - DNA, 509 bp, Sorghum bicolor
cgtccgctcatccgttcgcacggttccccttcccgttccacaaccctcgagaagcttccgccctcccctcccgcgccgccgccgccaccgccaccgccgccgcagccagggccgcggaaaccctagccacctccggccctccgcgcaccgggcgccccgccgccgtcgtacctgccgccggcaccgccgaagcgatcggatctcgagaccgtcaggagccacgatggaggactgggattctgaagatttccagccagttgcccctgttgtgaaagctgagccacttaaaaatcagtgggctgatgaagatgttgaagaagatgatgtaaaagaatcgtgggaagaagaggaggaggagaaaccaaagccagcgcctgtggaaaaggctgcggcgaaacctagcactaaggctcctgctaaaaagggaaaacagcaagcatcaacaagtgctgcagaaccagatgagccccctcttagtcccacttcagagaaaattcgccaacaaaggc

SEQ ID NO: 458095 - DNA, 476 bp, Sorghum bicolor
cgtccgatgcatatactgtcgaaagataccagcaccacgctgtgaagaacaccactcactcgcaggcagatgcatcacacacacatgtcacagacacactgacacactcgatttcaacggaggcgagctcatggcggtgatgttccgcatccgcgctggttctgctgataatggtaggaactacaacgatcttgttgaagcgatcgctgaacaccaaggaagacactgaggagaaagaaaatgagacagcctgcactgcacggtgattcagcaaagaaattcacagccacataggccacgactgaggaaactatggcgaaagaggacgctcctgcacttgatgataagaacgatgcttaaaagtgaaggcgtctttagtcctaaaccacggtcaaatgagtgtgcttccattcatttcgtcgtcaaggttcatgttcctcttacaatttacattgcgctttctctgggattaatgc

SEQ ID NO: 458096 - DNA, 436 bp, Sorghum bicolor
cgtccgcttatatgggcccagcgccatcagaatttgtgccaatgtcatcatggtcaagtagccatacagttgacttcattcccacgccacatgttgttgaccctatttctcaatctttagcagataaacatattcaatctgatgcagctgttgttagtataggcccttcactggacagtaatgctgtagtggccaaggaagagatggagactcctgcagtggtagcaagtggcaatttgataagcaacaaacatgatgatcaagataaacaattaaaggatgccattagaattgaactgagtcctgacatgcaagaagacaacaggcatgatgaaggtaggttcaggatatatgtgaaggggaaaagccgtcggaaacaaactctgagaatcccaataaagttgcttaacaagacatatgggtcacgctcatttaa

SEQ ID NO: 458097 - DNA, 532 bp, Sorghum bicolor
cgtccggcttcacccgaatatttgtcggttaatgttggtcgtgaagacataactggtattgattttgtggtttttgaacacccagaagtaacaatcttgagtggtcatgtggaaggagatggcattgatacgttacagccgcatctctctgttgagatcagatcagcagcagacccttctagagtagaatctgtacttcctgttcctctttcgtactattttgaagtgcgagatttgcccaagggcaagcatcttgttcagcttcgatctggccttccatcacatacacataggtttgaatcagagttagttgaagtagatctggaaaaggaaccccaaatccatgttggccccctcaaatataaaactgaagagcgtcatcaaaagcaggaactgaccccagcaccagtttttccgcttattgttggagtttctgtggttgcactggtgatcagtatgccaaggttaaatgacttgtaccagagcgctggagggatgacttctttgggttcggggatggcaccaatcaaaa

SEQ ID NO: 458098 - DNA, 510 bp, Sorghum bicolor
  unsure (1)..(510): unsure at all n locations
cgtccgcccacgcgtncgcccttcccttccggccgcctcccctcctcccccacctcccaaattgaaatccacccgctcctccccgcctagggttccgcttccgcttccgcccccgtccgtccgagcactacccaagcggcggcagccggcccttctcgtcgccctcgagacttccctaccgccggaagtctcagttgcacgttcggccgctcccctgcactgccgggcccgcccatcgcctgaggctcttacggtgccacggagttgcaactgcacgaaggccttttgtggtcacaaaggcactattgtattacaacaacagtcctaactgaagtaataagacatttttgaaactgtctgctaccattgcttccatggcaaccaatgagaacctcccaccaaatgtcatcaggcaattggctaaagaactgaagaatcttgatgagtcgcctncagaagggattaatgtgattatcaatgatgatgacttcactactatttttgctgata

SEQ ID NO: 458099 - DNA, 415 bp, Sorghum bicolor
cgtccggccccttccctatgctcacacatccaacaccatgaaccccaccttgccatctatctccttccaatctccttgtttcaagatccaaccagatcctcagcggagccactggcctcctcggcaacagagcacaaggaaaccagggctgtctctaaagcttatacgcgcaacactaggaccagacgccaatggcggactccacaatgctgaccgcagaggtgccaccttaccatcttcgcccctgtcagatgtagttcaggagttttactcctccctcaatgaaaagaacagcaaacgactcgataagttgatggcccctgattgcatcgtcgaggatactgcttattataagccactggatgccaagtgtacccgtatctacttcaaacgattgatggaatccatgggaaag

SEQ ID NO: 458100 - DNA, 440 bp, Sorghum bicolor
acccacgcgtgcgtccacgcgtccgaataaataaatggcataataaatctctactctatcgacgaaagctgtggaggaaaaccaaggatctccccgtgcttgtgtatgccaggtcgcctgctctccgtccgcatcccgtccctcgcgaagctcggcgctcccaggtgtgcaaaattcatggcttcagacactggcaagaagctcattcagatcgatgtgagctcggatacagtgtgcccttggtgcttcgtcggtaaaaagaaccttgagaaagcaatggagcaaagcaaggacaagtttgatttcgaggtccgttggcatccgttctttctgaaccctgatgcgcctaaggagggcgtcaggaaaactgacttcttcagggcgaagttgggcctgttcaatatgagcgtgcaatttctcgcatgactgagatatttcga

SEQ ID NO: 458101 - DNA, 320 bp, Sorghum bicolor
acgcgtgcgagagtttgatcactatggaacgtatgcaaaataatgaaggtcgtacaccgtttgaagacttgacaacaccaccaatcgaggtgacaagacaacatcaaattcacaagcgcaagttgatgaacgtgtgcaacgtaaaagggaaagagaaaaagcacggcatgcatcaatgactcaaacagaaagggatgaaaaaaataaaaaaattagggaaaagtatcatcaaaaaaagacagaaactgaaatatctgctggctcaagaggtgttggggttgaatctaacaaggaaaacacagatgccatgagtctaaaaa

SEQ ID NO: 458102 - DNA, 469 bp, Sorghum bicolor
cgtccgcggacgcgtgggctgcagtaaagccatctgcacccccagaacataatgataatgttaatgaagaggaagatgagtttgcccagctagctcaaaggaaaaacaaatccgtagtaagtagtgacgatgcatcgtccagcactggggcggaccttgcccttgtacccattgatcaagcagtttcagaatcgtcatcttctggtgcaagcaatgcactggttcttcttgatcctgctcccagtactagcactgaaccaaaagagctggacatgatcgaccttctaagcctcaccttgtgcagccctactcctgaaacttcaacagattcttcagcacaggatcaaaatggaccccagcaacctgcagttacacataatcaaaatgggccccatgaacctacagttacaaatgggcaacgatatccttctagtgtgccacagtatccttcaaactaccagccttacgc

SEQ ID NO: 458103 - DNA, 553 bp, Sorghum bicolor
cgtccgcacaatattagtgtgtagaataggtgtcaatcttcaagagttcagcttgcaatggataattgagttgcattttttattcatcatgagtttattattgaataagtcacaaagttatgcttaaattagttggtcggcatgctcccccatatattttttgttcattcaaaaagcaaaccgattacatgcctgtctggtttactcttcttgtcaagtagaattgtgtttatggtttggtttcgttgtcatgccagttctaccatctactgtaaacgtagttaggtgattgggtggtgtctagtctagcaggtgaatgcctaggtagtctatatggataagcagaatattgaatttataattggattttcaacaagttagcatccaatcagcatgaagataacgaagaattccatgagctaatttggcatacgtggcataattaaatttaagccaaagagtgtgaaactcatttgtgtattttcccaatcaagcatgaacatttcaagccaacaatcaattgttggtgctaaaagtttattgtccacttcgt

SEQ ID NO: 458104 - DNA, 495 bp, Sorghum bicolor
  unsure (1)..(495): unsure at all n locations
cgtccgcgcttctccctccctctatctctctcgaactagcagcgctgcagcgcatcggcggcctcctccccctctgcctccttcctccctctctctgcctctctctccccatgtgccggcgcagctaggcggattggatgaggcagcgacgcaccaggtggctagcggcgtgggtgggtcggcagcacacggatccagggcctccatcaccggatccagggcctccccatgcccgctccataccgcctccccgcgccagccacggcggatccaaccccggctgtggtggtttgggccccagccatggtggatcctacggatttggccccagccatggcgcctacgacgacttgctgcccgtgcctctaggtactccgcctcgacttcgaccgcatggctccacctttgtctcttccactctgccatagattatntatcccataggatgctgcntgcgtcgattcgattcccatgggctgttcctcgtgatgctct

SEQ ID NO: 458105 - DNA, 416 bp, Sorghum bicolor
  unsure (1)..(416): unsure at all n locations
cgtccgactgaagttctccccaaaaacaactttcctttttcaaaatccctttctgtgcttttgcttaactgaaatgcagcacacagcttacacaaaaggctcagatttccgttggagcacatgcctagtgaaaagtgctgttctctcttcctttgcgtgtgcaacgtctgcttgctgtgctcacgctgtcccctgaccatcgcatttggtgacatccacataccacatccaacaagaaactgatgcgggagaaccggcgcgtcccctggaacgcccaggccaggcgttcccttcagtctctctagcagttcgctaaccaaaaatctttggtgcaaagtggtgcgtgtgcaggcaggacgcgacgcangcggcgctgcagaagaccatagactacgcctgcggctccggggcggact

SEQ ID NO: 458106 - DNA, 523 bp, Sorghum bicolor
cgtccggaaggatcgttccagttgaatccaaacgccagtcctttcatacctgggtcgctgggttcatttgcacacaaggccccagaaaaacaaggaggtcctatcatttttgcagggtcatcatcaaagggagagccttctggtagcagttttgatccttcgcagcatgaggaaaatgacatggatgaagttgctctagccaatatggtcttttcaatgttcccaaatgtctccgcagatttcattgatgagttactcaaggcaaatgattttgacataaatctgactgttgatatgcttcatgagctgaactcacaagatatgcttcctgatgatgctgaggctatcaatgaccttcctgatgatgctgaggctaccaatgaccttcataatggccagggcgtacctgatgctgataaggctgtgtgtctaagagtagcaggaagatgaatgaagatctgcagaatgagaagtcagcaacttctgatgtgaaatctgtgctgccaaagttcttagagatcaa

SEQ ID NO: 458107 - DNA, 514 bp, Sorghum bicolor
  unsure (1)..(514): unsure at all n locations
cgtccgctcaccggcgacgcatttgtcggctgcgctgaggctcaaactgtcagatttcgttcgttcccaaaccccagtttccaatccctagatccctctcaccggcgacgcgtttgtcggctgcgcttgagatggatcgcgacacgccggtgccgaggaggaggagaacggagagcagacatgccggggagccctcttcggctgtggcggtggagacgacgaacggcaagagcaagacaacatggttgtgggaggcgggcgggagactagtggagacccagtccgtcactgccgagcagacgagcgcgaccatcacagaagaggcggaggacgaggagtggacagatgatgccctccccctcatcgcgagcagccgtcctctccctcatagatgccccagtttccccaagggtcgaagccggcaagacatcgcagagtggcacgaggctactagagtggcttacgagaaggctgccaacgatcctgtctccaatcctnctatcttgagggagac

SEQ ID NO: 458108 - DNA, 504 bp, Sorghum bicolor
  unsure (1)..(504): unsure at all n locations
cgtccgcaccgctccgaccgacaccgcccatccccatcaccgccacccggcctcgccatcgcgccggccgcgcctggtccgccgcgcgcgtcctgcccggtccgccgtgtccgcccgaagcgctgcgcccgcctgtccgccgagaagagccacacccgccagtctgcctagaagagacgcgactgcctggtccgcccgaagcgtcgcgccgccggcctgcaggtccgcccgaagcgccgcgtcggccgcctgtaggtccgccaggaggaaccgccccgccgcttccagagatgaataccaggctcaaggcatttgtttttgctgctgctgcacattggttgttgtgtgtcatggcaattgttgctcggcctaggaaaagaaaacgggttgcaagaaagggaggggattacttatgcaccaatatatgaaagggataggaagagaatggaatacctcgatgacaaaatctggaggaataacacaacttgnttaaacatgctgaga

SEQ ID NO: 458109 - DNA, 567 bp, Sorghum bicolor
  unsure (1)..(567): unsure at all n locations
cgtccgtcgacccacgcgtccgcccccccgtcccccgtgtcccgtgccgcccaagccataagctgccagccgcctggatctgatcatctatctgattggattggctcttgtcaccggggggcgaagggaaccaaggtccaacgaggaagaaccagcaccagctagcaggcgttgttcgtccaagaacaccatcagcaagagatgctgcagctgctcatggcgctggccttctcggcggcgccgctgacgctgtacgtgccgccggtgcgcagcctcagcctcttcgtcgaggccatggaggccgtctgccgcgactgcgcgccctactcccacggcgccgtcctccgcttccgcctcggactctcccgcatcctcgccggcctcgcgcgcgccctccgctaggcggccggcgggcccccatcgccgcctccgggttcctccgatcctcctgcccatacatacacacgcacacgcacgtatggtgacctttctggttcttgctccattctntctctgtcctttccactacctagccaacaggtggtttctagcgcagcnacagcagtc

SEQ ID NO: 458110 - DNA, 477 bp, Sorghum bicolor
cgtccgcgcacacggtactcgtcctcctcctcgcagagcttgcaccagcacgccaccttagcttgctgtgctcgcactcgcacagttgcgagcgcattgcatttgctcagcacgcagctaggcggccgggaagcatagctggcagatggcgagcagcgccggcgggtacggcgtgaagcagcaggcggaggccgccgcaactgccgcgaggaagcgggtgatggtggtggtggatgagacctcgggctccaagcacgccatgatgtgggcgctcacccacgtcgccaacaagggggacttcctcacgctgctccacgtcctgccgcactccggcagcggccggggcgaggaggcctcctccctcgccaactcgctcggcacgctctgcaaggcctccaagccagagggtggaggtgaagcccttgtgatccaagggcccaagctgggcaccgtgctcagccaggtgaagaagctgga

SEQ ID NO: 458111 - DNA, 511 bp, Sorghum bicolor
cgtccgccaatccccagcctccgccctcaccctgccctcggtggatctagcctcggcacagaggttggcatgcagctcgcggaggaggttcaagacaaagcgtgatccacggagaaggctgaagggtgacgccccacctccaacatgcgtggatctggtccgatctgcaagctaggtgagttccgcatggagttccgcatgacgcgcacaacaggaatagaaggagttccgcatggaggtcgcgagtcccacctgcaggctaggctggttgcagctttgcagaagcaagacaagcaaggcaccctagcttggtcctgcctgattgatttttttgccagtccaagtttgaagtggataaaacctcaatccatgtgaaaaaaagcatgtgtggctatgctgaagaatgttgttcgcaaacggcgctataacttaaagaagatgtattttgatcctcttccactgcatcaagtgccgaagaaatgtgttgatatttgtttgaaatgtgttgaga

SEQ ID NO: 458112 - DNA, 432 bp, Sorghum bicolor
cgtgcgatttaccagattccagctccacgagcactctctctggctagatgccacactccattcttgcgagcggtgctactaaccaggcggacgtcctctactgaaaccacgactgagaatgaactaatcactgcaaatgctacagcatctgacatgtggattggtgttgcctaccacgcacgtgagtaacaacccgactgtgactcattgctcaacgatggcaaaagcattagtgccaatgtgaatgcgaagcaccaaatatatgggaggatctaaaagaagcatccaatactactacaactagtcgttgtggggactcgattgtcggcgatgatacaggataccttcgatttgaagattctaaggcagttgaaatggccccaatgacttctgtacttgctgatcaatgtagcttgattattaacgaccaca

SEQ ID NO: 458113 - DNA, 478 bp, Sorghum bicolor
  unsure (1)..(478): unsure at all n locations
cgtccgcacagacacaggtgagtgacactacagtgggagcgtgaacagaggaagcggctgagctctcgtcaagttgcggcgatgaagatgcatcgtttcgctctgcctggtctggggtttctcgtcctgtggatgctgctgcattgcggaagtgagctcgccgcggcggtgcctccagatggctggtacgattactctgcctacaccgactgcagaggccagccggaaccggcgctgtacaacggaggcatttcaagttcggcaacagcgacgactcggacgggtaccgcacgacggagaccggcgtcttctccccggcgttcgtggtgtacaacctcaacaaaaccaccatgtacaccttctcatgctgggtgaagctggaaggcgcgtacctcggcttgatcacttgngaagtggcgccggacaacaccgggcgcgagggcatcgncacggtcttgccggagcgactgtggccttc

SEQ ID NO: 458114 - DNA, 478 bp, Sorghum bicolor
cgtccgctgaaagaggcgtgcaaggatacaaaaaatttgtagaagatatggaagagcttaccaggaccaaggttttagaagtgaaagggctatcgacgaaacaacatctagggccagcaatgctgcatctcctcaagaaatttactgggttaacaaagtttaagattgacctcctcccagtgaacacctggatgagtcattctaatcgattttctcattatttgattctggtcctaattgccaaataaataattacggaaactctatatgtcagttggctgaaatcactaaatactttagttgacgagaacattttgaccccatcagcaaggttaggaatcaagtttgcacttttatcatgtggcttacacgccattttaattttattgttatctttttatcttcactttttggtgccacaaggtctggttatgactcgtaaactggtagtagatgtagacaatacaactggtagtgc

SEQ ID NO: 458115 - DNA, 400 bp, Sorghum bicolor
  unsure (1)..(400): unsure at all n locations
cgtccgatcgaagttcaagtcattccgcgaatcgtagctcaaaatctgagttcctccaaatctccctttgtacagtgcactctgaatttatattctgaagttttcatcgaatctacaatttttcctgctcctgtccaggaaaagctgcaattcccatcagtgcatggaggactgcgaggcaagggccgcaagtggaagctgtggcggacctcctccggcgaccagggctccatctggcgcggctccagaggcggcagccagcgctcggcggcgtcggaggcctcggacgacgcgtcctcggtggccgcccccgccgacccgttcacgngcccgccccgccgtcgccaccgtcacccgcgccccggcgcgggacttctatgccgtccgccaggagtgggcc

SEQ ID NO: 458116 - DNA, 483 bp, Sorghum bicolor
  unsure (1)..(483): unsure at all n locations
cgtccgggccccgcgaggtaagcactcttttaccactataaatattctatcttcagtatttattttagcatttactttccagcatttaatttttgtcaaattagaataattagaattagtatttaattttgctatgtattgaaaaaaaactaagtaattacttagtactataatttaaaattctcttttaaattatatgaagtttatctacctgataatttattctgagaactaaattctgtgggtagccaaaaacttgtgattcagtctaagtaattggcagatatgatataaaaaggttgagctagtatacattttattgtaagtgatagctaagctccagacattttgcaagaattaaattaatcaatctataattcatcttgctaataagatntgagtagacctatttgttatacattcatgattgaatccacaggcataaaaataatntttgctctatgcagcaaattctccctttcg

SEQ ID NO: 458117 - DNA, 523 bp, Sorghum bicolor
  unsure (1)..(523): unsure at all n locations
cgtccggtttctgaaggatttgctgggaaagttgttagtgatgaagtgaagcaactggcccagggggtccagaacaagttacgtgacctgattggctctgagaaatttgttgaagtctacaagagcgttcggatgggcctgaaacagaagcgggacggtagaaagcaggcacagaagattgttgcagccgtggacccagaacggcatgccaagcgaaagcagcgtatcgcatccaagcaccgggaacacaagaggcggaagataatggctatgaagattggcaggtggatgaggtagttctgtattaggctctgcggaatttggtggcaatgggatcatctaatntgtaaggttttgtactggctaattttcgtgccaaaagtggtggcataaaattaagttaatggttaagtagatagaaaaatttgttttatacgctgtgtcactaacttttgacaggccgacctaattttgtgtgatgatgagtggcggatcatattgtaagtaaatgttagaggcattc

SEQ ID NO: 458118 - DNA, 413 bp, Sorghum bicolor
cgtccgaatatttcagattatggtattatttgctgcttggtgcttaactctgatcttttttatattttcgtagattgttgagaattcccgtctaagtaaaggaatggactactttactgctttgcttatatctatgtgatgaaaagttttgaaaaataatgtcagtacaccctgcctatgagcatgtctcactttcactaacatatttaatatttgaccatttgaaatctctaatcattctgaggagctcaggcgttccggcggtcgcgagcgggcagccacatggcctgcatccatgagtggcgctcaggcgtctcaggttgcaagcggcgagcctatgcagccgagcggccatggtcatgtccttggtggccgaacgcgccacactgtgtgtatcgccaccgtcaggttgc

SEQ ID NO: 458119 - DNA, 306 bp, Sorghum bicolor
ttttgttgaatctccatctttctttctagtattatcgaatcatcaaatcttacaagagcagcgaaactctctcgtaagaaaaaaaaaaaccaagaagaatagcatctctctacaacccatttcaatttccatacaaaccaatccagcctgaggaaggcaggaacccaccgaattaatcgatccacatgacgcgacgagaactccccaaatcacagcgcgatggtgaggcgctcggcgtccgtcgtgctgccgccgagcccgagccaggaggaggccgccggctgcttcgtcttctcgtcgtgcgag

SEQ ID NO: 458120 - DNA, 540 bp, Sorghum bicolor
  unsure (1)..(540): unsure at all n locations
cgtccgcaaatggttcaagcacagcctttgagtcagggagtcaaccatcgccatccagcttagtcgatgtgaagcaggattcttctcttaatattggaaatgatttctccttgttccattcagagatgaaatgtacggggcacggcaagtgtgtttgtgaagaagcaaattcttccgaagagtctcagaggcacctatctgataccgaggagcacattccatccttgaaaagtgttgtgggcgggatgcctcagcagcctctagttgaaagcagagaagctgactcatcatctgaacctgctgacacaggtgatgaaggatttcagtcatccctatcgggcagcacagaaggcagtttgtcctcaacacctgcagactcagatgctggcaatgaggaagcaagttcattatcagaggatactgaaccagatgatgtgtaccatccagctgacatttctccagaagataaacatttcatgatgtngcttggttggaaagaagatgaaatagtgcaagtggcacccttggatttcgatgaga

SEQ ID NO: 458121 - DNA, 544 bp, Sorghum bicolor
  unsure (1)..(544): unsure at all n locations
ncgtccgcccatcttttccactgctcttgtataatcttctgttccttttttctttggcatgttctgtttatgggattcttaactatctgatatttgagcagaactattgaagttggcgctgatagattcaaggttcctgatattctatttaatccatctctatcccaggtgagtagcgaggaaaggggtctgtagtacttactggtttgaattaggttgtaatcacctaacttgttctagtgctgtgttttttactgcactggtttttgtaatggatccatgttattgtgcagaaaaaaccctagtgcattgctttcttgtttagtgtatgttaacagtggtttagataattgtttgaactcagcagacttgctttctttcaccttatatcccggccttcattctcacanaatttctgaccaacagactattcctggaattgatggatttgcagattcaacaccagtccgtggccttcaacgaatggtcattgacagcataaaatagtgtgacgttgacatacgaaaggagctatntagcaata

SEQ ID NO: 458122 - DNA, 135 bp, Sorghum bicolor
ccagcgtgcggctctcggttcgtccactcccagctccacttccctccggctcccacaccacacaacgcctctactcccacctcgtagtctgtgtcccagtgccccagcgtctagctgcgacgcgcgcgcccgccg

SEQ ID NO: 458123 - DNA, 187 bp, Sorghum bicolor
cacacttagataagttgaaaatcattgaccttacatgtgtatatgaattttcttggttgcaccctgcctcacacagtcacacgcttagacaagttgaaacttgttgaccttacatgtgtacctgattttcttggcccctttaaacatattaactcttgacctctcttgtttgcagtgtagtcgaaga

SEQ ID NO: 458124 - DNA, 361 bp, Sorghum bicolor
cgtccggttggctgttgctgcttcacttggttctctggtttgtgaagtgaccttgaagtcttggacaactactgtgactcagctagctgctgggagggactataggtggatcatctcgtgcctcagccaacgacagggacaacagcgatggccattaagttgtgcggtgccaggaagtattttgtgaagccaaagtcttttgtttatctactatggctaatagcaacgaccagcaagttcgaaggccgtgcatgtgtcatgctgggtattttggttgtgcgtgggctgctgcatatttagattgtgaaagcacatatgcagattccatcgcgcttcaagacatgtgtgctagttgtggagt

SEQ ID NO: 458125 - DNA, 101 bp, Sorghum bicolor
  unsure (1)..(101): unsure at all n locations
cgtccgnnttnntnnnattnatnnagttcnaaaaaaatataacttaaatatatataaaaaaaactctttaaatacaaacttaagtggacagagacacactt

SEQ ID NO: 458126 - DNA, 108 bp, Sorghum bicolor
cgtccgcaggggcagacaacggctcagagctagcagactattttcgatctgataacatgcggggggggagcaccgtgcggatcgcagatcgcacctagctggtgcagg

SEQ ID NO: 458127 - DNA, 295 bp, Sorghum bicolor
agattgaagtgatcattcttcacccgaattttgcaaagattttaacgtgtccttgttcgcaggacgtgatcacgtcgcggagcagctacctgaggcgtctgctgtcggagtccggcgacgtcgcgatcgcgctgccggcgggcctcacgttcgacgcgttcgcgcaggccatcgcgacctgctacggctccggcgaagcgacggcggcgctgtccccggcgagcctcgcggcggcgtgggcggcggcgggctggctggagctggagccgggcgccgggccgaggggggaccccta

SEQ ID NO: 458128 - DNA, 386 bp, Sorghum bicolor
  unsure (1)..(386): unsure at all n locations
cgtccgngntttttttttttttttttttttttttttttttttttttactttttttatatttttgtctttcgtactaaagggagaaagggggccaacaagttaaagaacccgggcggtcctttttagggatccaaatttatactcctcttgtggggaactaaaaattcttttattggggcaccttaaacaaattcagtggggggaaatttacaaggttccgacttggaaaaccctggggaaacacaaatttatcggcagggagcaaatttccctttaggcccgcggcctaaaagctaaaaggcacgcgcccattttcttttcaaaaaggtacgcaccctttatgggtaaattaacccccccttgttcggttgttaaagcccgggggg

SEQ ID NO: 458129 - DNA, 367 bp, Sorghum bicolor
cgtccgcgccgcccagccctctcctcccgcctcctctaccgccacgtacggctcctccgccgcctacgtcgctcccgccgccatgtacggctcaggcgccgcctacgtcgcgcccgcctcttccgcccccgtcggcggatacacctacccggcgcccgccttctccggtggcagcagcgccgggtacgccaagatcccaacctacccggcgcccccgtcggcgtaccctaaccccaaacctgccccgacgcaagtcttcaccacccacgccggggcggtccaagaccccaccgcgccgccgtcgccgctggtcaaagccggcgagctcgtcacgcgcctccgggagcaggggcaggcgctcatcgcg

SEQ ID NO: 458130 - DNA, 107 bp, Sorghum bicolor
tccgtccggaatccggtcgccacgcgtccgcagagagagagctgcaccgtcaacacttacgctcgaagttgtagatggcgctcacatgtcgactctcacgggatggc

SEQ ID NO: 458131 - DNA, 328 bp, Sorghum bicolor
cgtccgccgacggtcagcaggcactgtctcagtgctacctggaggagcccgggagctgggtcttgtaccacgctggcgattttgtggcctcaaagcctgaccagccgatgaagctgaagttctccatggcgcagatcgactgcacacacacaaaaggcgggctgtgcatcgactcggtgctcatctatccgaaagggaaggggtttcagcaggagagggtggtcaggtctcagaaatgagactgtagattgttgtggaggtactactcacagtaggatgttagaccaaatgcagcttgcagcctgatcttatttttgctttgggctct

SEQ ID NO: 458132 - DNA, 310 bp, Sorghum bicolor
cgtccgaaatagaaaaaaaaataatataatcgaacataaattaaacataaataaaataaataaaatactacaatgaaacagataaaaaaacattgaaggggacaacaatcaaaaaaaaaggggggggtcccctttaaaggatcaaagtttacacacccttgcttgcaaggtcaaagcttttttatagggccaccaaaattaaattcattgcccggctttttaaaactacttgattggaaaaaccctgccgttcccaaattaaattgctttctataaaatcccctttaacaaaagttgcttaataccaaaa

SEQ ID NO: 458133 - DNA, 449 bp, Sorghum bicolor
  unsure (1)..(449): unsure at all n locations
cgtccgaactcaccagcctgtccccaacaatgcacaccagcatccattctcccccatcagcaggcggctcttcttctcccccaaacccaaatgagtgctgagttttgcgctgctgctggtggtggcggtgcggctgtggccatggagttcggagtcgtcggggatgtgatggggctgcagcaaggcatcgccgtcacagcgccatcgcccagggacagcagcgacctgtgtctcctcaagcgagcagccctcacccaggcagcggcggcggctgctgccccctacccctcccccttcctcgacgaacagaagatgctcaggttctccaaggcggctcacacattgccctcaggcttggattttggaggcccaagcgagcaggctntcctgctgtccaggaccaagaggccatttactccctcgcagtggatggagctggagcaccaggc

SEQ ID NO: 458134 - DNA, 385 bp, Sorghum bicolor
  unsure (1)..(385): unsure at all n locations
cgtccgcggacgcgtggggtacagagcaaaggtttgggtgaagccgtgggaggatttcaagtctgttgtggagtttcgccttgttggagactctgaatctgaatccgagtcttctgtcacttctgatgttagctctgggcaagcgattgccaagctctctcttgaagcagacattgcacaagaggaggctcacctgcacaccattgagaatgatggactttccggcgatttcgcatcatcctcttagacatacttggtgtgactaggattccaggcaaggatggaaagcgtgaaggttntaaatgaagttttaggtatttagaatgctatatcgtagattgctgtcaagctgaaatgncttgcctttgttacttgaatatgtata

SEQ ID NO: 458135 - DNA, 313 bp, Sorghum bicolor
  unsure (1)..(313): unsure at all n locations
cgtccgggcaggccatggagactctggcggcggctcgccgtgccaagagaaggaagccggaggcgcgcaagagccccgaacaggagggtggagcaatcatctcgccgctggtaccagcgacgagtgcgcctgaatccaatcctccgggtccgggagccggaggagatgaatcccacatccaagatccaccgcctggagccgtcggaggggaagaagacggngtcgaccgaatcagcctcctccccaacgccatctctggcgctcagcccctctcaacctcgacggccgtgacgttcgcaccatcgatgtcgtc

SEQ ID NO: 458136 - DNA, 250 bp, Sorghum bicolor
cattcccgaatcgacccacgcgtccagtcctgcttgcttgcgcggctgcagacgagagaggcgtaggagagggatcatggcggcccccgacgtgaaggcgaataccatcaaaatcatggatcaccgaaatgatcaggaagcacagaacaactccattatcccccgactcacctagaccggagatcctggcattaccggacctcttgatctcgtcgagggttaccgaagtgcctacatagacatccctaac

SEQ ID NO: 458137 - DNA, 345 bp, Sorghum bicolor
cgtccgcagacaacgatgagcatgcagagcaatctgagtaatctttatgagcatgcagagcaatctgagtaatctttgggtacagatgtggattagagctaatatgtccatgataatgagtttgtcagcccaggtattgtgtacctacttttaccggtgtgccaggaaaagaaagtttcatgttgatttgaggagcaactgggttcttttttgtaactgtcgtacctgaatctttgtaatagggtagagcagttttgctaggtaactggttgtatcaagatgtttatctgtactgtctactacaaatacagtcacaaaaatttcacttaaagtcaagttgtccct

SEQ ID NO: 458138 - DNA, 280 bp, Sorghum bicolor
cgtccgcccacgcgtccgcattgactctagcttagctgctgcctattcagatggattatttgctcatcagctggaaaatggtgctgggaaagtaccacaaactgttgatggcctgaaagttgggaaaaagaggcttaataatgcactctctcatggtgactctgaaatttcacagccaaaacgaaagcagcaaaggagcactactcagactttgagagtgattggagggagaattgattcaactgcagttatcaatctagaaaaaatgtcaaagatgaca

SEQ ID NO: 458139 - DNA, 247 bp, Sorghum bicolor
cacctcgcaccgtcgtcgaacagacatgacaggcacctttgactgctcaagctaagtcgtactctcgacgctcgctgcgccggagcgcgcataagacacccgtgtgcaacccgacggcgcgtctactacggaacatgaccgcatcggtggcaggaagggggccatccgcgcgcgctgcgtcgaccgcgcggggcggcacagtgctcgactcggaccatttcacccggctggtggcgccggcgtacgt

SEQ ID NO: 458140 - DNA, 369 bp, Sorghum bicolor
  unsure (1)..(369): unsure at all n locations
cgtccgccaaggccaacaccttctggaactgtcaccactccagtgtctaggagatcggacagccagtggaggtttgatactccgacatcagaagcatccatgtccatgagaaggcgcaagttcagcacactttcttcaatctcgtactggatgacacagatcaggctggctgaggctgcttctaagcactcagtttctctgggcttctttaagcttgctcttgaatcagaatgtgagcctttggaccggatgagggaagaactcaagtcctatgtagcccggcatggcctagcgacagagttggaggacccagttaaggacattcttcaggtttatgatatngctgaggattttgagaagctgaagatc

SEQ ID NO: 458141 - DNA, 202 bp, Sorghum bicolor
cgtccgagcccacccgagccctcgagaaggacgcgtcgacgatggcggccgagggcggcggcgggcaagagacgttcgaggcgcgggtgaagcgcctgttcgggtcccgcctctacgacgccgtcccggactcctccttcccgacggctctggccgggccgcgcgactcagcccccgtggcaaccgcgagcccaccgagaga

SEQ ID NO: 458142 - DNA, 158 bp, Sorghum bicolor
  unsure (1)..(158): unsure at all n locations
cgtccgtgtaccctgaccaagcttgtgttgaggctggaagaagtgcacncatctaaggttgaatcaaacaaggcttgcactggagcattgctgatcatgacatcgattctgcagctggccaggcttcttaccttcccacccgatcgatatgatcatat

SEQ ID NO: 458143 - DNA, 442 bp, Sorghum bicolor
cgtccgcccacgcgtgcgccagctccagctcttcctcccggttcctcctcgccgcccccgccgacgacgcctccctctgtcggatccaccgctgaccgggccgctccgtctgcgccggcctgatcaccggctggttcttggcctcttcgcttcctgcgccgcctagacgtcgccatgggcaagagtaagaggaacaagggcggtcgaagtggcggtggtgccgatgaccagcttgacggtggcagcgatgccgatagcgtgacctctatgtcgactgcgctgtctgaccttcagctcgcgcaggccaccgagcatgttagctcgcaggaattcgttcttgacaactacattgacgctctctacgagaagaggggatccacaagagagaaagcactgggcgctcttatcgatgcttttgaaagttttgtgcttcttgggttag

SEQ ID NO: 458144 - DNA, 398 bp, Sorghum bicolor
  unsure (1)..(398): unsure at all n locations
cgtgcgcacgctcgggcgctcctccaccgcccgcgagtcgcgacgccgccgccgccacaccatccggccgccctcgccctggcatccgtgcgccgccgcgacagcgacgtgcctccacatcgctgtctctcggtctctcttgtgcttgcgacgtcaacgcgggggtcacgctcgggcgctcctccaccgccgctgtcttagtcctcgtccgccatcttgttcctctgcgccgtcgccatcttcaccttcaccgccattgtcgtccgtctcaaggaccacgagctgcagaccacggtcaaggccctggttggagccttcgagtccgtcatctncaagattgcaacaacaacactaaagctaaatgtgccatctaacaagcacatgggagtctacatcac

SEQ ID NO: 458145 - DNA, 316 bp, Sorghum bicolor
cgtccgcccacgcgtccgatttaactgcaatgtgaacagtctggctgccccttgatggcttcctattacctttggctttatgttagtttgtagtgtctgttatttacttccccttttggtttctaacatgctttcttgtacagacattttcaaagcatacaaaccaatctggcggatatggtccacaaggttaccgacctcagggtcatggtgctggttctcagtgggggccacgttctcagaatcatggctatggatacccacctagaggtatgcctccacctcaaaactacaacgcaccctacggtggctaccc

SEQ ID NO: 458146 - DNA, 423 bp, Sorghum bicolor
  unsure (1)..(423): unsure at all n locations
cgtccgcttcagaaaagggaagctagagataggcactaagcttgcagagttttgttcacgtgctttgcttgctttggatgtccttgtccaccctcgagccctttctctagaaagaacagttccttcacagggaaatacagtttttggtgctggaacataccagatttcacgattcggngatcagcctcaagcaatggaggttgaagacatgtacgatgattggctgacatccaacaacgatgaaccagcagaggttccagtgaacgatagtgctgcaggagtaagtacagatgtcattaaggtggaggttggaaagcagctcaattccaaagcagaagatcctaaagttgacccacccagaatcacagatgcagcacaagatgcaccaacatccacccagagtgatgtcaagatggttgatgc

SEQ ID NO: 458147 - DNA, 159 bp, Sorghum bicolor
gcgatcgtcgcaccgcggcgtacaaagctactgaaatatttgtgataggggtatgtctgctttgctactacatgagtgcacatatggctgagtggctgacactatcctgctactgactgtctttgtggctcgccggtgctaaagatcggggttggatca

SEQ ID NO: 458148 - DNA, 321 bp, Sorghum bicolor
cgtccggcatgatttaccagatgacacagaggaactattttggggttcacctatcagagtgcaaaatgagatattaccccccaaaagtcttccagaggaatatgacgctggcaaagctgaatcacagttcagttctctatcatctgatcctcatagcatggcaagccagcgtgcatggaaacaacctactcagggtcccaggcctaagtcactgctggaaatccaagctgaggaacaattgcgtgcacagaaaggattagctactgaaactgctaagccagcaacttcagtcccttcaattccttggaatggcatgacaat

SEQ ID NO: 458149 - DNA, 342 bp, Sorghum bicolor
  unsure (1)..(342): unsure at all n locations
cgtccgcatcgatcctctcatctcatctgcccacccgcaagccattccgccgccgctcgtgactgggaagatgatgccattgagccaacccgacttctcgccgtcgcagttcaccgcctcccagaatgccgccgccgactccaccacgcctttcaagatgcgcggngcgtccagcaccatgccgctcaccgtcaagcaggtcgtcgacgctcagcagtctggcaccggcgagaagggcgctccgttcgtcgtggatggcgtcgagatggctaacattcgacttgtggggatggtcaacggcaaggtggagcggacgaccgatgtcacattcacgctcgatga

SEQ ID NO: 458150 - DNA, 419 bp, Sorghum bicolor
cgtccgcttatttgtgtagatatttggatagcagacagttgtctaccaaatataatctgtgcatccaaaaaatcaaagtggtatggtgaatttggcaacaaattatttatttctgattcagtttctcttgtataaaggtgtcaattactaatgctatagtttacatgtgcactgatctattctgtaagtagatactcctaggtccgtaatatgtgagcattgcattgcctgcactcctattctagatgttctgaattaatgaagcctggaactaatgcggaaattttcagtgttactactgtctgcttcagttctaggttctagatgtacatcataatattttcgcttagtaatgagccacttcaaacttggatcaaccaaaaaacagtgaaagggggcaataccctaaatgtgtttat

SEQ ID NO: 458151 - DNA, 68 bp, Sorghum bicolor
tgcgtccgcatcgatcctctcatcttatccgacaccccgcaagtcatttcggtgtcgccccttactgg

SEQ ID NO: 458152 - DNA, 360 bp, Sorghum bicolor
  unsure (1)..(360): unsure at all n locations
ctggacactcgagtaccgaacgcaggacactcgcaaggtcggcggcggcacagaagcactagggcatccacctcggcggctgcggtggcctccatgtcgaccccttccggcaacggcaacggcggcggcgcctactactactncgngctctacgacttatacggccctaacgcgaagcctgatgttattttcaaggaggctgctttaaacactacattaaatctgtaggacattcanggtctagttacttgggttattggtgacggcatgctgccttcttgggtgtttgttaaagtactttgtcctttttgagattaaggtatcgaatgtaattacatacaaaattgtatccagtagtta

SEQ ID NO: 458153 - DNA, 424 bp, Sorghum bicolor
cgtccgattgcggcaaccatgcaactatgaaactgcaggaccaggaaggaacgatccaacctatgatcatacagacacgtgctctgatatgagcatttcattgtcagagagtgattttcagagaaaagatcatgctttgtcaatgccagagcatggaggcaccaactctgaagcctcggatgctgttggaagtgcatcggcagagaaaccaactgttgatgctgattacgatgaggtaacgtcagcttctggtccgaatcattttccgggggttgcatcaagggcaggcagagttcaatattggatgatggaagactcaccactcctggaagacggagagctgagcgatgcaccaccagtggacaggcctgcagctgtcacgcatcatcaaccgaaggaacacacgccagcagcagcaacaccc

SEQ ID NO: 458154 - DNA, 333 bp, Sorghum bicolor
cgtccgtgctcacgtgcgagcttacctagctggcttctacacggactcgtacaccaatgacagtacgactaacactagtgttattacgagaagtcctaccacatgacgtgcacgaaaaagcagaggtaacaccagaaatggtgacgggagggcattaccgaggccaatggtaaacctgaagggagacatgatgtattgctaatattgacgctgagagcgagcatatgtggaagtaaacataagactttagagaatactttcgagtacctgaactagttcggtgattgtggcgcagatggatgcacaattgtatgtaacaatgaaagctataaa

SEQ ID NO: 458155 - DNA, 243 bp, Sorghum bicolor
  unsure (1)..(243): unsure at all n locations
gtttatatgcgctggatagcctatgctgttaatgggcttattatgtggacgatgagatgtctgtaggtgctgcangggcacacaaagctttaaacttttttgggacaccttctcctaggcttagcttggggcattacacttgcaaggaagcatggttttttggaccgggggggaaccatttaaagggtgctggtttccggctggctggtgaaaaaaacaacccaacaatttgttgattgtgac

SEQ ID NO: 458156 - DNA, 382 bp, Sorghum bicolor
  unsure (1)..(382): unsure at all n locations
cgtccgctcagatgcgctgttctcccctcctgaagcaaagcacaaacaaggttaaactgaggcataacgcagaaagcaaggatttcctttgggtttttgtcatggatcaggatgttggtgctcttcatggagataaccatgcgttccacattgagttacgtagatctctagtacaactggtttcctctcaaccaggcgaagggcaatctttttctgcccctgccattcctattgtgtcagtgaatggctcttgctatatgatagcacttagcaaggtgttccgtcagcccaacaggcaacatagagtcatttttcctgatggaactacagtgatgcttagagtagaagatataaggatgncaggatctctggcagcattttc

SEQ ID NO: 458157 - DNA, 355 bp, Sorghum bicolor
  unsure (1)..(355): unsure at all n locations
cgtccgctattgaagccactgtacaacgagagcaatctggtaaagctgtgcccttggtgctagtgagatgtgctgactacctggttatatcaggtttgaataatgagtacttattcaaatcagaaggcgacaaaaaagttcttcagcagttagtttctctttacaatgaagactctggtgcatctttacctgaaggtgtaaatcctattgatgtangtgcactggtgaagtgctaccttgccagtattcctgagccgcttactacattttcgctttatgatgaacttcgagctgcgagggttagcattcctgatcttaggaacatattgaagaagctttcaaatgtgaactacat

SEQ ID NO: 458158 - DNA, 462 bp, Sorghum bicolor
  unsure (1)..(462): unsure at all n locations
cgtccgcattcgtccatctcttcggcgttacacctccttgcgacaacgcgaagcgcctcgccgaccggcgaccgccgttccccaccaaacggtcgaacaacaaccctcgccacccttgcaactgcgccatgccttcctcttccttctccacctgccactcctcgtcctgcgtccaaatcgttgatcccaaccccgcgagcgcgagcgccccggacaccaccgccgactccagcgaccgcgacgatgacggcggcggtggtgaaaacgggcgctcgtggtccgcgacggagcgcgtcccctcgtacctatggaaccagaactcggtccacgtcctctgcaagaagttcggcgtcaacaccaaggcgttcaccccgatcctcgccggcgaccgacgcgcgtgctcgcctncacccgcgggctccgtctgcgtgtacgcggacgcgctggaggccgggatgcgtg

SEQ ID NO: 458159 - DNA, 342 bp, Sorghum bicolor
cgtccgcccacgcgtccgaccacgcgttcgcagaggaggaaaaaaaaacaccaagggaaaaaaaatatcacctcctcttcctgcgttcgtgcccctgctcgatccccgacgaagaattcgcccccgaatccatcgatctgctctcccccagtccgccgatccgtggatcgatccgtgcgcgggctcggtccgccccggggttacgatctggtcctcgcctcgccggaggaggagatgaacggcgccggtggcagtcaccaccagcagcagcagcagaggctccggcagcagcagcagcagcaggcgcttctgatgcagcaagcgctgcagcagcagcagcag

SEQ ID NO: 458160 - DNA, 249 bp, Sorghum bicolor
cgtccgccgacgcgtacggatctgtttatggtgatacctgacaacatataactgttattcatgatgacacgaaatttgaacgcgagctgtgtgctatatgaactatgtctcgagacttaggcgatcagctcattactagtgagattattgcgatgcattgagtacatcgcaagagtcgtgcaacagaagcgacaggcataagagacatactcgattctgatgtatacggttcacaagagaataggatga

SEQ ID NO: 458161 - DNA, 154 bp, Sorghum bicolor
  unsure (1)..(154): unsure at all n locations
cgtccgcggacgcgtgggccgcctcctccgctccgcccctccagccctgcctcccgcgccgtctcgacccgcctccctacgtcgttcctggccgccgggcttattctccgtcgccggctacgcgcgcggngagggaagaggagccgcagcgcgt

SEQ ID NO: 458162 - DNA, 388 bp, Sorghum bicolor
cgtccgatacgatggccagggcaaattccacaagagcacaacaactactctgaagtttgttgttagccaggcaaattatactgttgacaaccttaggaacctatctgatagtttgtcagctgcaaagaggattgacatagcaaattcctttttactgcctcctaatgtccaaagtcagataaatgaaatccaaggaaagctgaacacgtcagctactgatcttgctattaaaacaacagataatgccgcgaggataaaaaagttgctaaacagagtgcgccttgctttaattgtcattgcagcagtgatgcttcttctggcatttattggcttcttgttatccatctttggtctggaattcaatggctctggcttgggtgtattggat

SEQ ID NO: 458163 - DNA, 304 bp, Sorghum bicolor
cgtccggcggcagcgacagcaaagcgagcacccatctcaagtactgtcttggttgagcaagcacaagcaccagcaccagcaccagcaccaggcaggaggaaggagaggatggaggtggcgggggctcaagcccgcgcggttccccttctgctccgccaccccgcgttcctgcggagctccgtatccgtcttctgcacgggctcccgccggagctgggcggcggcggcaacggcagagggggacgagacccgcggcttcgacaaggtgcccatggacacccccggcgcgtatccggctgtggacc

SEQ ID NO: 458164 - DNA, 88 bp, Sorghum bicolor
ctatgcagaagtgcccactatgctcgctggtgactcgcgacgtgatgttcagacgcgcctcgacatgagaccgcgactggcatggcac

SEQ ID NO: 458165 - DNA, 343 bp, Sorghum bicolor
  unsure (1)..(343): unsure at all n locations
atattgttcttctgaagataagagctctattgttggctnttccatcccaggcgacggacanagctattctggcactggtactgatggctctgtgccttgccatcgttcccacaagagtgcttctgctgctggtgtttgtggaggtatccacgaaccactcaccactacgaaaagcaaccacagaaaggtgtaccagaaggttgaaagagtggtggttcagcatacctgcagcttcagtggtggtggagaaggagaaagatgacatgaagacangatgagatctgtgtatatatatccaatgtaatctcgtgtctcctgcttggctgatgcattgtgtgatgta
